(19) United States
(12) Patent Application Publication
(10) Pub. No.: US 2003/0180953 A1
(43) Pub. Date: Sep. 25, 2003

(54) Gene disruption methodologies for drug target discovery

(75) Inventors: Terry Roemer, Montreal (CA); Bo Jiang, Montreal (CA); Charles Boone, Toronto (CA); Howard Bussey, Westmount (CA); Kari L. Ohlsen, San Diego, CA (US)

Correspondence Address: PENNIE AND EDMONDS, 1155 AVENUE OF THE AMERICAS, NEW YORK, NY, 100362711

(73) Assignee: Elitra Pharmaceuticals, Inc.

(21) Appl. No.: 10/032,585

(22) Filed: Dec. 20, 2001

Related U.S. Application Data
(63) Continuation-in-part of application No. 09/792,024, filed on Feb. 20, 2001.
(60) Provisional application No. 60/259,128, filed on Dec. 29, 2000.
(60) Provisional application No. 60/314,050, filed on Aug. 22, 2001.

(51) Int. Cl. C12N 1/18; C12N 1/16; C12N 15/74

(52) U.S. Cl. 435/483; 435/484; 435/254.2

(57) ABSTRACT

The present invention provides methods and compositions that enable the experimental determination as to whether any gene in the genome of a diploid pathogenic organism is essential, and whether it is required for virulence or pathogenicity. The methods involve the construction of genetic mutants in which one allele of a specific gene is inactivated while the other allele of the gene is placed under conditional expression. The identification of essential genes and those genes critical to the development of virulent infections, provides a basis for the development of screens for new drugs against such pathogenic organisms.

The present invention further provides Candida albicans genes that are demonstrated to be essential and are potential targets for drug screening. The nucleotide sequence of the target genes can be used for various drug discovery purposes, such as expression of the recombinant protein, hybridization assay and construction of nucleic acid arrays. The uses of proteins encoded by the essential genes, and genetically engineered cells comprising modified alleles of essential genes in various screening methods are also encompassed by the invention.

[0001] This application claims priority to the U.S. provisional application serial No. 60/259,128, filed Dec. 29, 2000, U.S. non-provisional application Ser. No. 09/792,024, filed Feb. 20, 2001; and U.S. provisional application serial No. 60/314,050, filed Aug. 22, 2001, which are all incorporated herein by reference in their entirety.

### 1. INTRODUCTION

[0002] The present invention is directed toward (1) methods for constructing strains useful for identification and validation of gene products as effective targets for therapeutic intervention, (2) methods for identifying and validating gene products as effective targets for therapeutic intervention, (3) a collection of identified essential genes, and (4) screening methods and assay procedures for the discovery of new drugs.

### 2. BACKGROUND OF THE INVENTION

[0003] Validation of a cellular target for drug screening purposes generally involves an experimental demonstration that inactivation of that gene product leaves the cell inviable. Accordingly, a drug active against the same essential gene product expressed, for example, by a pathogenic fungus, would be predicted to be an effective therapeutic agent. Similarly, a gene product required for fungal pathogenicity and virulence is also expected to provide a suitable target for drug screening programs. Target validation in this instance is based upon a demonstration that inactivation of the gene encoding the virulence factor creates a fungal strain that is shown to be either less pathogenic or, ideally, avirulent, in animal model studies. Identification and validation of drug targets are critical issues for detection and discovery of new drugs because these targets form the basis for high throughput screens within the pharmaceutical industry.

[0004] Target discovery has traditionally been a costly, time-consuming process, in which newly-identified genes and gene products have been individually analyzed as potentially-suitable drug targets. DNA sequence analysis of entire genomes has markedly accelerated the gene discovery process. Consequently, new methods and tools are required to analyze this information, first to identify all of the genes of the organism, and then, to discern which genes encode products that will be suitable targets for the discovery of effective, non-toxic drugs. Gene discovery through sequence analysis alone does not validate either known or novel genes as drug targets. Elucidation of the function of a gene from the underlying and a determination of whether or not that gene is essential still present substantial obstacles to the identification of appropriate drug targets. These obstacles are especially pronounced in diploid organisms.

[0005] C. albicans is a major fungal pathogen of humans. An absence of identified specific, sensitive, and unique drug targets in this organism has hampered the development of effective, non-toxic compounds for clinical use. The recent completion of the DNA sequence analysis of the entire C. albicans genome has rejuvenated efforts to identify new antifungal drug targets. Nevertheless, two primary obstacles to the exploitation of this information for the development of useful drug targets remain: the paucity of suitable markers for genetic manipulations in C. albicans and the inherent difficulty in establishing, in this diploid organism, whether a specific gene encodes an essential product. Co-pending provisional patent application, filed Feb. 18, 2000, discloses the identification of dominant selectable markers, and the construction of two genes encoding those markers, which are suitable for transformation and gene disruption in C. albicans.

[0006] Current methods for gene disruption in C. albicans (FIG. 1) typically involve a multistep process employing a “URA blaster” gene cassette which is recombined into the genome, displacing the target gene of interest. The URA blaster cassette comprises the CaURA3 marker which is selectable in the corresponding auxotrophic host and which is flanked by direct repeats of the Salmonella typhimurium HisG gene. The URA blaster cassette also carries flanking sequences corresponding to the gene to be replaced, which facilitate precise replacement of that gene by homologous recombination. Putative heterozygous transformants, which have had one allele of the target gene deleted, are selected as uracil prototrophs, and their identity and chromosomal structure confirmed by Southern blot and PCR analyses. Isolates within which intrachromosomal recombination events have occurred between HisG repeats, leading to excision of the CaURA3 gene and loss of the integrated cassette, are selected on 5-fluoroorotic acid (5-FOA) containing media. This allows a repetition of the entire process, including reuse of the Ura-blaster cassette, for disruption of the second allele of the target gene. In those instances in which the target gene is nonessential, homozygous gene disruptions are produced in the second round gene replacement and identified by Southern blot and PCR analyses.

[0007] However, homozygous deletion strains, which lack both alleles of a gene that is essential will not be viable. Accordingly, the Ura blaster method will not provide an unequivocal result, establishing the essential nature of the target gene since alternative explanations, including poor growth of a viable mutant strain, may be equally likely for the negative results obtained. More recent approaches for identification of essential genes, including those disclosed by Wilson, R. B., Davis, D., Mitchell, A. P. (1999) J. Bacteriol. 181:1868-74, employ multiple auxotrophic markers and a PCR-based gene disruption strategy. Although such methods effectively overcome the need to use the Ura Blaster cassette, determination of whether a given gene is essential, and therefore, a potentially useful target, remains labor-intensive and unsuitable for genome-wide analyses. Substantial effort is required to support a statistically valid conclusion that a given gene is essential when using either the Ura blaster cassette or multiple auxotrophic marker-based methods for gene disruption in Candida albicans. Typically, between 30 and 40 second round transformants must all be confirmed as reconstructed heterozygous strains (using PCR or Southern blot analysis) resulting from homologous recombination between the disruption fragment and previously constructed disruption allele, before statistical support to the claim that the gene is essential can be made. Moreover, since secondary mutations may be selected in either the transformation step or 5-FOA counterselection (if the Ura blaster cassette is reused), two independently constructed heterozygous strains are preferably examined during the attempted disruption of the second allele. In addition, demonstration that a particular phenotype is linked to the homozygous mutation of the target gene (and not a secondary mutation) requires complementation of the defect by transforming a wild type copy of the gene back into the disruption strain.

[0008] Finally, the Ura blaster method precludes direct demonstration of gene essentiality. Therefore, one is unable to critically evaluate the terminal phenotype characteristic of essential target genes. Consequently, establishing whether inactivation of a validated drug target gene results in cell death (i.e., a cidal terminal phenotype) versus growth inhibition (i.e., a static terminal phenotype) is not possible with current approaches, despite the value such information would provide in prioritizing drug targets for suitability in drug development.

[0009] Clearly, since current gene disruption methods are labor intensive and largely refractile to a high throughput strategy for target validation, there is a need for effective methods and tools for unambiguous, rapid, and accurate identification of essential genes in diploid, pathogenic fungi, and particularly, in Candida albicans. The present invention overcomes these limitations in current drug discovery approaches by enabling high throughput strategies that provide rapid identification, validation, and prioritization of drug targets, and consequently, accelerate drug screening.

### 3. SUMMARY OF THE INVENTION

[0010] The present invention provides effective and efficient methods that enable, for each gene in the genome of an organism, the experimental determination as to whether that gene is essential, and for a pathogenic organism, in addition, whether it is required for virulence or pathogenicity. The identification and validation of essential genes and those genes critical to the development of virulent infections, provides a basis for the development of high-throughput screens for new drugs against the pathogenic organism.

[0011] The present invention can be practiced with any organism independent of ploidy, and in particular, pathogenic fungi. Preferably, the pathogenic fungi are diploid pathogenic fungi, including but not limited to Candida albicans, Aspergillus fumigatus, Cryptococcus neoformans and the like.

[0012] In one embodiment, the present invention is directed toward a method for constructing a diploid fungal strain in which one allele of a gene is modified by insertion of or replacement by a cassette comprising an expressible dominant selectable marker. This cassette is introduced into the chromosome by recombination, thereby providing a heterozygous strain in which the first allele of the gene is inactivated.

[0013] The other allele of the gene is modified by the introduction, by recombination, of a promoter replacement fragment comprising a heterologous promoter, such that the expression of the second allele of the gene is regulated by the heterologous promoter. Expression from the heterologous promoter can be regulated by the presence of a transactivator protein comprising a DNA-binding domain and transcription-activation domain. The DNA-binding domain of this transactivator protein recognizes and binds to a sequence in the heterologous promoter and increases transcription of that promoter. The transactivator protein can be produced in the cell by expressing a nucleotide sequence encoding the protein.

[0014] This method for the construction of a diploid fungus having both alleles of a gene modified, is carried out, in parallel, with each and every gene of the organism, thereby allowing the assembly a collection of diploid fungal cells each of which comprises the modified alleles of a gene. This collection, therefore, comprises modified alleles of substantially all of the genes of the diploid organism. As used herein, the term “substantially all” includes at least 60%, 70%, 80%, 90%, 95% or 99% of the total. Preferably, every gene in the genome of the diploid organism is represented in the collection.

[0015] The present invention also encompasses diploid organisms, such as diploid pathogenic fungal strains, comprising modified alleles of a gene, where the first allele of a gene is inactivated by insertion of or replacement by a nucleotide sequence encoding an expressible dominant selectable marker; and where the second allele of the gene has also been modified so that expression of the second allele is regulated by a heterologous promoter. In one aspect of the present invention, the alleles modified in the mutant diploid fungal strain correspond to an essential gene, which is required for growth, viability and survival of the strain. In another aspect of the present invention, the modified alleles correspond to a gene required for the virulence and pathogenicity of the diploid pathogenic fungal strain against a host organism. In both cases, the essential gene and the virulence/pathogenicity gene are potential drug targets.

[0016] Accordingly, the present invention encompasses collections of mutant diploid fungal strains wherein each collection comprises a plurality of strains, each strain containing the modified alleles of a different gene. The collections of strains of the invention include modified alleles for substantially all the different essential genes in the genome of a fungus or substantially all the different virulence genes in the genome of a pathogenic fungus.

[0017] In another embodiment, the present invention is directed to nucleic acid microarrays which comprise a plurality of defined nucleotide sequences disposed at identifiable positions in an array on a substrate. The defined nucleotide sequences can comprise oligonucleotides complementary to, and capable of hybridizing with, the nucleotide sequences of the essential genes of the diploid pathogenic organism that are required for the growth and survival of the diploid pathogenic organism, the nucleotide sequences of genes contributing to the pathogenicity or virulence of the organism, and/or the unique molecular tags employed to mark each of the mutant strains.

[0018] The present invention is also directed to methods for the identification of genes essential to the survival of a diploid organism, and of genes that contribute to the virulence and/or pathogenicity of the diploid pathogenic organism. First, the invention provides mutants of diploid organisms, such as mutant fungal cells, having one allele of a gene inactivated by insertion of or replacement with a disruption cassette, and the other allele modified by a nucleic acid molecule comprising a heterologous regulated promoter, such that expression of that second allele is under the control of the heterologous promoter. Second, such mutant cells are cultured under conditions where the second allele of the modified gene is substantially not expressed. The viability or pathogenicity of the cells are then determined. The resulting loss of viability or exhibition of a severe growth defect indicates that the gene that is modified in the mutant cells is essential to the survival of a pathogenic fungus. Similarly, the resulting loss of virulence and/or pathogenicity of the mutant cells indicates that the gene that is modified contributes to the virulence and/or pathogenicity of the pathogenic fungus.

[0019] In yet another embodiment of the present invention, the mutant pathogenic fungal strains constructed according to the methods disclosed are used for the detection of antifungal agents effective against pathogenic fungi. Mutant cells of the invention are cultured under differential growth conditions in the presence or absence of a test compound. The growth rates are then compared to indicate whether or not the compound is active against a target gene product. The second allele of the target gene may be substantially underexpressed to provide cells with enhanced sensitivity to compounds active against the gene product expressed by the modified allele. Alternatively, the second allele may be substantially overexpressed to provide cells with increased resistance to compounds active against the gene product expressed by the modified allele of the target gene.

[0020] In yet another embodiment of the present invention, the strains constructed according to the methods disclosed are used for the screening of therapeutic agents effective for the treatment of non-fungal infectious diseases in a plant or an animal, such as a human. As a consequence of the similarity of a target's amino acid sequence with a plant or animal counterpart, or the lack of sequence similarity, active compounds so identified may have therapeutic applications for the treatment of diseases in the plant or animal, in particular, human diseases, such as cancers and immune disorders.

[0021] The present invention, in other embodiments, further encompasses the use of transcriptional profiling and proteomics techniques to analyze the expression of essential and/or virulence genes under a variety of conditions, including in the presence of known drugs. The information yielded from such studies can be used to uncover the target and mechanism of known drugs, to discover new drugs that act in a similar fashion to known drugs, and to delineate the interactions between gene products that are essential to growth and survival of the organism and that are instrumental to virulence and pathogenicity of the organism.

[0022] In a further embodiment of the present invention, a set of genes of a pathogenic organism are identified as potential targets for drug screening. Such genes comprise, genes that have been determined, using the methods and criteria disclosed herein, to be essential for survival of a pathogenic fungus and/or for the virulence and/or pathogenicity of the pathogenic fungus. The polynucleotides of the essential genes or virulence genes of a pathogenic organism (i.e., the target genes) provided by the present invention can be used by various drug discovery purposes. Without limitation, the polynucleotides can be used to express recombinant protein for characterization, screening or therapeutic use; as markers for host tissues in which the pathogenic organisms invade or reside (either permanently or at a particular stage of development or in a disease states); to compare with DNA sequences of other related or distant pathogenic organisms to identify potential orthologous essential or virulence genes; for selecting and making oligomers for attachment to a nucleic acid array for examination of expression patterns; to raise anti-protein antibodies using DNA immunization techniques; as an antigen to raise anti-DNA antibodies or elicit another immune response; and as a therapeutic agent (e.g., antisense). Where the polynucleotide encodes a protein which binds or potentially binds to another protein (such as, for example, in a receptor-ligand interaction), the polynucleotide can also be used in assays to identify polynucleotides encoding the other protein with which binding occurs or to identify inhibitors of the binding interaction.

[0023] The polypeptides or proteins encoded by the essential genes and virulence genes (i.e. the target gene products) provided by the present invention can also be used in assays to determine biological activity, including its uses as a member in a panel or an array of multiple proteins for high-throughput screening; to raise antibodies or to elicit immune response; as a reagent (including the labeled reagent) in assays designed to quantitatively determine levels of the protein (or its receptor) in biological fluids; as a marker for host tissues in which the pathogenic organisms invade or reside (either permanently or at a particular stage of development or in a disease states); and, of course, to isolate correlative receptors or ligands (also referred to as binding partners) especially in the case of virulence factors. Where the protein binds or potentially binds to another protein (such as, for example, in a receptor-ligand interaction), the protein can be used to identify the other protein with which binding occurs or to identify inhibitors of the binding interaction. Proteins involved in these binding interactions can also be used to screen for peptide or small molecule inhibitors or agonists of the binding interaction, such as those involved in invasiveness, and pathogenicity of the pathogenic organism.

[0024] Any or all of these drug discovery utilities are capable of being developed into a kit for commercialization as research products. The kits may comprise polynucleotides and/or polypeptides corresponding to a plurality of essential genes and virulence genes of the invention, antibodies, and/or other reagents.

### 4. BRIEF DESCRIPTION OF THE DRAWINGS

[0025] FIG. 1 depicts the URA blaster method for gene disruption in Candida albicans.

[0026] FIG. 2 depicts the GRACE method for constructing a gene disruption of one allele of a gene (CaKRE9), and promoter replacement of the second allele of the target gene, placing the second allele under conditional, regulated control by a heterologous promoter.

[0027] FIG. 3 presents conditional gene expression, using GRACE technology, with KRE1, KRE5, KRE6 and KRE9.

[0028] FIG. 4 presents conditional gene expression using GRACE technology with CaKRE1, CaTUB1, CaALG7, CaAUR1, CaFKS1 and CaSAT2.

[0029] FIG. 5 presents a Northern Blot Analysis of CaHIS3, CaALR1, CaCDC24 and CaKRE9 mRNA isolated from GRACE strains to illustrate elevated expression under non-repressing conditions.

[0030] FIG. 6 presents growth of a CaHIS3 heterozygote strain and a tetracycline promoter-regulated CaHIS3 GRACE strain compared to growth of a wild-type diploid CaHIS3 strain in the presence and absence of 3-aminotriazole (3-AT).

[0031] FIG. 6A depicts growth of a wild-type strain and a CaHIS3 heterozygote strain as compared with a CaHIS3 GRACE strain constitutively expressing the tetracycline promoter-regulated imidazoleglycerol phosphate dehydratase, in the presence of inhibitory levels of 3-aminotriazole.

[0032] FIG. 6B depicts growth of a wild-type strain, a haploinsufficient CaHIS3 heterozygote strain, and a CaHIS3 GRACE strain constitutively expressing the tetracycline promoter-regulated imidazoleglycerol phosphate dehydratase, in the presence of an intermediate level of 3-aminotriazole.

[0033] FIG. 6C depicts growth of a wild-type strain, a haploinsufficient CaHIS3 heterozygote strain, and a CaHIS3 GRACE strain minimally expressing the tetracycline promoter-regulated imidazoleglycerol phosphate dehydratase, in the presence of an intermediate level of 3-aminotriazole.

[0034] FIG. 6D demonstrates the hypersensitivity of the CaHIS3 GRACE strain minimally expressing the tetracycline promoter-regulated imidazoleglycerol phosphate dehydratase, in the presence of an intermediate level of 3-aminotriazole.

### 5. DETAILED DESCRIPTION OF THE INVENTION

[0035] 5.1 Gene Disruption and Drug Target Discovery

[0036] The present invention provides a systematic and efficient method for drug target identification and validation. The approach is based on genomics information as well as the biological function of individual genes.

[0037] The methods of the invention generates a collection of genetic mutants in which the dosage of specific genes can be modulated, such that their functions in growth, survival, and/or pathogenicity can be investigated. The information accrued from such investigations allows the identification of individual gene products as potential drug targets. The present invention further provides methods of use of the genetic mutants either individually or as a collection in drug screening and for investigating the mechanisms of drug action.

[0038] Generally, in gene disruption experiments, the observation that homozygous deletions cannot be generated for both alleles of a gene in a diploid organism, cannot, per se, support the conclusion that the gene is an essential gene. Rather, a direct demonstration of expression of the gene in question that is coupled with viability of the cell carrying that gene, is required for the unambiguous confirmation that the gene in question is essential.

[0039] A direct demonstration that a given gene is essential for survival of a cell can be established by disrupting its expression in diploid organisms which have a haploid stage. For example, in Saccharomyces cerevisiae, this is achieved by complete removal of the gene product through gene disruption methods in a diploid cell type, followed by sporulation and tetrad dissection of the meiotic progeny to enable direct comparison of haploid yeast strains possessing single mutational differences. However, such an approach is not applicable to asexual yeast strains, which include most diploid pathogenic cell types, and alternative methods are required for eliminating expression of a putative essential gene.

[0040] In one embodiment, the invention provides a method for creating a diploid mutant cell of an organism in which the dosage of a specific gene can be modulated. By this method of the invention, one allele of a target gene in a diploid cell of an organism is disrupted while the second allele is modified by having its promoter replaced by a regulated promoter of heterologous origin. A strain constructed in this manner is said to comprise a modified allelic pair, i.e., a gene wherein both alleles are modified as described above. Where the genomic DNA sequence of the organism is available, this process may be repeated with each and every gene of the organism, thereby constructing a collection of mutant organisms each harboring a disrupted allele and an allele which can be conditionally expressed. This gene disruption strategy, therefore, provides a substantially complete set of potential drug target genes for that organism. This collection of mutant organisms, comprising a substantially complete set of modified allelic pairs, forms the basis for the development of high throughput drug screening assays. A collection of such mutant organisms can be made even when the genomic sequences of an organism are not completely sequenced. It is contemplated that a smaller collection of mutant organisms can be made, wherein in each mutant organism, one allele of a desired subset of gene is disrupted, and the other allele of the genes in this subset is placed under conditional expression. The method of the invention employed for the construction of such strains is referred to herein as the GRACE method, where the acronym is derived from the phrase gene replacement and conditional expression.

[0041] The GRACE method, which involves disruption of one allele coupled with conditional expression of the other allele, overcomes limitations relying upon repeated cycles of disruption with the URA blaster cassette followed by counterselection for its loss. The GRACE method permits large scale target validation in a diploid pathogenic microorganism, such as a pathogenic fungus.

[0042] The GRACE method of the invention, as applied to a diploid cell involves two steps: (i) gene replacement resulting in disruption of the coding and/or non-coding region(s) of one wild type allele by insertion, truncation, and/or deletion, and (ii) conditional expression of the remaining wild type allele via promoter replacement or conditional protein instability (FIG. 2). Detailed descriptions of the method is provided in later sections.

[0043] Isolated mutant organisms resulting from the application of the GRACE method are referred to herein as GRACE strains of the organism. Such mutant strains of an organism are encompassed by the invention. In a particular embodiment, a collection of GRACE strains which are generated by subjecting substantially all the different genes in the genome of the organism to modification by the GRACE method is provided. In this collection, each strain comprises the modified alleles of a different gene, and substantially all the genes of the organism are represented in the collection. It is intended that a GRACE strain is generated for every gene in an organism of interest. Alternatively, a smaller collection of GRACE strains of an organism can be generated wherein a desired subset of the genes in the organism are modified by the GRACE method.

[0044] A gene is generally considered essential when viability and/or normal growth of the organism is substantially coupled to or dependent on the expression of the gene. An essential function for a cell depends in part on the genotype of the cell and in part the cell's environment. Multiple genes are required for some essential function, for example, energy metabolism, biosynthesis of cell structure, replication and repair of genetic material, etc. Thus, the expression of many genes in an organism are essential for its growth and/or survival. Accordingly, when the viability or normal growth of a GRACE strain under a defined set of conditions is coupled to or dependent on the conditional expression of the remaining functional allele of a modified allelic gene pair, the gene which has been modified in this strain by the GRACE method is referred to as an “essential gene” of the organism.

[0045] A gene is generally considered to contribute to the virulence/pathogenicity of an organism when pathogenicity of the organism is associated at least in part to the expression of the gene. Many genes in an organism are expected to contribute to the virulence and/or pathogenicity of the organism. Accordingly, when the virulence and/or pathogenicity of a GRACE strain to a defined host or to defined set of cells from a host is associated with the conditional expression of the remaining functional allele of a modified allelic gene pair, the gene which has been modified in this strain by the GRACE method is referred to as a “virulence gene” of the organism.

[0046] The present invention provides a convenient and efficient method to identify essential genes of a pathogenic organism, and to validate their usefulness in drug discovery programs. The method of the invention can similarly be used to identify virulence genes of a pathogenic organism. The identities of these essential genes and virulence genes of an organism as identified by the GRACE method are encompassed in the present invention. Substantially all of the essential genes and virulence genes of an organism can be identified and validated by the GRACE method of the invention.

[0047] Each of the essential genes and virulence genes so identified represent a potential drug target for the organism, and can be used individually or as a collection in various methods of drug screening. Depending on the objective of the drug screening program and the target disease, the essential genes and virulence genes of the invention can be classified and divided into subsets based on the structural features, functional properties, and expression profile of the gene products. The gene products encoded by the essential genes and virulence genes within each subset may share similar biological activity, similar intracellular localization, structural homology, and/or sequence homology. Subsets may also be created based on the homology or similarity in sequence to other organisms in a similar or distant taxonomic group, e.g. homology to Saccharomyces cerevisiae genes, or to human genes, or a complete lack of sequence similarity or homology to genes of other organisms, such as S. cerevisiae or human. Subsets may also be created based on the display of cidal terminal phenotype or static terminal phenotype by the organism bearing the modified gene. Such subsets, referred to as essential gene sets or virulence gene sets, which can be conveniently investigated as a group in a drug screening program, are provided by the present invention. Accordingly, the present invention provides a plurality of mutant organisms, such as a collection of GRACE strains, each comprising the modified alleles of a different gene, wherein each gene is essential for the growth and/or survival of the cells. The collection can be used according to the various methods of the invention, wherein the cells of each strain in the collection are separately subjected to the same manipulation or treatment related to the use. Alternatively, the cells of each strain in the collection are pooled before the manipulation or treatment related to the use. The concept of a collection is also extended to data collection, processing and interpretation where data arising from different strains of fungal cells or a pool of different fungal strains in the collection are handled coordinately as a set.

[0048] In a specific embodiment, substantially all of the essential genes in the genome of a pathogenic fungus are identified by the GRACE method, and the GRACE strains containing the modified allelic pairs of essential genes are included in a collection of GRACE strains. In another specific embodiment, substantially all of the virulence genes in the genome of a pathogenic fungus are identified by the GRACE method, and the GRACE strains containing the modified allelic pairs of virulence genes are included in a collection of GRACE strains.

[0049] For Candida albicans, based on analysis of the C. albicans genome sequence a collection of GRACE strains for the entire genome may comprise approximately 7000 strains each with a modified allelic pairs of genes. The complete set of essential genes of C. albicans is estimated to comprise approximately 1000 genes. The present invention provides the identities of many of these genes in C. albicans, and the various uses of these genes and their products as drug targets. In addition, estimates as to the number of genes participating in the virulence of this pathogen range between 100 and 400 genes. Once the identity of an essential gene is known, various types of mutants containing one or more copies of the mutated essential gene created by other methods beside the GRACE method are contemplated and encompassed by the invention.

[0050] The invention also provides biological and computational methods, and reagents that allow the isolation and identification of genes that are homologous to the identified essential and virulence genes of C. albicans. Information obtained from the GRACE strains of diploid organisms can be used to identify homologous sequences in haploid organisms. The identities and uses of such homologous genes are also encompassed by the present invention.

[0051] For clarity of discussion, the invention is described in the subsections below by way of example for the pathogenic fungus, Candida albicans. However, the principles may be analogously applied to the essential and virulence genes of other pathogens and parasites, of plants and animals including humans. The GRACE method can be applied to any pathogenic organisms that has a diploid phase in their life cycles. Hence, the term diploid pathogenic organism is not limited to organism that exist exclusively in diploid form, but encompasses also organisms that have both haploid and diploid phases in their life cycle.

[0052] For example, the GRACE method for drug target identification and validation can be directly applied to other pathogenic fungi. Deuteromycetous fungi, i.e. those lacking a sexual cycle and classical genetics, (in which C. albicans is included), represent the majority of human fungal pathogens. Aspergillus fumigatus is another medically-significant member of this phylum, which, more strictly, includes members of the Ascomycota and the Basidiomycota. A. fumigatus, an Ascomycte is the predominant air borne infectious fungal agent causing respiratory infection, or invasive aspergillosis (IA), in immunocompromised patients. While relatively unknown 20 years ago, today the number of IA cases is estimated to be several thousand per year. Moreover, IA exhibits a mortality rate exceeding 50% and neither amphothericin B nor fluconazole are highly efficacious. Compounding these problems is that identification of novel drug targets is limited by the current state of target validation in this organism.

[0053] The GRACE method demonstrated for C. albicans is readily adapted for use with A. fumigatus, for the following reasons. Although, A. fumigatus possesses a haploid genome, the GRACE method could be simplified to one step-conditional promoter replacement of the wild type promoter. Since A. fumigatus, in contrast to Candida albicans, adheres to the universal genetic code, extensive site-directed mutagenesis, like that required to engineer the GRACE method for C. albicans, would not be required. Moreover, essential molecular biology techniques such as transformation and gene disruption via homologous recombination have been developed for A. fumigatus. Selectable markers are available for these techniques in A. fumigatus, and include genes conferring antibiotic resistance to bygromycin B and phleomycin, and the auxotrophic marker, ura3. Furthermore, both public and private A. fumigatus genome sequencing projects exist. Therefore, sequence information is available both for the identification of putative essential genes as well as for the experimental validation of these drug targets using the GRACE method. Additional pathogenic deuteromycetous fungi to which the GRACE method may be applied include Aspergillus flavus, Aspergillus niger, and Coccidioides immitis.

[0054] In another aspect of the present invention, the GRACE method for drug target identification and validation is applied to Basidiomycetous pathogenic fungi. One particular, medically-significant member of this phylum is Cryptococcus neoformans. This air borne pathogen represents the fourth (7-8%) most commonly recognized cause of life-threatening infections in AIDS patients. Transformation and gene disruption strategies exist for C. neoformans and a publically funded genome sequencing project for this organism is in place. C. neoformans possesses a sexual cycle, thus enabling the GRACE method to be employed with both haploid and diploid strains. Other medically-significant Basidiomycetes include Trichosporon beigelii and Schizophylum commune.

[0055] In the same way medically relevant fungal pathogens are suitable for a rational drug target discovery using the present invention, so too may plant fungal pathogens and animal pathogens be examined to identify novel drug targets for agricultural and veterinary purposes. The quality and yield of many agricultural crops including fruits, nuts, vegetables, rice, soybeans, oats, barley and wheat are significantly reduced by plant fungal pathogens. Examples include the wheat fungal pathogens causing leaf blotch (Septoria tritici, glume blotch (Septoria nodorum), various wheat rusts (Puccinia recondita, Puccinia graminis); powdery mildew (various species), and stem/stock rot (Fusarium spp.). Other particularly destructive examples of plant pathogens include, Phytophthora infestans, the causative agent of the Irish potato famine, the Dutch elm disease causing ascomycetous fungus, Ophiostoma ulmi, the corn smut causing pathogen, Ustilago maydis, the rice-blast-causing pathogen Magnapurtla grisea, Peronospora parasitica (Century et al., Proc Natl Acad Sci U S A 1995 July 3;92(14):6597-601); Cladosporium fulvum (leaf mould pathogen of tomato); Fusarium graminearum, Fusarium culmorum, and Fusarium avenaceum, (wheat, Abramson et al., J Food Prot 2001 August;64(8):1220-5); Alternaria brassicicola (broccoli; Mora et al., Appl Microbiol Biotechnol 2001 April;55(3):306-10); Alternaria tagetica (Gamboa-Angulo et al., J Agric Food Chem 2001 March;49(3):1228-32); the cereal pathogen Bipolaris sorokiniana (Apoga et al., FEMS Microbiol Lett 2001 April 13; 197(2):145-50); the rice seedling blast fungus Pyricularia grisea (Lee et al., Mol Plant Microbe Interact 2001 April;14(4):527-35); the anther smut fungus Microbotryum violaceum (Bucheli et al.,: Mol Ecol 2001 February;10(2):285-94); Verticillium longisporum comb. Nov (wilt of oilseed rape, Karapapa et al., Curr Microbiol 2001 March;42(3):217-24); Aspergillus flavus infection of cotton bolls (Shieh et al., Appl Environ Microbiol 1997 September;63(9):3548-52; the eyespot pathogen Tapesia yallundae (Wood et al., FEMS Microbiol Lett 2001 March 15;196(2):183-7); Phytophthora cactorum strain P381 (strawberry leaf necrosis, Orsomando et al., J Biol Chem 2001 June 15;276(24):21578-84); Sclerotinia sclerotiorum, an ubiquitous necrotrophic fungus (sunflowers, Poussereau et al., Microbiology 2001 March;147(Pt 3):717-26); pepper plant/cranberry, anthracnose fungus Colletotrichum gloeosporioides (Kim et al., Mol Plant Microbe Interact 2001 January;14(1):80-5); Nectria haematococca (pea plants, Han et al., Plant J 2001 February;25(3):305-14); Cochliobolus heterostrophus (Monke et al., Mol Gen Genet 1993 October;241(1-2):73-80), Glomerella cingulata (Rodriquez et al., Gene 1987;54(1):73-81) obligate pathogen Bremia lactucae (lettuce downy mildew; Judelson et al., Mol Plant Microbe Interact 1990 July-August;3(4):225-32) Rhynchosporium secalis (Rohe et al., Curr Genet 1996 May;29(6):587-90), Gibberella pulicaris (Fusarium sambucinum), Leptosphaeria maculans (Farman et al., Mol Gen Genet 1992 January;231 (2):243-7), Cryphonectria parasitica and Mycosphaerella fijiensis and Mycosphaerella musicola, the causal agents of black and yellow Sigatoka, respectively, and Mycosphaerella eumusae, which causes Septoria leaf spot of banana (banana & plantain, Balint-Kurti et al., FEMS Microbiol Lett 2001 February 5;195(1):9-15). The emerging appearance of fungicidal-resistant plant pathogens and increasing reliance on monoculture practices, clearly indicate a growing need for novel and improved fungicidal compounds. The present invention encompasses identification and validation of drug targets in pathogens and parasites of plants and livestock. Accordingly, the application of the GRACE method to identify and validate drug targets in pathogens and parasites of plants and livestock are encompassed. Table I lists exemplary groups of haploid and diploid fungi of medical, agricultural, or commercial value.

TABLE I
Exemplary Haploid and Diploid Fungi

| | | |
|---|---|---|
| | | General Commercial |
| Animal pathogens: | Plant Pathogens: | Significance |

Ascomycota

| | | |
|---|---|---|
| Aspergillus fumigatus | Alternaria solanii | Aspergillus niger |
| Alternaria spp | Gaeumannomyces graminis | Schizosaccharomyces pombe |
| Blastomyces dermatidis | Cercospora zeae-maydis | Pichia pastoris |
| Candida spp including | Botrytis cinerea | Hansenula polymorpha |
| Candida dublinensis | Claviceps purpurea | Ashbya gossipii |
| Candida glabrata | Corticum rolfsii | Aspergillus nidulans |
| Candida krusei | Endothia parasitica | Trichoderma reesei |
| Candida lustaniae | Sclerotinia sclerotiorum | Aureobasidium pullulans |
| Candida parapsilopsis | Erysiphe gramini | Yarrowia lipolytica |
| Candida tropicalis | Erysiphe triticii | Candida utilis |
| Coccidioides immitis | Fusarium spp. | Kluveromyces lactis |
| Exophalia dermatiditis | Magnaporthe grisea | |
| Fusarium oxysporum | Plasmopara viticola | |
| Histoplasma capsulatum | Penicillium digitatum | |
| Pneumocystis carinii | Ophiostoma ulmi | |
| | Rhizoctonia species including oryzae | |
| | Septoria species including | |
| | Septoria avenae | |
| | Septoria nodorum | |
| | Septoria passerinii | |
| | Septoria triticii | |
| | Venturia inequalis | |
| | Verticillium dahliae | |
| | Verticillium albo-atrum | |

Basidiomycota

| | | |
|---|---|---|
| Cryptococcus neoformans | Puccinia spp including | Agaricus campestris |
| Trichosporon beigelii | Puccinia coronata | Phanerochaete chrysosporium |
| | Puccinia graminis | Gloeophyllum trabeum |
| | Puccinia recondita | Trametes versicolor |
| | Puccinia striiformis | |
| | Tilletia spp including | |
| | Tilletia caries | |
| | Tilletia controversa | |
| | Tilletia indica | |
| | Tilletia tritici | |
| | Tilletia foetida | |
| | Ustilago maydis | |
| | Ustilago hordeii | |

Zygomycota

Absidia corymbifera
Mucor rouxii
Rhizomucor pusillus
Rhizopus arrhizus

[0056] All Candida species except Candida glabrata are obligate diploid species that lack a haploid phase in its life cycle, and are thus subject to the application of the GRACE methods.

[0057] 5.2 Construction of GRACE Strains

[0058] According to the invention, in a GRACE strain of a diploid organism, only one allele of a gene is eliminated, while the second allele is placed under the control of the heterologous promoter, the activity of which is regulatable. Where the gene is essential, elimination of both alleles will be lethal or severely crippling for growth. Therefore, in the present invention, a heterologous promoter is used to provide a range of levels of expression of the second allele. Depending on the conditions, the second allele can be non-expressing, underexpressing, overexpressing, or expressing at a normal level relative to that when the allele is linked to its native promoter. A heterologous promoter is a promoter from a different gene from the same pathogenic organism, or it can be a promoter from a different species.

[0059] Precise replacement of a target gene is facilitated by using a gene disruption cassette comprising a selectable marker, preferably a dominant selectable marker, that is expressible in the strain of interest. The availability of two distinct dominant selectable markers allows the gene replacement process to be engineered at both alleles of the target gene, without the required counterselection step inherent in existing methods.

[0060] In particular, the present invention encompasses a method for constructing a strain of diploid pathogenic fungal cells, in which both alleles of a gene are modified, the method comprising the steps of (a) modifying a first allele of a gene in diploid pathogenic fungal cells by recombination using a gene disruption cassette comprising a nucleotide sequence encoding a selectable marker that is expressible in the cells, thereby providing heterozygous pathogenic fungal cells in which the first allele of the gene is inactivated; and (b) modifying the second allele of the gene in the heterozygous diploid pathogenic fungal cells by recombination with a promoter replacement fragment comprising a heterologous promoter, such that the expression of the second allele of the gene is regulated by the heterologous promoter.

[0061] The process can be repeated for a desired subset of the genes such that a collection of GRACE strains is generated wherein each strain comprises a modified allelic pair of a different gene. By repeating this process for every gene in a pathogenic fungus, a complete set of GRACE strains representing the entire genome of the pathogenic fungus can be obtained. Thus, the present invention provides a method of assembling a collection of diploid pathogenic fungal cells, each of which comprises the modified alleles of a different gene. The method comprises repeating the steps of modifying pairs of alleles a plurality of times, wherein a different pair of gene alleles is modified with each repetition, thereby providing the collection of diploid pathogenic fungal cells each comprising the modified alleles of a different gene.

[0062] A preferred embodiment for the construction of GRACE strains, uses the following two-step method. C. albicans is used as an example.

[0063] 5.2.1 Heterozygote Construction by Gene Disruption

[0064] Several art-known methods are available to create a heterozygote mutant. In less preferred embodiments, auxotrophic markers, such as but not limited to CaURA43, CaHIS3, CaLEU2, or CaTRP1, could be used for gene disruption if desired. However, the preferred method of heterozygote construction in diploid fungi employs a genetically modified dominant selectable marker. C. albicans is sensitive to the nucleoside-like antibiotic streptothricin at a concentration of 200 micrograms per milliliter. The presence of the Escherichia coli SAT1 gene within C. albicans allows acetylation of the drug rendering it nontoxic and permitting the strain to grow in the presence of streptothricin at a concentration of 200 micrograms per milliliter. Expression of the SAT1 gene in C. albicans is made possible by engineering the gene so that its DNA sequence is altered to conform to the genetic code of this organism and by providing a CaACT1 promoter (Morschhauser et al. (1998) Mol. Gen. Genet. 257:412-420) and a CaPCK1 terminator sequence (Leuker et al. (1997) Gene 192: 235-40). This genetically modified marker is referred to as CaSAT1 which is the subject of a copending U.S. nonprovisional application, filed Feb. 16, 2001.

[0065] C. albicans is also sensitive to a second fungicidal compound, blasticidin, whose cognate resistance gene from Bacillus cereus, BSR, has similarly been genetically engineered for expression in C. albicans (CaBSR1), and has been shown to confer a dominant drug resistance phenotype. PCR amplification of either dominant selectable marker so as to include about 65 bp of flanking sequence identical to the sequence 5′ and 3′ of the C. albicans gene to be disrupted, allows construction of a gene disruption cassette for any given C. albicans gene.

[0066] By employing the method of Baudin et al. (1993, Nucleic Acids Research 21:3329-30), a gene disruption event can be obtained following transformation of a C. albicans strain with the PCR-amplified gene disruption cassette and selection for drug resistant transformants that have precisely replaced the wild type gene with the dominant selectable marker. Such mutant strains can be selected for growth in the presence of a drug, such as but not limited to streptothricin. The resulting gene disruptions are generally heterozygous in the diploid C. albicans, with one copy of the allelic pair on one homologous chromosome disrupted, and the other allele on the other homologous chromosome remaining as a wild type allele as found in the initial parental strain. The disrupted allele is non-functional, and expression from this allele of the gene is nil. By repeating this process for all the genes in the genome of an organism, a set of gene disruptions can be obtained for every gene in the organism. The method can also be applied to a desired subset of genes.

[0067] 5.2.2 Conditional Expression by a Tetracycline-Regulatable Promoter

[0068] The conditional expression system used in this embodiment of the invention comprises a regulatable promoter and a means for regulating promoter activity. Conditional expression of the remaining wild type allele in a heterozygote constructed as set forth in Section 5.1.1 is achieved by replacing its promoter with a tetracycline-regulatable promoter system that is developed initially for S. cerevisiae but which is modified for use in C. albicans. See Gari et al., 1997, Yeast 13:837-848; and Nagahashi et al., 1997, Mol. Gen. Genet. 255:372-375.

[0069] Briefly, conditional expression is achieved by first constructing a transactivation fusion protein comprising the E. coli TetR tetracycline repressor domain or DNA binding domain (amino acids 1-207) fused to the transcription activation domain of S. cerevisiae GAL4 (amino acids 785-881) or HAP4 (amino acids 424-554). Multiple CTG codon corrections were introduced to comply with the C. albicans genetic code. The nucleotide sequences encoding the transactivation fusion proteins of E. coli TetR (amino acids 1-207) plus S. cerevisiae GAL4 (amino acids 785-881), and of E. coli TetR (amino acids 1-207) plus S. cerevisiae HAP4 (amino acids 424-554), both of which have been modified for proper expression in C. albicans are encompassed by the present invention. Accordingly, the invention provides haploid or diploid cells that can comprise a nucleotide sequence encoding a transactivation fusion protein expressible in the cells, wherein the transactivation fusion protein comprises a DNA binding domain and a transcription activation domain.

[0070] Constitutive expression of the transactivation fusion protein in C. albicans can be achieved by providing a CaACT1 promoter and CaACT1 terminator sequence. However, it will be appreciated that any regulatory regions, promoters and terminators, that are functional in C. albicans can be used to express the fusion protein. Thus, a nucleic acid molecule comprising a promoter functional in C. albicans, the coding region of a transactivation fusion protein, and a terminator functional in C. albicans, are encompassed by the present invention. Such a nucleic acid molecule can be a plasmid, a cosmid, a transposon, or a mobile genetic element. In a preferred embodiment, the TetR-Gal4 or TetR-Hap4 transactivators can be stably integrated into a C. albicans strain, by using either ura3 and his3 auxotrophic markers.

[0071] In this embodiment, the invention further provides that a promoter replacement fragment comprising a nucleotide sequence encoding heterologous promoter which comprises at least one copy of a nucleotide sequence which is recognized by the DNA binding domain of the transactivation fusion protein, and wherein binding of the transactivation fusion protein increases transcription of the heterologous promoter. The heterologous tetracycline promoter initially developed for S. cerevisiae gene expression, contains an ADH1 3′ terminator sequence, variable number of copies of the tetracycline operator sequence (2, 4, or 7 copies), and the CYC1 basal promoter. The tetracycline promoter has been subcloned adjacent to both CaHIS3 and CaSAT1 selectable markers in the orientation favoring tetracycline promoter-dependent regulation when placed immediately upstream the open reading frame of the gene of interest. PCR amplification of the CaHIS3-Tet promoter cassette incorporates 65 bp of flanking sequence homologous to the promoter sequence around nucleotide positions −200 and −1 (relative to the start codon) of the target gene, thereby producing a conditional promoter replacement fragment for transformation. When transformed into a C. albicans strain made heterozygous as described in Section 5.1.1 using the CaSAT1 disruption cassette, homologous recombination between the promoter replacement fragment and the promoter of the wild type allele generates a strain in which the remaining wild type gene is conditionally regulated gene by the tetracycline promoter. Transformants are selected as His prototrophs and verified by Southern blot and PCR analysis.

[0072] In this particular embodiment, the promoter is induced in the absence of tetracycline, and repressed by the presence of tetracycline. Analogs of tetracycline, including but not limited to chlortetracycline, demeclocycline, doxycycline, meclocycline, methocycline, minocycline hydrochloride, anhydrotetracycline, and oxytetracycline, can also be used to repress the expression of the modified gene allele in a GRACE strain.

[0073] The present invention also encompasses alternative variants of the tetracycline promoter system, based upon a mutated tetracycline repressor (tetR) molecule, designated tetR′, which is activated (i.e. binds to its cognate operator sequence) by binding of the antibiotic effector molecule to promote expression, and is repressed (i.e. does not bind to the operator sequence) in the absence of the antibiotic effectors, when the tetR′ is used instead of, or in addition to, the wild-type tetR. For example, the GRACE method could be performed using tetR′ instead of tetR in cases where repression is desired under conditions which lack the presence of tetracycline, such as shut off of a gene participating in drug transport (e.g. CaCDR1, CaPDR5, or CaMDR1). Also, the GRACE method could be adapted to incorporate both the tetR and tetR′ molecules in a dual activator/repressor system where tetR is fused to an activator domain and tetR′ is fused to a general repressor (e.g. CaSsr6 or CaTup1) to enhance or further repress expression in the presence of the antibiotic effector molecules (Belli et al., 1998, Nucl Acid Res 26:942-947 which is incorporated herein by reference). These methods of providing conditional expression are also contemplated.

[0074] In another embodiment of the invention, the method may also be applied to haploid pathogenic fungi by modifying the single allele of the gene via recombination of the allele with a promoter replacement fragment comprising a nucleotide sequence encoding a heterologous promoter, such that the expression of the gene is conditionally regulated by the heterologous promoter. By repeating this process for a preferred subset of genes in a haploid pathogenic organism, or its entire genome, a collection or a complete set of conditional mutant strains can be obtained. A preferred subset of genes comprises genes that share substantial nucleotide sequence homology with target genes of other organisms, e.g., C. albicans and S. cerevisiae. For example, this variation to the method of the invention may be applied to haploid fungal pathogens including, but not limited to, animal fugal pathogens such as Aspergillus fumigatus, Aspergillus niger, Aspergillus flavis, Candida glabrata, Cryptococcus neoformans, Coccidioides immitis, Exophalia dermatiditis, Fusarium oxysporum, Histoplasma capsulatum, Pneumocystis carinii, Trichosporon beigelii, Rhizopus arrhizus, Mucor rouxii, Rhizomucor pusillus, or Absidia corymbigera, or the plant fungal pathogens, such as Botrytis cinerea, Erysiphe graminis, Magnaporthe grisea, Puccinia recodita, Septoria triticii, Tilletia controversa, Ustilago maydis, or any species falling within the genera of any of the above species.

[0075] The means to achieve conditional expression are not restricted to the tetracycline promoter system and can be performed using other conditional promoters. Such conditional promoter may, for example, be regulated by a repressor which repress transcription from the promoter under particular condition or by a transactivator which increases transcription from the promoter, such as, when in the presence of an inducer. For example, the C. albicans CaPCK1 promoter is not transcribed in the presence of glucose but has a high level of expression in cells grown on other carbon sources, such as succinate, and therefore could also be adopted for conditional expression of the modified allele in a GRACE strain. To this end, it has been shown that both CaHIS1 and CaSAT1 are essential for growth on glucose-containing medium using the CaPCK1 promoter as an alternative to the tetracycline promoter in the above description. In this instance, the CaPCK1 promoter is heterologous to the gene expressed and not to the organism, and such heterologous promoters are also encompassed in the invention. Alternative promoters that could functionally replace the tetracycline promoter include but are not limited to other antibiotic-based regulatable promoter systems (e.g., pristinamycin-induced promoter or PIP) as well as Candida albicans conditionally-regulated promoters such as MET25, AML2, PHO5, GAL1,10, STE2, or STE3.

[0076] In a preferred embodiment of the GRACE method, performing the gene disruption first enables heterozygous strains to be constructed and separately collected as a heterozygote strain collection during the process of drug target validation. Such a C. albicans heterozygote strain collection enables drug screening approaches based on haploinsufficiency for validated targets within the collection. As used herein, the term “haploinsufficiency” refers to the phenomenon whereby heterozygous strains for a given gene express approximately half the normal diploid level of a particular gene product. Consequently, these strains provide constructions having a diminished level of the encoded gene product, and they may be used directly in screens for antifungal compounds. Here differential sensitivity of a diploid parent, as compared with its heterozygous derivative, will indicate that a drug is active against the encoded gene product.

[0077] It is clear to those skilled in the art that the order of allele modification followed in this embodiment of the invention is not critical, and that it is feasible to perform these steps in a different order such that the conditional-expressing allele is constructed first and the disruption of the remaining wild type gene allele be performed subsequently. However, where the promoter replacement step is carried out first, care should be taken to delete sequences homologous to those employed in the gene disruption step.

[0078] A specific application of the GRACE method, as used to construct modified alleles of the target gene CaKRE9 is provided in Section 6.

[0079] 5.2.3 Alternative Methods of Conditional Expression

[0080] In other embodiments of the invention, conditional expression could be achieved by means other than the reliance of conditional promoters. For example, conditional expression could be achieved by the replacement of the wild type allele in heterozygous strains with temperature sensitive alleles derived in vitro, and their phenotype would then be analyzed at the nonpermissive temperature. In a related approach, insertion of a ubiquitination signal into the remaining wild type allele to destabilize the gene product during activation conditions can be adopted to examine phenotypic effects resulting from gene inactivation. Collectively, these examples demonstrate the manner in which C. albicans genes can be disrupted and conditionally regulated using the GRACE method.

[0081] In an alternative embodiment of the present invention, a constitutive promoter regulated by an excisable transactivator can be used. The promoter is placed upstream to a target gene to repress expression to the basal level characteristic of the promoter. For example, in a fungal cell, a heterologous promoter containing lexA operator elements may be used in combination with a fusion protein composed of the lexA DNA binding domain and any transcriptional activator domain (e.g. GAL4, HAP4, VP16) to provide constitutive expression of a target gene. Counterselection mediated by 5-FOA can be used to select those cells which have excised the gene encoding the fusion protein. This procedure enables an examination of the phenotype associated with repression of the target gene to the basal level of expression provided by the lexA heterologous promoter in the absence of a functional transcription activator. The GRACE strains generated by this approach can be used for drug target validation as described in detail in the sections below. In this system, the low basal level expression associated with the heterologous promoter is critical. Thus, it is preferable that the basal level of expression of the promoter is low to make this alternative shut-off system more useful for target validation.

[0082] Alternatively, conditional expression of a target gene can be achieved without the use of a transactivator containing a DNA binding, transcriptional activator domain. A cassette could be assembled to contain a heterologous constitutive promoter downstream of, for example, the URA3 selectable marker, which is flanked with a direct repeat containing homologous sequences to the 5′ portion of the target gene. Additional homologous sequences upstream of the target, when added to this cassette would facilitate homologous recombination and replacement of the native promoter withe above-described heterologous promoter cassette immediately upstream of the start codon of the target gene or open reading frame. Conditional expression is achieved by selecting strains, by using 5-FOA containing media, which have excised the heterologous constitutive promoter and URA3 marker (and consequently lack those regulatory sequences upstream of the target gene required for expression of the gene) and examining the growth of the resulting strain versus a wild type strain grown under identical conditions.

[0083] 5.2.4 GRACE strains of Filamentous Plant Pathogenic Fungi

[0084] In specific embodiments, the methods of identifying drug targets of the invention can be applied to filamentous plant pathogenic fungi. A wide variety of filamentous fungi cause plant diseases; these fungi include species in the genera Ustilago, Fusarium, Colletotrichum, Botrytis, Septoria, Rhizoctonia, Puccinia, Tilletia and Gaemannomyces. In particular, pathogenic fungi of the Fusarium group cause many economically significant diseases on crop plants and some species also cause human infections. For example, plant pathogenic species such as F. graminearum, which causes head scab of wheat, can have devastating economic effects, e.g., $2.6 billion in crop losses over the last 10 years in the U.S.

[0085] A majority of techniques and reagents applicable to genetic engineering in fungi in general are useful in the present invention. The transformation procedure for most filamentous plant pathogenic fungi is based on the protocol developed for Aspergillus nidulans by Yelton et al. (1984. Proc. Natl. Acad. Sci. 81: 1470-1474). The protocol involved creating protoplasts by Novozyme 234 digestion of the cell wall material from mycelium or newly germinated conidial spores. Protoplasts are separated from the cell wall debris by filtration, centrifugation and (in some species) gradient purification. DNA is introduced in the presence of CaCl₂ and polyethylene glycol, and protoplasts are regenerated on medium containing an osmotic stabilizer (such as sorbitol). A. nidulans metabolic genes such as TrpC, ArgB and the amdS gene (growth on acetamide) have commonly been used as selectable markers. Metabolic markers for other fungi include the PyrG gene and the gene for nitrate reductase. Dominant selectable markers generally include genes for resistance to hygromycin, benomyl, bialophos, phleomycin and, more recently, pyrithiamine. By far, resistance to hygromycin is the most common selection for obtaining transformants and most vectors are based on the marker developed by Punt et al. (pAN7-1; Gene. 56: 117-124, 1987). Promoters to drive transcription of marker genes include the A. nidulans trpC and gpd promoters although many more of the characterized promoters can be used. Well-studied regulated promoters are available from genes involved in nitrogen metabolism (e.g. see publications by the laboratories of Michael Hynes, George Marzluf and Herb Arst). In addition, regulated promoters have been identified for plant pathogens such as the promoter for the pg1 gene encoding polygalacturonase which is induced upon growth with pectin as the carbon source (Di Pietro and Roncero. 1998. MPMI 11: 91-98.). Generally, targeted integration of transforming DNA occurs at a lower frequency than in S. cerevisiae, but nonetheless sufficient for gene replacement and the GRACE promoter replacement method.

[0086] In preferred embodiments, the invention encompasses modified strains and essential genes of basidiomycetes which comprises, for example, the Ustilago species. In particular, Ustilago maydis (corn smut) is a dimorphic basidiomycete fungus related to many fungal plant pathogens such as the economically important bunts and rusts. Other Ustilago species, such as U. hordei, are common pathogens of small grain cereals such as barley, oats and wheat. In the Ustilago species, the budding form is haploid, unicellular and nonpathogenic; this cell type serves as a genetically tractable model system in which molecular biological methods can readily be applied to identify essential genes (Banuett, F. Annual Reviews in Genetics (1995) 29;179-208). Fusion of two haploid cells of opposite mating type produces a dikaryotic filamentous form which is pathogenic and which requires the host plant for growth. The GRACE method can be adapted to target validation within U. maydis and U. hordei for identifying novel plant pathogen essential targets suitable for agricultural purposes. A comparative analysis with U. maydis and U. hordei may provide a significant advantage because the analyses could help identify essential genes.

[0087] U. maydis and U. hordei are preferred plant pathogenic fungi for constructing GRACE strains for use in the methods of drug targets identification of the invention. In Ustilago species, gene replacement by homologous recombination is efficient. Targeted disruptions using 1 kb flanking sequence yields as high as 70-90% correct integration Protoplast-based transformation protocols typically yield 50-100 colonies/μg. For example, dominant selectable markers including nourseothricin (NSR), hygromycin B (hygB), phleomycin, benomyl, carboxin, and geneticin, as well as autonomously replicating and integration plasmids are available (Kojic M, and Holloman W K Can J Microbiol 2000 46:333-8, and Gold, S., G. Bakkeren, J. Davies and J. W. Kronstad. 1994. Gene 142: 225-230). Accordingly, standard gene disruption experiments may be performed by those skilled in the art using gene disruption cassettes containing dominant selectable markers suitable for selection in U. maydis (e.g. nourseothricin, hygromycin B, phleomycin, or carboxin dominant selectable markers may be used). These may be amplified by three-way PCR methodology (Wach, A. 1996. Yeast Vol. 12:259-265) to add flanking homologous sequence of suitable length and permit precise gene replacement. Alternatively, auxotrophic markers may be used to select for stable integration of the disruption cassette within any corresponding U. maydis and U. hordei auxotrophic mutant. Alternative recombinant DNA methods to construct suitable U. maydis and U. hordei gene disruption cassettes are also readily available to those skilled in the art.

[0088] Transformation of the resulting disruption cassettes may be performed as described by Wang, et al. 1988. Proc. Natl. Acad. Sci., 85: 865-869. Briefly, transformation in U. maydis involves removing the cell wall with lysing enzyme (e.g. Novozyme or Sigma L1412), adding DNA, treating the cells with PEG and plating on medium with 1M sorbitol and antibiotic selection. Transformants appear in 3 to 5 days. Alternatively, diploid U. maydis strains are also publicly available and have been used for the analysis of essential genes (e.g., Holden et al., 1989. EMBO J. 8: 1927-1934.). Specifically, one allele is disrupted in the diploid strain, as outlined above, and the heterozygous strain is injected into corn seedlings. Diploid spores are harvested 14 days later, the spores are germinated to obtain meiotic progeny. Random spore analysis of the resulting progeny is then performed whereby haploid strains are screened for the absence of any identifiable disrupted allele within the population. A statistical analysis may then be performed to determine the essentiality of the examined gene based on the absence of identifying any viable haploid strains maintaining the deletion allele.

[0089] PCR-based promoter replacement experiments using the GRACE regulatable promoter system in U. maydis may be performed by those skilled in the art by first constructing a functional transactivator protein which regulates the GRACE tetracycline promoter. The transactivator protein must be constitutively expressed at high levels. Possible U. maydis regulatory sequence includes the UmTEF1 and UmHSP70 promoters and their respective 3′UTR sequence. The resulting transactivator may be subcloned into a suitable U. maydis plasmid (e.g., pCM54; Tsukuda, et al., 1988. Mol. Cell. Biol. 8:3703-3709.) containing a dominant selectable marker (e.g. HygB) and transformed into any U. maydis homothalic wild-type strain (e.g. 518 (a2 b2) and 521 (a1 b1) (Banuett, F. Trends in Genetics (1992) 8:174-180. Alternatively, a number U. maydis and U. hordei strains containing stable auxotrophic mutations are publicly available and may be used in conjunction with cognate auxotrophic marker cassettes to introduce and stably express the transactivator protein.

[0090] As U. maydis and U. hordei are haploid fungal organisms, the GRACE methodology may then be applied as a single step involving precise promoter replacement using a tetracycline promoter replacement cassette. Preferably, this may be performed using 3-way PCR products comprising a NSR dominant selectable marker fused to the Tet promoter and flanked with appropriate homologous sequence and transforming the promoter replacement cassette into a U. maydis strain constitutively expressing the Tet transactivator protein. Alternative dominant selectable markers may also be employed. Precise replacement by homologous recombination between the wild type promoter and the dominant marker-fused Tet conditional promoter facilitates conditional mutant U. maydis strain construction in a single step. Correct integration of the promoter replacement cassette may be experimentally determined by PCR-mediated genotyping and/or Southern blot analysis.

[0091] Alternatively endogenous regulatable promoters may be applied to constructing conditional mutant strains of U. maydis. Preferable regulatable promoters which may be used include, but are not restricted to, the crg1 gene promoter which is regulated by carbon source (Bottin, A., Kamper, J. and Kahmann, R. Mol. Gen. Genet. 253: 342-352 (1996) and the nar1 gene promoter (nitrate reductase) has also been developed for regulating gene expression (Brachmann, A. et al. 2001. Mol. Microbiol. 42: 1047-1063).

[0092] U. hordei has a very similar life cycle when compared with U. maydis except that the fungus grows more slowly in culture and crosses require the complete growth cycle of the barley plant (2 months) to complete. U. hordei is closely related to a large group of Ustilago species that cause economically more important diseases on small grain cereals. These other species include U. tritici, U. nuda, U. avenae and U. kolleri. U. hordei which are amenable to the methods of the invention also shows remarkably similarities to the bunt pathogens that cause important cereal diseases. Haploid and stable diploid strains of U. hordei are available and formation of stable U. hordei diploids (Int. J. Plant Sci. 155: 15-22) offers the ability to evaluate gene essentiality by random spore analysis as described above for U. maydis.

[0093] Gene disruption in U. hordei is accomplished in an identical fashion to that of U. maydis and the common selectable markers (e.g., hygromycin resistance) function in both species (Bakkeren, G. and J. Kronstad. 1996. Genetics 143: 1601-1613.). Gene replacement has been demonstrated for several genes at the mating type locus (Lee, N., G. Bakkeren, K. Wong, J. E. Sherwood and J. W. Kronstad. 1999. Proc. Natl. Acad. Sci., USA. 96: 15026-15031.). One minor technical difference in the transformation of U. hordei, compared with U. maydis, is that electroporation enhances the uptake of DNA in U. hordei. Preferred target genes for use in construction of GRACE strains include pan1 which participates in pantothenic acid biosynthesis (Bakkeren, G., and J. W. Kronstad. 1993. The Plant Cell 5: 123-136) and fil1 encoding a Gα subunit (Lichter A, Mills D. 1997. Mol Gen Genet. 256: 426-435).

[0094] In various embodiments, the hph gene isolated from E. coli, encoding hygromycin resistance, can be used generally as a selectable marker and GUS can be used as a reporter gene. Non-limiting examples of useful recombinant regulatable gene expression systems include the following: F. oxysporum panC promoter induced by steroidal glycoalkaloid alpha-tomatine (Perez-Espinosa et al., : Mol Genet Genomics 2001 July;265(5):922-9); Ustilago maydis hsp70-like gene promoter in a high-copy number autonomously replicating expression vector (Keon et al., Antisense Nucleic Acid Drug Dev 1999 February;9(1):101-4); Cochliobolus heterostrophus transient and stable gene expression systems using P1 or GPD1 (glyceraldehyde 3 phosphate dehydrogenase) promoter of C. heterostrophus or GUS or hygromycin B phosphotransferase gene (hph) of E. coli (Monke et al., Mol Gen Genet 1993 October;241(1-2):73-80); Rhynchosporium secalis (barley leaf scald fungus) transformed to hygromycin-B and phleomycin resistance using the hph gene from E. coli and the ble gene from Streptoalloteichus hindustanus under the control of Aspergillus nidulans promoter and terminator sequences, plasmid DNA introduced into fungal protoplasts by PEG/CaCl₂ treatment (Rohe et al., Curr Genet 1996 May;29(6):587-90). Pathogens of banana and plantain (Musa spp.) Mycosphaerella fijiensis and Mycosphaerella musicola, and Mycosphaerella eumusae can be transformed as taught in Balint-Kurti et al., FEMS Microbiol Lett 2001 February 5;195(1):9-15. Gibberella pulicaris (Fusarium sambucinum) a trichothecene-producing plant pathogen can be transformed with three different vectors: cosHyg1, pUCH1, and pDH25, all of which carry hph (encoding hygromycin B phosphotransferase) as the selectable marker (Salch et al., Curr Genet 1993;23(4):343-50). Leptosphaeria maculans, a fungal pathogen of Brassica spp. can be transformed with the vector pAN8-1, encoding phleomycin resistance; protoplasts can be retransformed using the partially homologous vector, pAN7-1 which encodes hygromycin B resistance. Farman et al., Mol Gen Genet 1992 January;231(2):243-7. Cryphonectria parasitica; targeted disruption of enpg-1 of this chestnut blight fungus was accomplished by homologous recombination with a cloned copy of the hph gene of Escherichia coli inserted into exon 1, see Gao et al., Appl Environ Microbiol 1996 June;62(6):1984-90.

[0095] Another example, Glomerella cingulata f sp. phaseoli (Gcp) was transformed using either of two selectable markers: the amdS+ gene of Aspergillus nidulans, which encodes acetamidase and permits growth on acetamide as the sole nitrogen source and the hygBR gene of Escherichia coli which permits growth in the presence of the antibiotic Hy. The amdS+ gene functioned in Gcp under control of A. nidulans regulatory signals and hygBR was expressed after fusion to a promoter from Cochliobolus heterostrophus, another filamentous ascomycete. Protoplasts to be transformed were generated with the digestive enzyme complex Novozym 234 and then were exposed to plasmid DNA in the presence of 10 mM CaCl₂ and polyethylene glycol. Transformation occurred by integration of single or multiple copies of either the amdS+ or hygBR plasmid into the fungal genome. (Rodriquez et al., Gene 1987;54(1):73-81); integration vectors for homologous recombination; deletion studies demonstrated that 505 bp (the minimum length of homologous promoter DNA analysed which was still capable of promoter function) was sufficient to target integration events. Homologous integration of the vector resulted in duplication of the gdpA promoter region. (Rikkerink et al., Curr Genet 1994 March;25(3):202-8).

[0096] 5.3 Identification of Essential Genes and Virulence Genes

[0097] 5.3.1 Essential Genes

[0098] The present invention provides methods for determining whether the gene that has been modified in a GRACE strain is an essential gene or a virulence gene in a pathogenic organism of interest. To determine whether a gene is an essential gene in an organism, a GRACE strain containing the modified alleles of the gene is cultured under conditions wherein the second modified allele of the gene which is under conditional expression, is substantially underexpressed or not expressed. The viability and/or growth of the GRACE strain is compared with that of a wild type strain cultured under the same conditions. A loss or reduction of viability or growth indicates that the gene is essential to the survival of a pathogenic fungus. Accordingly, the present invention provides a method for identifying essential genes in a diploid pathogenic organism comprising the steps of culturing a plurality of GRACE strains under culture conditions wherein the second allele of each of the gene modified in the respective GRACE strain is substantially underexpressed or not expressed; determining viability and/or growth indicator(s) of the cells; and comparing that with the viability and/or growth indicator(s) of wild type cells. The level of expression of the second allele can be less than 50% of the non-modified allele, less than 30%, less than 20%, and preferably less than 10%. Depending on the heterologous promoter used, the level of expression can be controlled by, for example, antibiotics, metal ions, specific chemicals, nutrients, pH, temperature, etc.

[0099] Candida albicans is used herein as an example which has been analyzed by the GRACE methodology.

[0100] For example, C. albicans conditional gene expression using the GRACE method was performed using CaKRE1, CaKRE5, CaKRE6, and CaKRE9 (FIG. 3). CaKRE5, CaKRE6, and CaKRE9 are predicted to be essential or conditionally essential (CaKRE9 null strains are nonviable on glucose but viable on galactose), in C. albicans as demonstrated by gene disruption using the Ura blaster method. CaKRE1 has been demonstrated as a nonessential gene using the Ura blaster method in C. albicans. Strains heterozygous for the above genes were constructed by PCR-based gene disruption method using the CaSAT1 disruption cassette followed by tetracycline regulated promoter replacement of the native promoter of the wild type allele. Robust growth of each of these strains suggests expression proceeds normally in the absence of tetracycline. When tetracycline is added to the growth medium, expression of these tetracycline promoter-regulated genes is greatly reduced or abolished. In the presence of tetracycline, the GRACE strain cells containing each one of the three essential C. albicans genes cited above stop growing. As expected, only the CaKRE1 GRACE strain demonstrates robust growth despite repression of CaKRE1 expression.

[0101] To further examine the utility of the GRACE method in target validation, growth of four additional GRACE strains controlling expression of the known essential genes CaTUB1, CaALG7, CaAUR1, and CaFKS1, as well as the predicted essential gene CaSAT2, and CaKRE1 were compared under inducing versus repressing conditions (FIG. 4). As expected, GRACE strains of CaTUB1, CaALG7, CaAUR1 and CaFKS1 failed to grow under repressing conditions, unlike the non-essential CaKRE1 GRACE strain. Furthermore, as predicted, the CaSAT2 GRACE strain demonstrates essentiality of this gene in C. albicans. The CaSAT2 gene, which has been engineered as a dominant selectable marker for use in C. albicans, is a C. albicans gene that is homologous to a S. cerevisiae gene but is unrelated to the Sat1 gene of E. coli.

[0102] In all cases based on other disruption data that have been generated, this is the expected response if the tetracycline regulated gene is repressed to a level where it is nonfunctional in the presence of tetracycline. Furthermore, in applying the GRACE methodology of conditional gene disruption to two additional C. albicans genes (CaYPD1, and CaYNL194c) whose S. cerevisiae counterpart is known not to be essential, no inhibition of growth was observed when these strains were incubated in the presence of tetracycline. These results establish that the method of conditional gene expression using a GRACE strain is a reliable indicator of gene essentiality.

[0103] Furthermore, the utility of the present method, as a rapid and accurate means to identifying the complete set of essential genes in C. albicans, has been demonstrated by an analysis of the null phenotype of a large number of genes using the GRACE two-step method of gene disruption and conditional expression. Target genes were selected as being fungal specific and essential. Such genes are referred to as target essential genes in the screening assays described below.

[0104] A literature search identified reports of URA blaster-based gene disruption experiments on a total of 89 genes, of which 13 genes were presumed to be essential, based on the inability to construct homozygous deletion strains. The 13 genes are CaCCT8 Rademacher et al., Microbiology, UK 144, 2951-2960 (1998)); CaFKS1 (Mio et al., J. Bacteriol, 179, 4096-105 (1997); and Douglas, et al., Antimicrob Agents Chemother 41, 2471-9 (1997)); CaHSP90 (Swoboda et al., Infect Immun 63, 4506-14 (1995)); CaKRE6 (Mio et al., J. Bacteriol 179, 2363-72 (1997)); CaNMT1 (Weinberg et al., Mol Microbiol 16, 241-50 (1995)); CaPRS1 (Payne et al., J. Med. Vet. Mycol. 35, 305-12 (1997)); CaPSA1 (Care et al., Mol Microbiol 34, 792-798 (1999)); CaRAD6 (Care et al., Mol Microbiol 34, 792-798 (1999)); CaSEC4 (Mao et al., J. Bacteriol 181, 7235-7242 (1999)); CaSEC14 (Monteoliva et al., Yeast 12, 1097-105 (1996)); CaSNF1 (Petter et al., Infect Immun. 65, 4909-17 (1997)); CaTOP2 (Keller, et al., Biochem J., 329-39 (1997)); and CaEFT2 (Mendoza et al., Gene 229, 183-1991 (1999)). These 13 putatively essential genes and CaTUB1, CaALG1, and CaAUR1 of C. albicans are not initially identified by the GRACE method. However, GRACE strains containing modified alleles of any one of these 17 genes and their uses are encompassed by the invention, for example, the CaTUB1, CaALG1, and CaAUR1 GRACE strains in FIG. 4 and the CaKRE6 GRACE strain in FIG. 3. Any of these 17 genes may be included as a control for comparisons in the methods of the invention, or as a positive control for essentiality in the collections of essential genes of the invention. The nucleic acid molecules comprising a nucleotide sequence corresponding to any of these 17 genes may be used in the methods of drug discovery of the invention as drug targets, or they may be included individually or in subgroups as controls in a kit or in a nucleic acid microarray of the invention.

[0105] In contrast to the use of conventional method, application of the GRACE method has already identified significantly more C. albicans essential genes than previously determined by the collective efforts of the entire C. albicans research community. The data presented herewith establishes the speed inherent to the approach of the invention and, therefore, the feasibility of extending the GRACE method to the examination of all the genes of the C. albicans genome, the identification of the complete set of essential genes of this diploid fungal pathogen, and its application to other species.

[0106] An alternative method is available for assessing the essentiality of the modified gene in a GRACE strain. According to the invention, repression of expression of the modified gene allele within a GRACE strain may be achieved by homologous recombination-mediated excision of the gene encoding the transactivator protein. In a preferred embodiment, where conditional expression of a target gene is achieved using the tetracycline-regulated promoter, constitutive expression (under nonrepressing conditions) may be repressed by homologous recombination-mediated excision of the transactivator gene (TetR-GAL4AD). In this way, an absolute achievable repression level is produced independently of that produced by tetracycline-mediated inactivation of the transactivator protein. Excision of the transactivator gene is made possible by virtue of the selectable marker and integration strategy used in GRACE strain construction. Stable integration of the CaURA3-marked plasmid containing the TetR-GAL4AD transactivator gene into the CaLEU2 locus results in a tandem duplication of CaLEU2 flanking the integrated plasmid. Counterselection on 5-FOA-containing medium can then be performed to select for excision of the CaURA3-marked transactivator gene and to directly examine whether this alternative repression strategy reveals the target gene to be essential.

[0107] Three examples of genes defined as essential on 5-FOA containing medium but lacking any detectable growth impairment on tetracycline supplemented medium are the genes, CaYCL052c, CaYNL194c and CaYJR046c. Presumably, this is due to the target gene exhibiting a lower basal level of expression under conditions where the transactivator gene has been completely eliminated than its gene product incompletely inactivated by addition of tetracycline. Thus, the GRACE method offers two independent approaches for the determination of whether or not a given gene is essential for viability of the host strain.

[0108] 5.3.2 Virulence/Pathogenicity Genes

[0109] The present invention also provides methods of using the GRACE strains of a diploid pathogenic organism to identify virulence/pathogenicity genes. In addition to uncovering essential genes of a pathogenic organism, the GRACE methodology enables the identification of other genes and gene products potentially relevant to the screening of drugs useful for the treatment of diseases caused by the pathogenic organism. Nonessential genes and their gene products of a pathogen which nevertheless display indispensable roles in the pathogenesis process, may therefore serve as potential drug targets for prophylactic drug development and could be used in combination with existing cidal therapeutics to improve treatment strategies. Thus, genes and their products implicated in virulence and/or pathogenicity represent another important class of potential drug targets. Moreover, some of the genes implicated in virulence and pathogenicity may be species-specific, and unique to a particular strain of pathogen. It has been estimated that approximately 6-7% of the genes identified through the C. albicans sequencing project are absent in S. cerevisiae. This represents as many as 420 Candida albicans-specific genes which potentially participate in the process of pathogenesis or virulence. Such a large scale functional evaluation of this gene set can only be achieved using the GRACE methodology of the invention.

[0110] Although essential genes provide preferred targets, value would also be placed on those nonessential C. albicans specific genes identified. The potential role of nonessential C. albicans-specific genes in pathogenesis may be evaluated and prioritized according to virulence assays (e.g. buccal epithelial cell adhesion assays and macrophage assays) and various C. albicans infection studies (e.g. oral, vaginal, systemic) using mouse or other animal models. In the same manner described above for essential genes, it is equally feasible to demonstrate whether nonessential genes comprising the GRACE strain collection are required for pathogenicity in a cellular assay or in a mouse model system. Accordingly, GRACE strains that fail to cause fungal infection in mice under conditions of gene inactivation by tetracycline (or alternative gene inactivation means) define the GRACE virulence/pathogenicity subset of genes. More defined subsets of virulence/pathogenicity genes, for example those genes required for particular steps in pathogenesis (e.g. adherence or invasion) can be determined by applying the GRACE pathogenicity subset of strains to in vitro assays which measure the corresponding process. For example, examining GRACE pathogenicity strains in a buccal adhesion or macrophage assay by conditional expression of individual genes would identify those pathogenicity factors required for adherence or cell invasion respectively. Moreover, essential genes that display substantially reduced virulence and growth rate when only partially inactivated represent “multifactorial” drug targets for which even minimally inhibitory high specificity compounds would display therapeutic value.

[0111] Accordingly, to determine whether a gene contributes toward the virulence/pathogenicity of a pathogenic organism in a host, a GRACE strain of the pathogen containing the modified alleles of the gene is allowed to infect host cells or animals under conditions wherein the second modified allele of the gene which is under conditional expression, is substantially underexpressed or not expressed. After the host cells and/or animals have been contacted with the GRACE strain for an appropriate period of time, the condition of the cells and/or animals is compared with cells and/or animals infected by a wild type strain under the same conditions. Various aspects of the infected cell's morphology, physiology, and/or biochemistry can be measured by methods known in the art. When an animal model is used, the progression of the disease, severity of the symptoms, and/or survival of the host can be determined. Any loss or reduction of virulence or pathogenicity displayed by the GRACE strain indicates that the gene modified in the strain contributes to or is critical to the virulence and/or pathogenicity of the virus. Such genes are referred to as target virulence genes in the screening assays described below.

[0112] In another aspect of the present invention, GRACE methodology can be used for the identification and delineation of genetic pathways known to be essential to the development of pathogenicity. For example, extensive work in S. cerevisiae has uncovered a number of processes including cell adhesion, signal transduction, cytoskeletal assembly, that play roles in the dimorphic transition between yeast and hyphal morphologies. Deletion of orthologous genes participating in functionally homologous cellular pathways in pathogenic fungi such as C. albicans, A. fumigatus, and C. neoformans, has clearly demonstrated a concomitant loss of virulence. Therefore, the use of GRACE strains of orthologous genes found in C. albicans and other pathogenic fungi could rapidly validate potential antifungal drug target genes whose inactivation impairs hyphal development and pathogenicity.

[0113] 5.3.3 Validation of Genes Encoding Drug Targets

[0114] Target gene validation refers to the process by which a gene product is identified as suitable for use in screening methods or assays in order to find modulators of the function or structure of that gene product. Criteria used for validation of a gene product as a target for drug screening, however, may be varied depending on the desired mode of action that the compounds sought will have, as well as the host to be protected.

[0115] In one aspect of the present invention, a set of GRACE strains identified and grouped as having only modified alleles of essential genes can be used directly for drug screening.

[0116] In another aspect, the initial set of essential genes is further characterized using, for example, nucleotide sequence comparisons, to identify a subset of essential genes which include only those genes specific to fungi—that is, a subset of genes encoding essential genes products which do not have homologs in a host of the pathogen, such as humans. Modulators, and preferably inhibitors, of such a subset of genes in a fungal pathogen of humans would be predicted to be much less likely to have toxic side effects when used to treat humans.

[0117] Similarly, other subsets of the larger essential gene set could be defined to include only those GRACE strains carrying modified allele pairs that do not have a homologous sequence in one or more host (e.g., mammalian) species to allow the detection of compounds expected to be used in veterinary applications. In addition, using other homology criteria, a subset of GRACE strains could be identified that would be used for the detection of anti-fungal compounds active against agricultural pathogens, inhibiting targets that do not have homologs in the crop to be protected.

[0118] Current C. albicans gene disruption strategies identify nonessential genes and permit the inference that other genes are essential, based on a failure to generate a homozygous null mutant. The null phenotype of a drug target predicts the absolute efficaciousness of the “perfect” drug acting on this target. For example, the difference between a cidal (cell death) versus static (inhibitory growth) null terminal phenotype for a particular drug target. Gene disruption of CaERG11, the drug target of fluconazole, is presumed to be essential based on the failure to construct a homozygous CaERG11 deletion strain using the URA blaster method. However, direct evaluation of its null phenotype being cidal or static could not be performed in the pathogen, and only after the discovery of fluconazole was it possible to biochemically determine both the drug, and presumably the drug target to be static rather than as cidal. Despite the success fluconazole enjoys in the marketplace, its fungistatic mode of action contributes to its primary limitation, i.e., drug resistance after prolonged treatment. Therefore, for the first time, the ability to identify and evaluate cidal null phenotypes for validated drug targets within the pathogen as provided by the invention, now enables directed strategies to identifying antifungal drugs that specifically display a fungicidal mode of action.

[0119] Using a single GRACE strain or a desired collection of GRACE strains comprising essential genes, one or more target genes can be directly evaluated as displaying either a cidal or static null phenotype. This is determined by first incubating GRACE strains under repressing conditions for the conditional expression of the second allele for varying lengths of time in liquid culture, and measuring the percentage of viable cells following plating a defined number of cells onto growth conditions which relieve repression. The percentage of viable cells that remain after return to non-repressing conditions reflects either a cidal (low percent survival) or static (high percent survival) phenotype. Alternatively, vital dyes such as methylene blue or propidium iodide could be used to quantify percent viability of cells for a particular strain under repressing versus inducing conditions. As known fungicidal drug targets are included in the GRACE strain collection (e.g. CaAUR1), direct comparisons can be made between this standard fungicidal drug target and novel targets comprising the drug target set. In this way each member of the target set can be immediately ranked and prioritized against an industry standard cidal drug target to select appropriate drug targets and screening assays for the identification of the most rapid-acting cidal compounds.

[0120] 5.4 Essential Genes and Virulence Genes

[0121] 5.4.1 Nucleic Acids Encoding Targets, Vectors, and Host Cells

[0122] By practice of the methods of the invention, the essentiality and the contribution to virulence of substantially all the genes in the genome of an organism can be determined. The identities of essential genes and virulence genes of a diploid pathogenic organism, such as Candida albicans, once revealed by the methods of the invention, allow the inventors to study their functions and evaluate their usefulness as drug targets. Information regarding the structure and function of the gene product of the individual essential gene or virulence gene allows one to design reagents and assays to find compounds that interfere with its expression or function in the pathogenic organism. Accordingly, the present invention provides information on whether a gene or its product(s) is essential to growth, survival, or proliferation of the pathogenic organism, or that a gene or its product(s) contributes to virulence or pathogenicity of the organism with respect to a host. Based on this information, the invention further provides, in various embodiments, novel uses of the nucleotide and/or amino acid sequences of genes that are essential and/or that contributes to virulence or pathogenicity of a pathogenic organism, for purpose of discovering drugs that act against the pathogenic organism. Moreover, the present invention provides specifically the use of this information to identify orthologs of these essential genes in a non-pathogenic yeast, such as Saccharomyces cerevisiae, and the use of these orthologs in drug screening methods. Although the nucleotide sequence of the orthologs of these essential genes in S. cerevisiae may be known, it was not appreciated that these S. cerevisiae genes can be useful for discovering drugs against pathogenic fungi.

[0123] As used herein, the terms “gene” and “recombinant gene” refer to nucleic acid molecules comprising a nucleotide sequence encoding a polypeptide or a biologically active ribonucleic acid (RNA). The term can further include nucleic acid molecules comprising upstream, downstream, and/or intron nucleotide sequences. The term “open reading frame (ORF),” means a series of nucleotide triplets coding for amino acids without any termination codons and the triplet sequence is translatable into protein using the codon usage information appropriate for a particular organism.

[0124] As used herein, the term “target gene” refers to either an essential gene or a virulence gene useful in the invention, especially in the context of drug screening. The terms “target essential gene” and “target virulence gene” will be used where it is appropriate to refer to the two groups of genes separately. However, it is expected that some genes will contribute to virulence and be essential to the survival of the organism. The target genes of the invention may be partially characterized, fully characterized, or validated as a drug target, by methods known in the art and/or methods taught hereinbelow. As used herein, the term “target organism” refers to a pathogenic organism, the essential and/or virulence genes of which are useful in the invention.

[0125] The term “nucleotide sequence” refers to a heteropolymer of nucleotides, including but not limited to ribonucleotides and deoxyribonucleotides, or the sequence of these nucleotides. The terms “nucleic acid” and “polynucleotide” are also used interchangeably herein to refer to a heteropolymer of nucleotides, which may be unmodified or modified DNA or RNA. For example, polynucleotides can be single-stranded or double-stranded DNA, DNA that is a mixture of single-stranded and double-stranded regions, hybrid molecules comprising DNA and RNA with a mixture of single-stranded and double-stranded regions. In addition, the polynucleotide can be composed of triple-stranded regions comprising DNA, RNA, or both. A polynucleotide can also contain one or modified bases, or DNA or RNA backbones modified for nuclease resistance or other reasons. Generally, nucleic acid segments provided by this invention can be assembled from fragments of the genome and short oligonucleotides, or from a series of oligonucleotides, or from individual nucleotides, to provide a synthetic nucleic acid.

[0126] The term “recombinant,” when used herein to refer to a polypeptide or protein, means that a polypeptide or protein is derived from recombinant (e.g., microbial or mammalian) expression systems. “Microbial” refers to recombinant polypeptides or proteins made in bacterial or fungal (e.g., yeast) expression systems. As a product, “recombinant microbial” defines a polypeptide or protein essentially unaccompanied by associated native glycosylation. Polypeptides or proteins expressed in most bacterial cultures, e.g., E. coli, will be free of glycosylation modifications; polypeptides or proteins expressed in yeast will be glycosylated.

[0127] The term “expression vehicle or vector” refers to a plasmid or phage or virus, for expressing a polypeptide from a nucleotide sequence. An expression vehicle can comprise a transcriptional unit, also referred to as an expression construct, comprising an assembly of (1) a genetic element or elements having a regulatory role in gene expression, for example, promoters or enhancers, (2) a structural or coding sequence which is transcribed into mRNA and translated into protein, and which is operably linked to the elements of (1); and (3) appropriate transcription initiation and termination sequences. “Operably linked” refers to a link in which the regulatory regions and the DNA sequence to be expressed are joined and positioned in such a way as to permit transcription, and ultimately, translation. In the case of C. albicans, due to its unusual codon usage, modification of a coding sequence derived from other organisms may be necessary to ensure a polypeptide having the expected amino acid sequence is produced in this organism. Structural units intended for use in yeast or eukaryotic expression systems preferably include a leader sequence enabling extracellular secretion of translated protein by a host cell. Alternatively, where a recombinant protein is expressed without a leader or transport sequence, it may include an N-terminal methionine residue. This residue may or may not be subsequently cleaved from the expressed recombinant protein to provide a final product.

[0128] The term “recombinant host cells” means cultured cells which have stably integrated a recombinant transcriptional unit into chromosomal DNA or carry stably the recombinant transcriptional unit extrachromosomally. Recombinant host cells as defined herein will express heterologous polypeptides or proteins, and RNA encoded by the DNA segment or synthetic gene in the recombinant transcriptional unit. This term also means host cells which have stably integrated a recombinant genetic element or elements having a regulatory role in gene expression, for example, promoters or enhancers. Recombinant expression systems as defined herein will express RNA, polypeptides or proteins endogenous to the cell upon induction of the regulatory elements linked to the endogenous DNA segment or gene to be expressed. The cells can be prokaryotic or eukaryotic.

[0129] The term “polypeptide” refers to the molecule form by joining amino acids to each other by peptide bonds, and may contain amino acids other than the twenty commonly used gene-encoded amino acids. The term “active polypeptide” refers to those forms of the polypeptide which retain the biologic and/or immunologic activities of any naturally occurring polypeptide. The term “naturally occurring polypeptide” refers to polypeptides produced by cells that have not been genetically engineered and specifically contemplates various polypeptides arising from post-translational modifications of the polypeptide including, but not limited to, proteolytic processing, acetylation, carboxylation, glycosylation, phosphorylation, lipidation and acylation.

[0130] The term “isolated” as used herein refers to a nucleic acid or polypeptide separated from at least one macromolecular component (e.g., nucleic acid or polypeptide) present with the nucleic acid or polypeptide in its natural source. In one embodiment, the polynucleotide or polypeptide is purified such that it constitutes at least 95% by weight, more preferably at least 99.8% by weight, of the indicated biological macromolecules present (but water, buffers, and other small molecules, especially molecules having a molecular weight of less than 1000 daltons, can be present).

[0131] Table II lists a set of fungal specific genes that are demonstrated to be essential in C. albicans when conditionally expressed under the tetracycline repression system in the respective GRACE strains or when the gene encoding the transactivator protein is excised in the respective GRACE strain in a 5-FOA assay.

TABLE II
Sequence identifiers of essential genes and related oligonucleotides

| | | | | | | | DNA | Protein |
|---|---|---|---|---|---|---|---|---|
| Gene Name | KO-Up | KO-Down | Tet-Up | Tet-Down | Primer A | Primer B | Sequence | Sequence |
| CaYDL105W | 1 | 1001 | 2001 | 3001 | 4001 | 5001 | 6001 | 7001 |
| CaYJL090C | 2 | 1002 | 2002 | 3002 | 4002 | 5002 | 6002 | 7002 |
| CaYLR127C | 3 | 1003 | 2003 | 3003 | 4003 | 5003 | 6003 | 7003 |
| CaYNL151C | 4 | 1004 | 2004 | 3004 | 4004 | 5004 | 6004 | 7004 |
| CaYPL083C | 5 | 1005 | 2005 | 3005 | 4005 | 5005 | 6005 | 7005 |
| CaYHR036W | 6 | 1006 | 2006 | 3006 | 4006 | 5006 | 6006 | 7006 |
| CaYNL256W | 7 | 1007 | 2007 | 3007 | 4007 | 5007 | 6007 | 7007 |
| CaYOL149W | 8 | 1008 | 2008 | 3008 | 4008 | 5008 | 6008 | 7008 |
| CaYDR361C | 9 | 1009 | 2009 | 3009 | 4009 | 5009 | 6009 | 7009 |
| CaYDR407C | 10 | 1010 | 2010 | 3010 | 4010 | 5010 | 6010 | 7010 |
| CaYBR070C | 11 | 1011 | 2011 | 3011 | 4011 | 5011 | 6011 | 7011 |
| CaYOR148C | 12 | 1012 | 2012 | 3012 | 4012 | 5012 | 6012 | 7012 |
| CaYJR041C | 13 | 1013 | 2013 | 3013 | 4013 | 5013 | 6013 | 7013 |
| CaYGR090W | 14 | 1014 | 2014 | 3014 | 4014 | 5014 | 6014 | 7014 |
| CaYBR123C | 15 | 1015 | 2015 | 3015 | 4015 | 5015 | 6015 | 7015 |
| CaYHR118C | 16 | 1016 | 2016 | 3016 | 4016 | 5016 | 6016 | 7016 |
| CaYKR063C | 17 | 1017 | 2017 | 3017 | 4017 | 5017 | 6017 | 7017 |
| CaYOR004W | 18 | 1018 | 2018 | 3018 | 4018 | 5018 | 6018 | 7018 |
| CaYML025C | 19 | 1019 | 2019 | 3019 | 4019 | 5019 | 6019 | 7019 |
| CaYKL033W | 20 | 1020 | 2020 | 3020 | 4020 | 5020 | 6020 | 7020 |
| CaYDR498C | 21 | 1021 | 2021 | 3021 | 4021 | 5021 | 6021 | 7021 |
| CaYIR011C | 22 | 1022 | 2022 | 3022 | 4022 | 5022 | 6022 | 7022 |
| CaYMR220W | 23 | 1023 | 2023 | 3023 | 4023 | 5023 | 6023 | 7023 |
| CaYPR105C | 24 | 1024 | 2024 | 3024 | 4024 | 5024 | 6024 | 7024 |
| CaYDL153C | 25 | 1025 | 2025 | 3025 | 4025 | 5025 | 6025 | 7025 |
| CaYPL128C | 26 | 1026 | 2026 | 3026 | 4026 | 5026 | 6026 | 7026 |
| CaYER026C | 27 | 1027 | 2027 | 3027 | 4027 | 5027 | 6027 | 7027 |
| CaYKL004W | 28 | 1028 | 2028 | 3028 | 4028 | 5028 | 6028 | 7028 |
| CaYMR200W | 29 | 1029 | 2029 | 3029 | 4029 | 5029 | 6029 | 7029 |
| CaYPR165W | 30 | 1030 | 2030 | 3030 | 4030 | 5030 | 6030 | 7030 |
| CaYHR007C | 31 | 1031 | 2031 | 3031 | 4031 | 5031 | 6031 | 7031 |
| CaYJL087C | 32 | 1032 | 2032 | 3032 | 4032 | 5032 | 6032 | 7032 |
| CaYLR229C | 33 | 1033 | 2033 | 3033 | 4033 | 5033 | 6033 | 7033 |
| CaYER118C | 34 | 1034 | 2034 | 3034 | 4034 | 5034 | 6034 | 7034 |
| CaYPL228W | 35 | 1035 | 2035 | 3035 | 4035 | 5035 | 6035 | 7035 |
| CaYPL160W | 36 | 1036 | 2036 | 3036 | 4036 | 5036 | 6036 | 7036 |
| CaYHR101C | 37 | 1037 | 2037 | 3037 | 4037 | 5037 | 6037 | 7037 |
| CaYML085C | 38 | 1038 | 2038 | 3038 | 4038 | 5038 | 6038 | 7038 |
| CaYBR243C | 39 | 1039 | 2039 | 3039 | 4039 | 5039 | 6039 | 7039 |
| CaYLR342W | 40 | 1040 | 2040 | 3040 | 4040 | 5040 | 6040 | 7040 |
| CaYOL026C | 41 | 1041 | 2041 | 3041 | 4041 | 5041 | 6041 | 7041 |
| CaYGR251W | 42 | 1042 | 2042 | 3042 | 4042 | 5042 | 6042 | 7042 |
| CaYDR118W | 43 | 1043 | 2043 | 3043 | 4043 | 5043 | 6043 | 7043 |
| CaYJL085W | 44 | 1044 | 2044 | 3044 | 4044 | 5044 | 6044 | 7044 |
| CaYDR052C | 45 | 1045 | 2045 | 3045 | 4045 | 5045 | 6045 | 7045 |
| CaYGR002C | 46 | 1046 | 2046 | 3046 | 4046 | 5046 | 6046 | 7046 |
| CaYLL004W | 47 | 1047 | 2047 | 3047 | 4047 | 5047 | 6047 | 7047 |
| CaYOR075W | 48 | 1048 | 2048 | 3048 | 4048 | 5048 | 6048 | 7048 |
| CaYMR005W | 49 | 1049 | 2049 | 3049 | 4049 | 5049 | 6049 | 7049 |
| CaYHR172W | 50 | 1050 | 2050 | 3050 | 4050 | 5050 | 6050 | 7050 |
| CaYGL122C | 51 | 1051 | 2051 | 3051 | 4051 | 5051 | 6051 | 7051 |
| CaYOR287C | 52 | 1052 | 2052 | 3052 | 4052 | 5052 | 6052 | 7052 |
| CaYMR149W | 53 | 1053 | 2053 | 3053 | 4053 | 5053 | 6053 | 7053 |
| CaYKR071C | 54 | 1054 | 2054 | 3054 | 4054 | 5054 | 6054 | 7054 |
| CaYDR412W | 55 | 1055 | 2055 | 3055 | 4055 | 5055 | 6055 | 7055 |
| CaYKR025W | 56 | 1056 | 2056 | 3056 | 4056 | 5056 | 6056 | 7056 |
| CaYJR112W | 57 | 1057 | 2057 | 3057 | 4057 | 5057 | 6057 | 7057 |
| CaYMR277W | 58 | 1058 | 2058 | 3058 | 4058 | 5058 | 6058 | 7058 |
| CaYKR083C | 59 | 1059 | 2059 | 3059 | 4059 | 5059 | 6059 | 7059 |
| CaYNL245C | 60 | 1060 | 2060 | 3060 | 4060 | 5060 | 6060 | 7060 |
| CaYNL181W | 61 | 1061 | 2061 | 3061 | 4061 | 5061 | 6061 | 7061 |
| CaYNL260C | 62 | 1062 | 2062 | 3062 | 4062 | 5062 | 6062 | 7062 |
| CaYDR365C | 63 | 1063 | 2063 | 3063 | 4063 | 5063 | 6063 | 7063 |
| CaYNL149C | 64 | 1064 | 2064 | 3064 | 4064 | 5064 | 6064 | 7064 |
| CaYGL029W | 65 | 1065 | 2065 | 3065 | 4065 | 5065 | 6065 | 7065 |
| CaYOR057W | 66 | 1066 | 2066 | 3066 | 4066 | 5066 | 6066 | 7066 |
| CaYIL022W | 67 | 1067 | 2067 | 3067 | 4067 | 5067 | 6067 | 7067 |
| CaYMR203W | 68 | 1068 | 2068 | 3068 | 4068 | 5068 | 6068 | 7068 |
| CaYOR206W | 69 | 1069 | 2069 | 3069 | 4069 | 5069 | 6069 | 7069 |
| CaYBR167C | 70 | 1070 | 2070 | 3070 | 4070 | 5070 | 6070 | 7070 |
| CaYDR016C | 71 | 1071 | 2071 | 3071 | 4071 | 5071 | 6071 | 7071 |
| CaYNL306W | 72 | 1072 | 2072 | 3072 | 4072 | 5072 | 6072 | 7072 |
| CaYJR067C | 73 | 1073 | 2073 | 3073 | 4073 | 5073 | 6073 | 7073 |
| CaYDR362C | 74 | 1074 | 2074 | 3074 | 4074 | 5074 | 6074 | 7074 |
| CaYLR355C | 75 | 1075 | 2075 | 3075 | 4075 | 5075 | 6075 | 7075 |
| CaYLR105C | 76 | 1076 | 2076 | 3076 | 4076 | 5076 | 6076 | 7076 |
| CaYML127W | 77 | 1077 | 2077 | 3077 | 4077 | 5077 | 6077 | 7077 |
| CaYPL011C | 78 | 1078 | 2078 | 3078 | 4078 | 5078 | 6078 | 7078 |
| CaYKL108W | 79 | 1079 | 2079 | 3079 | 4079 | 5079 | 6079 | 7079 |
| CaYCR035C | 80 | 1080 | 2080 | 3080 | 4080 | 5080 | 6080 | 7080 |
| CaYML114C | 81 | 1081 | 2081 | 3081 | 4081 | 5081 | 6081 | 7081 |
| CaYNL118C | 82 | 1082 | 2082 | 3082 | 4082 | 5082 | 6082 | 7082 |
| CaYDR527W | 83 | 1083 | 2083 | 3083 | 4083 | 5083 | 6083 | 7083 |
| CaYBR256C | 84 | 1084 | 2084 | 3084 | 4084 | 5084 | 6084 | 7084 |
| CaYGL233W | 85 | 1085 | 2085 | 3085 | 4085 | 5085 | 6085 | 7085 |
| CaYLR103C | 86 | 1086 | 2086 | 3086 | 4086 | 5086 | 6086 | 7086 |
| CaYOR340C | 87 | 1087 | 2087 | 3087 | 4087 | 5087 | 6087 | 7087 |
| CaYPR175W | 88 | 1088 | 2088 | 3088 | 4088 | 5088 | 6088 | 7088 |
| CaYJR093C | 89 | 1089 | 2089 | 3089 | 4089 | 5089 | 6089 | 7089 |
| CaYCL031C | 90 | 1090 | 2090 | 3090 | 4090 | 5090 | 6090 | 7090 |
| CaYML130C | 91 | 1091 | 2091 | 3091 | 4091 | 5091 | 6091 | 7091 |
| CaYAL033W | 92 | 1092 | 2092 | 3092 | 4092 | 5092 | 6092 | 7092 |
| CaYNL062C | 93 | 1093 | 2093 | 3093 | 4093 | 5093 | 6093 | 7093 |
| CaYNL132W | 94 | 1094 | 2094 | 3094 | 4094 | 5094 | 6094 | 7094 |
| CaYDL193W | 95 | 1095 | 2095 | 3095 | 4095 | 5095 | 6095 | 7095 |
| CaYDR489W | 96 | 1096 | 2096 | 3096 | 4096 | 5096 | 6096 | 7096 |
| CaYJL069C | 97 | 1097 | 2097 | 3097 | 4097 | 5097 | 6097 | 7097 |
| CaYPL063W | 98 | 1098 | 2098 | 3098 | 4098 | 5098 | 6098 | 7098 |
| CaYNL232W | 99 | 1099 | 2099 | 3099 | 4099 | 5099 | 6099 | 7099 |
| CaYNR054C | 100 | 1100 | 2100 | 3100 | 4100 | 5100 | 6100 | 7100 |
| CaYGR245C | 101 | 1101 | 2101 | 3101 | 4101 | 5101 | 6101 | 7101 |
| CaYPR162C | 102 | 1102 | 2102 | 3102 | 4102 | 5102 | 6102 | 7102 |
| CaYHR058C | 103 | 1103 | 2103 | 3103 | 4103 | 5103 | 6103 | 7103 |
| CaYKR081C | 104 | 1104 | 2104 | 3104 | 4104 | 5104 | 6104 | 7104 |
| CaYNL240C | 105 | 1105 | 2105 | 3105 | 4105 | 5105 | 6105 | 7105 |
| CaYPR168W | 106 | 1106 | 2106 | 3106 | 4106 | 5106 | 6106 | 7106 |
| CaYKL099C | 107 | 1107 | 2107 | 3107 | 4107 | 5107 | 6107 | 7107 |
| CaYLR008C | 108 | 1108 | 2108 | 3108 | 4108 | 5108 | 6108 | 7108 |
| CaYOL142W | 109 | 1109 | 2109 | 3109 | 4109 | 5109 | 6109 | 7109 |
| CaYDL015C | 110 | 1110 | 2110 | 3110 | 4110 | 5110 | 6110 | 7110 |
| CaYDR472W | 111 | 1111 | 2111 | 3111 | 4111 | 5111 | 6111 | 7111 |
| CaYNR046W | 112 | 1112 | 2112 | 3112 | 4112 | 5112 | 6112 | 7112 |
| CaYDR473C | 113 | 1113 | 2113 | 3113 | 4113 | 5113 | 6113 | 7113 |
| CaYGL207W | 114 | 1114 | 2114 | 3114 | 4114 | 5114 | 6114 | 7114 |
| CaYHR088W | 115 | 1115 | 2115 | 3115 | 4115 | 5115 | 6115 | 7115 |
| CaYIR015W | 116 | 1116 | 2116 | 3116 | 4116 | 5116 | 6116 | 7116 |
| CaYHR197W | 117 | 1117 | 2117 | 3117 | 4117 | 5117 | 6117 | 7117 |
| CaYMR218C | 118 | 1118 | 2118 | 3118 | 4118 | 5118 | 6118 | 7118 |
| CaYKL182W | 119 | 1119 | 2119 | 3119 | 4119 | 5119 | 6119 | 7119 |
| CaYDR325W | 120 | 1120 | 2120 | 3120 | 4120 | 5120 | 6120 | 7120 |
| CaYLL003W | 121 | 1121 | 2121 | 3121 | 4121 | 5121 | 6121 | 7121 |
| CaYNR026C | 122 | 1122 | 2122 | 3122 | 4122 | 5122 | 6122 | 7122 |
| CaYNL251C | 123 | 1123 | 2123 | 3123 | 4123 | 5123 | 6123 | 7123 |
| CaYPL126W | 124 | 1124 | 2124 | 3124 | 4124 | 5124 | 6124 | 7124 |
| CaYLR002C | 125 | 1125 | 2125 | 3125 | 4125 | 5125 | 6125 | 7125 |
| CaYJL061W | 126 | 1126 | 2126 | 3126 | 4126 | 5126 | 6126 | 7126 |
| CaYLR071C | 127 | 1127 | 2127 | 3127 | 4127 | 5127 | 6127 | 7127 |
| CaYML031W | 128 | 1128 | 2128 | 3128 | 4128 | 5128 | 6128 | 7128 |
| CaYIL147C | 129 | 1129 | 2129 | 3129 | 4129 | 5129 | 6129 | 7129 |
| CaYJL025W | 130 | 1130 | 2130 | 3130 | 4130 | 5130 | 6130 | 7130 |
| CaYOR353C | 131 | 1131 | 2131 | 3131 | 4131 | 5131 | 6131 | 7131 |
| CaYKR008W | 132 | 1132 | 2132 | 3132 | 4132 | 5132 | 6132 | 7132 |
| CaYMR033W | 133 | 1133 | 2133 | 3133 | 4133 | 5133 | 6133 | 7133 |
| CaYNL313C | 134 | 1134 | 2134 | 3134 | 4134 | 5134 | 6134 | 7134 |
| CaYGL225W | 135 | 1135 | 2135 | 3135 | 4135 | 5135 | 6135 | 7135 |
| CaYNL308C | 136 | 1136 | 2136 | 3136 | 4136 | 5136 | 6136 | 7136 |
| CaYDR353W | 137 | 1137 | 2137 | 3137 | 4137 | 5137 | 6137 | 7137 |
| CaYIL068C | 138 | 1138 | 2138 | 3138 | 4138 | 5138 | 6138 | 7138 |
| CaYPR190C | 139 | 1139 | 2139 | 3139 | 4139 | 5139 | 6139 | 7139 |
| CaYOR174W | 140 | 1140 | 2140 | 3140 | 4140 | 5140 | 6140 | 7140 |
| CaYDL150W | 141 | 1141 | 2141 | 3141 | 4141 | 5141 | 6141 | 7141 |
| CaYAL041W | 142 | 1142 | 2142 | 3142 | 4142 | 5142 | 6142 | 7142 |
| CaYMR227C | 143 | 1143 | 2143 | 3143 | 4143 | 5143 | 6143 | 7143 |
| CaYPL043W | 144 | 1144 | 2144 | 3144 | 4144 | 5144 | 6144 | 7144 |
| CaYDR324C | 145 | 1145 | 2145 | 3145 | 4145 | 5145 | 6145 | 7145 |
| CaYOL022C | 146 | 1146 | 2146 | 3146 | 4146 | 5146 | 6146 | 7146 |
| CaYOL069W | 147 | 1147 | 2147 | 3147 | 4147 | 5147 | 6147 | 7147 |
| CaYGR156W | 148 | 1148 | 2148 | 3148 | 4148 | 5148 | 6148 | 7148 |
| CaYDL003W | 149 | 1149 | 2149 | 3149 | 4149 | 5149 | 6149 | 7149 |
| CaYDR228C | 150 | 1150 | 2150 | 3150 | 4150 | 5150 | 6150 | 7150 |
| CaYKR062W | 151 | 1151 | 2151 | 3151 | 4151 | 5151 | 6151 | 7151 |
| CaYDR398W | 152 | 1152 | 2152 | 3152 | 4152 | 5152 | 6152 | 7152 |
| CaYNL126W | 153 | 1153 | 2153 | 3153 | 4153 | 5153 | 6153 | 7153 |
| CaYKL089W | 154 | 1154 | 2154 | 3154 | 4154 | 5154 | 6154 | 7154 |
| CaYMR028W | 155 | 1155 | 2155 | 3155 | 4155 | 5155 | 6155 | 7155 |
| CaYDR299W | 156 | 1156 | 2156 | 3156 | 4156 | 5156 | 6156 | 7156 |
| CaYOL034W | 157 | 1157 | 2157 | 3157 | 4157 | 5157 | 6157 | 7157 |
| CaYGR119C | 158 | 1158 | 2158 | 3158 | 4158 | 5158 | 6158 | 7158 |
| CaYDL111C | 159 | 1159 | 2159 | 3159 | 4159 | 5159 | 6159 | 7159 |
| CaYHR052W | 160 | 1160 | 2160 | 3160 | 4160 | 5160 | 6160 | 7160 |
| CaYKL021C | 161 | 1161 | 2161 | 3161 | 4161 | 5161 | 6161 | 7161 |
| CaYLL031C | 162 | 1162 | 2162 | 3162 | 4162 | 5162 | 6162 | 7162 |
| CaYHR040W | 163 | 1163 | 2163 | 3163 | 4163 | 5163 | 6163 | 7163 |
| CaYML015C | 164 | 1164 | 2164 | 3164 | 4164 | 5164 | 6164 | 7164 |
| CaYIL004C | 165 | 1165 | 2165 | 3165 | 4165 | 5165 | 6165 | 7165 |
| CaYDR302W | 166 | 1166 | 2166 | 3166 | 4166 | 5166 | 6166 | 7166 |
| CaYPR133C | 167 | 1167 | 2167 | 3167 | 4167 | 5167 | 6167 | 7167 |
| CaYDL195W | 168 | 1168 | 2168 | 3168 | 4168 | 5168 | 6168 | 7168 |
| CaYCR052W | 169 | 1169 | 2169 | 3169 | 4169 | 5169 | 6169 | 7169 |
| CaYFR042W | 170 | 1170 | 2170 | 3170 | 4170 | 5170 | 6170 | 7170 |
| CaYNR017W | 171 | 1171 | 2171 | 3171 | 4171 | 5171 | 6171 | 7171 |
| CaYOR254C | 172 | 1172 | 2172 | 3172 | 4172 | 5172 | 6172 | 7172 |
| CaYFL029C | 173 | 1173 | 2173 | 3173 | 4173 | 5173 | 6173 | 7173 |
| CaYBR265W | 174 | 1174 | 2174 | 3174 | 4174 | 5174 | 6174 | 7174 |
| CaYNL312W | 175 | 1175 | 2175 | 3175 | 4175 | 5175 | 6175 | 7175 |
| CaYBR155W | 176 | 1176 | 2176 | 3176 | 4176 | 5176 | 6176 | 7176 |
| CaYGR280C | 177 | 1177 | 2177 | 3177 | 4177 | 5177 | 6177 | 7177 |
| CaYJL203W | 178 | 1178 | 2178 | 3178 | 4178 | 5178 | 6178 | 7178 |
| CaYIR012W | 179 | 1179 | 2179 | 3179 | 4179 | 5179 | 6179 | 7179 |
| CaYMR093W | 180 | 1180 | 2180 | 3180 | 4180 | 5180 | 6180 | 7180 |
| CaYPR137W | 181 | 1181 | 2181 | 3181 | 4181 | 5181 | 6181 | 7181 |
| CaYLR298C | 182 | 1182 | 2182 | 3182 | 4182 | 5182 | 6182 | 7182 |
| CaYBR192W | 183 | 1183 | 2183 | 3183 | 4183 | 5183 | 6183 | 7183 |
| CaYPR112C | 184 | 1184 | 2184 | 3184 | 4184 | 5184 | 6184 | 7184 |
| CaYLL011W | 185 | 1185 | 2185 | 3185 | 4185 | 5185 | 6185 | 7185 |
| CaYER082C | 186 | 1186 | 2186 | 3186 | 4186 | 5186 | 6186 | 7186 |
| CaYDL217C | 187 | 1187 | 2187 | 3187 | 4187 | 5187 | 6187 | 7187 |
| CaYFL035C | 188 | 1188 | 2188 | 3188 | 4188 | 5188 | 6188 | 7188 |
| CaYOR262W | 189 | 1189 | 2189 | 3189 | 4189 | 5189 | 6189 | 7189 |
| CaYLR323C | 190 | 1190 | 2190 | 3190 | 4190 | 5190 | 6190 | 7190 |
| CaYAR007C | 191 | 1191 | 2191 | 3191 | 4191 | 5191 | 6191 | 7191 |
| CaYBL023C | 192 | 1192 | 2192 | 3192 | 4192 | 5192 | 6192 | 7192 |
| CaYBL026W | 193 | 1193 | 2193 | 3193 | 4193 | 5193 | 6193 | 7193 |
| CaYBL030C | 194 | 1194 | 2194 | 3194 | 4194 | 5194 | 6194 | 7194 |
| CaYBL035C | 195 | 1195 | 2195 | 3195 | 4195 | 5195 | 6195 | 7195 |
| CaYBL040C | 196 | 1196 | 2196 | 3196 | 4196 | 5196 | 6196 | 7196 |
| CaYBL050W | 197 | 1197 | 2197 | 3197 | 4197 | 5197 | 6197 | 7197 |
| CaYBL076C | 198 | 1198 | 2198 | 3198 | 4198 | 5198 | 6198 | 7198 |
| CaYBR002C | 199 | 1199 | 2199 | 3199 | 4199 | 5199 | 6199 | 7199 |
| CaYBR029C | 200 | 1200 | 2200 | 3200 | 4200 | 5200 | 6200 | 7200 |
| CaYBR080C | 201 | 1201 | 2201 | 3201 | 4201 | 5201 | 6201 | 7201 |
| CaYBR091C | 202 | 1202 | 2202 | 3202 | 4202 | 5202 | 6202 | 7202 |
| CaYBR135W | 203 | 1203 | 2203 | 3203 | 4203 | 5203 | 6203 | 7203 |
| CaYBR142W | 204 | 1204 | 2204 | 3204 | 4204 | 5204 | 6204 | 7204 |
| CaYBR143C | 205 | 1205 | 2205 | 3205 | 4205 | 5205 | 6205 | 7205 |
| CaYBR160W | 206 | 1206 | 2206 | 3206 | 4206 | 5206 | 6206 | 7206 |
| CaYBR196C | 207 | 1207 | 2207 | 3207 | 4207 | 5207 | 6207 | 7207 |
| CaYBR198C | 208 | 1208 | 2208 | 3208 | 4208 | 5208 | 6208 | 7208 |
| CaYBR202W | 209 | 1209 | 2209 | 3209 | 4209 | 5209 | 6209 | 7209 |
| CaYBR234C | 210 | 1210 | 2210 | 3210 | 4210 | 5210 | 6210 | 7210 |
| CaYBR236C | 211 | 1211 | 2211 | 3211 | 4211 | 5211 | 6211 | 7211 |
| CaYBR237W | 212 | 1212 | 2212 | 3212 | 4212 | 5212 | 6212 | 7212 |
| CaYBR253W | 213 | 1213 | 2213 | 3213 | 4213 | 5213 | 6213 | 7213 |
| CaYBR254C | 214 | 1214 | 2214 | 3214 | 4214 | 5214 | 6214 | 7214 |
| CaYCL003W | 215 | 1215 | 2215 | 3215 | 4215 | 5215 | 6215 | 7215 |
| CaYCL017C | 216 | 1216 | 2216 | 3216 | 4216 | 5216 | 6216 | 7216 |
| CaYCL054W | 217 | 1217 | 2217 | 3217 | 4217 | 5217 | 6217 | 7217 |
| CaYCR012W | 218 | 1218 | 2218 | 3218 | 4218 | 5218 | 6218 | 7218 |
| CaYCR057C | 219 | 1219 | 2219 | 3219 | 4219 | 5219 | 6219 | 7219 |
| CaYCR072C | 220 | 1220 | 2220 | 3220 | 4220 | 5220 | 6220 | 7220 |
| CaYDL030W | 221 | 1221 | 2221 | 3221 | 4221 | 5221 | 6221 | 7221 |
| CaYDL043C | 222 | 1222 | 2222 | 3222 | 4222 | 5222 | 6222 | 7222 |
| CaYDL055C | 223 | 1223 | 2223 | 3223 | 4223 | 5223 | 6223 | 7223 |
| CaYDL060W | 224 | 1224 | 2224 | 3224 | 4224 | 5224 | 6224 | 7224 |
| CaYDL084W | 225 | 1225 | 2225 | 3225 | 4225 | 5225 | 6225 | 7225 |
| CaYDL087C | 226 | 1226 | 2226 | 3226 | 4226 | 5226 | 6226 | 7226 |
| CaYDL126C | 227 | 1227 | 2227 | 3227 | 4227 | 5227 | 6227 | 7227 |
| CaYDL132W | 228 | 1228 | 2228 | 3228 | 4228 | 5228 | 6228 | 7228 |
| CaYDL141W | 229 | 1229 | 2229 | 3229 | 4229 | 5229 | 6229 | 7229 |
| CaYKL059C | 230 | 1230 | 2230 | 3230 | 4230 | 5230 | 6230 | 7230 |
| CaYDL108W | 231 | 1231 | 2231 | 3231 | 4231 | 5231 | 6231 | 7231 |
| CaYKL060C | 232 | 1232 | 2232 | 3232 | 4232 | 5232 | 6232 | 7232 |
| CaYHR070W | 233 | 1233 | 2233 | 3233 | 4233 | 5233 | 6233 | 7233 |
| CaYGR195W | 234 | 1234 | 2234 | 3234 | 4234 | 5234 | 6234 | 7234 |
| CaYOL102C | 235 | 1235 | 2235 | 3235 | 4235 | 5235 | 6235 | 7235 |
| CaYOR074C | 236 | 1236 | 2236 | 3236 | 4236 | 5236 | 6236 | 7236 |
| CaYGL155W | 237 | 1237 | 2237 | 3237 | 4237 | 5237 | 6237 | 7237 |
| CaYLR305C | 238 | 1238 | 2238 | 3238 | 4238 | 5238 | 6238 | 7238 |
| CaYNL222W | 239 | 1239 | 2239 | 3239 | 4239 | 5239 | 6239 | 7239 |
| CaYDR236C | 240 | 1240 | 2240 | 3240 | 4240 | 5240 | 6240 | 7240 |
| CaYBL020W | 241 | 1241 | 2241 | 3241 | 4241 | 5241 | 6241 | 7241 |
| CaYNL261W | 242 | 1242 | 2242 | 3242 | 4242 | 5242 | 6242 | 7242 |
| CaYDR246W | 243 | 1243 | 2243 | 3243 | 4243 | 5243 | 6243 | 7243 |
| CaYNL075W | 244 | 1244 | 2244 | 3244 | 4244 | 5244 | 6244 | 7244 |
| CaYOR145C | 245 | 1245 | 2245 | 3245 | 4245 | 5245 | 6245 | 7245 |
| CaYOL077C | 246 | 1246 | 2246 | 3246 | 4246 | 5246 | 6246 | 7246 |
| CaYBR257W | 247 | 1247 | 2247 | 3247 | 4247 | 5247 | 6247 | 7247 |
| CaYHR170W | 248 | 1248 | 2248 | 3248 | 4248 | 5248 | 6248 | 7248 |
| CaYNL263C | 249 | 1249 | 2249 | 3249 | 4249 | 5249 | 6249 | 7249 |
| CaYKR068C | 250 | 1250 | 2250 | 3250 | 4250 | 5250 | 6250 | 7250 |
| CaYPR016C | 251 | 1251 | 2251 | 3251 | 4251 | 5251 | 6251 | 7251 |
| CaYGR172C | 252 | 1252 | 2252 | 3252 | 4252 | 5252 | 6252 | 7252 |
| CaYHR089C | 253 | 1253 | 2253 | 3253 | 4253 | 5253 | 6253 | 7253 |
| CaYMR197C | 254 | 1254 | 2254 | 3254 | 4254 | 5254 | 6254 | 7254 |
| CaYHR188C | 255 | 1255 | 2255 | 3255 | 4255 | 5255 | 6255 | 7255 |
| CaYPL266W | 256 | 1256 | 2256 | 3256 | 4256 | 5256 | 6256 | 7256 |
| CaYBR011C | 257 | 1257 | 2257 | 3257 | 4257 | 5257 | 6257 | 7257 |
| CaYCL059C | 258 | 1258 | 2258 | 3258 | 4258 | 5258 | 6258 | 7258 |
| CaYDL008W | 259 | 1259 | 2259 | 3259 | 4259 | 5259 | 6259 | 7259 |
| CaYDL097C | 260 | 1260 | 2260 | 3260 | 4260 | 5260 | 6260 | 7260 |
| CaYDL143W | 261 | 1261 | 2261 | 3261 | 4261 | 5261 | 6261 | 7261 |
| CaYDL205C | 262 | 1262 | 2262 | 3262 | 4262 | 5262 | 6262 | 7262 |
| CaYDL208W | 263 | 1263 | 2263 | 3263 | 4263 | 5263 | 6263 | 7263 |
| CaYDR002W | 264 | 1264 | 2264 | 3264 | 4264 | 5264 | 6264 | 7264 |
| CaYDR013W | 265 | 1265 | 2265 | 3265 | 4265 | 5265 | 6265 | 7265 |
| CaYDR023W | 266 | 1266 | 2266 | 3266 | 4266 | 5266 | 6266 | 7266 |
| CaYDR037W | 267 | 1267 | 2267 | 3267 | 4267 | 5267 | 6267 | 7267 |
| CaYDR045C | 268 | 1268 | 2268 | 3268 | 4268 | 5268 | 6268 | 7268 |
| CaYDR054C | 269 | 1269 | 2269 | 3269 | 4269 | 5269 | 6269 | 7269 |
| CaYDR086C | 270 | 1270 | 2270 | 3270 | 4270 | 5270 | 6270 | 7270 |
| CaYDR087C | 271 | 1271 | 2271 | 3271 | 4271 | 5271 | 6271 | 7271 |
| CaYDR091C | 272 | 1272 | 2272 | 3272 | 4272 | 5272 | 6272 | 7272 |
| CaYDR167W | 273 | 1273 | 2273 | 3273 | 4273 | 5273 | 6273 | 7273 |
| CaYDR172W | 274 | 1274 | 2274 | 3274 | 4274 | 5274 | 6274 | 7274 |
| CaYDR189W | 275 | 1275 | 2275 | 3275 | 4275 | 5275 | 6275 | 7275 |
| CaYDR196C | 276 | 1276 | 2276 | 3276 | 4276 | 5276 | 6276 | 7276 |
| CaYDR212W | 277 | 1277 | 2277 | 3277 | 4277 | 5277 | 6277 | 7277 |
| CaYDR238C | 278 | 1278 | 2278 | 3278 | 4278 | 5278 | 6278 | 7278 |
| CaYDR280W | 279 | 1279 | 2279 | 3279 | 4279 | 5279 | 6279 | 7279 |
| CaYDR331W | 280 | 1280 | 2280 | 3280 | 4280 | 5280 | 6280 | 7280 |
| CaYDR373W | 281 | 1281 | 2281 | 3281 | 4281 | 5281 | 6281 | 7281 |
| CaYDR376W | 282 | 1282 | 2282 | 3282 | 4282 | 5282 | 6282 | 7282 |
| CaYDR390C | 283 | 1283 | 2283 | 3283 | 4283 | 5283 | 6283 | 7283 |
| CaYDR394W | 284 | 1284 | 2284 | 3284 | 4284 | 5284 | 6284 | 7284 |
| CaYDR404C | 285 | 1285 | 2285 | 3285 | 4285 | 5285 | 6285 | 7285 |
| CaYDR429C | 286 | 1286 | 2286 | 3286 | 4286 | 5286 | 6286 | 7286 |
| CaYDR454C | 287 | 1287 | 2287 | 3287 | 4287 | 5287 | 6287 | 7287 |
| CaYEL020W-A | 288 | 1288 | 2288 | 3288 | 4288 | 5288 | 6288 | 7288 |
| CaYEL026W | 289 | 1289 | 2289 | 3289 | 4289 | 5289 | 6289 | 7289 |
| CaYER003C | 290 | 1290 | 2290 | 3290 | 4290 | 5290 | 6290 | 7290 |
| CaYER006W | 291 | 1291 | 2291 | 3291 | 4291 | 5291 | 6291 | 7291 |
| CaYER012W | 292 | 1292 | 2292 | 3292 | 4292 | 5292 | 6292 | 7292 |
| CaYER021W | 293 | 1293 | 2293 | 3293 | 4293 | 5293 | 6293 | 7293 |
| CaYER036C | 294 | 1294 | 2294 | 3294 | 4294 | 5294 | 6294 | 7294 |
| CaYER094C | 295 | 1295 | 2295 | 3295 | 4295 | 5295 | 6295 | 7295 |
| CaYER125W | 296 | 1296 | 2296 | 3296 | 4296 | 5296 | 6296 | 7296 |
| CaYER148W | 297 | 1297 | 2297 | 3297 | 4297 | 5297 | 6297 | 7297 |
| CaYER159C | 298 | 1298 | 2298 | 3298 | 4298 | 5298 | 6298 | 7298 |
| CaYFL002C | 299 | 1299 | 2299 | 3299 | 4299 | 5299 | 6299 | 7299 |
| CaYFL005W | 300 | 1300 | 2300 | 3300 | 4300 | 5300 | 6300 | 7300 |
| CaYFL017C | 301 | 1301 | 2301 | 3301 | 4301 | 5301 | 6301 | 7301 |
| CaYFL022C | 302 | 1302 | 2302 | 3302 | 4302 | 5302 | 6302 | 7302 |
| CaYFL038C | 303 | 1303 | 2303 | 3303 | 4303 | 5303 | 6303 | 7303 |
| CaYFL045C | 304 | 1304 | 2304 | 3304 | 4304 | 5304 | 6304 | 7304 |
| CaYFR004W | 305 | 1305 | 2305 | 3305 | 4305 | 5305 | 6305 | 7305 |
| CaYFR037C | 306 | 1306 | 2306 | 3306 | 4306 | 5306 | 6306 | 7306 |
| CaYFR050C | 307 | 1307 | 2307 | 3307 | 4307 | 5307 | 6307 | 7307 |
| CaYFR052W | 308 | 1308 | 2308 | 3308 | 4308 | 5308 | 6308 | 7308 |
| CaYDL029W | 309 | 1309 | 2309 | 3309 | 4309 | 5309 | 6309 | 7309 |
| CaYDL147W | 310 | 1310 | 2310 | 3310 | 4310 | 5310 | 6310 | 7310 |
| CaYDL148C | 311 | 1311 | 2311 | 3311 | 4311 | 5311 | 6311 | 7311 |
| CaYDR060W | 312 | 1312 | 2312 | 3312 | 4312 | 5312 | 6312 | 7312 |
| CaYDR062W | 313 | 1313 | 2313 | 3313 | 4313 | 5313 | 6313 | 7313 |
| CaYDR211W | 314 | 1314 | 2314 | 3314 | 4314 | 5314 | 6314 | 7314 |
| CaYDR328C | 315 | 1315 | 2315 | 3315 | 4315 | 5315 | 6315 | 7315 |
| CaYER025W | 316 | 1316 | 2316 | 3316 | 4316 | 5316 | 6316 | 7316 |
| CaYER136W | 317 | 1317 | 2317 | 3317 | 4317 | 5317 | 6317 | 7317 |
| CaYER171W | 318 | 1318 | 2318 | 3318 | 4318 | 5318 | 6318 | 7318 |
| CaYFL008W | 319 | 1319 | 2319 | 3319 | 4319 | 5319 | 6319 | 7319 |
| CaYGL001C | 320 | 1320 | 2320 | 3320 | 4320 | 5320 | 6320 | 7320 |
| CaYGL008C | 321 | 1321 | 2321 | 3321 | 4321 | 5321 | 6321 | 7321 |
| CaYGL011C | 322 | 1322 | 2322 | 3322 | 4322 | 5322 | 6322 | 7322 |
| CaYGL022W | 323 | 1323 | 2323 | 3323 | 4323 | 5323 | 6323 | 7323 |
| CaYGL044C | 324 | 1324 | 2324 | 3324 | 4324 | 5324 | 6324 | 7324 |
| CaYGL048C | 325 | 1325 | 2325 | 3325 | 4325 | 5325 | 6325 | 7325 |
| CaYGL068W | 326 | 1326 | 2326 | 3326 | 4326 | 5326 | 6326 | 7326 |
| CaYGL097W | 327 | 1327 | 2327 | 3327 | 4327 | 5327 | 6327 | 7327 |
| CaYGL112C | 328 | 1328 | 2328 | 3328 | 4328 | 5328 | 6328 | 7328 |
| CaYGL120C | 329 | 1329 | 2329 | 3329 | 4329 | 5329 | 6329 | 7329 |
| CaYGL130W | 330 | 1330 | 2330 | 3330 | 4330 | 5330 | 6330 | 7330 |
| CaYGR029W | 331 | 1331 | 2331 | 3331 | 4331 | 5331 | 6331 | 7331 |
| CaYGR060W | 332 | 1332 | 2332 | 3332 | 4332 | 5332 | 6332 | 7332 |
| CaYGR094W | 333 | 1333 | 2333 | 3333 | 4333 | 5333 | 6333 | 7333 |
| CaYGR103W | 334 | 1334 | 2334 | 3334 | 4334 | 5334 | 6334 | 7334 |
| CaYGR185C | 335 | 1335 | 2335 | 3335 | 4335 | 5335 | 6335 | 7335 |
| CaYGR211W | 336 | 1336 | 2336 | 3336 | 4336 | 5336 | 6336 | 7336 |
| CaYGR218W | 337 | 1337 | 2337 | 3337 | 4337 | 5337 | 6337 | 7337 |
| CaYGR246C | 338 | 1338 | 2338 | 3338 | 4338 | 5338 | 6338 | 7338 |
| CaYGR253C | 339 | 1339 | 2339 | 3339 | 4339 | 5339 | 6339 | 7339 |
| CaYHL015W | 340 | 1340 | 2340 | 3340 | 4340 | 5340 | 6340 | 7340 |
| CaYHR005C-A | 341 | 1341 | 2341 | 3341 | 4341 | 5341 | 6341 | 7341 |
| CaYHR019C | 342 | 1342 | 2342 | 3342 | 4342 | 5342 | 6342 | 7342 |
| CaYHR020W | 343 | 1343 | 2343 | 3343 | 4343 | 5343 | 6343 | 7343 |
| CaYHR024C | 344 | 1344 | 2344 | 3344 | 4344 | 5344 | 6344 | 7344 |
| CaYHR062C | 345 | 1345 | 2345 | 3345 | 4345 | 5345 | 6345 | 7345 |
| CaYHR072W | 346 | 1346 | 2346 | 3346 | 4346 | 5346 | 6346 | 7346 |
| CaYHR072W-A | 347 | 1347 | 2347 | 3347 | 4347 | 5347 | 6347 | 7347 |
| CaYHR090C | 348 | 1348 | 2348 | 3348 | 4348 | 5348 | 6348 | 7348 |
| CaYHR122W | 349 | 1349 | 2349 | 3349 | 4349 | 5349 | 6349 | 7349 |
| CaYHR143W-A | 350 | 1350 | 2350 | 3350 | 4350 | 5350 | 6350 | 7350 |
| CaYHR148W | 351 | 1351 | 2351 | 3351 | 4351 | 5351 | 6351 | 7351 |
| CaYHR165C | 352 | 1352 | 2352 | 3352 | 4352 | 5352 | 6352 | 7352 |
| CaYHR166C | 353 | 1353 | 2353 | 3353 | 4353 | 5353 | 6353 | 7353 |
| CaYHR169W | 354 | 1354 | 2354 | 3354 | 4354 | 5354 | 6354 | 7354 |
| CaYHR190W | 355 | 1355 | 2355 | 3355 | 4355 | 5355 | 6355 | 7355 |
| CaYIL003W | 356 | 1356 | 2356 | 3356 | 4356 | 5356 | 6356 | 7356 |
| CaYIL021W | 357 | 1357 | 2357 | 3357 | 4357 | 5357 | 6357 | 7357 |
| CaYIL075C | 358 | 1358 | 2358 | 3358 | 4358 | 5358 | 6358 | 7358 |
| CaYIL078W | 359 | 1359 | 2359 | 3359 | 4359 | 5359 | 6359 | 7359 |
| CaYIL142W | 360 | 1360 | 2360 | 3360 | 4360 | 5360 | 6360 | 7360 |
| CaYIR008C | 361 | 1361 | 2361 | 3361 | 4361 | 5361 | 6361 | 7361 |
| CaYIR022W | 362 | 1362 | 2362 | 3362 | 4362 | 5362 | 6362 | 7362 |
| CaYJL001W | 363 | 1363 | 2363 | 3363 | 4363 | 5363 | 6363 | 7363 |
| CaYJL014W | 364 | 1364 | 2364 | 3364 | 4364 | 5364 | 6364 | 7364 |
| CaYJL050W | 365 | 1365 | 2365 | 3365 | 4365 | 5365 | 6365 | 7365 |
| CaYJL074C | 366 | 1366 | 2366 | 3366 | 4366 | 5366 | 6366 | 7366 |
| CaYJL081C | 367 | 1367 | 2367 | 3367 | 4367 | 5367 | 6367 | 7367 |
| CaYJL104W | 368 | 1368 | 2368 | 3368 | 4368 | 5368 | 6368 | 7368 |
| CaYJL111W | 369 | 1369 | 2369 | 3369 | 4369 | 5369 | 6369 | 7369 |
| CaYJL143W | 370 | 1370 | 2370 | 3370 | 4370 | 5370 | 6370 | 7370 |
| CaYJL167W | 371 | 1371 | 2371 | 3371 | 4371 | 5371 | 6371 | 7371 |
| CaYJL194W | 372 | 1372 | 2372 | 3372 | 4372 | 5372 | 6372 | 7372 |
| CaYJR006W | 373 | 1373 | 2373 | 3373 | 4373 | 5373 | 6373 | 7373 |
| CaYJR017C | 374 | 1374 | 2374 | 3374 | 4374 | 5374 | 6374 | 7374 |
| CaYJR064W | 375 | 1375 | 2375 | 3375 | 4375 | 5375 | 6375 | 7375 |
| CaYJR065C | 376 | 1376 | 2376 | 3376 | 4376 | 5376 | 6376 | 7376 |
| CaYJR072C | 377 | 1377 | 2377 | 3377 | 4377 | 5377 | 6377 | 7377 |
| CaYJR123W | 378 | 1378 | 2378 | 3378 | 4378 | 5378 | 6378 | 7378 |
| CaYKL012W | 379 | 1379 | 2379 | 3379 | 4379 | 5379 | 6379 | 7379 |
| CaYKL019W | 380 | 1380 | 2380 | 3380 | 4380 | 5380 | 6380 | 7380 |
| CaYKL028W | 381 | 1381 | 2381 | 3381 | 4381 | 5381 | 6381 | 7381 |
| CaYKL058W | 382 | 1382 | 2382 | 3382 | 4382 | 5382 | 6382 | 7382 |
| CaYKL104C | 383 | 1383 | 2383 | 3383 | 4383 | 5383 | 6383 | 7383 |
| CaYKL144C | 384 | 1384 | 2384 | 3384 | 4384 | 5384 | 6384 | 7384 |
| CaYKL145W | 385 | 1385 | 2385 | 3385 | 4385 | 5385 | 6385 | 7385 |
| CaYKL172W | 386 | 1386 | 2386 | 3386 | 4386 | 5386 | 6386 | 7386 |
| CaYKL210W | 387 | 1387 | 2387 | 3387 | 4387 | 5387 | 6387 | 7387 |
| CaYKR079C | 388 | 1388 | 2388 | 3388 | 4388 | 5388 | 6388 | 7388 |
| CaYKR086W | 389 | 1389 | 2389 | 3389 | 4389 | 5389 | 6389 | 7389 |
| CaYLL018C | 390 | 1390 | 2390 | 3390 | 4390 | 5390 | 6390 | 7390 |
| CaYLR005W | 391 | 1391 | 2391 | 3391 | 4391 | 5391 | 6391 | 7391 |
| CaYLR009W | 392 | 1392 | 2392 | 3392 | 4392 | 5392 | 6392 | 7392 |
| CaYLR022C | 393 | 1393 | 2393 | 3393 | 4393 | 5393 | 6393 | 7393 |
| CaYLR026C | 394 | 1394 | 2394 | 3394 | 4394 | 5394 | 6394 | 7394 |
| CaYLR051C | 395 | 1395 | 2395 | 3395 | 4395 | 5395 | 6395 | 7395 |
| CaYLR060W | 396 | 1396 | 2396 | 3396 | 4396 | 5396 | 6396 | 7396 |
| CaYLR078C | 397 | 1397 | 2397 | 3397 | 4397 | 5397 | 6397 | 7397 |
| CaYLR100W | 398 | 1398 | 2398 | 3398 | 4398 | 5398 | 6398 | 7398 |
| CaYLR116W | 399 | 1399 | 2399 | 3399 | 4399 | 5399 | 6399 | 7399 |
| CaYLR117C | 400 | 1400 | 2400 | 3400 | 4400 | 5400 | 6400 | 7400 |
| CaYLR129W | 401 | 1401 | 2401 | 3401 | 4401 | 5401 | 6401 | 7401 |
| CaYLR147C | 402 | 1402 | 2402 | 3402 | 4402 | 5402 | 6402 | 7402 |
| CaYLR153C | 403 | 1403 | 2403 | 3403 | 4403 | 5403 | 6403 | 7403 |
| CaYLR163C | 404 | 1404 | 2404 | 3404 | 4404 | 5404 | 6404 | 7404 |
| CaYLR175W | 405 | 1405 | 2405 | 3405 | 4405 | 5405 | 6405 | 7405 |
| CaYLR186W | 406 | 1406 | 2406 | 3406 | 4406 | 5406 | 6406 | 7406 |
| CaYLR197W | 407 | 1407 | 2407 | 3407 | 4407 | 5407 | 6407 | 7407 |
| CaYLR208W | 408 | 1408 | 2408 | 3408 | 4408 | 5408 | 6408 | 7408 |
| CaYLR222C | 409 | 1409 | 2409 | 3409 | 4409 | 5409 | 6409 | 7409 |
| CaYLR259C | 410 | 1410 | 2410 | 3410 | 4410 | 5410 | 6410 | 7410 |
| CaYLR276C | 411 | 1411 | 2411 | 3411 | 4411 | 5411 | 6411 | 7411 |
| CaYLR277C | 412 | 1412 | 2412 | 3412 | 4412 | 5412 | 6412 | 7412 |
| CaYLR291C | 413 | 1413 | 2413 | 3413 | 4413 | 5413 | 6413 | 7413 |
| CaYLR293C | 414 | 1414 | 2414 | 3414 | 4414 | 5414 | 6414 | 7414 |
| CaYLR347C | 415 | 1415 | 2415 | 3415 | 4415 | 5415 | 6415 | 7415 |
| CaYLR378C | 416 | 1416 | 2416 | 3416 | 4416 | 5416 | 6416 | 7416 |
| CaYLR397C | 417 | 1417 | 2417 | 3417 | 4417 | 5417 | 6417 | 7417 |
| CaYML064C | 418 | 1418 | 2418 | 3418 | 4418 | 5418 | 6418 | 7418 |
| CaYML069W | 419 | 1419 | 2419 | 3419 | 4419 | 5419 | 6419 | 7419 |
| CaYML092C | 420 | 1420 | 2420 | 3420 | 4420 | 5420 | 6420 | 7420 |
| CaYML093W | 421 | 1421 | 2421 | 3421 | 4421 | 5421 | 6421 | 7421 |
| CaYML125C | 422 | 1422 | 2422 | 3422 | 4422 | 5422 | 6422 | 7422 |
| CaYML126C | 423 | 1423 | 2423 | 3423 | 4423 | 5423 | 6423 | 7423 |
| CaYMR113W | 424 | 1424 | 2424 | 3424 | 4424 | 5424 | 6424 | 7424 |
| CaYMR131C | 425 | 1425 | 2425 | 3425 | 4425 | 5425 | 6425 | 7425 |
| CaYMR146C | 426 | 1426 | 2426 | 3426 | 4426 | 5426 | 6426 | 7426 |
| CaYMR208W | 427 | 1427 | 2427 | 3427 | 4427 | 5427 | 6427 | 7427 |
| CaYMR213W | 428 | 1428 | 2428 | 3428 | 4428 | 5428 | 6428 | 7428 |
| CaYMR240C | 429 | 1429 | 2429 | 3429 | 4429 | 5429 | 6429 | 7429 |
| CaYMR260C | 430 | 1430 | 2430 | 3430 | 4430 | 5430 | 6430 | 7430 |
| CaYMR308C | 431 | 1431 | 2431 | 3431 | 4431 | 5431 | 6431 | 7431 |
| CaYMR314W | 432 | 1432 | 2432 | 3432 | 4432 | 5432 | 6432 | 7432 |
| CaYNL002C | 433 | 1433 | 2433 | 3433 | 4433 | 5433 | 6433 | 7433 |
| CaYNL006W | 434 | 1434 | 2434 | 3434 | 4434 | 5434 | 6434 | 7434 |
| CaYNL061W | 435 | 1435 | 2435 | 3435 | 4435 | 5435 | 6435 | 7435 |
| CaYNL102W | 436 | 1436 | 2436 | 3436 | 4436 | 5436 | 6436 | 7436 |
| CaYNL113W | 437 | 1437 | 2437 | 3437 | 4437 | 5437 | 6437 | 7437 |
| CaYNL178W | 438 | 1438 | 2438 | 3438 | 4438 | 5438 | 6438 | 7438 |
| CaYNL189W | 439 | 1439 | 2439 | 3439 | 4439 | 5439 | 6439 | 7439 |
| CaYNL244C | 440 | 1440 | 2440 | 3440 | 4440 | 5440 | 6440 | 7440 |
| CaYNL247W | 441 | 1441 | 2441 | 3441 | 4441 | 5441 | 6441 | 7441 |
| CaYNL287W | 442 | 1442 | 2442 | 3442 | 4442 | 5442 | 6442 | 7442 |
| CaYNR043W | 443 | 1443 | 2443 | 3443 | 4443 | 5443 | 6443 | 7443 |
| CaYOL005C | 444 | 1444 | 2444 | 3444 | 4444 | 5444 | 6444 | 7444 |
| CaYOL010W | 445 | 1445 | 2445 | 3445 | 4445 | 5445 | 6445 | 7445 |
| CaYOL094C | 446 | 1446 | 2446 | 3446 | 4446 | 5446 | 6446 | 7446 |
| CaYOL139C | 447 | 1447 | 2447 | 3447 | 4447 | 5447 | 6447 | 7447 |
| CaYOR048C | 448 | 1448 | 2448 | 3448 | 4448 | 5448 | 6448 | 7448 |
| CaYOR056C | 449 | 1449 | 2449 | 3449 | 4449 | 5449 | 6449 | 7449 |
| CaYOR063W | 450 | 1450 | 2450 | 3450 | 4450 | 5450 | 6450 | 7450 |
| CaYOR103C | 451 | 1451 | 2451 | 3451 | 4451 | 5451 | 6451 | 7451 |
| CaYOR116C | 452 | 1452 | 2452 | 3452 | 4452 | 5452 | 6452 | 7452 |
| CaYOR117W | 453 | 1453 | 2453 | 3453 | 4453 | 5453 | 6453 | 7453 |
| CaYOR151C | 454 | 1454 | 2454 | 3454 | 4454 | 5454 | 6454 | 7454 |
| CaYOR157C | 455 | 1455 | 2455 | 3455 | 4455 | 5455 | 6455 | 7455 |
| CaYOR159C | 456 | 1456 | 2456 | 3456 | 4456 | 5456 | 6456 | 7456 |
| CaYOR168W | 457 | 1457 | 2457 | 3457 | 4457 | 5457 | 6457 | 7457 |
| CaYOR194C | 458 | 1458 | 2458 | 3458 | 4458 | 5458 | 6458 | 7458 |
| CaYOR207C | 459 | 1459 | 2459 | 3459 | 4459 | 5459 | 6459 | 7459 |
| CaYOR210W | 460 | 1460 | 2460 | 3460 | 4460 | 5460 | 6460 | 7460 |
| CaYOR217W | 461 | 1461 | 2461 | 3461 | 4461 | 5461 | 6461 | 7461 |
| CaYOR224C | 462 | 1462 | 2462 | 3462 | 4462 | 5462 | 6462 | 7462 |
| CaYOR232W | 463 | 1463 | 2463 | 3463 | 4463 | 5463 | 6463 | 7463 |
| CaYOR259C | 464 | 1464 | 2464 | 3464 | 4464 | 5464 | 6464 | 7464 |
| CaYOR261C | 465 | 1465 | 2465 | 3465 | 4465 | 5465 | 6465 | 7465 |
| CaYOR272W | 466 | 1466 | 2466 | 3466 | 4466 | 5466 | 6466 | 7466 |
| CaYOR294W | 467 | 1467 | 2467 | 3467 | 4467 | 5467 | 6467 | 7467 |
| CaYOR310C | 468 | 1468 | 2468 | 3468 | 4468 | 5468 | 6468 | 7468 |
| CaYOR335C | 469 | 1469 | 2469 | 3469 | 4469 | 5469 | 6469 | 7469 |
| CaYOR341W | 470 | 1470 | 2470 | 3470 | 4470 | 5470 | 6470 | 7470 |
| CaYPL010W | 471 | 1471 | 2471 | 3471 | 4471 | 5471 | 6471 | 7471 |
| CaYPL076W | 472 | 1472 | 2472 | 3472 | 4472 | 5472 | 6472 | 7472 |
| CaYPL094C | 473 | 1473 | 2473 | 3473 | 4473 | 5473 | 6473 | 7473 |
| CaYPL117C | 474 | 1474 | 2474 | 3474 | 4474 | 5474 | 6474 | 7474 |
| CaYPL122C | 475 | 1475 | 2475 | 3475 | 4475 | 5475 | 6475 | 7475 |
| CaYPL131W | 476 | 1476 | 2476 | 3476 | 4476 | 5476 | 6476 | 7476 |
| CaYPL211W | 477 | 1477 | 2477 | 3477 | 4477 | 5477 | 6477 | 7477 |
| CaYPL235W | 478 | 1478 | 2478 | 3478 | 4478 | 5478 | 6478 | 7478 |
| CaYPL252C | 479 | 1479 | 2479 | 3479 | 4479 | 5479 | 6479 | 7479 |
| CaYPR019W | 480 | 1480 | 2480 | 3480 | 4480 | 5480 | 6480 | 7480 |
| CaYPR025C | 481 | 1481 | 2481 | 3481 | 4481 | 5481 | 6481 | 7481 |
| CaYPR034W | 482 | 1482 | 2482 | 3482 | 4482 | 5482 | 6482 | 7482 |
| CaYPR055W | 483 | 1483 | 2483 | 3483 | 4483 | 5483 | 6483 | 7483 |
| CaYPR056W | 484 | 1484 | 2484 | 3484 | 4484 | 5484 | 6484 | 7484 |
| CaYPR082C | 485 | 1485 | 2485 | 3485 | 4485 | 5485 | 6485 | 7485 |
| CaYPR103W | 486 | 1486 | 2486 | 3486 | 4486 | 5486 | 6486 | 7486 |
| CaYPR107C | 487 | 1487 | 2487 | 3487 | 4487 | 5487 | 6487 | 7487 |
| CaYPR108W | 488 | 1488 | 2488 | 3488 | 4488 | 5488 | 6488 | 7488 |
| CaYPR110C | 489 | 1489 | 2489 | 3489 | 4489 | 5489 | 6489 | 7489 |
| CaYPR113W | 490 | 1490 | 2490 | 3490 | 4490 | 5490 | 6490 | 7490 |
| CaYPR176C | 491 | 1491 | 2491 | 3491 | 4491 | 5491 | 6491 | 7491 |
| CaYPR183W | 492 | 1492 | 2492 | 3492 | 4492 | 5492 | 6492 | 7492 |
| CaYPR186C | 493 | 1493 | 2493 | 3493 | 4493 | 5493 | 6493 | 7493 |
| CaYPR187W | 494 | 1494 | 2494 | 3494 | 4494 | 5494 | 6494 | 7494 |
| CaYGL123W | 495 | 1495 | 2495 | 3495 | 4495 | 5495 | 6495 | 7495 |
| CaYHR042W | 496 | 1496 | 2496 | 3496 | 4496 | 5496 | 6496 | 7496 |
| CaYIL062C | 497 | 1497 | 2497 | 3497 | 4497 | 5497 | 6497 | 7497 |
| CaYJR042W | 498 | 1498 | 2498 | 3498 | 4498 | 5498 | 6498 | 7498 |
| CaYJR063W | 499 | 1499 | 2499 | 3499 | 4499 | 5499 | 6499 | 7499 |
| CaYJR076C | 500 | 1500 | 2500 | 3500 | 4500 | 5500 | 6500 | 7500 |
| CaYKL013C | 501 | 1501 | 2501 | 3501 | 4501 | 5501 | 6501 | 7501 |
| CaYLR196W | 502 | 1502 | 2502 | 3502 | 4502 | 5502 | 6502 | 7502 |
| CaYLR272C | 503 | 1503 | 2503 | 3503 | 4503 | 5503 | 6503 | 7503 |
| CaYNR035C | 504 | 1504 | 2504 | 3504 | 4504 | 5504 | 6504 | 7504 |
| CaYPR088C | 505 | 1505 | 2505 | 3505 | 4505 | 5505 | 6505 | 7505 |
| CaYDR397C | 506 | 1506 | 2506 | 3506 | 4506 | 5506 | 6506 | 7506 |
| CaYAL032C | 507 | 1507 | 2507 | 3507 | 4507 | 5507 | 6507 | 7507 |
| CaYBR060C | 508 | 1508 | 2508 | 3508 | 4508 | 5508 | 6508 | 7508 |
| CaYBR154C | 509 | 1509 | 2509 | 3509 | 4509 | 5509 | 6509 | 7509 |
| CaYDL028C | 510 | 1510 | 2510 | 3510 | 4510 | 5510 | 6510 | 7510 |
| CaYDR088C | 511 | 1511 | 2511 | 3511 | 4511 | 5511 | 6511 | 7511 |
| CaYDR235W | 512 | 1512 | 2512 | 3512 | 4512 | 5512 | 6512 | 7512 |
| CaYDR267C | 513 | 1513 | 2513 | 3513 | 4513 | 5513 | 6513 | 7513 |
| CaYDR460W | 514 | 1514 | 2514 | 3514 | 4514 | 5514 | 6514 | 7514 |
| CaYEL032W | 515 | 1515 | 2515 | 3515 | 4515 | 5515 | 6515 | 7515 |
| CaYER013W | 516 | 1516 | 2516 | 3516 | 4516 | 5516 | 6516 | 7516 |
| CaYER048W-A | 517 | 1517 | 2517 | 3517 | 4517 | 5517 | 6517 | 7517 |
| CaYER172C | 518 | 1518 | 2518 | 3518 | 4518 | 5518 | 6518 | 7518 |
| CaYFR031C | 519 | 1519 | 2519 | 3519 | 4519 | 5519 | 6519 | 7519 |
| CaYGL065C | 520 | 1520 | 2520 | 3520 | 4520 | 5520 | 6520 | 7520 |
| CaYGL073W | 521 | 1521 | 2521 | 3521 | 4521 | 5521 | 6521 | 7521 |
| CaYGL091C | 522 | 1522 | 2522 | 3522 | 4522 | 5522 | 6522 | 7522 |
| CaYGL103W | 523 | 1523 | 2523 | 3523 | 4523 | 5523 | 6523 | 7523 |
| CaYGL116W | 524 | 1524 | 2524 | 3524 | 4524 | 5524 | 6524 | 7524 |
| CaYGL201C | 525 | 1525 | 2525 | 3525 | 4525 | 5525 | 6525 | 7525 |
| CaYGL245W | 526 | 1526 | 2526 | 3526 | 4526 | 5526 | 6526 | 7526 |
| CaYGL247W | 527 | 1527 | 2527 | 3527 | 4527 | 5527 | 6527 | 7527 |
| CaYGR047C | 528 | 1528 | 2528 | 3528 | 4528 | 5528 | 6528 | 7528 |
| CaYGR074W | 529 | 1529 | 2529 | 3529 | 4529 | 5529 | 6529 | 7529 |
| CaYGR083C | 530 | 1530 | 2530 | 3530 | 4530 | 5530 | 6530 | 7530 |
| CaYGR128C | 531 | 1531 | 2531 | 3531 | 4531 | 5531 | 6531 | 7531 |
| CaYHR074W | 532 | 1532 | 2532 | 3532 | 4532 | 5532 | 6532 | 7532 |
| CaYHR107C | 533 | 1533 | 2533 | 3533 | 4533 | 5533 | 6533 | 7533 |
| CaYIL126W | 534 | 1534 | 2534 | 3534 | 4534 | 5534 | 6534 | 7534 |
| CaYJL010C | 535 | 1535 | 2535 | 3535 | 4535 | 5535 | 6535 | 7535 |
| CaYJL011C | 536 | 1536 | 2536 | 3536 | 4536 | 5536 | 6536 | 7536 |
| CaYJL026W | 537 | 1537 | 2537 | 3537 | 4537 | 5537 | 6537 | 7537 |
| CaYJL039C | 538 | 1538 | 2538 | 3538 | 4538 | 5538 | 6538 | 7538 |
| CaYJL041W | 539 | 1539 | 2539 | 3539 | 4539 | 5539 | 6539 | 7539 |
| CaYJR045C | 540 | 1540 | 2540 | 3540 | 4540 | 5540 | 6540 | 7540 |
| CaYKL049C | 541 | 1541 | 2541 | 3541 | 4541 | 5541 | 6541 | 7541 |
| CaYKL152C | 542 | 1542 | 2542 | 3542 | 4542 | 5542 | 6542 | 7542 |
| CaYKL181W | 543 | 1543 | 2543 | 3543 | 4543 | 5543 | 6543 | 7543 |
| CaYLR086W | 544 | 1544 | 2544 | 3544 | 4544 | 5544 | 6544 | 7544 |
| CaYLR115W | 545 | 1545 | 2545 | 3545 | 4545 | 5545 | 6545 | 7545 |
| CaYLR223C | 546 | 1546 | 2546 | 3546 | 4546 | 5546 | 6546 | 7546 |
| CaYLR274W | 547 | 1547 | 2547 | 3547 | 4547 | 5547 | 6547 | 7547 |
| CaYLR336C | 548 | 1548 | 2548 | 3548 | 4548 | 5548 | 6548 | 7548 |
| CaYML065W | 549 | 1549 | 2549 | 3549 | 4549 | 5549 | 6549 | 7549 |
| CaYML098W | 550 | 1550 | 2550 | 3550 | 4550 | 5550 | 6550 | 7550 |
| CaYMR043W | 551 | 1551 | 2551 | 3551 | 4551 | 5551 | 6551 | 7551 |
| CaYMR112C | 552 | 1552 | 2552 | 3552 | 4552 | 5552 | 6552 | 7552 |
| CaYMR281W | 553 | 1553 | 2553 | 3553 | 4553 | 5553 | 6553 | 7553 |
| CaYMR288W | 554 | 1554 | 2554 | 3554 | 4554 | 5554 | 6554 | 7554 |
| CaYMR290C | 555 | 1555 | 2555 | 3555 | 4555 | 5555 | 6555 | 7555 |
| CaYMR309C | 556 | 1556 | 2556 | 3556 | 4556 | 5556 | 6556 | 7556 |
| CaYNL039W | 557 | 1557 | 2557 | 3557 | 4557 | 5557 | 6557 | 7557 |
| CaYNL110C | 558 | 1558 | 2558 | 3558 | 4558 | 5558 | 6558 | 7558 |
| CaYNL221C | 559 | 1559 | 2559 | 3559 | 4559 | 5559 | 6559 | 7559 |
| CaYNL317W | 560 | 1560 | 2560 | 3560 | 4560 | 5560 | 6560 | 7560 |
| CaYNR053C | 561 | 1561 | 2561 | 3561 | 4561 | 5561 | 6561 | 7561 |
| CaYOL038W | 562 | 1562 | 2562 | 3562 | 4562 | 5562 | 6562 | 7562 |
| CaYOR095C | 563 | 1563 | 2563 | 3563 | 4563 | 5563 | 6563 | 7563 |
| CaYOR204W | 564 | 1564 | 2564 | 3564 | 4564 | 5564 | 6564 | 7564 |
| CaYOR249C | 565 | 1565 | 2565 | 3565 | 4565 | 5565 | 6565 | 7565 |
| CaYOR250C | 566 | 1566 | 2566 | 3566 | 4566 | 5566 | 6566 | 7566 |
| CaYOR257W | 567 | 1567 | 2567 | 3567 | 4567 | 5567 | 6567 | 7567 |
| CaYOR370C | 568 | 1568 | 2568 | 3568 | 4568 | 5568 | 6568 | 7568 |
| CaYPL151C | 569 | 1569 | 2569 | 3569 | 4569 | 5569 | 6569 | 7569 |
| CaYPL204W | 570 | 1570 | 2570 | 3570 | 4570 | 5570 | 6570 | 7570 |
| CaYPL209C | 571 | 1571 | 2571 | 3571 | 4571 | 5571 | 6571 | 7571 |
| CaYPL242C | 572 | 1572 | 2572 | 3572 | 4572 | 5572 | 6572 | 7572 |
| CaYPR048W | 573 | 1573 | 2573 | 3573 | 4573 | 5573 | 6573 | 7573 |
| CaYPR086W | 574 | 1574 | 2574 | 3574 | 4574 | 5574 | 6574 | 7574 |
| CaYPR178W | 575 | 1575 | 2575 | 3575 | 4575 | 5575 | 6575 | 7575 |
| CaYIL109C | 576 | 1576 | 2576 | 3576 | 4576 | 5576 | 6576 | 7576 |
| CaYKL045W | 577 | 1577 | 2577 | 3577 | 4577 | 5577 | 6577 | 7577 |
| CaYLR316C | 578 | 1578 | 2578 | 3578 | 4578 | 5578 | 6578 | 7578 |
| CaYBR087W | 579 | 1579 | 2579 | 3579 | 4579 | 5579 | 6579 | 7579 |
| CaYGR048W | 580 | 1580 | 2580 | 3580 | 4580 | 5580 | 6580 | 7580 |
| CaYPL169C | 581 | 1581 | 2581 | 3581 | 4581 | 5581 | 6581 | 7581 |
| CaYGR186W | 582 | 1582 | 2582 | 3582 | 4582 | 5582 | 6582 | 7582 |
| CaYNL131W | 583 | 1583 | 2583 | 3583 | 4583 | 5583 | 6583 | 7583 |
| CaYLR088W | 584 | 1584 | 2584 | 3584 | 4584 | 5584 | 6584 | 7584 |
| CaYKL193C | 585 | 1585 | 2585 | 3585 | 4585 | 5585 | 6585 | 7585 |
| CaYJR007W | 586 | 1586 | 2586 | 3586 | 4586 | 5586 | 6586 | 7586 |
| CaYJL034W | 587 | 1587 | 2587 | 3587 | 4587 | 5587 | 6587 | 7587 |
| CaYDL207W | 588 | 1588 | 2588 | 3588 | 4588 | 5588 | 6588 | 7588 |
| CaYDL017W | 589 | 1589 | 2589 | 3589 | 4589 | 5589 | 6589 | 7589 |
| CaYAL035W | 590 | 1590 | 2590 | 3590 | 4590 | 5590 | 6590 | 7590 |
| CaYBR038W | 591 | 1591 | 2591 | 3591 | 4591 | 5591 | 6591 | 7591 |
| CaYBR159W | 592 | 1592 | 2592 | 3592 | 4592 | 5592 | 6592 | 7592 |
| CaYDR120C | 593 | 1593 | 2593 | 3593 | 4593 | 5593 | 6593 | 7593 |
| CaYER070W | 594 | 1594 | 2594 | 3594 | 4594 | 5594 | 6594 | 7594 |
| CaYGL003C | 595 | 1595 | 2595 | 3595 | 4595 | 5595 | 6595 | 7595 |
| CaYGL206C | 596 | 1596 | 2596 | 3596 | 4596 | 5596 | 6596 | 7596 |
| CaYAL043C | 597 | 1597 | 2597 | 3597 | 4597 | 5597 | 6597 | 7597 |
| CaYBL097W | 598 | 1598 | 2598 | 3598 | 4598 | 5598 | 6598 | 7598 |
| CaYBL105C | 599 | 1599 | 2599 | 3599 | 4599 | 5599 | 6599 | 7599 |
| CaYBR079C | 600 | 1600 | 2600 | 3600 | 4600 | 5600 | 6600 | 7600 |
| CaYBR088C | 601 | 1601 | 2601 | 3601 | 4601 | 5601 | 6601 | 7601 |
| CaYDL145C | 602 | 1602 | 2602 | 3602 | 4602 | 5602 | 6602 | 7602 |
| CaYDL166C | 603 | 1603 | 2603 | 3603 | 4603 | 5603 | 6603 | 7603 |
| CaYDR145W | 604 | 1604 | 2604 | 3604 | 4604 | 5604 | 6604 | 7604 |
| CaYDR170C | 605 | 1605 | 2605 | 3605 | 4605 | 5605 | 6605 | 7605 |
| CaYDR301W | 606 | 1606 | 2606 | 3606 | 4606 | 5606 | 6606 | 7606 |
| CaYDR531W | 607 | 1607 | 2607 | 3607 | 4607 | 5607 | 6607 | 7607 |
| CaYFL024C | 608 | 1608 | 2608 | 3608 | 4608 | 5608 | 6608 | 7608 |
| CaYFR002W | 609 | 1609 | 2609 | 3609 | 4609 | 5609 | 6609 | 7609 |
| CaYGR264C | 610 | 1610 | 2610 | 3610 | 4610 | 5610 | 6610 | 7610 |
| CaYHR023W | 611 | 1611 | 2611 | 3611 | 4611 | 5611 | 6611 | 7611 |
| CaYHR027C | 612 | 1612 | 2612 | 3612 | 4612 | 5612 | 6612 | 7612 |
| CaYJL008C | 613 | 1613 | 2613 | 3613 | 4613 | 5613 | 6613 | 7613 |
| CaYJL033W | 614 | 1614 | 2614 | 3614 | 4614 | 5614 | 6614 | 7614 |
| CaYJL054W | 615 | 1615 | 2615 | 3615 | 4615 | 5615 | 6615 | 7615 |
| CaYJL109C | 616 | 1616 | 2616 | 3616 | 4616 | 5616 | 6616 | 7616 |
| CaYJL125C | 617 | 1617 | 2617 | 3617 | 4617 | 5617 | 6617 | 7617 |
| CaYJL156C | 618 | 1618 | 2618 | 3618 | 4618 | 5618 | 6618 | 7618 |
| CaYJR002W | 619 | 1619 | 2619 | 3619 | 4619 | 5619 | 6619 | 7619 |
| CaYKL192C | 620 | 1620 | 2620 | 3620 | 4620 | 5620 | 6620 | 7620 |
| CaYLL034C | 621 | 1621 | 2621 | 3621 | 4621 | 5621 | 6621 | 7621 |
| CaYLR029C | 622 | 1622 | 2622 | 3622 | 4622 | 5622 | 6622 | 7622 |
| CaYLR167W | 623 | 1623 | 2623 | 3623 | 4623 | 5623 | 6623 | 7623 |
| CaYLR243W | 624 | 1624 | 2624 | 3624 | 4624 | 5624 | 6624 | 7624 |
| CaYLR249W | 625 | 1625 | 2625 | 3625 | 4625 | 5625 | 6625 | 7625 |
| CaYLR321C | 626 | 1626 | 2626 | 3626 | 4626 | 5626 | 6626 | 7626 |
| CaYLR383W | 627 | 1627 | 2627 | 3627 | 4627 | 5627 | 6627 | 7627 |
| CaYMR239C | 628 | 1628 | 2628 | 3628 | 4628 | 5628 | 6628 | 7628 |
| CaYNL088W | 629 | 1629 | 2629 | 3629 | 4629 | 5629 | 6629 | 7629 |
| CaYNL163C | 630 | 1630 | 2630 | 3630 | 4630 | 5630 | 6630 | 7630 |
| CaYNR038W | 631 | 1631 | 2631 | 3631 | 4631 | 5631 | 6631 | 7631 |
| CaYOL097C | 632 | 1632 | 2632 | 3632 | 4632 | 5632 | 6632 | 7632 |
| CaYOR260W | 633 | 1633 | 2633 | 3633 | 4633 | 5633 | 6633 | 7633 |
| CaYPL028W | 634 | 1634 | 2634 | 3634 | 4634 | 5634 | 6634 | 7634 |
| CaYPL153C | 635 | 1635 | 2635 | 3635 | 4635 | 5635 | 6635 | 7635 |
| CaYPL210C | 636 | 1636 | 2636 | 3636 | 4636 | 5636 | 6636 | 7636 |
| CaYPL217C | 637 | 1637 | 2637 | 3637 | 4637 | 5637 | 6637 | 7637 |
| CaYPR010C | 638 | 1638 | 2638 | 3638 | 4638 | 5638 | 6638 | 7638 |
| CaYPR144C | 639 | 1639 | 2639 | 3639 | 4639 | 5639 | 6639 | 7639 |
| CaYPR169W | 640 | 1640 | 2640 | 3640 | 4640 | 5640 | 6640 | 7640 |
| CaYDL140C | 641 | 1641 | 2641 | 3641 | 4641 | 5641 | 6641 | 7641 |
| CaYDL031W | 642 | 1642 | 2642 | 3642 | 4642 | 5642 | 6642 | 7642 |
| CaYHR186C | 643 | 1643 | 2643 | 3643 | 4643 | 5643 | 6643 | 7643 |
| CaYPL093W | 644 | 1644 | 2644 | 3644 | 4644 | 5644 | 6644 | 7644 |
| CaYKL035W | 645 | 1645 | 2645 | 3645 | 4645 | 5645 | 6645 | 7645 |
| CaYDL058W | 646 | 1646 | 2646 | 3646 | 4646 | 5646 | 6646 | 7646 |
| CaYDR341C | 647 | 1647 | 2647 | 3647 | 4647 | 5647 | 6647 | 7647 |
| CaYGL238W | 648 | 1648 | 2648 | 3648 | 4648 | 5648 | 6648 | 7648 |
| CaYFR028C | 649 | 1649 | 2649 | 3649 | 4649 | 5649 | 6649 | 7649 |
| CaYNL172W | 650 | 1650 | 2650 | 3650 | 4650 | 5650 | 6650 | 7650 |
| CaYDR190C | 651 | 1651 | 2651 | 3651 | 4651 | 5651 | 6651 | 7651 |
| CaYEL055C | 652 | 1652 | 2652 | 3652 | 4652 | 5652 | 6652 | 7652 |
| CaYPR041W | 653 | 1653 | 2653 | 3653 | 4653 | 5653 | 6653 | 7653 |
| CaYGR255C | 654 | 1654 | 2654 | 3654 | 4654 | 5654 | 6654 | 7654 |
| CaYBR055C | 655 | 1655 | 2655 | 3655 | 4655 | 5655 | 6655 | 7655 |
| CaYER022W | 656 | 1656 | 2656 | 3656 | 4656 | 5656 | 6656 | 7656 |
| CaYKL014C | 657 | 1657 | 2657 | 3657 | 4657 | 5657 | 6657 | 7657 |
| CaYIL046W | 658 | 1658 | 2658 | 3658 | 4658 | 5658 | 6658 | 7658 |
| CaYMR015C | 659 | 1659 | 2659 | 3659 | 4659 | 5659 | 6659 | 7659 |
| CaYNL280C | 660 | 1660 | 2660 | 3660 | 4660 | 5660 | 6660 | 7660 |
| CaYML075C | 661 | 1661 | 2661 | 3661 | 4661 | 5661 | 6661 | 7661 |
| CaYCR042C | 662 | 1662 | 2662 | 3662 | 4662 | 5662 | 6662 | 7662 |
| CaYMR235C | 663 | 1663 | 2663 | 3663 | 4663 | 5663 | 6663 | 7663 |
| CaYIL026C | 664 | 1664 | 2664 | 3664 | 4664 | 5664 | 6664 | 7664 |
| CaYPL085W | 665 | 1665 | 2665 | 3665 | 4665 | 5665 | 6665 | 7665 |
| CaYGR005C | 666 | 1666 | 2666 | 3666 | 4666 | 5666 | 6666 | 7666 |
| CaYOL144W | 667 | 1667 | 2667 | 3667 | 4667 | 5667 | 6667 | 7667 |
| CaYHR005C | 668 | 1668 | 2668 | 3668 | 4668 | 5668 | 6668 | 7668 |
| CaYGR013W | 669 | 1669 | 2669 | 3669 | 4669 | 5669 | 6669 | 7669 |
| CaYIL115C | 670 | 1670 | 2670 | 3670 | 4670 | 5670 | 6670 | 7670 |
| CaYGR147C | 671 | 1671 | 2671 | 3671 | 4671 | 5671 | 6671 | 7671 |
| CaYOR336W | 672 | 1672 | 2672 | 3672 | 4672 | 5672 | 6672 | 7672 |
| CaYPR159W | 673 | 1673 | 2673 | 3673 | 4673 | 5673 | 6673 | 7673 |
| CaYJL174W | 674 | 1674 | 2674 | 3674 | 4674 | 5674 | 6674 | 7674 |
| CaYOL130W | 675 | 1675 | 2675 | 3675 | 4675 | 5675 | 6675 | 7675 |
| CaYNL048W | 676 | 1676 | 2676 | 3676 | 4676 | 5676 | 6676 | 7676 |
| CaYER007W | 677 | 1677 | 2677 | 3677 | 4677 | 5677 | 6677 | 7677 |
| CaYGL106W | 678 | 1678 | 2678 | 3678 | 4678 | 5678 | 6678 | 7678 |
| CaYDL102W | 679 | 1679 | 2679 | 3679 | 4679 | 5679 | 6679 | 7679 |
| CaYDL007W | 680 | 1680 | 2680 | 3680 | 4680 | 5680 | 6680 | 7680 |
| CaYER031C | 681 | 1681 | 2681 | 3681 | 4681 | 5681 | 6681 | 7681 |
| CaYDR226W | 682 | 1682 | 2682 | 3682 | 4682 | 5682 | 6682 | 7682 |
| CaYOR349W | 683 | 1683 | 2683 | 3683 | 4683 | 5683 | 6683 | 7683 |
| CaYNL148C | 684 | 1684 | 2684 | 3684 | 4684 | 5684 | 6684 | 7684 |
| CaYPR119W | 685 | 1685 | 2685 | 3685 | 4685 | 5685 | 6685 | 7685 |
| CaYMR055C | 686 | 1686 | 2686 | 3686 | 4686 | 5686 | 6686 | 7686 |
| CaYFL018C | 687 | 1687 | 2687 | 3687 | 4687 | 5687 | 6687 | 7687 |
| CaYNL238W | 688 | 1688 | 2688 | 3688 | 4688 | 5688 | 6688 | 7688 |
| CaYPL231W | 689 | 1689 | 2689 | 3689 | 4689 | 5689 | 6689 | 7689 |
| CaYNL025C | 690 | 1690 | 2690 | 3690 | 4690 | 5690 | 6690 | 7690 |
| CaYJL141C | 691 | 1691 | 2691 | 3691 | 4691 | 5691 | 6691 | 7691 |
| CaYLR306W | 692 | 1692 | 2692 | 3692 | 4692 | 5692 | 6692 | 7692 |
| CaYLR300W | 693 | 1693 | 2693 | 3693 | 4693 | 5693 | 6693 | 7693 |
| CaYKL046C | 694 | 1694 | 2694 | 3694 | 4694 | 5694 | 6694 | 7694 |
| CaYDR311W | 695 | 1695 | 2695 | 3695 | 4695 | 5695 | 6695 | 7695 |
| CaYDR449C | 696 | 1696 | 2696 | 3696 | 4696 | 5696 | 6696 | 7696 |
| CaYER023W | 697 | 1697 | 2697 | 3697 | 4697 | 5697 | 6697 | 7697 |
| CaYGL040C | 698 | 1698 | 2698 | 3698 | 4698 | 5698 | 6698 | 7698 |
| CaYGR009C | 699 | 1699 | 2699 | 3699 | 4699 | 5699 | 6699 | 7699 |
| CaYNR003C | 700 | 1700 | 2700 | 3700 | 4700 | 5700 | 6700 | 7700 |
| CaYOL066C | 701 | 1701 | 2701 | 3701 | 4701 | 5701 | 6701 | 7701 |
| CaYOR119C | 702 | 1702 | 2702 | 3702 | 4702 | 5702 | 6702 | 7702 |
| CaYMR049C | 703 | 1703 | 2703 | 3703 | 4703 | 5703 | 6703 | 7703 |
| CaYNR050C | 704 | 1704 | 2704 | 3704 | 4704 | 5704 | 6704 | 7704 |
| CaYPL203W | 705 | 1705 | 2705 | 3705 | 4705 | 5705 | 6705 | 7705 |
| CaYER113C | 706 | 1706 | 2706 | 3706 | 4706 | 5706 | 6706 | 7706 |
| CaYOR280C | 707 | 1707 | 2707 | 3707 | 4707 | 5707 | 6707 | 7707 |
| CaYGR006W | 708 | 1708 | 2708 | 3708 | 4708 | 5708 | 6708 | 7708 |
| CaYJL122W | 709 | 1709 | 2709 | 3709 | 4709 | 5709 | 6709 | 7709 |
| CaORF6_3320 | 710 | 1710 | 2710 | 3710 | 4710 | 5710 | 6710 | 7710 |
| CaORF6_7574 | 711 | 1711 | 2711 | 3711 | 4711 | 5711 | 6711 | 7711 |
| CaORF6_6275 | 712 | 1712 | 2712 | 3712 | 4712 | 5712 | 6712 | 7712 |
| CaORF6_1979 | 713 | 1713 | 2713 | 3713 | 4713 | 5713 | 6713 | 7713 |
| CaORF6_8942 | 714 | 1714 | 2714 | 3714 | 4714 | 5714 | 6714 | 7714 |
| CaYJL153C | 715 | 1715 | 2715 | 3715 | 4715 | 5715 | 6715 | 7715 |
| CaYNL277W | 716 | 1716 | 2716 | 3716 | 4716 | 5716 | 6716 | 7716 |
| CaYIL104C | 717 | 1717 | 2717 | 3717 | 4717 | 5717 | 6717 | 7717 |
| CaYOL027C | 718 | 1718 | 2718 | 3718 | 4718 | 5718 | 6718 | 7718 |
| CaYJL134W | 719 | 1719 | 2719 | 3719 | 4719 | 5719 | 6719 | 7719 |
| CaYLL012W | 720 | 1720 | 2720 | 3720 | 4720 | 5720 | 6720 | 7720 |
| CaORF6_7779 | 721 | 1721 | 2721 | 3721 | 4721 | 5721 | 6721 | 7721 |
| CaORF6_3262 | 722 | 1722 | 2722 | 3722 | 4722 | 5722 | 6722 | 7722 |
| CaORF6_7304 | 723 | 1723 | 2723 | 3723 | 4723 | 5723 | 6723 | 7723 |
| CaORF6_2028 | 724 | 1724 | 2724 | 3724 | 4724 | 5724 | 6724 | 7724 |
| CaORF6_1717 | 725 | 1725 | 2725 | 3725 | 4725 | 5725 | 6725 | 7725 |
| CaORF6_1780 | 726 | 1726 | 2726 | 3726 | 4726 | 5726 | 6726 | 7726 |
| CaORF6_1932 | 727 | 1727 | 2727 | 3727 | 4727 | 5727 | 6727 | 7727 |
| CaORF6_1934 | 728 | 1728 | 2728 | 3728 | 4728 | 5728 | 6728 | 7728 |
| CaORF6_2193 | 729 | 1729 | 2729 | 3729 | 4729 | 5729 | 6729 | 7729 |
| CaORF6_2398 | 730 | 1730 | 2730 | 3730 | 4730 | 5730 | 6730 | 7730 |
| orf6.3168 | 731 | 1731 | 2731 | 3731 | 4731 | 5731 | 6731 | 7731 |
| orf6.3295 | 732 | 1732 | 2732 | 3732 | 4732 | 5732 | 6732 | 7732 |
| orf6.3939 | 733 | 1733 | 2733 | 3733 | 4733 | 5733 | 6733 | 7733 |
| orf6.4497 | 734 | 1734 | 2734 | 3734 | 4734 | 5734 | 6734 | 7734 |
| orf6.4499 | 735 | 1735 | 2735 | 3735 | 4735 | 5735 | 6735 | 7735 |
| orf6.4537 | 736 | 1736 | 2736 | 3736 | 4736 | 5736 | 6736 | 7736 |
| orf6.4747 | 737 | 1737 | 2737 | 3737 | 4737 | 5737 | 6737 | 7737 |
| orf6.4899 | 738 | 1738 | 2738 | 3738 | 4738 | 5738 | 6738 | 7738 |
| orf6.4974 | 739 | 1739 | 2739 | 3739 | 4739 | 5739 | 6739 | 7739 |
| orf6.5147 | 740 | 1740 | 2740 | 3740 | 4740 | 5740 | 6740 | 7740 |
| orf6.5199 | 741 | 1741 | 2741 | 3741 | 4741 | 5741 | 6741 | 7741 |
| orf6.5210 | 742 | 1742 | 2742 | 3742 | 4742 | 5742 | 6742 | 7742 |
| orf6.5520 | 743 | 1743 | 2743 | 3743 | 4743 | 5743 | 6743 | 7743 |
| orf6.569 | 744 | 1744 | 2744 | 3744 | 4744 | 5744 | 6744 | 7744 |
| orf6.5739 | 745 | 1745 | 2745 | 3745 | 4745 | 5745 | 6745 | 7745 |
| orf6.6011 | 746 | 1746 | 2746 | 3746 | 4746 | 5746 | 6746 | 7746 |
| orf6.7375 | 747 | 1747 | 2747 | 3747 | 4747 | 5747 | 6747 | 7747 |
| orf6.7629 | 748 | 1748 | 2748 | 3748 | 4748 | 5748 | 6748 | 7748 |
| orf6.8025 | 749 | 1749 | 2749 | 3749 | 4749 | 5749 | 6749 | 7749 |
| orf6.804 | 750 | 1750 | 2750 | 3750 | 4750 | 5750 | 6750 | 7750 |
| orf6.8362 | 751 | 1751 | 2751 | 3751 | 4751 | 5751 | 6751 | 7751 |
| orf6.8377 | 752 | 1752 | 2752 | 3752 | 4752 | 5752 | 6752 | 7752 |
| orf6.8395 | 753 | 1753 | 2753 | 3753 | 4753 | 5753 | 6753 | 7753 |
| orf6.8482 | 754 | 1754 | 2754 | 3754 | 4754 | 5754 | 6754 | 7754 |
| orf6.8837 | 755 | 1755 | 2755 | 3755 | 4755 | 5755 | 6755 | 7755 |
| orf6.889 | 756 | 1756 | 2756 | 3756 | 4756 | 5756 | 6756 | 7756 |
| orf6.8938 | 757 | 1757 | 2757 | 3757 | 4757 | 5757 | 6757 | 7757 |
| orf6.9113 | 758 | 1758 | 2758 | 3758 | 4758 | 5758 | 6758 | 7758 |
| CaLYS4 | 759 | 1759 | 2759 | 3759 | 4759 | 5759 | 6759 | 7759 |
| CaTRP5 | 760 | 1760 | 2760 | 3760 | 4760 | 5760 | 6760 | 7760 |
| CaPRO1 | 761 | 1761 | 2761 | 3761 | 4761 | 5761 | 6761 | 7761 |
| CaPBS2 | 762 | 1762 | 2762 | 3762 | 4762 | 5762 | 6762 | 7762 |
| CaYBL041W | 763 | 1763 | 2763 | 3763 | 4763 | 5763 | 6763 | 7763 |
| CaYBR170C | 764 | 1764 | 2764 | 3764 | 4764 | 5764 | 6764 | 7764 |
| CaYDR188W | 765 | 1765 | 2765 | 3765 | 4765 | 5765 | 6765 | 7765 |
| CaYGR098C | 766 | 1766 | 2766 | 3766 | 4766 | 5766 | 6766 | 7766 |
| CaYGR267C | 767 | 1767 | 2767 | 3767 | 4767 | 5767 | 6767 | 7767 |
| CaYGR274C | 768 | 1768 | 2768 | 3768 | 4768 | 5768 | 6768 | 7768 |
| CaYJL002C | 769 | 1769 | 2769 | 3769 | 4769 | 5769 | 6769 | 7769 |
| CaYKL125W | 770 | 1770 | 2770 | 3770 | 4770 | 5770 | 6770 | 7770 |
| CaYLL035W | 771 | 1771 | 2771 | 3771 | 4771 | 5771 | 6771 | 7771 |
| CaYPL016W | 772 | 1772 | 2772 | 3772 | 4772 | 5772 | 6772 | 7772 |
| CaYPL218W | 773 | 1773 | 2773 | 3773 | 4773 | 5773 | 6773 | 7773 |
| CaYKL141W | 774 | 1774 | 2774 | 3774 | 4774 | 5774 | 6774 | 7774 |
| CaYHR174W | 775 | 1775 | 2775 | 3775 | 4775 | 5775 | 6775 | 7775 |
| CaYDR356W | 776 | 1776 | 2776 | 3776 | 4776 | 5776 | 6776 | 7776 |
| CaYNL124W | 777 | 1777 | 2777 | 3777 | 4777 | 5777 | 6777 | 7777 |
| CaYAL015C | 778 | 1778 | 2778 | 3778 | 4778 | 5778 | 6778 | 7778 |
| CaYBR001C | 779 | 1779 | 2779 | 3779 | 4779 | 5779 | 6779 | 7779 |
| CaYCL035C | 780 | 1780 | 2780 | 3780 | 4780 | 5780 | 6780 | 7780 |
| CaYCR048W | 781 | 1781 | 2781 | 3781 | 4781 | 5781 | 6781 | 7781 |
| CaYDR379W | 782 | 1782 | 2782 | 3782 | 4782 | 5782 | 6782 | 7782 |
| CaYER059W | 783 | 1783 | 2783 | 3783 | 4783 | 5783 | 6783 | 7783 |
| CaYGR070W | 784 | 1784 | 2784 | 3784 | 4784 | 5784 | 6784 | 7784 |
| CaYGR209C | 785 | 1785 | 2785 | 3785 | 4785 | 5785 | 6785 | 7785 |
| orf6.1498 | 786 | 1786 | 2786 | 3786 | 4786 | 5786 | 6786 | 7786 |
| orf6.2086 | 787 | 1787 | 2787 | 3787 | 4787 | 5787 | 6787 | 7787 |
| orf6.3026 | 788 | 1788 | 2788 | 3788 | 4788 | 5788 | 6788 | 7788 |
| orf6.3261 | 789 | 1789 | 2789 | 3789 | 4789 | 5789 | 6789 | 7789 |
| orf6.3819 | 790 | 1790 | 2790 | 3790 | 4790 | 5790 | 6790 | 7790 |
| orf6.3864 | 791 | 1791 | 2791 | 3791 | 4791 | 5791 | 6791 | 7791 |
| orf6.3972 | 792 | 1792 | 2792 | 3792 | 4792 | 5792 | 6792 | 7792 |
| orf6.4005 | 793 | 1793 | 2793 | 3793 | 4793 | 5793 | 6793 | 7793 |
| orf6.4010 | 794 | 1794 | 2794 | 3794 | 4794 | 5794 | 6794 | 7794 |
| orf6.4114 | 795 | 1795 | 2795 | 3795 | 4795 | 5795 | 6795 | 7795 |
| orf6.4153 | 796 | 1796 | 2796 | 3796 | 4796 | 5796 | 6796 | 7796 |
| orf6.4206 | 797 | 1797 | 2797 | 3797 | 4797 | 5797 | 6797 | 7797 |
| orf6.4293 | 798 | 1798 | 2798 | 3798 | 4798 | 5798 | 6798 | 7798 |
| orf6.4463 | 799 | 1799 | 2799 | 3799 | 4799 | 5799 | 6799 | 7799 |
| orf6.4555 | 800 | 1800 | 2800 | 3800 | 4800 | 5800 | 6800 | 7800 |
| orf6.4628 | 801 | 1801 | 2801 | 3801 | 4801 | 5801 | 6801 | 7801 |
| orf6.4837 | 802 | 1802 | 2802 | 3802 | 4802 | 5802 | 6802 | 7802 |
| orf6.4854 | 803 | 1803 | 2803 | 3803 | 4803 | 5803 | 6803 | 7803 |
| orf6.4923 | 804 | 1804 | 2804 | 3804 | 4804 | 5804 | 6804 | 7804 |
| orf6.4927 | 805 | 1805 | 2805 | 3805 | 4805 | 5805 | 6805 | 7805 |
| orf6.5092 | 806 | 1806 | 2806 | 3806 | 4806 | 5806 | 6806 | 7806 |
| orf6.5279 | 807 | 1807 | 2807 | 3807 | 4807 | 5807 | 6807 | 7807 |
| orf6.5786 | 808 | 1808 | 2808 | 3808 | 4808 | 5808 | 6808 | 7808 |
| orf6.5919 | 809 | 1809 | 2809 | 3809 | 4809 | 5809 | 6809 | 7809 |
| orf6.5920 | 810 | 1810 | 2810 | 3810 | 4810 | 5810 | 6810 | 7810 |
| orf6.6022 | 811 | 1811 | 2811 | 3811 | 4811 | 5811 | 6811 | 7811 |
| orf6.6026 | 812 | 1812 | 2812 | 3812 | 4812 | 5812 | 6812 | 7812 |
| orf6.6030 | 813 | 1813 | 2813 | 3813 | 4813 | 5813 | 6813 | 7813 |
| orf6.6069 | 814 | 1814 | 2814 | 3814 | 4814 | 5814 | 6814 | 7814 |
| orf6.6140 | 815 | 1815 | 2815 | 3815 | 4815 | 5815 | 6815 | 7815 |
| orf6.6218 | 816 | 1816 | 2816 | 3816 | 4816 | 5816 | 6816 | 7816 |
| orf6.6390 | 817 | 1817 | 2817 | 3817 | 4817 | 5817 | 6817 | 7817 |
| orf6.6550 | 818 | 1818 | 2818 | 3818 | 4818 | 5818 | 6818 | 7818 |
| orf6.6562 | 819 | 1819 | 2819 | 3819 | 4819 | 5819 | 6819 | 7819 |
| orf6.6660 | 820 | 1820 | 2820 | 3820 | 4820 | 5820 | 6820 | 7820 |
| orf6.6664 | 821 | 1821 | 2821 | 3821 | 4821 | 5821 | 6821 | 7821 |
| orf6.6670 | 822 | 1822 | 2822 | 3822 | 4822 | 5822 | 6822 | 7822 |
| orf6.6700 | 823 | 1823 | 2823 | 3823 | 4823 | 5823 | 6823 | 7823 |
| orf6.6933 | 824 | 1824 | 2824 | 3824 | 4824 | 5824 | 6824 | 7824 |
| orf6.6939 | 825 | 1825 | 2825 | 3825 | 4825 | 5825 | 6825 | 7825 |
| orf6.7203 | 826 | 1826 | 2826 | 3826 | 4826 | 5826 | 6826 | 7826 |
| orf6.7214 | 827 | 1827 | 2827 | 3827 | 4827 | 5827 | 6827 | 7827 |
| orf6.7847 | 828 | 1828 | 2828 | 3828 | 4828 | 5828 | 6828 | 7828 |
| orf6.7893 | 829 | 1829 | 2829 | 3829 | 4829 | 5829 | 6829 | 7829 |
| orf6.8239 | 830 | 1830 | 2830 | 3830 | 4830 | 5830 | 6830 | 7830 |
| orf6.8461 | 831 | 1831 | 2831 | 3831 | 4831 | 5831 | 6831 | 7831 |
| orf6.8607 | 832 | 1832 | 2832 | 3832 | 4832 | 5832 | 6832 | 7832 |
| orf6.8654 | 833 | 1833 | 2833 | 3833 | 4833 | 5833 | 6833 | 7833 |
| orf6.8716 | 834 | 1834 | 2834 | 3834 | 4834 | 5834 | 6834 | 7834 |
| CaYPR198W | 835 | 1835 | 2835 | 3835 | 4835 | 5835 | 6835 | 7835 |
| orf6.1031 | 836 | 1836 | 2836 | 3836 | 4836 | 5836 | 6836 | 7836 |
| orf6.1035 | 837 | 1837 | 2837 | 3837 | 4837 | 5837 | 6837 | 7837 |
| orf6.1302 | 838 | 1838 | 2838 | 3838 | 4838 | 5838 | 6838 | 7838 |
| orf6.1752 | 839 | 1839 | 2839 | 3839 | 4839 | 5839 | 6839 | 7839 |
| orf6.2119 | 840 | 1840 | 2840 | 3840 | 4840 | 5840 | 6840 | 7840 |
| orf6.2277 | 841 | 1841 | 2841 | 3841 | 4841 | 5841 | 6841 | 7841 |
| orf6.2355 | 842 | 1842 | 2842 | 3842 | 4842 | 5842 | 6842 | 7842 |
| orf6.2417 | 843 | 1843 | 2843 | 3843 | 4843 | 5843 | 6843 | 7843 |
| orf6.2463 | 844 | 1844 | 2844 | 3844 | 4844 | 5844 | 6844 | 7844 |
| orf6.2715 | 845 | 1845 | 2845 | 3845 | 4845 | 5845 | 6845 | 7845 |
| orf6.2865 | 846 | 1846 | 2846 | 3846 | 4846 | 5846 | 6846 | 7846 |
| orf6.3078 | 847 | 1847 | 2847 | 3847 | 4847 | 5847 | 6847 | 7847 |
| orf6.3170 | 848 | 1848 | 2848 | 3848 | 4848 | 5848 | 6848 | 7848 |
| orf6.3203 | 849 | 1849 | 2849 | 3849 | 4849 | 5849 | 6849 | 7849 |
| orf6.3517 | 850 | 1850 | 2850 | 3850 | 4850 | 5850 | 6850 | 7850 |
| orf6.3623 | 851 | 1851 | 2851 | 3851 | 4851 | 5851 | 6851 | 7851 |
| orf6.3676 | 852 | 1852 | 2852 | 3852 | 4852 | 5852 | 6852 | 7852 |
| orf6.3804 | 853 | 1853 | 2853 | 3853 | 4853 | 5853 | 6853 | 7853 |
| orf6.4003 | 854 | 1854 | 2854 | 3854 | 4854 | 5854 | 6854 | 7854 |
| orf6.4037 | 855 | 1855 | 2855 | 3855 | 4855 | 5855 | 6855 | 7855 |
| orf6.4386 | 856 | 1856 | 2856 | 3856 | 4856 | 5856 | 6856 | 7856 |
| orf6.4898 | 857 | 1857 | 2857 | 3857 | 4857 | 5857 | 6857 | 7857 |
| orf6.5286 | 858 | 1858 | 2858 | 3858 | 4858 | 5858 | 6858 | 7858 |
| orf6.5335 | 859 | 1859 | 2859 | 3859 | 4859 | 5859 | 6859 | 7859 |
| orf6.5517 | 860 | 1860 | 2860 | 3860 | 4860 | 5860 | 6860 | 7860 |
| orf6.5752 | 861 | 1861 | 2861 | 3861 | 4861 | 5861 | 6861 | 7861 |
| orf6.7453 | 862 | 1862 | 2862 | 3862 | 4862 | 5862 | 6862 | 7862 |
| orf6.7500 | 863 | 1863 | 2863 | 3863 | 4863 | 5863 | 6863 | 7863 |
| orf6.7621 | 864 | 1864 | 2864 | 3864 | 4864 | 5864 | 6864 | 7864 |
| orf6.7699 | 865 | 1865 | 2865 | 3865 | 4865 | 5865 | 6865 | 7865 |
| orf6.7983 | 866 | 1866 | 2866 | 3866 | 4866 | 5866 | 6866 | 7866 |
| orf6.8076 | 867 | 1867 | 2867 | 3867 | 4867 | 5867 | 6867 | 7867 |
| orf6.8143 | 868 | 1868 | 2868 | 3868 | 4868 | 5868 | 6868 | 7868 |
| orf6.8690 | 869 | 1869 | 2869 | 3869 | 4869 | 5869 | 6869 | 7869 |
| orf6.9105 | 870 | 1870 | 2870 | 3870 | 4870 | 5870 | 6870 | 7870 |
| orf6.1740 | 871 | 1871 | 2871 | 3871 | 4871 | 5871 | 6871 | 7871 |
| orf6.2265 | 872 | 1872 | 2872 | 3872 | 4872 | 5872 | 6872 | 7872 |
| orf6.2307 | 873 | 1873 | 2873 | 3873 | 4873 | 5873 | 6873 | 7873 |
| orf6.2584 | 874 | 1874 | 2874 | 3874 | 4874 | 5874 | 6874 | 7874 |
| orf6.2709 | 875 | 1875 | 2875 | 3875 | 4875 | 5875 | 6875 | 7875 |
| orf6.2898 | 876 | 1876 | 2876 | 3876 | 4876 | 5876 | 6876 | 7876 |
| orf6.3102 | 877 | 1877 | 2877 | 3877 | 4877 | 5877 | 6877 | 7877 |
| orf6.3507 | 878 | 1878 | 2878 | 3878 | 4878 | 5878 | 6878 | 7878 |
| orf6.3754 | 879 | 1879 | 2879 | 3879 | 4879 | 5879 | 6879 | 7879 |
| orf6.3955 | 880 | 1880 | 2880 | 3880 | 4880 | 5880 | 6880 | 7880 |
| orf6.4050 | 881 | 1881 | 2881 | 3881 | 4881 | 5881 | 6881 | 7881 |
| orf6.4735 | 882 | 1882 | 2882 | 3882 | 4882 | 5882 | 6882 | 7882 |
| orf6.4748 | 883 | 1883 | 2883 | 3883 | 4883 | 5883 | 6883 | 7883 |
| orf6.4766 | 884 | 1884 | 2884 | 3884 | 4884 | 5884 | 6884 | 7884 |
| orf6.5263 | 885 | 1885 | 2885 | 3885 | 4885 | 5885 | 6885 | 7885 |
| orf6.5701 | 886 | 1886 | 2886 | 3886 | 4886 | 5886 | 6886 | 7886 |
| orf6.5918 | 887 | 1887 | 2887 | 3887 | 4887 | 5887 | 6887 | 7887 |
| orf6.6139 | 888 | 1888 | 2888 | 3888 | 4888 | 5888 | 6888 | 7888 |
| orf6.6214 | 889 | 1889 | 2889 | 3889 | 4889 | 5889 | 6889 | 7889 |
| orf6.6250 | 890 | 1890 | 2890 | 3890 | 4890 | 5890 | 6890 | 7890 |
| orf6.6255 | 891 | 1891 | 2891 | 3891 | 4891 | 5891 | 6891 | 7891 |
| orf6.6561 | 892 | 1892 | 2892 | 3892 | 4892 | 5892 | 6892 | 7892 |
| orf6.6665 | 893 | 1893 | 2893 | 3893 | 4893 | 5893 | 6893 | 7893 |
| orf6.6753 | 894 | 1894 | 2894 | 3894 | 4894 | 5894 | 6894 | 7894 |
| orf6.6768 | 895 | 1895 | 2895 | 3895 | 4895 | 5895 | 6895 | 7895 |
| orf6.6808 | 896 | 1896 | 2896 | 3896 | 4896 | 5896 | 6896 | 7896 |
| orf6.6921 | 897 | 1897 | 2897 | 3897 | 4897 | 5897 | 6897 | 7897 |
| orf6.6972 | 898 | 1898 | 2898 | 3898 | 4898 | 5898 | 6898 | 7898 |
| orf6.6993 | 899 | 1899 | 2899 | 3899 | 4899 | 5899 | 6899 | 7899 |
| orf6.6997 | 900 | 1900 | 2900 | 3900 | 4900 | 5900 | 6900 | 7900 |
| orf6.7164 | 901 | 1901 | 2901 | 3901 | 4901 | 5901 | 6901 | 7901 |
| orf6.7180 | 902 | 1902 | 2902 | 3902 | 4902 | 5902 | 6902 | 7902 |
| orf6.7314 | 903 | 1903 | 2903 | 3903 | 4903 | 5903 | 6903 | 7903 |
| orf6.7478 | 904 | 1904 | 2904 | 3904 | 4904 | 5904 | 6904 | 7904 |
| orf6.7883 | 905 | 1905 | 2905 | 3905 | 4905 | 5905 | 6905 | 7905 |
| orf6.7923 | 906 | 1906 | 2906 | 3906 | 4906 | 5906 | 6906 | 7906 |
| orf6.8232 | 907 | 1907 | 2907 | 3907 | 4907 | 5907 | 6907 | 7907 |
| orf6.8441 | 908 | 1908 | 2908 | 3908 | 4908 | 5908 | 6908 | 7908 |
| orf6.8465 | 909 | 1909 | 2909 | 3909 | 4909 | 5909 | 6909 | 7909 |
| orf6.8543 | 910 | 1910 | 2910 | 3910 | 4910 | 5910 | 6910 | 7910 |
| orf6.8747 | 911 | 1911 | 2911 | 3911 | 4911 | 5911 | 6911 | 7911 |
| orf6.8766 | 912 | 1912 | 2912 | 3912 | 4912 | 5912 | 6912 | 7912 |
| orf6.8967 | 913 | 1913 | 2913 | 3913 | 4913 | 5913 | 6913 | 7913 |
| orf6.848 | 914 | 1914 | 2914 | 3914 | 4914 | 5914 | 6914 | 7914 |
| orf6.893 | 915 | 1915 | 2915 | 3915 | 4915 | 5915 | 6915 | 7915 |
| orf6.1000 | 916 | 1916 | 2916 | 3916 | 4916 | 5916 | 6916 | 7916 |
| orf6.1364 | 917 | 1917 | 2917 | 3917 | 4917 | 5917 | 6917 | 7917 |
| orf6.2113 | 918 | 1918 | 2918 | 3918 | 4918 | 5918 | 6918 | 7918 |
| orf6.2481 | 919 | 1919 | 2919 | 3919 | 4919 | 5919 | 6919 | 7919 |
| orf6.2565 | 920 | 1920 | 2920 | 3920 | 4920 | 5920 | 6920 | 7920 |
| orf6.3020 | 921 | 1921 | 2921 | 3921 | 4921 | 5921 | 6921 | 7921 |
| orf6.3597 | 922 | 1922 | 2922 | 3922 | 4922 | 5922 | 6922 | 7922 |
| orf6.6093 | 923 | 1923 | 2923 | 3923 | 4923 | 5923 | 6923 | 7923 |
| orf6.6260 | 924 | 1924 | 2924 | 3924 | 4924 | 5924 | 6924 | 7924 |
| orf6.6934 | 925 | 1925 | 2925 | 3925 | 4925 | 5925 | 6925 | 7925 |
| orf6.6946 | 926 | 1926 | 2926 | 3926 | 4926 | 5926 | 6926 | 7926 |
| orf6.2546 | 927 | 1927 | 2927 | 3927 | 4927 | 5927 | 6927 | 7927 |
| orf6.4262 | 928 | 1928 | 2928 | 3928 | 4928 | 5928 | 6928 | 7928 |
| orf6.4676 | 929 | 1929 | 2929 | 3929 | 4929 | 5929 | 6929 | 7929 |
| orf6.5777 | 930 | 1930 | 2930 | 3930 | 4930 | 5930 | 6930 | 7930 |
| orf6.7959 | 931 | 1931 | 2931 | 3931 | 4931 | 5931 | 6931 | 7931 |
| orf6.8887 | 932 | 1932 | 2932 | 3932 | 4932 | 5932 | 6932 | 7932 |

[0132] In one embodiment, the present invention provides the identities of 932 essential genes. Although the nucleotide sequence and the reading frame of a number of these genes are known, the fact that these genes are essential to the growth and/or survival of Candida albicans was not known until the inventors' discovery. Thus, the uses of these genes and their gene products are encompassed by the present invention. Also provided in Table II are SEQ ID NOs: that are used herein to identify the open reading frame, the deduced amino acid sequence and related oligonucleotide sequences for each identified essential gene. To facilitate correlation of the nucleotide sequence of each essential gene with its corresponding amino acid sequence and related oligonucleotide sequences, the sequence identifiers have been organized into eight blocks of each with one thousand SEQ ID numbers. Each block of SEQ ID numbers, which corresponds to a type of sequence, has 932 sequences with SEQ ID NOs., and 166 SEQ ID NOs. with no sequence which serve as place holders. Accordingly, the SEQ ID NO. for each of the eight related sequences of an essential gene are separated by 1000. For example, SEQ ID NOs: 1, 1001, 2001, 3001, 4001, 5001, 6001, and 7001 are directed to, respectively, the upstream and downstream knockout (KO) primers, upstream and downstream tet promoter primers, identification primers A and B, the nucleotide sequence of the coding region and the amino acid sequence of one essential gene, and in this example, the essential gene is CaYDL105W.

[0133] In accordance with the above numbering scheme, SEQ ID NOs: 6001 through to SEQ ID NO: 6932 each identifies a nucleotide sequence of the opening reading frame (ORF) of an identified essential gene. The nucleotide sequences labeled as SEQ ID NOs: 6001-6932 were obtained from a Candida albicans genomic sequence database version 6 assembled by the Candida albicans Sequencing Project and is accessible by internet at the web sites of Stanford University and University of Minnesota (See http://www-sequence.stanford.edu:8080/and http://alces.med.umn.edu/Candida.html).

[0134] The predicted amino acid sequence of the identified essential genes are set forth in SEQ ID NO: 7001 through to SEQ ID NO: 7932 which are obtained by conceptual translation of the nucleotide sequences of SEQ ID NOs: 6001 through to 6932 once the reading frame is determined. As it is well known in the art, the codon CTG is translated to a serine residue in C. albicans, instead of the usual leucine in other organisms. Accordingly, the conceptual translation of the ORF is performed using the codon usage of C. albicans.

[0135] The DNA sequences were generated by sequencing reactions and may contain minor errors which may exist as misidentified nucleotides, insertions, and/or deletions. However, such minor errors, if present, in the sequence database should not disturb the identification of an ORF as that of an essential gene of the invention. Since sequences of the ORFs are provided herein and can be used individually to uniquely identify the corresponding gene in the C. albicans genome, a clone of the gene corresponding to the ORFs can readily be isolated by any of several art-known methods. The sequencing can then be repeated to confirm the sequence or correct the error(s). The disclosure of the ORFs or a portion thereof essentially provides the complete gene by uniquely identifying the coding sequence in question, and providing sufficient guidance to obtain the complete cDNA or genomic sequence. The uses of an essential gene that corresponds to an ORF identified by the methods of the invention are not affected by the minor errors in the ORF.

[0136] For example, minor sequence errors and variation in splicing do not affect the construction of conditional-expression C. albicans mutant strains or GRACE strains based on the sequences provided herein, and the uses of those strains, since these methods do not require absolute sequence identity between the chromosomal DNA sequences and the sequences of the gene in the primers or recombinant DNA. In some instances, the correct reading frame of the C. albicans gene can be identified by comparing its overall amino acid sequence with known Saccharomyces cerevisiae sequences. Accordingly, the present invention encompasses C. albicans genes which correspond to the ORFs identified in the invention, polypeptides encoded by C. albicans genes which correspond to the ORFs identified in the invention, and the various uses of the polynucleotides and polypeptides of the genes which correspond to the ORFs of the invention. As used herein in referring to the relationship between a specified nucleotide sequence and a gene, the term “corresponds” or “corresponding” indicates that the specified sequence effectively identifies the gene. In general, correspondence is substantial sequence identity barring minor errors in sequencing, allelic variations and/or variations in splicing. Correspondence can be a transcriptional relationship between the gene sequence and the mRNA or a portion thereof which is transcribed from that gene. This correspondence is present also between portions of an mRNA which is not translated into polypeptide and DNA sequence of the gene.

[0137] SEQ ID NOs: 1-5932 identify oligonucleotide primers and probes that were designed for and used in the construction of the GRACE strain for the corresponding identified essential gene. (i.e., SEQ ID NOs: 1-932 are knockout upstream primers (KO-UP); SEQ ID NOs: 1001-1932 are knockout downstream primers (KO-Down); SEQ ID NOs: 2001-2932 are tetracycline promoter upstream primers (Tet-Up); SEQ ID NOs: 3001-3932 are tetracycline promoter downstream primers (Tet-Down); and SEQ ID NOs: 4001-4932, and 5001-5932 are primers for identification of the respective GRACE strains (primers A and B respectively). Therefore, each set of oligonucleotides can be used to identify a unique essential gene and a unique GRACE strain, e.g. by hybridization, or PCR.

[0138] The essential genes listed in Table II can be obtained using cloning methods well known to those of skill in the art, and include but are not limited to the use of appropriate probes to detect the genes within an appropriate cDNA or gDNA (genomic DNA) library. (See, for example, Sambrook et al., 1989, Molecular Cloning: A Laboratory Manual, Cold Spring Harbor Laboratories, which is incorporated herein by reference in its entirety.) Probes for the sequences identified herein can be synthesized based on the DNA sequences disclosed herein in SEQ ID NOs: 6001-6932.

[0139] As used herein, “target gene” (i.e., essential and/or virulence gene) refers to (a) a gene containing at least one of the DNA sequences and/or fragments thereof that are set forth in SEQ ID NO: 6001 through to SEQ ID NO: 6932; (b) any DNA sequence or fragment thereof that encodes the amino acid sequence that are set forth in SEQ ID NO: 7001 through to SEQ ID NO: 7932 using the universal genetic code or the codon usage of C. albicans; (c) any DNA sequence that hybridizes to the complement of the nucleotide sequences set forth in SEQ ID NO: 6001 through to SEQ ID NO: 6932 under stringent conditions, e.g., hybridization to filter-bound DNA in 6× sodium chloride/sodium citrate (SSC) at about 45° C. followed by one or more washes in 0.2×SSC/0.1% SDS at about 50-65° C., or under highly stringent conditions, e.g., hybridization to filter-bound nucleic acid in 6×SSC at about 45° C. followed by one or more washes in 0.1×SSC/0.2% SDS at about 68° C., or under other hybridization conditions which are apparent to those of skill in the art (see, for example, Ausubel, F. M. et al., eds., 1989, Current Protocols in Molecular Biology, Vol. I, Green Publishing Associates, Inc. and John Wiley & Sons, Inc., New York, at pp. 6.3.1-6.3.6 and 2.10.3). Preferably, the polynucleotides that hybridize to the complements of the DNA sequences disclosed herein encode gene products, e.g., gene products that are functionally equivalent to a gene product encoded by a target gene.

[0140] As described above, target gene sequences include not only degenerate nucleotide sequences that encode a polypeptide comprising or consisting essentially of one of the amino acid sequences of SEQ ID NO: 7001 through to SEQ ID NO: 7932 in C. albicans, but also degenerate nucleotide sequences that when translated in organisms other than C. albicans, would yield a polypeptide comprising or consisting essentially of one of the amino acid sequences of SEQ ID NO: 7001 through to SEQ ID NO: 7932, or a fragment thereof. One of skill in the art would know how to select the appropriate codons or modify the nucleotide sequences of SEQ ID NO: 6001 through to SEQ ID NO: 6932 when using the target gene sequences in C. albicans or in other organisms. Moreover, the term “target gene”, in certain embodiments, encompasses genes that are naturally occurring in Saccharomyces cerevisiae or variants thereof, that share extensive nucleotide sequence homology with C. albicans genes having one of the DNA sequences that are set forth in SEQ ID NO: 6001 through to SEQ ID NO: 6932, i.e., the orthologs in S. cerevisiae. It is contemplated that methods for drug screening that can be applied to C. albicans genes can also be applied to orthologs of the same genes in the non-pathogenic S. cerevisiae. However, in certain embodiments, target genes excluding genes of Saccharomyces cerevisiae are used.

[0141] In another embodiment, the invention also encompasses the following polynucleotides, host cells expressing such polynucleotides and the expression products of such nucleotides: (a) polynucleotides that encode portions of target gene product that corresponds to its functional domains, and the polypeptide products encoded by such nucleotide sequences, and in which, in the case of receptor-type gene products, such domains include, but are not limited to signal sequences, extracellular domains (ECD), transmembrane domains (TM) and cytoplasmic domains (CD); (b) polynucleotides that encode mutants of a target gene product, in which all or part of one of its domains is deleted or altered, and which, in the case of receptor-type gene products, such mutants include, but are not limited to, mature proteins in which the signal sequence is cleaved, soluble receptors in which all or a portion of the TM is deleted, and nonfunctional receptors in which all or a portion of CD is deleted; and (d) polynucleotides that encode fusion proteins containing a target gene product or one of its domains fused to another polypeptide.

[0142] The invention also includes polynucleotides, preferably DNA molecules, that hybridize to, and are therefore the complements of, the DNA sequences of the target gene sequences. Also included are polynucleotides that hybridize to the complement of the DNA sequences of the target genes. Such hybridization conditions can be highly stringent or less highly stringent, as described above and known in the art. The nucleic acid molecules of the invention that hybridize to the above described DNA sequences include oligodeoxynucleotides (“oligos”) which hybridize to the target gene under highly stringent or stringent conditions. In general, for oligos between 14 and 70 nucleotides in length the melting temperature (Tm) is calculated using the formula:

Tm(° C.)=81.5+16.6(log[monovalent cations (molar)]+0.41(% G+C)−(500/N)

[0143] where N is the length of the probe. If the hybridization is carried out in a solution containing formamide, the melting temperature may be calculated using the equation:

Tm(° C.)=81.5+16.6(log[monovalent cations (molar)])+0.41(% G+C)−(0.61)(% formamide)−(500/N).

[0144] where N is the length of the probe. In general, hybridization is carried out at about 20-25 degrees below Tm (for DNA-DNA hybrids) or about 10-15 degrees below Tm (for RNA-DNA hybrids). Other exemplary highly stringent conditions may refer, e.g., to washing in 6×SSC/0.05% sodium pyrophosphate at 37° C. (for 14-base oligos), 48° C. (for 17-base oligos), 55° C. (for 20-base oligos), and 60° C. (for 23-base oligos). Examples of such oligos are set forth in SEQ ID NOs: 4001 to 4932 and 5001 to 5932.

[0145] These nucleic acid molecules can encode or act as target gene antisense molecules, useful, for example, in target gene regulation and/or as antisense primers in amplification reactions of target gene nucleotide sequences. Further, such sequences can be used as part of ribozyme and/or triple helix sequences, also useful for target gene regulation. Still further, such molecules can be used as components of diagnostic methods whereby the presence of the pathogen can be detected. The uses of these nucleic acid molecules are discussed in detail below.

[0146] Fragments of the target genes of the invention can be at least 10 nucleotides in length. In alternative embodiments, the fragments can be about 20, 30, 40, 50, 60, 70, 80, 90, 100, 200, 300, 400, 500, 1000, 1500, 2000, 2500, 3000, 3500, 4000, 4500, 5000 or more contiguous nucleotides in length. Alternatively, the fragments can comprise nucleotide sequences that encode at least 10, 20, 30, 40, 50, 100, 150, 200, 250, 300, 350, 400, 450 or more contiguous amino acid residues of the target gene products. Fragments of the target genes of the invention can also refer to exons or introns of the above described nucleic acid molecules, as well as portions of the coding regions of such nucleic acid molecules that encode functional domains such as signal sequences, extracellular domains (ECD), transmembrane domains (TM) and cytoplasmic domains (CD).

[0147] To identify and characterize the essential genes of the invention, computer a algorithms are employed to perform searches in computer databases and comparative analysis, and the results of such analyses are stored in or displayed on a computer. Such computerized tools for analyzing sequence information are very useful in determining the relatedness of structure of genes and gene products with respect to other genes and gene products in the same species or a different species, and may provide putative functions to novel genes and their products. Biological information such as nucleotide and amino acid sequences are coded and represented as streams of data in a computer. As used here, the term “computer” includes but is not limited to personal computers, data terminals, computer workstations, networks, computerized storage and retrieval systems, and graphical displays for presentation of sequence information, and results of analyses. Typically, a computer comprises a data entry means, a display means, a programmable processing unit, and a data storage means. A “computer readable medium” can be used to store information such as sequence data, lists, and databases, and includes but is not limited to computer memory, magnetic storage devices, such as floppy discs and magnetic tapes, optical-magnetic storage devices, and optical storage devices, such as compact discs. Accordingly, the present invention also encompass a computer or a computer readable medium that comprises at least one nucleotide sequence selected from the group consisting of SEQ ID NOs: 1-932, 1001-1932, 2001-2932, 3001-3932, 4001-4932, 5001-5932, and 6001-6932, or at least one amino acid sequence selected from the group consisting of SEQ ID NOs: 7001-7932. In preferred embodiments, the sequences are curated and stored in a form with links to other annotations and biological information associated with the sequences. It is also an object of the invention to provide one or more computers programmed with instructions to perform sequence homology searching, sequence alignment, structure prediction and model construction, using the nucleotide sequences of the invention, preferably one or more nucleotide sequences selected from the group consisting of SEQ ID NO: SEQ ID NOs: 1-932, 1001-1932, 2001-2932, 3001-3932, 4001-4932, 5001-5932, and 6001-6932, and/or one or more amino acid sequence selected from the group consisting of SEQ ID NO: SEQ ID NOs: 7001-7932. Computers that comprise, and that can transmit and distribute the nucleotide and/or amino acid sequences of the invention are also contemplated. Also encompassed by the present invention are the uses of one or more nucleotide sequences selected from the group consisting of SEQ ID NOs: 1-932, 1001-1932, 2001-2932, 3001-3932, 4001-4932, 5001-5932, and 6001-6932, and/or one or more amino acid sequence selected from the group consisting of SEQ ID NOs: 7001-7932 in computer-assisted methods for identifying homologous sequences in public and private sequence databases, in computer-assisted methods for providing putative functional characteristics of a gene product based on structural homology with other gene products with known function(s), in computer-assisted methods of constructing a model of the gene product. In one specific embodiment, the invention encompasses a method assisted by a computer for identifying a putatively essential gene of a fungus, comprising detecting sequence homology between a fungal nucleotide sequence or fungal amino acid sequence with at least one nucleotide sequence selected from the group consisting of SEQ ID NOs: 1-932, 1001-1932, 2001-2932, 3001-3932, 4001-4932, 5001-5932, and 6001-6932, or at least one amino acid sequence selected from the group consisting of SEQ ID NOs: 7001-7932.

[0148] 5.4.2 Homologous Target Genes

[0149] In addition to the nucleotide sequences of Candida albicans described above, homologs or orthologs of these target gene sequences, as can be present in other species, can be identified and isolated by molecular biological techniques well known in the art, and without undue experimentation, used in the methods of the invention. For example, homologous target genes in Aspergillus fumigatus, Aspergillus flavus, Aspergillus niger, Coccidioides immitis, Cryptococcus neoformans, Histoplasma capsulatum, Phytophthora infestans, Puccinia seconditii, Pneumocystis carinii, or any species falling within the genera of any of the above species. Other yeasts in the genera of Candida, Saccharomyces, Schizosaccharomyces, Sporobolomyces, Torulopsis, Trichosporon, Tricophyton, Dermatophytes, Microsproum, Wickerhamia, Ashbya, Blastomyces, Candida, Citeromyces, Crebrothecium, Cryptococcus, Debaryomyces, Endomycopsis, Geotrichum, Hansenula, Kloeckera, Kluveromyces, Lipomyces, Pichia, Rhodosporidium, Rhodotorula, and Yarrowia are also contemplated. Also included are homologs of these target gene sequences can be identified in and isolated from animal fugal pathogens such as Aspergillus fumigatus, Aspergillus niger, Aspergillus flavis, Candida tropicalis, Candida parapsilopsis, Candida krusei, Cryptococcus neoformans, Coccidioides immitis, Exophalia dermatiditis, Fusarium oxysporum, Histoplasma capsulatum, Phneumocystis carinii, Trichosporon beigelii, Rhizopus arrhizus, Mucor rouxii, Rhizomucor pusillus, or Absidia corymbigera, or the plant fungal pathogens, such as Alternaria solanii, Botrytis cinerea, Erysiphe graminis, Magnaporthe grisea, Puccinia recodita, Sclerotinia sclerotiorum, Septoria triticii, Tilletia controversa, Ustilago maydis, Venturia inequalis, Verticullium dahliae or any species falling within the genera of any of the above species.

[0150] Accordingly, the present invention provides polynucleotides that comprise nucleotide sequences allowing them to hybridize to the polynucleotides of the target genes. In one embodiment, the present invention encompasses an isolated nucleic acid comprising a nucleotide sequence that is at least 50% identical to a nucleotide sequence selected from the group consisting of SEQ ID NO: 6001 through to SEQ ID NO: 6932, and that is of a species other than Saccharomyces cerevisiae and/or Candida albicans. In another embodiment, the present invention encompasses an isolated nucleic acid comprising a nucleotide sequence that hybridizes under medium stringency conditions to a second nucleic acid that consists of a nucleotide sequence selected from the group consisting of SEQ ID NO: 6001 through to SEQ ID NO: 6932, and that is of a species other than Saccharomyces cerevisiae and/or Candida albicans. In a specific embodiment, the nucleotide sequence that is at least 50% identical or hybridizes under medium stringency conditions to any one of the sequences SEQ ID NO: 6001 through to SEQ ID NO: 6932 is from Aspergillus fumigatus or Cryptococcus neoformans. In another specific embodiment, the nucleotide sequence that is at least 50% identical or hybridizes under medium stringency conditions to any one of the sequences SEQ ID NO: 6001 through to SEQ ID NO: 6932 is of a species other than Aspergillus fumigatus and/or Cryptococcus neoformans.

[0151] In yet another embodiment, the present invention includes an isolated nucleic acid comprising a nucleotide sequence that encodes a polypeptide the amino acid sequence of which is at least 50% identical to an amino acid sequence selected from the group consisting of SEQ ID NO. 7001 through to 7932, wherein the polypeptide is that of a species other than Saccharomyces cerevisiae and/or Candida albicans. In a specific embodiment, the amino acid sequence that is at least 50% identical to any one of the sequences SEQ ID NO: 7001 through to SEQ ID NO: 7932 is from Aspergillus fumigatus or Cryptococcus neoformans. In another specific embodiment, the amino acid sequence that is at least 50% identical to any one of the sequences SEQ ID NO: 7001 through to SEQ ID NO: 7932 is of a species other than Aspergillus fumigatus and/or Cryptococcus neoformans.

[0152] Although the nucleotide sequences and amino acid sequences of homologs or orthologs of the essential/virulence genes in S. cerevisiae are mostly published, uses of such homologs or orthologs in S. cerevisiae in drug screening are mostly not known and are thus specifically provided by the invention. To use such nucleotide and/or amino acid sequences of S. cerevisiae, public databases, such as Stanford Genomic Resources (www-genome.stanford.edu), Munich Information Centre for Protein Sequences (www.mips.biochem.mpg.de) or Proteome (www.proteome.com) may be used to identify and retrieve the sequences. Orthologs of S. cerevisiae can also be identified by hybridization assays using nucleic acid probes consisting of any one of the nucleotide sequences of SEQ ID NOs: 6001 to 6932.

[0153] The nucleotide sequences of the invention still further include nucleotide sequences that have at least 40%, 45%, 55%, 60%, 65%, 70%, 75%, 80%, 85%, 90%, 95%, 98% or more nucleotide sequence identity to the nucleotide sequences set forth in SEQ ID NO: 6001 through to SEQ ID NO: 6932. The nucleotide sequences of the invention also include nucleotide sequences that encode polypeptides having at least 25%, 30%, 40%, 50%, 55%, 60%, 65%, 70%, 75%, 80%, 85%, 90%, 95%, 98% or higher amino acid sequence identity or similarity to the amino acid sequences set forth in SEQ ID NOs: 7001 15 through to 7932.

[0154] To determine the percent identity of two amino acid sequences or of two nucleotide sequences, the sequences are aligned for optimal comparison purposes (e.g., gaps can be introduced in the sequence of a first amino acid or nucleotide sequence for optimal alignment with a second amino acid or nucleotide sequence). The amino acid residues or nucleotides at corresponding amino acid positions or nucleotide positions are then compared. When a position in the first sequence is occupied by the same amino acid residue or nucleotide as the corresponding position in the second sequence, then the molecules are identical at that position. The percent identity between the two sequences is a function of the number of identical positions shared by the sequences (i.e., % identity number of identical overlapping positions/total number of positions×100%). In one embodiment, the two sequences are the same length.

[0155] The determination of percent identity between two sequences can also be accomplished using a mathematical algorithm and computer-assisted methods. A preferred, non-limiting example of a mathematical algorithm utilized for the comparison of two sequences is the algorithm of Karlin and Altschul (1990) Proc. Natl. Acad. Sci. U.S.A. 87:2264-2268, modified as in Karlin and Altschul (1993) Proc. Natl. Acad. Sci. U.S.A. 90:5873-5877. Such an algorithm is incorporated into the NBLAST and XBLAST programs of Altschul et al., 1990, J. Mol. Biol. 215:403-0. BLAST nucleotide searches can be performed with the NBLAST nucleotide program parameters set, e.g., for score=100, wordlength=12 to obtain nucleotide sequences homologous to a nucleic acid molecules of the present invention. BLAST protein searches can be performed with the XBLAST program parameters set, e.g., to score-50, wordlength=3 to obtain amino acid sequences homologous to a protein molecule of the present invention. To obtain gapped alignments for comparison purposes, Gapped BLAST can be utilized as described in Altschul et al., 1997, Nucleic Acids Res. 25:3389-3402. Alternatively, PSI-BLAST can be used to perform an iterated search which detects distant relationships between molecules (Id.). When utilizing BLAST, Gapped BLAST, and PSI-Blast programs, the default parameters of the respective programs (e.g., of XBLAST and NBLAST) can be used (see, e.g., http://www.ncbi.nlm.nih.gov). Another preferred, non-limiting example of a mathematical algorithm utilized for the comparison of sequences is the algorithm of Myers and Miller, (1988) CABIOS 4:11-17. Such an algorithm is incorporated in the ALIGN program (version 2.0) which is part of the GCG sequence alignment software package. When utilizing the ALIGN program for comparing amino acid sequences, a PAM120 weight residue table, a gap length penalty of 12, and a gap penalty of 4 can be used. Any of these algorithms can be coded as a set of instructions for use in a computer that comprises the sequences of the invention.

[0156] To isolate homologous target genes, the C. albicans target gene sequence described above can be labeled and used to screen a cDNA library constructed from mRNA obtained from the organism of interest. Hybridization conditions should be of a lower stringency when the cDNA library was derived from an organism different from the type of organism from which the labeled sequence was derived. cDNA screening can also identify clones derived from alternatively spliced transcripts in the same or different species. Alternatively, the labeled fragment can be used to screen a genomic library derived from the organism of interest, again, using appropriately stringent conditions. Low stringency conditions will be well known to those of skill in the art, and will vary predictably depending on the specific organisms from which the library and the labeled sequences are derived. For guidance regarding such conditions see, for example, Sambrook et al., 1989, Molecular Cloning, A Laboratory Manual, Cold Spring Harbor Press, N.Y.; and Ausubel et al., 1989, Current Protocols in Molecular Biology, (Green Publishing Associates and Wiley Interscience, N.Y.).

[0157] Further, a homologous target gene sequence can be isolated by performing a polymerase chain reaction (PCR) using two degenerate oligonucleotide primer pools designed on the basis of amino acid sequences within the target gene of interest. The template for the reaction can be cDNA obtained by reverse transcription of mRNA prepared from the organism of interest. The PCR product can be subcloned and sequenced to ensure that the amplified sequences represent the sequences of a homologous target gene sequence.

[0158] The PCR fragment can then be used to isolate a full length cDNA clone by a variety of methods well known to those of ordinary skill in the art. Alternatively, the labeled fragment can be used to screen a genomic library.

[0159] PCR technology can also be utilized to isolate full length cDNA sequences. For example, RNA can be isolated, following standard procedures, from an organism of interest. A reverse transcription reaction can be performed on the RNA using an oligonucleotide primer specific for the most 5′ end of the amplified fragment for the priming of first strand synthesis. The resulting RNA/DNA hybrid can then be “tailed” with guanines using a standard terminal transferase reaction, the hybrid can be digested with RNAase H, and second strand synthesis can then be primed with a poly-C primer. Thus, cDNA sequences upstream of the amplified fragment can easily be isolated. For a review of cloning strategies which can be used, see e.g., Sambrook et al., 1989, Molecular Cloning, A Laboratory Manual, Cold Springs Harbor Press, N.Y.; and Ausubel et al., 1989, Current Protocols in Molecular Biology, (Green Publishing Associates and Wiley Interscience, N.Y.).

[0160] Additionally, an expression library can be constructed utilizing DNA isolated from or cDNA synthesized from the organism of interest. In this manner, gene products made by the homologous target gene can be expressed and screened using standard antibody screening techniques in conjunction with antibodies raised against the C. albicans gene product, as described, below. (For screening techniques, see, for example, Harlow, E. and Lane, eds., 1988, “Antibodies: A Laboratory Manual,” Cold Spring Harbor Press, Cold Spring Harbor). Library clones detected via their reaction with such labeled antibodies can be purified and subjected to sequence analysis by well known methods.

[0161] Alternatively, homologous target genes or polypeptides may be identified by searching a database to identify sequences having a desired level of homology to a target gene or polypeptide involved in proliferation, virulence or pathogenicity. A variety of such databases are available to those skilled in the art, including GenBank and GenSeq. In various embodiments, the databases are screened to identify nucleic acids with at least 97%, at least 95%, at least 90%, at least 85%, at least 80%, at least 70%, at least 60%, at least 50%, or at least 40% identity to a target nucleotide sequence, or a portion thereof. In other embodiments, the databases are screened to identify polypeptides having at least 99%, at least 95%, at least 90%, at least 85%, at least 80%, at least 70%, at least 60%, at least 50%, at least 40% or at least 25% identity or similarity to a polypeptide involved in proliferation, virulence or pathogenicity or a portion thereof.

[0162] Alternatively, functionally homologous target sequences or polypeptides may be identified by creating mutations that have phenotypes by removing or altering the function of a gene. This can be done for one or all genes in a given fungal species including, for example: Saccharomyces cerevisiae, Candida albicans, and Aspergillus fumigatus. Having mutants in the genes of one fungal species offers a method to identify functionally similar genes (orthologs) or related genes (paralogs) in another species, by use of a functional complementation test.

[0163] A library of gene or cDNA copies of messenger RNA of genes can be made from a given species, e.g. Candida albicans, and the library cloned into a vector permitting expression (for example, with the Candida albicans promoters or a Saccharomyces cerevisiae promoter) of the genes in a second species, e.g. Saccharomyces cerevisiae. Such a library is referred to as a “heterologous library.” Transformation of the Candida albicans heterologous library into a defined mutant of Saccharomyces cerevisiae that is functionally deficient with respect to the identified gene, and screening or selecting for a gene in the heterologous library that restores phenotypic function in whole or in part of the mutational defect is said to be “heterologous functional complementation” and in this example, permits identification of gene in Candida albicans that are functionally related to the mutated gene in Saccharomyces cerevisiae. Inherent in this functional-complementation method, is the ability to restore gene function without the requirement for sequence similarity of nucleic acids or polypeptides; that is, this method permits interspecific identification of genes with conserved biological function, even where sequence similarity comparisons fail to reveal or suggest such conservation.

[0164] In those instances in which the gene to be tested is an essential gene, a number of possibilities exist regarding performing heterologous functional complementation tests. The mutation in the essential gene can be a conditional allele, including but not limited to, a temperature-sensitive allele, an allele conditionally expressed from a regulatable promoter, or an allele that has been rendered the mRNA transcript or the encoded gene product conditionally unstable. Alternatively, the strain carrying a mutation in an essential gene can be propagated using a copy of the native gene (a wild type copy of the gene mutated from the same species) on a vector comprising a marker that can be selected against, permitting selection for those strains carrying few or no copies of the vector and the included wild type allele. A strain constructed in this manner is transformed with the heterologous library, and those clones in which a heterologous gene can functionally complement the essential gene mutation, are selected on medium non-permissive for maintenance of the plasmid carrying the wild type gene.

[0165] In the following example, the identification, by functional complementation, of a Candida albicans homolog of a Saccharomyces cerevisiae gene, KRE 9, is described. (Lussier et al. 1998, “The Candida albicans KRE 9 gene is required for cell wall β-1,6-glucan synthesis and is essential for growth on glucose,” Proc. Natl. Acad. Sci. USA 95: 9825-30). The host strain was a Saccharomyces cerevisiae haploid null mutant in KRE 9, kre 9::HIS3, which has a severe growth defect phenotype. The host strain carried a wild type copy of the native Saccharomyces cerevisiae KRE 9 gene on a LYS-2 based pRS317 shuttle vector and was transformed with a Candida albicans genomic library. This heterologous library was constructed using, as a vector, the multicopy plasmid YEp352, which carries the URA3 gene as a selectable marker. To screen for plasmids supporting growth of the kre 9::HIS 3 mutant host, approximately 20,000 colonies capable of growth in the absence of histidine, lysine, and uracil, were replica-plated onto minimal medium containing α-amino adipate as a nitrogen source to allow selection for cells that have lost the LYS2 plasmid-based copy of KRE 9 and that possess a copy of a functionally-complementing Candida albicans ortholog, CaKRE 9. These cells were tested further for loss of the pRS317-KRE 9 plasmid by their inability to grow in the absence of lysine, and YEp352-based Candida albicans genomic DNA was recovered from them. On retransformation of the Saccharomyces cerevisiae kre 9::HIS3 mutant, a specific genomic insert of 8 kb of Candida albicans was recovered that was able to restore growth partially. Following further subcloning using functional complementation for selection, a 1.6 kb DNA fragment was obtained that contained the functional Candida albicans KRE 9 gene.

[0166] A heterologous functional complementation test is not restricted to the exchange of genetic information between Candida albicans and Saccharomyces cerevisiae; functional complementation tests can be performed, as described above, using any pair of fungal species. For example, the CRE1 gene of the fungus Sclerotininia sclerotiorum can functionally complement the creAD30 mutant of the CREA gene of Aspergillus nidulans (see Vautard et al. 1999, “The glucose repressor gene CRE1 from Sclerotininia sclerotiorum is functionally related to CREA from Aspergillus nidulans but not to the Mig proteins from Saccharomyces cerevisiae,” FEBS Lett. 453: 54-58).

[0167] In yet another embodiment, where the source of nucleic acid deposited on a gene expression array and the source of the nucleic acid probe being hybridized to the array are from two different species of organisms, the results allow rapid identification of homologous genes in the two species.

[0168] In yet another embodiment, the invention also encompasses (a) DNA vectors that contain a nucleotide sequence comprising any of the foregoing coding sequences of the target gene and/or their complements (including antisense); (b) DNA expression vectors that contain a nucleotide sequence comprising any of the foregoing coding sequences operably linked with a regulatory element that directs the expression of the coding sequences; and (c) genetically engineered host cells that contain any of the foregoing coding sequences of the target gene operably linked with a regulatory element that directs the expression of the coding sequences in the host cell. Vectors, expression constructs, expression vectors, and genetically engineered host cells containing the coding sequences of homologous target genes of other species (excluding S. cerevisiae) are also contemplated. Also contemplated are genetically engineered host cells containing mutant alleles in homologous target genes of the other species. As used herein, regulatory elements include but are not limited to inducible and non-inducible promoters, enhancers, operators and other elements known to those skilled in the art that drive and regulate expression. Such regulatory elements include but are not limited to the lac system, the trp system, the tet system and other antibiotic-based repression systems (e.g. PIP), the TAC system, the TRC system, the major operator and promoter regions of phage A, the control regions of fd coat protein, and the fungal promoters for 3-phosphoglycerate kinase, acid phosphatase, the yeast mating pheromone responsive promoters (e.g. STE2 and STE3), and promoters isolated from genes involved in carbohydrate metabolism (e.g. GAL promoters), phosphate-responsive promoters (e.g. PHO5), or amino acid metabolism (e.g. MET genes). The invention includes fragments of any of the DNA vector sequences disclosed herein.

[0169] A variety of techniques can be utilized to further characterize the identified essential genes and virulence genes. First, the nucleotide sequence of the identified genes can be used to reveal homologies to one or more known sequence motifs which can yield information regarding the biological function of the identified gene product. Computer programs well known in the art can be employed to identify such relationships. Second, the sequences of the identified genes can be used, utilizing standard techniques such as in situ hybridization, to place the genes onto chromosome maps and genetic maps which can be correlated with similar maps constructed for another organism, e.g., Saccharomyces cerevisiae. The information obtained through such characterizations can suggest relevant methods for using the polynucleotides and polypeptides for discovery of drugs against Candida albicans and other pathogens.

[0170] Methods for performing the uses listed above are well known to those skilled in the art. References disclosing such methods include without limitation “Molecular Cloning: A Laboratory Manual,” 2d ed., Cold Spring Harbor Laboratory Press, Sambrook, J., E. F. Fritsch and T. Maniatis eds., 1989, and “Methods in Enzymology: Guide to Molecular Cloning Techniques,” Academic Press, Berger, S. L. and A. R. Kimmel eds., 1987. Many of the uses of the polynucleotides and polypeptides of the identified essential genes are discussed in details hereinbelow.

[0171] 5.4.3 Target Gene Products

[0172] The target gene products used and encompassed in the methods and compositions of the present invention include those gene products (e.g, RNA or proteins) that are encoded by the target essential gene sequences as described above, such as, the target gene sequences set forth in SEQ ID NOs: 6001 through to 6932. In Table II, the amino acid sequences of SEQ ID NOs: 7001 through to 7932 are deduced using the codon usage of C. albicans from the respective nucleotide sequences of SEQ ID NOs: 6001 through to 6932. However, when expressed in an organism other than C. albicans, protein products of the target genes comprising the amino acid sequences of SEQ ID NOs: 7001 through to 7932 may be encoded by nucleotide sequences that are translated using the universal genetic code. One of skill in the art would know the modifications that are necessary to accommodate for such a difference in codon usage.

[0173] In addition, however, the methods and compositions of the invention also use and encompass proteins and polypeptides that represent functionally equivalent gene products. Such functionally equivalent gene products include, but are not limited to, natural variants of the polypeptides comprising or consisting essentially of an amino acid sequence set forth in SEQ ID NOs: 7001 through to 7932.

[0174] Such equivalent target gene products can contain, e.g., deletions, additions or substitutions of amino acid residues within the amino acid sequences encoded by the target gene sequences described above, but which result in a silent change, thus producing a functionally equivalent target gene product. Conservative amino acid substitutions can be made on the basis of similarity in polarity, charge, solubility, hydrophobicity, hydrophilicity and/or the amphipathic nature of the residues involved. For example, nonpolar (i.e., hydrophobic) amino acid residues can include alanine (Ala or A), leucine (Leu or L), isoleucine (Ile or D, valine (Val or V), proline (Pro or P), phenylalanine (Phe or F), tryptophan (Trp or W) and methionine (Met or M); polar neutral amino acid residues can include glycine (Gly or G), serine (Ser or S), threonine (Thr or T), cysteine (Cys or C), tyrosine (Tyr or Y), asparagine (Asn or N) and glutamine (Gln or Q); positively charged (i.e., basic) amino acid residues can include arginine (Arg or R), lysine (Lys or K) and histidine (His or H); and negatively charged (i.e., acidic) amino acid residues can include aspartic acid (Asp or D) and glutamic acid (Glu or E).

[0175] In one particular embodiment, a composition comprising a mixture of natural variants of the polypeptides having one of SEQ ID NOs: 7001 through to 7932 is provided. Since it is known in the art that, in C. albicans, 99% of the tRNA molecules that recognize the codon CTG is charged with a serine residue, and 1% are charged with a leucine residue, there is a possibility that during biosynthesis, a leucine is incorporated into a growing polypeptide chain. Accordingly, when a nucleotide sequence comprising the codon CTG is translated in C. albicans, a small percentage of the resulting polypeptides may have a leucine residue in positions where a serine residue encoded by CTG (conforming to the codon usage of C. albicans) is expected. The product of translation of such a nucleotide sequence may comprise a mixture of polypeptides with minor leucine/serine variations at positions that correspond to a CTG codon in the nucleotide sequence.

[0176] “Functionally equivalent,” as the term is utilized herein, refers to a polypeptide capable of exhibiting a substantially similar in vivo activity as the Candida albicans target gene product encoded by one or more of the target gene sequences described in Table II. Alternatively, when utilized as part of assays described hereinbelow, the term “functionally equivalent” can refer to peptides or polypeptides that are capable of interacting with other cellular or extracellular molecules in a manner substantially similar to the way in which the corresponding portion of the target gene product would interact with such other molecules. Preferably, the functionally equivalent target gene products of the invention are also the same size or about the same size as a target gene product encoded by one or more of the target gene sequences described in Table II.

[0177] The biological function of the target gene products encoded by the C. albicans essential genes of the invention can be predicted by the function of their corresponding homologs in Saccharomyces cerevisiae. Accordingly, the C. albicans gene products of the invention may have one or more of the following biological functions:

[0178] Metabolism: amino-acid metabolism, amino-acid biosynthesis, assimilatory reduction of sulfur and biosynthesis of the serine family, regulation of amino-acid metabolism, amino-acid transport, amino-acid degradation (catabolism), other amino-acid metabolism activities, nitrogen and sulphur metabolism, nitrogen and sulphur utilization, regulation of nitrogen and sulphur utilization, nitrogen and sulphur transport, nucleotide metabolism, purine-ribonucleotide metabolism, pyrimidine-ribonucleotide metabolism, deoxyribonucleotide metabolism, metabolism of cyclic and unusual nucleotides, regulation of nucleotide metabolism, polynucleotide degradation, nucleotide transport, other nucleotide-metabolism activities, phosphate metabolism, phosphate utilization, regulation of phosphate utilization, phosphate transport, other phosphate metabolism activities, C-compound and carbohydrate metabolism, C-compound and carbohydrate utilization, regulation of C-compound and carbohydrate utilization, C-compound, carbohydrate transport, other carbohydrate metabolism activities, lipid, fatty-acid and isoprenoid metabolism, lipid, fatty-acid and isoprenoid biosynthesis, phospholipid biosynthesis, glycolipid biosynthesis, breakdown of lipids, fatty acids and isoprenoids, lipid, fatty-acid and isoprenoid utilization, regulation of lipid, fatty-acid and isoprenoid biosynthesis, lipid and fatty-acid transport, lipid and fatty-acid binding, other lipid, fatty-acid and isoprenoid metabolism activities, metabolism of vitamins, cofactors, and prosthetic groups, biosynthesis of vitamins, cofactors, and prosthetic groups, utilization of vitamins, cofactors, and prosthetic groups, regulation of vitamins, cofactors, and prosthetic groups, transport of vitamins, cofactors, and prosthetic groups, other vitamin, cofactor, and prosthetic group activities, secondary metabolism, metabolism of primary metabolic sugars derivatives, biosynthesis of glycosides, biosynthesis of secondary products derived from primary amino acids, biosynthesis of amines.

[0179] Energy: glycolysis and gluconeogenesis, pentose-phosphate pathway, tricarboxylic-acid pathway, electron transport and membrane-associated energy conservation, accessory proteins of electron transport and membrane-associated energy conservation, other electron transport and membrane-associated energy conservation proteins, respiration, fermentation, metabolism of energy reserves (glycogen, trehalose), glyoxylate cycle, oxidation of fatty acids, other energy generation activities.

[0180] Cell Growth, Cell Division and DNA Synthesis: cell growth, budding, cell polarity and filament formation, pheromone response, mating-type determination, sex-specific proteins, sporulation and germination, meiosis, DNA synthesis and replication, recombination and DNA repair, cell cycle control and mitosis, cell cycle check point proteins, cytokinesis, other cell growth, cell division and DNA synthesis activities.

[0181] Transcription: rRNA transcription, rRNA synthesis, rRNA processing, other rRNA-transcription activities, tRNA transcription, tRNA synthesis, tRNA processing, tRNA modification, other tRNA-transcription activities, mRNA transcription, mRNA synthesis, general transcription activities, transcriptional control, chromatin modification, mRNA processing (splicing), mRNA processing (5′-, 3′-end processing, mRNA degradation), 3′-end processing, mRNA degradation, other mRNA-transcription activities, RNA transport, other transcription activities.

[0182] Protein Synthesis: ribosomal proteins, translation, translational control, tRNA-synthetases, other protein-synthesis activities.

[0183] Protein Destination: protein folding and stabilization, protein targeting, sorting and translocation, protein modification, modification with fatty acids (e.g. myristylation, pabnitylation, farnesylation), modification by phosphorylation, dephosphorylation, modification by acetylation, other protein modifications, assembly of protein complexes, proteolysis, cytoplasmic and nuclear degradation, lysosomal and vacuolar degradation, other proteolytic degradation, other proteolytic proteins, other protein-destination activities.

[0184] Transport Facilitation: channels/pores, ion channels, ion transporters, metal ion transporters (Cu, Fe, etc.), other cation transporters (Na, K, Ca, NH₄, etc.), anion transporters (Cl, SO₄, PO₄, etc.), C-compound and carbohydrate transporters, other C-compound transporters, amino-acid transporters, peptide-transporters, lipid transporters, purine and pyrimidine transporters, allantoin and allantoate transporters, transport ATPases, ABC transporters, drug transporters, other transport facilitators.

[0185] Cellular Transport and Transport Mechanisms: nuclear transport, mitochondrial transport, vesicular transport (Golgi network, etc.), peroxisomal transport, vacuolar transport, extracellular transport (secretion), cellular import, cytoskeleton-dependent transport, transport mechanism, other transport mechanisms, other intracellular-transport activities.

[0186] Cellular Biogenesis: biogenesis of cell wall (cell envelope), biogenesis of plasma membrane, biogenesis of cytoskeleton, biogenesis of endoplasmatic reticulum, biogenesis of Golgi, biogenesis of intracellular transport vesicles, nuclear biogenesis, biogenesis of chromosome structure, mitochondrial biogenesis, peroxisomal biogenesis, endosomal biogenesis, vacuolar and lysosomal biogenesis, other cellular biogenesis activities.

[0187] Cellular Communication/signal Transduction: intracellular communication, unspecified signal transduction, second messenger formation, regulation of G-protein activity, key kinases, other unspecified signal transduction activities, morphogenesis, G-proteins, regulation of G-protein activity, key kinases, other morphogenetic activities, osmosensing, receptor proteins, mediator proteins, key kinases, key phosphatases, other osmosensing activities, nutritional response pathway, receptor proteins, second messenger formation, G-proteins, regulation of G-protein activity, key kinases, key phosphatases, other nutritional-response activities, pheromone response generation, receptor proteins, G-proteins, regulation of G-protein activity, key kinases, key phosphatases, other pheromone response activities, other signal-transduction activities.

[0188] Cell Rescue, Defense, Cell Death and Ageing: stress response, DNA repair, other DNA repair, detoxification, detoxification involving cytochrome P450, other detoxification, cell death, ageing, degradation of exogenous polynucleotides, other cell rescue activities.

[0189] Ionic Homeostasis: homeostasis of cations, homeostasis of metal ions, homeostasis of protons, homeostasis of other cations, homeostasis of anions, homeostasis of sulfates, homeostasis of phosphate, homeostasis of chloride, homeostasis of other anions.

[0190] Cellular Organization (proteins are localized to the corresponding organelle): organization of cell wall, organization of plasma membrane, organization of cytoplasm, organization of cytoskeleton, organization of centrosome, organization of endoplasmatic reticulum, organization of Golgi, organization of intracellular transport vesicles, nuclear organization, organization of chromosome structure, mitochondrial organization, peroxisomal organization, endosomal organization, vacuolar and lysosomal organization, inner membrane organization, extracellular/secretion proteins.

[0191] In another embodiment of the invention, the use of target gene products that are RNA or proteins of Saccharomyces cerevisiae are provided.

[0192] Peptides and polypeptides corresponding to one or more domains of the target gene products (e.g., signal sequence, TM, ECD, CD, or ligand-binding domains), truncated or deleted target gene products (e.g, polypeptides in which one or more domains of a target gene product are deleted) and fusion target gene proteins (e.g, proteins in which a full length or truncated or deleted target gene product, or a peptide or polypeptide corresponding to one or more domains of a target gene product is fused to an unrelated protein) are also within the scope of the present invention. Such peptides and polypeptides (also referred to as chimeric protein or polypeptides) can be readily designed by those skilled in the art on the basis of the target gene nucleotide and amino acid sequences listed in Table II. Exemplary fusion proteins can include, but are not limited to, epitope tag-fusion proteins which facilitates isolation of the target gene product by affinity chromatography using reagents that binds the epitope. Other exemplary fusion proteins include fusions to any amino acid sequence that allows, e.g., the fusion protein to be anchored to a cell membrane, thereby allowing target gene polypeptides to be exhibited on a cell surface; or fusions to an enzyme (e.g., β-galactosidase encoded by the LAC4 gene of Kluyveronmyces lactis (Leuker et al., 1994, Mol. Gen. Genet., 245:212-217)), to a fluorescent protein (e.g., from Renilla reniformis (Srikantha et al., 1996, J. Bacteriol. 178:121-129), or to a luminescent protein which can provide a marker function. Accordingly, the invention provides a fusion protein comprising a fragment of a first polypeptide fused to a second polypeptide, said fragment of the first polypeptide consisting of at least 6 consecutive residues of an amino acid sequence selected from one of SEQ ID NOs: 7001 through to 7932.

[0193] Other modifications of the target gene product coding sequences described above can be made to generate polypeptides that are better suited, e.g., for expression, for scale up, etc. in a chosen host cell. For example, cysteine residues can be deleted or substituted with another amino acid in order to eliminate disulfide bridges.

[0194] The target gene products of the invention preferably comprise at least as many contiguous amino acid residues as are necessary to represent an epitope fragment (that is, for the gene products to be recognized by an antibody directed to the target gene product). For example, such protein fragments or peptides can comprise at least about 8 contiguous amino acid residues from a full length differentially expressed or pathway gene product. In alternative embodiments, the protein fragments and peptides of the invention can comprise about 6, 10, 20, 30, 40, 50, 60, 70, 80, 90, 100, 150, 200, 250, 300, 350, 400, 450 or more contiguous amino acid residues of a target gene product.

[0195] The target gene products used and encompassed in the methods and compositions of the present invention also encompass amino acid sequences encoded by one or more of the above-described target gene sequences of the invention wherein domains often encoded by one or more exons of those sequences, or fragments thereof, have been deleted. The target gene products of the invention can still further comprise post translational modifications, including, but not limited to, glycosylations, acetylations and myristylations.

[0196] The target gene products of the invention can be readily produced, e.g., by synthetic techniques or by methods of recombinant DNA technology using techniques that are well known in the art. Thus, methods for preparing the target gene products of the invention are discussed herein. First, the polypeptides and peptides of the invention can be synthesized or prepared by techniques well known in the art. See, for example, Creighton, 1983, Proteins: Structures and Molecular Principles, W. H. Freeman and Co., N.Y., which is incorporated herein by reference in its entirety. Peptides can, for example, be synthesized on a solid support or in solution.

[0197] Alternatively, recombinant DNA methods which are well known to those skilled in the art can be used to construct expression vectors containing target gene protein coding sequences such as those set forth in SEQ ID NOs: 6001 through to 6932, and appropriate transcriptional/translational control signals. These methods include, for example, in vitro recombinant DNA techniques, synthetic techniques and in vivo recombination/genetic recombination. See, for example, the techniques described in Sambrook et al., 1989, Molecular Cloning: A Laboratory Manual, Cold Spring Harbor Press, Cold Spring Harbor, N.Y., Pla et al., Yeast 12:1677-1702 (1996), which are incorporated by reference herein in their entireties, and Ausubel, 1989, supra. Alternatively, RNA capable of encoding target gene protein sequences can be chemically synthesized using, for example, synthesizers. See, for example, the techniques described in Oligonucleotide Synthesis, 1984, Gait, M. J. ed., IRL Press, Oxford, which is incorporated by reference herein in its entirety.

[0198] A variety of host-expression vector systems can be utilized to express the target gene coding sequences of the invention. Such host-expression systems represent vehicles by which the coding sequences of interest can be produced and subsequently purified, but also represent cells which can, when transformed or transfected with the appropriate nucleotide coding sequences, exhibit the target gene protein of the invention in situ. These include but are not limited to microorganisms such as bacteria (e.g., E. coli, B. subtilis) transformed with recombinant bacteriophage DNA, plasmid DNA or cosmid DNA expression vectors containing target gene protein coding sequences; yeast (e.g., Saccharomyces, Schizosaccharomyces, Neurospora, Aspergillus, Candida, Pichia) transformed with recombinant yeast expression vectors containing the target gene protein coding sequences; insect cell systems infected with recombinant virus expression vectors (e.g, baculovirus) containing the target gene protein coding sequences; plant cell systems infected with recombinant virus expression vectors (e.g, cauliflower mosaic virus, CaMV; tobacco mosaic virus, TMV) or transformed with recombinant plasmid expression vectors (e.g, Ti plasmid) containing target gene protein coding sequences; or mammalian cell systems (e.g. COS, CHO, BHK, 293, 3T3) harboring recombinant expression constructs containing promoters derived from the genome of mammalian cells (e.g., metallothionein promoter) or from mammalian viruses (e.g., the adenovirus late promoter; the vaccinia virus 7.5K promoter). If necessary, the nucleotide sequences of coding regions may be modified according to the codon usage of the host such that the translated product has the correct amino acid sequence.

[0199] In bacterial systems, a number of expression vectors can be advantageously selected depending upon the use intended for the target gene protein being expressed. For example, when a large quantity of such a protein is to be produced, for the generation of antibodies or to screen peptide libraries, for example, vectors which direct the expression of high levels of fusion protein products that are readily purified can be desirable. Such vectors include, but are not limited, to the E. coli expression vector pUR278 (Ruther et al., 1983, EMBO J. 2:1791), in which the target gene protein coding sequence can be ligated individually into the vector in frame with the lacZ coding region so that a fusion protein is produced; pIN vectors (Inouye & Inouye, 1985, Nucleic Acids Res. 13:3101-3109; Van Heeke & Schuster, 1989, J. Biol. Chem. 264:5503-5509); and the like. pGEX vectors can also be used to express foreign polypeptides as fusion proteins with glutathione S-transferase (GST). In general, such fusion proteins are soluble and can easily be purified from lysed cells by adsorption to glutathione-agarose beads followed by elution in the presence of free glutathione. The pGEX vectors are designed to include thrombin or factor Xa protease cleavage sites so that the cloned target gene protein can be released from the GST moiety.

[0200] When a target gene is to be expressed in mammalian host cells, a number of viral-based expression systems can be utilized. In cases where an adenovirus is used as an expression vector, the target gene coding sequence of interest can be ligated to an adenovirus transcription/translation control complex, e.g., the late promoter and tripartite leader sequence. This chimeric gene can then be inserted in the adenovirus genome by in vitro or in vivo recombination. Insertion in a non-essential region of the viral genome (e.g., region E1 or E3) will result in a recombinant virus that is viable and capable of expressing target gene protein in infected hosts, (e.g., See Logan & Shenk, 1984, Proc. Natl. Acad Sci. USA 81:3655-3659). Specific initiation signals can also be required for efficient translation of inserted target gene coding sequences. These signals include the ATG initiation codon and adjacent sequences. In cases where an entire target gene, including its own initiation codon and adjacent sequences, is inserted into the appropriate expression vector, no additional translational control signals can be needed. However, in cases where only a portion of the target gene coding sequence is inserted, exogenous translational control signals, including, perhaps, the ATG initiation codon, must be provided. Furthermore, the initiation codon must be in phase with the reading frame of the desired coding sequence to ensure translation of the entire insert. These exogenous translational control signals and initiation codons can be of a variety of origins, both natural and synthetic. The efficiency of expression can be enhanced by the inclusion of appropriate transcription enhancer elements, transcription terminators, etc. (see Bittner et al., 1987, Methods in Enzymol. 153:516-544).

[0201] In addition, a host cell strain can be chosen which modulates the expression of the inserted sequences, or modifies and processes the gene product in the specific fashion desired. Such modifications (e.g, glycosylation) and processing (e.g., cleavage) of protein products can be important for the function of the protein. Different host cells have characteristic and specific mechanisms for the post-translational processing and modification of proteins. Appropriate cell lines or host systems can be chosen to ensure the correct modification and processing of the foreign protein expressed. To this end, eukaryotic host cells which possess the cellular machinery for proper processing of the primary transcript, glycosylation, and phosphorylation of the gene product can be used.

[0202] For long-term, high-yield production of recombinant proteins, stable expression is preferred. For example, cell lines which stably express the target gene protein can be engineered. Host cells can be transformed with DNA controlled by appropriate expression control elements (e.g., promoter, enhancer, sequences, transcription terminators, polyadenylation sites, etc.), and a selectable marker. Following the introduction of the foreign DNA, engineered cells can be allowed to grow for 1-2 days in an enriched media, and then are switched to a selective media. The selectable marker in the recombinant plasmid confers resistance to the selection and allows cells to stably integrate the plasmid into their chromosomes and grow to form foci which in turn can be cloned and expanded into cell lines. This method can advantageously be used to engineer cell lines which express the target gene protein. Such engineered cell lines can be particularly useful in screening and evaluation of compounds that affect the endogenous activity of the target gene protein.

[0203] A number of selection systems can be used, including but not limited to the herpes simplex virus thymidine kinase (Wigler et al., 1977, Cell 11:223), hypoxanthine-guanine phosphoribosyltransferase (Szybalska & Szybalski, 1962, Proc. Natl. Acad. Sci. USA 48:2026), and adenine phosphoribosyltransferase (Lowy et al., 1980, Cell 22:817) genes can be employed in tk⁻, hgprt⁻ or aprt⁻ cells, respectively. Also, antimetabolite resistance can be used as the basis of selection for dhfr, which confers resistance to methotrexate (Wigler et al., 1980, Proc. Natl. Acad. Sci USA 77:3567; O'Hare et al., 1981, Proc. Natl. Acad. Sci. USA 78:1527); gpt, which confers resistance to mycophenolic acid (Mulligan & Berg, 1981, Proc. Natl. Acad. Sci USA 78:2072); neo, which confers resistance to the aminoglycoside G-418 (Colberre-Garapin et al., 1981, J. Mol. Biol. 150:1); and hygro, which confers resistance to hygromycin (Santerre et al., 1984, Gene 30:147) genes.

[0204] Alternatively, any fusion protein may be readily purified by utilizing an antibody specific for the fusion protein being expressed. For example, a system described by Janknecht et al. allows for the ready purification of non-denatured fusion proteins expressed in human cells lines (Janknecht et al., 1991, Proc. Natl. Acad. Sci. USA 88: 8972-8976). In this system, the gene of interest is subcloned into a vaccinia recombination plasmid such that the gene's open reading frame is translationally fused to an amino-terminal tag consisting of six histidine residues. Extracts from cells infected with recombinant vaccinia virus are loaded onto Ni²⁺ nitriloacetic acid-agarose columns and histidine-tagged proteins are selectively eluted with imidazole-containing buffers. Fusions at the carboxy terminal of the target gene product are also contemplated.

[0205] When used as a component in assay systems such as those described herein, the target gene protein can be labeled, either directly or indirectly, to facilitate detection of a complex formed between the target gene protein and a test substance. Any of a variety of suitable labeling systems can be used including but not limited to radioisotopes such as ¹²⁵I; enzyme labeling systems that generate a detectable colorimetric signal or light when exposed to substrate; and fluorescent labels.

[0206] Indirect labeling involves the use of a protein, such as a labeled antibody, which specifically binds to either a target gene product. Such antibodies include but are not limited to polyclonal antibodies, monoclonal antibodies (mAbs), human, humanized or chimeric antibodies, single chain antibodies, Fab fragments, F(ab′)₂ fragments, fragments produced by a Fab expression library, anti-idiotypic (anti-Id) antibodies, and epitope-binding fragments of any of the above.

[0207] Following expression of the target gene protein encoded by the identified target nucleotide sequence, the protein is purified. Protein purification techniques are well known in the art. Proteins encoded and expressed from identified exogenous nucleotide sequences can be partially purified using precipitation techniques, such as precipitation with polyethylene glycol. Alternatively, epitope tagging of the protein can be used to allow simple one step purification of the protein. In addition, chromatographic methods such as ion-exchange chromatography, gel filtration, use of hydroxyapaptite columns, immobilized reactive dyes, chromatofocusing, and use of high-performance liquid chromatography, may also be used to purify the protein. Electrophoretic methods such as one-dimensional gel electrophoresis, high-resolution two-dimensional polyacrylamide electrophoresis, isoelectric focusing, and others are contemplated as purification methods. Also, affinity chromatographic methods, comprising solid phase bound-antibody, ligand presenting columns and other affinity chromatographic matrices are contemplated as purification methods in the present invention.

[0208] In addition, the purified target gene products, fragments thereof, or derivatives thereof may be administered to an individual in a pharmaceutically acceptable carrier to induce an immune response against the protein or polypeptide. Preferably, the immune response is a protective immune response which protects the individual. Methods for determining appropriate dosages of the protein (including use of adjuvants) and pharmaceutically acceptable carriers are familiar to those skilled in the art.

[0209] 5.4.4 Antibodies Specific for Target Gene Products

[0210] Described herein are methods for the production of antibodies capable of specifically recognizing epitopes of one or more of the target gene products described above. Such antibodies can include, but are not limited to, polyclonal antibodies, monoclonal antibodies (mAbs), human, humanized or chimeric antibodies, single chain antibodies, Fab fragments, F(ab′)₂ fragments, fragments produced by a Fab expression library, anti-idiotypic (anti-Id) antibodies, and epitope-binding fragments of any of the above.

[0211] For the production of antibodies to a target gene or gene product, various host animals can be immunized by injection with a target gene protein, or a portion thereof. Such host animals can include but are not limited to rabbits, mice, and rats, to name but a few. Various adjuvants can be used to increase the immunological response, depending on the host species, including but not limited to Freund's (complete and incomplete), mineral gels such as aluminum hydroxide, surface active substances such as lysolecithin, pluronic polyols, polyanions, peptides, oil emulsions, keyhole limpet hemocyanin, dinitrophenol, and potentially useful human adjuvants such as BCG (bacille Calmette-Guerin) and Corynebacterium parvum. Accordingly, the invention provides a method of eliciting an immune response in an animal, comprising introducing into the animal an immunogenic composition comprising an isolated polypeptide, the amino acid sequence of which comprises at least 6 or at least 8 consecutive residues of one of SEQ ID NOs: 7001 through to 7932.

[0212] Polyclonal antibodies are heterogeneous populations of antibody molecules derived from the sera of animals immunized with an antigen, such as target gene product, or an antigenic functional derivative thereof. For the production of polyclonal antibodies, host animals such as those described above, can be immunized by injection with differentially expressed or pathway gene product supplemented with adjuvants as also described above. The antibody titer in the immunized animal can be monitored over time by standard techniques, such as with an enzyme linked immunosorbent assay (ELISA) using immobilized polypeptide. If desired, the antibody molecules can be isolated from the animal (e.g, from the blood) and further purified by well-known techniques, such as protein A chromatography to obtain the IgG fraction.

[0213] Monoclonal antibodies, which are homogeneous populations of antibodies to a particular antigen, can be obtained by any technique which provides for the production of antibody molecules by continuous cell lines in culture. These include, but are not limited to the hybridoma technique of Kohler and Milstein, (1975, Nature 256:495-497; and U.S. Pat. No. 4,376,110), the human B-cell hybridoma technique (Kosbor et al., 1983, Immunology Today 4:72; Cole et al., 1983, Proc. Natl. Acad. Sci. USA 80:2026-2030), and the EBV-hybridoma technique (Cole et al., 1985, Monoclonal Antibodies And Cancer Therapy, Alan R. Liss, Inc., pp. 77-96). Such antibodies can be of any immunoglobulin class including IgG, IgM, IgE, IgA, IgD and any subclass thereof. The hybridoma producing the mAb of this invention can be cultivated in vitro or in vivo. Production of high titers of mAbs in vivo makes this the presently preferred method of production.

[0214] Alternative to preparing monoclonal antibody-secreting hybridomas, a monoclonal antibody directed against a polypeptide of the invention can be identified and isolated by screening a recombinant combinatorial immunoglobulin library (e.g., an antibody phage display library) with the polypeptide of interest. Kits for generating and screening phage display libraries are commercially available (e.g., the Pharmacia Recombinant Phage Antibody System, Catalog No. 27-9400-01; and the Stratagene SurfZAP™ Phage Display Kit, Catalog No. 240612). Additionally, examples of methods and reagents particularly amenable for use in generating and screening antibody display library can be found in, for example, U.S. Pat. No. 5,223,409; PCT Publication No. WO 92/18619; PCT Publication No. WO 91/17271; PCT Publication No. WO 92/20791; PCT Publication No. WO 92/15679; PCT Publication No. WO 93/01288; PCT Publication No. WO 92/01047; PCT Publication No. WO 92/09690; PCT Publication No. WO 90/02809; Fuchs et al. (1991) Bio/Technology 9:1370-1372; Hay et al. (1992) Hum. Antibod. Hybridomas 3:81-85; Huse et al. (1989) Science 246:1275-1281; Griffiths et al. (1993) EMBO J. 12:725-734.

[0215] Additionally, recombinant antibodies, such as chimeric and humanized monoclonal antibodies, comprising both human and non-human portions, which can be made using standard recombinant DNA techniques, are within the scope of the invention. A chimeric antibody is a molecule in which different portions are derived from different animal species, such as those having a variable region derived from a murine mAb and a human immunoglobulin constant region. (See, e.g, Cabilly et al., U.S. Pat. No. 4,816,567; and Boss et al., U.S. Pat. No. 4,816397, which are incorporated herein by reference in their entirety.) Humanized antibodies are antibody molecules from non-human species having one or more complimentarily determining regions (CDRs) from the non-human species and a framework region from a human immunoglobulin molecule. (See, e.g., Queen, U.S. Pat. No. 5,585,089, which is incorporated herein by reference in its entirety.) Such chimeric and humanized monoclonal antibodies can be produced by recombinant DNA techniques known in the art, for example using methods described in PCT Publication No. WO 87/02671; European Patent application 184,187; European Patent Application 171,496; European Patent Application 173,494; PCT Publication No. WO 86/01533; U.S. Pat. No. 4,816,567; European Patent Application 125,023; Better et al. (1988) Science 240:1041-1043; Liu et al. (1987) Proc. Natl. Acad. Sci. USA 84:3439-3443; Liu et al. (1987) J. Immunol. 139:3521-3526; Sun et al. (1987) Proc. Natl. Acad. Sci. USA 84:214-218; Nishimura et al. (1987) Canc. Res. 47:999-1005; Wood et al. (1985) Nature 314:446-449; and Shaw et al. (1988) J. Natl. Cancer Inst. 80:1553-1559); Morrison (1985) Science 229:1202-1207; Oi et al. (1986) Bio/Techniques 4:214; U.S. Pat. No. 5,225,539; Jones et al. (1986) Nature 321:552-525; Verhoeyan et al. (1988) Science 239:1534; and Beidler et al. (1988) J. Immunol. 141:4053-4060.

[0216] Completely human antibodies are particularly desirable for therapeutic treatment of human patients. Such antibodies can be produced using transgenic mice which are incapable of expressing endogenous immunoglobulin heavy and light chains genes, but which can express human heavy and light chain genes. The transgenic mice are immunized in the normal fashion with a selected antigen, e.g., all or a portion of a polypeptide of the invention. Monoclonal antibodies directed against the antigen can be obtained using conventional hybridoma technology. The human immunoglobulin transgenes harbored by the transgenic mice rearrange during B cell differentiation, and subsequently undergo class switching and somatic mutation. Thus, using such a technique, it is possible to produce therapeutically useful IgG, IgA and IgE antibodies. For an overview of this technology for producing human antibodies, see Lonberg and Huszar (1995, Int. Rev. Immunol. 13:65-93). For a detailed discussion of this technology for producing human antibodies and human monoclonal antibodies and protocols for producing such antibodies, see, e.g., U.S. Pat. Nos. 5,625,126; 5,633,425; 5,569,825; 5,661,016; and 5,545,806.

[0217] Completely human antibodies which recognize a selected epitope can be generated using a technique referred to as “guided selection.” In this approach a selected non-human monoclonal antibody, e.g., a mouse antibody, is used to guide the selection of a completely human antibody recognizing the same epitope. (Jespers et al. (1994) Bio/technology 12:899-903).

[0218] Antibody fragments which recognize specific epitopes can be generated by known techniques. For example, such fragments include but are not limited to: the F(ab′)₂ fragments which can be produced by pepsin digestion of the antibody molecule and the Fab fragments which can be generated by reducing the disulfide bridges of the F(ab′)₂ fragments. Alternatively, Fab expression libraries can be constructed (Huse et al., 1989, Science-246:1275-1281) to allow rapid and easy identification of monoclonal Fab fragments with the desired specificity.

[0219] Antibodies of the present invention may also be described or specified in terms of their binding affinity to a target gene product. Preferred binding affinities include those with a dissociation constant or Kd less than 5×10⁻⁶M, 10⁻⁶M, 5×10⁻⁷M, 10⁻⁷M, 5×10⁻⁸M, 10⁻⁸M, 5×10⁻⁹M, 10⁻⁹M, 5×10⁻¹⁰M, 10⁻¹⁰M, 5×10⁻¹¹M, 10⁻¹¹M, 5×10⁻¹²M, 10⁻¹²M, 5×10⁻¹³M, 10⁻¹³M, 5×10⁻¹⁴M, 10⁻¹⁴M, 5×10⁻¹⁵M, or 10⁻¹⁵M.

[0220] Antibodies directed against a target gene product or fragment thereof can be used to detect the a target gene product in order to evaluate the abundance and pattern of expression of the polypeptide under various environmental conditions, in different morphological forms (mycelium, yeast, spores) and stages of an organism's life cycle. Antibodies directed against a target gene product or fragment thereof can be used diagnostically to monitor levels of a target gene product in the tissue of an infected host as part of a clinical testing procedure, e.g., to, for example, determine the efficacy of a given treatment regimen. Detection can be facilitated by coupling the antibody to a detectable substance. Examples of detectable substances include various enzymes, prosthetic groups, fluorescent materials, luminescent materials, bioluminescent materials, and radioactive materials. Examples of suitable enzymes include horseradish peroxidase, alkaline phosphatase, beta-galactosidase, or acetylcholinesterase; examples of suitable prosthetic group complexes include streptavidin/biotin and avidinibiotin; examples of suitable fluorescent materials include umbelliferone, fluorescein, fluorescein isothiocyanate, rhodamine, dichlorotriazinylamine fluorescein, dansyl chloride or phycoery tirin; an example of a luminescent material includes luminol; examples of bioluminescent materials include luciferase, luciferin, and aequorin, and examples of suitable radioactive material include ¹²⁵I, 131I, ³⁵S or ³H.

[0221] Further, antibodies directed against a target gene product or fragment thereof can be used therapeutically to treat an infectious disease by preventing infection, and/or inhibiting growth of the pathogen. Antibodies can also be used to modify a biological activity of a target gene product. Antibodies to gene products related to virulence or pathogenicity can also be used to prevent infection and alleviate one or more symptoms associated with infection by the organism. To facilitate or enhance its therapeutic effect, an antibody (or fragment thereof) may be conjugated to a therapeutic moiety such as a toxin or fungicidal agent. Techniques for conjugating a therapeutic moiety to antibodies are well known, see, e.g., Thorpe et al., “The Preparation And Cytotoxic Properties Of Antibody-Toxin Conjugates”, Immunol. Rev., 62:119-58 (1982).

[0222] An antibody with or without a therapeutic moiety conjugated to it can be used as a therapeutic that is administered alone or in combination with chemotherapeutic agents.

[0223] 5.4.5 Antisense Molecules

[0224] The use of antisense molecules as inhibitors of gene expression may be a specific, genetically based therapeutic approach (for a review, see Stein, in Ch. 69, Section 5 “Cancer: Principle and Practice of Oncology”, 4th ed., ed. by DeVita et al., J. B. Lippincott, Philadelphia 1993). The present invention provides the therapeutic or prophylactic use of nucleic acids of at least six nucleotides that are antisense to a target essential or virulence gene or a portion thereof. An “antisense” target nucleic acid as used herein refers to a nucleic acid capable of hybridizing to a portion of a target gene RNA (preferably mRNA) by virtue of some sequence complementarity. The invention further provides pharmaceutical compositions comprising an effective amount of the antisense nucleic acids of the invention in a pharmaceutically acceptable carrier, as described infra.

[0225] In another embodiment, the invention is directed to methods for inhibiting the expression of a target gene in an organism of interest, such as C. albicans in vitro or in vivo comprising providing the cell with an effective amount of a composition comprising an antisense nucleic acid of the invention. Multiple antisense polynucleotides hybridizable to different target genes may be used in combinations, sequentially or simultaneously.

[0226] In another embodiment, the present invention is directed toward methods for modulating expression of an essential gene which has been identified by the methods described supra, in which an antisense RNA molecule, which inhibits translation of mRNA transcribed from an essential gene, is expressed from a regulatable promoter. In one aspect of this embodiment, the antisense RNA molecule is expressed in a GRACE strain of Candida albicans or another GRACE strain constructed from another diploid pathogenic organism. In other aspects of this embodiment, the antisense RNA molecule is expressed in a wild-type or other non-GRACE strain of Candida albicans or another diploid pathogenic organism, including animal fugal pathogens such as Aspergillus fumigatus, Aspergillus niger, Aspergillus flavis, Candida tropicalis, Candida parapsilopsis, Candida krusei, Cryptococcus neoformans, Coccidioides immitis, Exophalia dermatiditis, Fusarium oxysporum, Histoplasma capsulatum, Phneumocystis carinii, Trichosporon beigelii, Rhizopus arrhizus, Mucor rouxii, Rhizomucor pusillus, or Absidia corymbigera, or the plant fungal pathogens, such as Botrytis cinerea, Erysiphe graminis, Magnaporthe grisea, Puccinia recodita, Septoria triticii, Tilletia controversa, Ustilago maydis, or any species falling within the genera of any of the above species.

[0227] The nucleic acid molecule comprising an antisense nucleotide sequence of the invention may be complementary to a coding and/or noncoding region of a target gene mRNA. The antisense molecules will bind to the complementary target gene mRNA transcripts and reduce or prevent translation. Absolute complementarity, although preferred, is not required. A sequence “complementary” to a portion of an RNA, as referred to herein, means a sequence having sufficient complementarity to be able to hybridize with the RNA, forming a stable duplex; in the case of double-stranded antisense nucleic acids, a single strand of the duplex DNA may thus be tested, or triplex formation may be assayed. The ability to hybridize will depend on both the degree of complementarity and the length of the antisense nucleic acid. One skilled in the art can ascertain a tolerable degree of mismatch by use of standard procedures to determine the melting point of the hybridized complex.

[0228] Nucleic acid molecules that are complementary to the 5′ end of the message, e.g., the 5′ untranslated sequence up to and including the AUG initiation codon, should work most efficiently at inhibiting translation. However, sequences complementary to the 3′ untranslated sequences of mRNAs have recently been shown to be effective at inhibiting translation of mRNAs as well. See generally, Wagner, R., 1994, Nature 372:333-335.

[0229] Nucleic acid molecules comprising nucleotide sequences complementary to the 5′ untranslated region of the mRNA can include the complement of the AUG start codon. Antisense nucleic acid molecules complementary to mRNA coding regions are less efficient inhibitors of translation but could be used in accordance with the invention. Whether designed to hybridize to the 5′-, 3′- or coding region of target gene mRNA, antisense nucleic acids should be at least six nucleotides in length, and are preferably oligonucleotides ranging from 6 to about 50 nucleotides in length. In specific aspects, the oligonucleotide is at least 10 nucleotides, at least 17 nucleotides, at least 25 nucleotides, at least 50 nucleotides, or at least 200 nucleotides.

[0230] Regardless of the choice of target gene sequence, it is preferred that in vitro studies are first performed to quantitate the ability of the antisense molecule to inhibit gene expression. It is preferred that these studies utilize controls that distinguish between antisense gene inhibition and nonspecific biological effects of oligonucleotides. It is also preferred that these studies compare levels of the target RNA or protein with that of an internal control RNA or protein. Additionally, it is envisioned that results obtained using the antisense oligonucleotide are compared with those obtained using a control oligonucleotide. It is preferred that the control oligonucleotide is of approximately the same length as the test oligonucleotide and that the nucleotide sequence of the oligonucleotide differs from the antisense sequence no more than is necessary to prevent specific hybridization to the target sequence.

[0231] The antisense molecule can be DNA or RNA or chimeric mixtures or derivatives or modified versions thereof, single-stranded or double-stranded. The antisense molecule can be modified at the base moiety, sugar moiety, or phosphate backbone, for example, to improve stability of the molecule, hybridization, etc. The antisense molecule may include other appended groups such as peptides (e.g., for targeting cell receptors in vivo), hybridization-triggered cleavage agents. (See, e.g., Krol et al., 1988, BioTechniques 6:958-976) or intercalating agents. (See, e.g., Zon, 1988, Pharm. Res. 5:539-549). To this end, the antisense molecule may be conjugated to another molecule, e.g., a peptide, hybridization triggered cross-linking agent, transport agent, hybridization-triggered cleavage agent, etc.

[0232] The antisense molecule may comprise at least one modified base moiety which is selected from the group including but not limited to 5-fluorouracil, 5-bromouracil, 5-chlorouracil, 5-iodouracil, hypoxanthine, xanthine, 4-acetylcytosine, 5-(carboxyhydroxymethyl)uracil, 5-carboxymethylaminomethyl-2-thiouridine, 5-carboxymethylaminomethyluracil, dihydrouracil, beta-D-galactosylqueosine, inosine, N6-isopentenyladenine, 1-methylguanine, 1-methylinosine, 2,2-dimethylguanine, 2-methyladenine, 2-methylguanine, 3-methylcytosine, 5-methylcytosine, N6-adenine, 7-methylguanine, 5-methylaminomethyluracil, 5-methoxyaminomethyl-2-thiouracil, beta-D-mannosylqueosine, 5′-methoxycarboxymethyluracil, 5-methoxyuracil, 2-methylthio-N6-isopentenyladenine, uracil-5-oxyacetic acid (v), wybutoxosine, pseudouracil, queosine, 2-thiocytosine, 5-methyl-2-thiouracil, 2-thiouracil, 4-thiouracil, 5-methyluracil, uracil-5-oxyacetic acid methylester, uracil-5-oxyacetic acid (v), 5-methyl-2-thiouracil, 3-(3-amino-3-N-2-carboxypropyl) uracil, (acp3)w, and 2,6-diaminopurine.

[0233] The antisense molecule may also comprise at least one modified sugar moiety selected from the group including but not limited to arabinose, 2-fluoroarabinose, xylulose, and hexose.

[0234] In yet another embodiment, the antisense molecule comprises at least one modified phosphate backbone selected from the group consisting of a phosphorothioate, a phosphorodithioate, a phosphoramidothioate, a phosphoramidate, a phosphordiamidate, a methylphosphonate, an alkyl phosphotriester, and a formacetal or analog thereof.

[0235] In yet another embodiment, the antisense molecule is an α-anomeric oligonucleotide. An α-anomeric oligonucleotide forms specific double-stranded hybrids with complementary RNA in which, contrary to the usual β-units, the strands run parallel to each other (Gautier et al., 1987, Nucl. Acids Res. 15:6625-6641). The oligonucleotide is a 2′-0-methylribonucleotide (Inouye et al., 1987, Nucl. Acids Res. 15:6131-6148), or a chimeric RNA-DNA analogue (Inouye et al., 1987, FEBS Lett. 215:327-330).

[0236] Antisense molecules of the invention may be synthesized by standard methods known in the art, e.g. by use of an automated DNA synthesizer (such as are commercially available from Biosearch, Applied Biosystems, etc.). As examples, phosphorothioate oligonucleotides may be synthesized by the method of Stein et al. (1988, Nucl. Acids Res. 16:3209), methylphosphonate oligonucleotides can be prepared by use of controlled pore glass polymer supports (Sarin et al., 1988, Proc. Natl. Acad. Sci. U.S.A. 85:7448-7451), etc.

[0237] While antisense nucleotides complementary to the coding region of a target gene could be used, those complementary to the transcribed untranslated region are also preferred.

[0238] Pharmaceutical compositions of the invention comprising an effective amount of an antisense nucleic acid in a pharmaceutically acceptable carrier, can be administered to a subject infected with the pathogen of interest.

[0239] The amount of antisense nucleic acid which will be effective in the treatment of a particular disease caused by the pathogen will depend on the site of the infection or condition, and can be determined by standard techniques. Where possible, it is desirable to determine the antisense cytotoxicity of the pathogen to be treated in vitro, and then in useful animal model systems prior to testing and use in humans.

[0240] A number of methods have been developed for delivering antisense DNA or RNA to cells; e.g., antisense molecules can be injected directly into the tissue site in which the pathogens are residing, or modified antisense molecules, designed to target the desired cells (e.g., antisense molecule linked to peptides or antibodies that specifically bind receptors or antigens expressed on the pathogen's cell surface) can be administered systemically. Antisense molecules can be delivered to the desired cell population via a delivery complex. In a specific embodiment, pharmaceutical compositions comprising antisense nucleic acids of the target genes are administered via biopolymers (e.g., poly-β-1→4-N-acetylglucosamine polysaccharide), liposomes, microparticles, or microcapsules. In various embodiments of the invention, it may be useful to use such compositions to achieve sustained release of the antisense nucleic acids. In a specific embodiment, it may be desirable to utilize liposomes targeted via antibodies to specific identifiable pathogen antigens (Leonetti et al., 1990, Proc. Natl. Acad. Sci. U.S.A. 87:2448-2451; Renneisen et al., 1990, J. Biol. Chem. 265:16337-16342).

[0241] 5.4.6 Ribozyme Molecules

[0242] Ribozymes are enzymatic RNA molecules capable of catalyzing the specific cleavage of RNA (For a review see, for example Rossi, J., 1994, Current Biology 4:469-471). The mechanism of ribozyme action involves sequence specific hybridization of the ribozyme molecule to complementary target RNA, followed by a endonucleolytic cleavage. The composition of ribozyme molecules must include one or more sequences complementary to the target gene mRNA, and must include the well known catalytic sequence responsible for mRNA cleavage. For this sequence, see U.S. Pat. No. 5,093,246, which is incorporated by reference herein in its entirety. As such, within the scope of the invention are engineered hammerhead motif ribozyme molecules that specifically and efficiently catalyze endonucleolytic cleavage of RNA sequences encoding target gene proteins.

[0243] Ribozyme molecules designed to catalytically cleave specific target gene mRNA transcripts can also be used to prevent translation of target gene mRNA and expression of target genes. While ribozymes that cleave mRNA at site specific recognition sequences can be used to destroy target gene mRNAs, the use of hammerhead ribozymes is preferred. Hammerhead ribozymes cleave mRNAs at locations dictated by flanking regions that form complementary base pairs with the target gene mRNA. The sole requirement is that the target mRNA have the following sequence of two bases: 5′-UG-3′. The construction and production of hammerhead ribozymes is well known in the art and is described more fully in Haseloff and Gerlach, 1988, Nature, 334:585-591. Preferably the ribozyme is engineered so that the cleavage recognition site is located near the 5′ end of the target gene mRNA; i.e., to increase efficiency and minimize the intracellular accumulation of non-functional mRNA transcripts.

[0244] The ribozymes of the present invention also include RNA endoribonucleases (hereinafter “Cech-type ribozymes”) such as the one which occurs naturally in Tetrahymena thermophila (known as the IVS, or L-19 IVS RNA) and which has been extensively described by Thomas Cech and collaborators (Zaug, et al., 1984, Science, 224:574-578; Zaug and Cech, 1986, Science, 231:470-475; Zaug, et al., 1986, Nature, 324:429-433; published International patent application No. WO 88/04300 by University Patents Inc.; Been and Cech, 1986, Cell, 47:207-216). The Cech-type ribozymes have an eight base pair active site which hybridizes to a target RNA sequence whereafter cleavage of the target RNA takes place. The invention encompasses those Cech-type ribozymes which target eight base-pair active site sequences that are present in a target gene.

[0245] As in the antisense approach, the ribozymes can be composed of modified oligonucleotides (e.g. for improved stability, targeting, etc.) and should be delivered to cells which express the target gene in vivo. Because ribozymes unlike antisense molecules, are catalytic, a lower intracellular concentration is required for efficiency. Multiple ribozyme molecules directed against different target genes can also be used in combinations, sequentially or simultaneously.

[0246] Anti-sense RNA and DNA, ribozyme, and triple helix molecules of the invention can be prepared by any method known in the art for the synthesis of DNA and RNA molecules. These include techniques for chemically synthesizing oligodeoxyribonucleotides and oligoribonucleotides well known in the art such as for example solid phase phosphoramidite chemical synthesis. Alternatively, RNA molecules can be generated by in vitro and in vivo transcription of DNA sequences encoding the antisense RNA molecule. Such DNA sequences can be incorporated into a wide variety of vectors which incorporate suitable RNA polymerase promoters such as the T7 or SP6 polymerase promoters. Alternatively, antisense cDNA constructs that synthesize antisense RNA constitutively or inducibly, depending on the promoter used, can be introduced stably into cell lines. These nucleic acid constructs can be administered selectively to the desired cell population via a delivery complex.

[0247] Various well-known modifications to the DNA molecules can be introduced as a means of increasing intracellular stability and half-life. Possible modifications include, but are not limited to, the addition of flanking sequences of ribo- or deoxy- nucleotides to the 5′ and/or 3′ ends of the molecule or the use of phosphorothioate or 2′ O-methyl rather than phospho-diesterase linkages within the oligodeoxyribonucleotide backbone.

[0248] 5.5 Screening Assays

[0249] The following assays are designed to identify compounds that bind to target gene products, bind to other cellular proteins that interact with the target gene product, and to compounds that interfere with the interaction of the target gene product with other cellular proteins. Compounds identified via such methods can include compounds which modulate the activity of a polypeptide encoded by a target gene of the invention (that is, increase or decrease its activity, relative to activity observed in the absence of the compound). Alternatively, compounds identified via such methods can include compounds which modulate the expression of the polynucleotide (that is, increase or decrease expression relative to expression levels observed in the absence of the compound), or increase or decrease the stability of the expressed product encoded by that polynucleotide. Compounds, such as compounds identified via the methods of the invention, can be tested using standard assays well known to those of skill in the art for their ability to modulate activity/expression.

[0250] Accordingly, the present invention provides a method for identifying an antimycotic compound comprising screening a plurality of compounds to identify a compound that modulates the activity or level of a gene product, said gene product being encoded by a nucleotide sequence selected from the group consisting of SEQ ID NOs: 6001 through to 6932, or a nucleotide sequence that is naturally occurring in Saccharomyces cerevisiae and that is the ortholog of a gene having a nucleotide sequence selected from the group consisting of SEQ ID NOs: 6001 through to 6932.

[0251] 5.5.1 In Vitro Screening Assays

[0252] In vitro systems are designed to identify compounds capable of binding the target gene products of the invention. Compounds identified in this manner are useful, for example, in modulating the activity of wild type and/or mutant target gene products, are useful in elucidating the biological function of target gene products, are utilized in screens for identifying other compounds that disrupt normal target gene product interactions, or are useful themselves for the disruption of such interactions.

[0253] The principle of the assays used to identify compounds that bind to the target gene product involves preparing a reaction mixture comprising the target gene product and the test compound under conditions and for a time sufficient to allow the two components to interact and bind, thus forming a complex which is removed and/or detected within the reaction mixture. These assays are conducted in a variety of ways. For example, one method involves anchoring target gene product or the test substance onto a solid phase and detecting target gene product/test compound complexes anchored, via the intermolecular binding reaction, to the solid phase at the end of the reaction. In one embodiment of such a method, the target gene product is anchored onto a solid surface, and the test compound, which is not anchored, is labeled, either directly or indirectly.

[0254] In practice, microtiter plates are conveniently utilized as the solid phase. The anchored component is immobilized by non-covalent or covalent attachments. Non-covalent attachment can be accomplished by simply coating the solid surface with a solution of the protein and drying the coated surface. Alternatively, an immobilized antibody, preferably a monoclonal antibody, specific for the protein to be immobilized is used to anchor the protein to the solid surface. The surfaces are prepared in advance and stored.

[0255] In order to conduct the assay, the nonimmobilized component is added to the coated surface containing the anchored component. After the reaction is complete, unreacted components are removed (e. g, by washing) under conditions such that any complexes formed will remain immobilized on the solid surface. The detection of complexes anchored on the solid surface is accomplished in a number of ways. Where the previously nonimmobilized component is pre-labeled, the detection of label immobilized on the surface indicates that complexes were formed. Where the previously nonimmobilized component is not pre-labeled, an indirect label is used to detect complexes anchored on the surface; e., using a labeled antibody specific for the previously nonimmobilized component (the antibody, in turn, is directly labeled or indirectly labeled with a labeled anti-Ig antibody).

[0256] Alternatively, a reaction is conducted in a liquid phase, the reaction products are separated from unreacted components, and complexes are detected; e.g, using an immobilized antibody specific for the target gene product or for the test compound, to anchor complexes formed in solution, and a second labeled antibody, specific for the other component of the complex to allow detection of anchored complexes.

[0257] 5.5.1.1 Assays for Proteins that Interact with a Target Gene Product

[0258] Any method suitable for detecting protein-protein interactions can be employed for identifying novel target protein-cellular or extracellular protein interactions.

[0259] The target gene products of the invention interact, in vivo, with one or more cellular or extracellular macromolecules, such as proteins. Such macromolecules include, but are not limited to, nucleic acid molecules and proteins identified via methods such as those described above. For purposes of this discussion, such cellular and extracellular macromolecules are referred to herein as “binding partners.” Compounds that disrupt such interactions can be useful in regulating the activity of the target gene protein, especially mutant target gene proteins. Such compounds include, but are not limited to molecules such as antibodies, peptides, and the like, as described.

[0260] The basic principle of the assay systems used to identify compounds that interfere with the interaction between the target gene product and its cellular or extracellular binding partner or partners involves preparing a reaction mixture containing the target gene product and the binding partner under conditions and for a time sufficient to allow the two to interact and bind, thus forming a complex. In order to test a compound for inhibitory activity, the reaction mixture is prepared in the presence and absence of the test compound. The test compound is initially included in the reaction mixture, or added at a time subsequent to the addition of target gene product and its cellular or extracellular binding partner. Control reaction mixtures are incubated without the test compound. The formation of complexes between the target gene protein and the cellular or extracellular binding partner is then detected. The formation of a complex in the control reaction, but not in the reaction mixture containing the test compound, indicates that the compound interferes with the interaction of the target gene protein and the interactive binding partner. Additionally, complex formation within reaction mixtures containing the test compound and normal target gene protein can also be compared to complex formation within reaction mixtures containing the test compound and a mutant target gene protein. This comparison can be important in those cases wherein it is desirable to identify compounds that disrupt intermolecular interactions involving mutant but not normal target gene proteins.

[0261] The assay for compounds that interfere with the interaction of the target gene products and binding partners is conducted in either a heterogeneous or a homogeneous format. Heterogeneous assays involve anchoring either the target gene product or the binding partner onto a solid phase and detecting complexes anchored on the solid phase at the end of the reaction. In homogeneous assays, the entire reaction is carried out in a liquid phase. In either approach, the order of addition of reactants is varied to obtain different information about the compounds being tested. For example, test compounds that interfere with the interaction between the target gene products and the binding partners, e.g, by competition, are identified by conducting the reaction in the presence of the test substance; i.e., by adding the test substance to the reaction mixture prior to or simultaneously with the target gene protein and an interacting cellular or extracellular binding partner. Alternatively, test compounds that disrupt preformed complexes, e.g. compounds with higher binding constants that displace one of the components from the complex, are tested by adding the test compound to the reaction mixture after complexes have been formed. The various formats are described briefly below.

[0262] In a heterogeneous assay system, either the target gene protein or the interactive cellular or extracellular binding partner, is anchored onto a solid surface, while the non-anchored species is labeled, either directly or indirectly. In practice, microtiter plates are conveniently utilized. The anchored species is immobilized either by non-covalent or covalent attachment. Non-covalent attachment is accomplished simply by coating the solid surface with a solution of the target gene product or binding partner and drying the coated surface. Alternatively, an immobilized antibody specific for the species to be anchored is used to anchor the species to the solid surface. The surfaces can be prepared in advance and stored.

[0263] In order to conduct the assay, the partner of the immobilized species is exposed to the coated surface with or without the test compound. After the reaction is complete, unreacted components are removed (e.g, by washing) and any complexes formed will remain immobilized on the solid surface. The detection of complexes anchored on the solid surface is accomplished in a number of ways. Where the non-immobilized species is pre-labeled, the detection of label immobilized on the surface indicates that complexes were formed. Where the non-immobilized species is not pre-labeled, an indirect label can be used to detect complexes anchored on the surface; e.g, using a labeled antibody specific for the initially non-immobilized species (the antibody, in turn, is directly labeled or indirectly labeled with a labeled anti-Ig antibody). Depending upon the order of addition of reaction components, test compounds which inhibit complex formation or which disrupt preformed complexes are detected.

[0264] Alternatively, the reaction is conducted in a liquid phase in the presence or absence of the test compound, the reaction products separated from unreacted components, and complexes detected; e.g., using an immobilized antibody specific for one of the binding components to anchor any complexes formed in solution, and a second, labeled antibody specific for the other partner to detect anchored complexes. Again, depending upon the order of addition of reactants to the liquid phase, test compounds which inhibit complex or which disrupt preformed complexes are identified.

[0265] In an alternate embodiment of the invention, a homogeneous assay can be used. In this approach, a preformed complex of the target gene protein and the interacting cellular or extracellular binding partner is prepared in which either the target gene product or its binding partner is labeled, but the signal generated by the label is quenched due to complex formation (see, e.g, U.S. Pat. No. 4,109,496 by Rubenstein which utilizes this approach for immunoassays). The addition of a test substance that competes with and displaces one of the species from the preformed complex results in the generation of a signal above background. In this way, test substances which disrupt target gene protein/cellular or extracellular binding partner interaction are identified.

[0266] In a particular embodiment, the target gene product is prepared for immobilization using recombinant DNA techniques described above. For example, the target gene coding region is fused to a glutathione-S-transferase (GST) gene using a fusion vector, such as pGEX-5X-1, in such a manner that its binding activity is maintained in the resulting fusion protein. The interactive cellular or extracellular binding partner is purified and used to raise a monoclonal antibody, using methods routinely practiced in the art and as described above. This antibody is labeled with the radioactive isotope ¹²⁵I, for example, by methods routinely practiced in the art. In a heterogeneous assay, e.g., the GST-target gene fusion protein is anchored to glutathione-agarose beads. The interactive cellular or extracellular binding partner is then added in the presence or absence of the test compound in a manner that allows interaction and binding to occur. At the end of the reaction period, unbound material can be washed away, and the labeled monoclonal antibody is added to the system and allowed to bind to the complexed components. The interaction between the target gene protein and the interactive cellular or extracellular binding partner is detected by measuring the amount of radioactivity that remains associated with the glutathione-agarose beads. A successful inhibition of the interaction by the test compound results in a decrease in measured radioactivity.

[0267] Alternatively, the GST-target gene fusion protein and the interactive cellular or extracellular binding partner are mixed together in liquid in the absence of the solid glutathione-agarose beads. The test compound is added either during or after the species are allowed to interact. This mixture is added to the glutathione-agarose beads and unbound material is washed away. Again the extent of inhibition of the target gene product/binding partner interaction is detected by adding the labeled antibody and measuring the radioactivity associated with the beads.

[0268] In another embodiment of the invention, these same techniques are employed using peptide fragments that correspond to the binding domains of the target gene product and/or the interactive cellular or extracellular binding partner (in cases where the binding partner is a protein), in place of one or both of the full length proteins. Any number of methods routinely practiced in the art are used to identify and isolate the binding sites. These methods include, but are not limited to, mutagenesis of the gene encoding one of the proteins and screening for disruption of binding in a co-immunoprecipitation assay. Compensating mutations in the gene encoding the second species in the complex are then selected. Sequence analysis of the genes encoding the respective proteins reveals the mutations that correspond to the region of the protein involved in interactive binding. Alternatively, one protein is anchored to a solid surface using methods described above, and allowed to interact with and bind to its labeled binding partner, which has been treated with a proteolytic enzyme, such as trypsin. After washing, a short, labeled peptide comprising the binding domain remains associated with the solid material, and can be isolated and identified by amino acid sequencing. Also, once the gene coding for the cellular or extracellular binding partner is obtained, short gene segments are engineered to express peptide fragments of the protein, which are tested for binding activity and purified or synthesized.

[0269] For example, and not by way of limitation, a target gene product is anchored to a solid material as described, above, by making a GST-target gene fusion protein and allowing it to bind to glutathione agarose beads. The interactive cellular or extracellular binding partner is labeled with a radioactive isotope, such as ³⁵S, and cleaved with a proteolytic enzyme such as trypsin. Cleavage products are added to the anchored GST-target gene fusion protein and allowed to bind. After washing away unbound peptides, labeled bound material, representing the cellular or extracellular binding partner binding domain, is eluted, purified, and analyzed for amino acid sequence by well known methods. Peptides so identified are produced synthetically or fused to appropriate facilitative proteins using well known recombinant DNA technology.

[0270] 5.5.1.2 Screening a Combinatorial Chemical Library

[0271] In one embodiment of the present invention, the proteins encoded by the fungal genes identified using the methods of the present invention are isolated and expressed. These recombinant proteins are then used as targets in assays to screen libraries of compounds for potential drug candidates. The generation of chemical libraries is well known in the art. For example, combinatorial chemistry is used to generate a library of compounds to be screened in the assays described herein. A combinatorial chemical library is a collection of diverse chemical compounds generated by either chemical synthesis or biological synthesis by combining a number of chemical “building block” reagents. For example, a linear combinatorial chemical library such as a polypeptide library is formed by combining amino acids in every possible combination to yield peptides of a given length. Millions of chemical compounds theoretically can be synthesized through such combinatorial mixings of chemical building blocks. For example, one commentator observed that the systematic, combinatorial mixing of 100 interchangeable chemical building blocks results in the theoretical synthesis of 100 million tetrameric compounds or 10 billion pentameric compounds. (Gallop et al., “Applications of Combinatorial Technologies to Drug Discovery, Background and Peptide Combinatorial Libraries,” Journal of Medicinal Chemistry, Vol. 37, No. 9, 1233-1250 (1994). Other chemical libraries known to those in the art may also be used, including natural product libraries.

[0272] Once generated, combinatorial libraries are screened for compounds that possess desirable biological properties. For example, compounds which may be useful as drugs or to develop drugs would likely have the ability to bind to the target protein identified, expressed and purified as discussed above. Further, if the identified target protein is an enzyme, candidate compounds would likely interfere with the enzymatic properties of the target protein. For example, the enzymatic function of a target protein may be to serve as a protease, nuclease, phosphatase, dehydrogenase, transporter protein, transcriptional enzyme, replication component, and any other type of enzyme known or unknown. Thus, the present invention contemplates using the protein products described above to screen combinatorial chemical libraries.

[0273] In some embodiments of the present invention, the biochemical activity of the protein, as well as the chemical structure of a substrate on which the protein acts is known. In other embodiments of the present invention, the biochemical activity of the target protein is unknown and the target protein has no known substrates.

[0274] In some embodiments of the present invention, libraries of compounds are screened to identify compounds that function as inhibitors of the target gene product. First, a library of small molecules is generated using methods of combinatorial library formation well known in the art. U.S. Pat. Nos. 5,463,564 and 5,574, 656, to Agrafiotis, et al., entitled “System and Method of Automatically Generating Chemical Compounds with Desired Properties,” the disclosures of which are incorporated herein by reference in their entireties, are two such teachings. Then the library compounds are screened to identify those compounds that possess desired structural and functional properties. U.S. Pat. No. 5,684,711, the disclosure of which is incorporated herein by reference in its entirety, also discusses a method for screening libraries.

[0275] To illustrate the screening process, the target gene product, an enzyme, and chemical compounds of the library are combined and permitted to interact with one another. A labeled substrate is added to the incubation. The label on the substrate is such that a detectable signal is emitted from metabolized substrate molecules. The emission of this signal permits one to measure the effect of the combinatorial library compounds on the enzymatic activity of target enzymes by comparing it to the signal emitted in the absence of combinatorial library compounds. The characteristics of each library compound are encoded so that compounds demonstrating activity against the enzyme can be analyzed and features common to the various compounds identified can be isolated and combined into future iterations of libraries.

[0276] Once a library of compounds is screened, subsequent libraries are generated using those chemical building blocks that possess the features shown in the first round of screen to have activity against the target enzyme. Using this method, subsequent iterations of candidate compounds will possess more and more of those structural and functional features required to inhibit the function of the target enzyme, until a group of enzyme inhibitors with high specificity for the enzyme can be found. These compounds can then be further tested for their safety and efficacy as antibiotics for use in mammals.

[0277] It will be readily appreciated that this particular screening methodology is exemplary only. Other methods are well known to those skilled in the art. For example, a wide variety of screening techniques are known for a large number of naturally-occurring targets when the biochemical function of the target protein is known. For example, some techniques involve the generation and use of small peptides to probe and analyze target proteins both biochemically and genetically in order to identify and develop drug leads. Such techniques include the methods described in PCT publications No. WO9935494, WO9819162, WO9954728, the disclosures of which are incorporated herein by reference in their entireties.

[0278] Similar methods may be used to identify compounds which inhibit the activity of proteins from organisms other than Candida albicans which are homologous to the Candida albicans target proteins described herein. For example, the proteins may be from animal fugal pathogens such as Aspergillus fumigatus, Aspergillus niger, Aspergillus flavis, Candida tropicalis, Candida parapsilopsis, Candida krusei, Cryptococcus neoformans, Coccidioides immitis, Exophalia dermatiditis, Fusarium oxysporum, Histoplasma capsulatum, Phneumocystis carinii, Trichosporon beigelii, Rhizopus arrhizus, Mucor rouxii, Rhizomucor pusillus, or Absidia corymbigera, or the plant fungal pathogens, such as Botrytis cinerea, Erysiphe graminis, Magnaporthe grisea, Puccinia recodita, Septoria triticii, Tilletia controversa, Ustilago maydis, or any species falling within the genera of any of the above species. In some embodiments, the proteins are from an organism other than Saccharomyces cerevisiae.

[0279] 5.5.1.3 In vitro Enzyme Assays

[0280] In one embodiment, GRACE methods and strains can be used to develop in vitro assays for biochemical activities that are shown to be essential to cell viability. A number of essential genes identified by the GRACE conditional expression methodologies display statistically significant similarity to biochemically characterized gene products from other organisms. For example, based on amino acid sequence similarity, a number of essential and fungal specific genes listed in Table II are predicted to possess the following biochemical activities:

| | |
|---|---|
| CaRHO1 | GTPase involved in (1,3)-β-glucan synthesis |
| | and polarity |
| CaYHR118c (ORC6) | Origin of replication complex subunit |
| CaYPL128c (TBP1) | Telomere binding protein |
| CaYNL256w | Dihydropteroate synthase |
| CaYKL004w (AUR1) | Phosphatidylinositol: ceramide phosphoinositol |
| | transferase |
| CaYJL090c (DPB11) | DNA polB subunit |
| CaYOL149w (DCP1) | mRNA decapping enzyme |
| CaYNL151c (RPC31) | RNA polIII subunit |
| CaYOR148c (SPP2) | RNA splicing |
| CaYER026c (CHO1) | Phosphatidylserine synthase |

[0281] Therefore, a number of well characterized standard in vitro biochemical assays (e.g, DNA binding, RNA processing, GTP binding and hydrolysis, and phosphorylation) are readily adapted for these validated drug targets. For example the validated target, CaRHO1, is used within a in vitro-based drug screen by adapting standard GTPase assays developed for a wide range of such proteins. Alternatively, novel assays are developed using biochemical information pertaining to validated drug targets within our GRACE strain collection. Any assays known in the art for enzymes with similar biochemical activities (e.g., mechanism of action, class of substrate) are adapted for screening for inhibitors of the enzymes encoded by these essential C. albicans genes.

[0282] For example, a number of features make the C. albicans gene, CaTBF1, a candidate for in vitro assay development. CaTBF1 shares significant homology to its S. cerevisiae counterpart, TBF1, a telomere binding factor. In addition, the DNA sequence CaTBF1p recognizes is known and is relatively short (Koering et al., Nucleic Acid Res. 28:2519-2526, which is incorporated herein by reference in its entirety), enabling inexpensive synthesis of oligonucleotides corresponding to this element. Moreover since this assay only requires the target protein and a DNA fragment containing the nucleotide sequence it recognizes, only purification of CaTBF1p protein is necessary in order to develop an in vitro binding assay. One preferred embodiment of this in vitro assay involves crosslinking the DNA element to the bottom of a well, incubation of radiolabeled CaTBF1p to facilitate protein-DNA binding, a series of washes to remove unbound material, and determination of the percentage of bound radiolabeled CaTBF1p. Alternatively, purified CaTBF1p is attached to the well and radiolabeled oligonucleotides added. Drug screening, including the use of high throughput screening technique, is performed by searching for compounds that inhibit the protein-DNA binding measured in this assay.

[0283] Similarly, a second validated drug target, CaORC6, is used in this type of assay since its S. cerevisiae homolog, ORC6, directly binds a DNA element within the origin of replication of yeast chromosomes (Mizushima et al., 2000, Genes & Development 14:1631-1641, which is incorporated herein by reference in its entirety). Biochemical purification of any of these targets could be achieved, for example, by PCR-based construction of C. albicans heterozygous strains in which the gene encoding the CaORC6 protein has been modified to include a carboxy-terminal hexahistidine tag enabling purification of the chimeric protein using standard Ni⁺² affinity column chromatography techniques.

[0284] For other targets like CaDPB11, a homolog of which in S. cerevisiae encode proteins that physically associate with Sld2p (Kamimura et al., 1998, Cell Biol. 18:6102-6109, which is incorporated herein by reference in its entirety), in vitro assays similar to those described above are developed. In addition, two-hybrid assays based on known physical interactions are developed for any validated targets within the GRACE strain collection.

[0285] The present invention also provides cell extracts useful in establishing in vitro assays for suitable biochemical targets. For example, in an embodiment of the present invention, GRACE-derived C. albicans strains are grown either under constitutive expression conditions or transcription repression conditions to either overproduce or deplete a particular gene product. Cellular extracts resulting from strains incubated under these two conditions are compared with extracts prepared from identically-grown wild type strains. These extracts are then used for the rapid evaluation of targets using existing in vitro assays or new assays directed toward novel gene products, without having to purify the gene product. Such a whole cell extract approach to in vitro assay development is typically necessary for targets involved in cell wall biosynthetic pathways (e.g. (1,3)-β-glucan synthesis or chitin synthesis) which involve multiple gene products that transit the secretory pathway before receiving essential post-translational modifications required for their functional activity. GRACE-derived strains for conditional expression of target genes involved in these, or other cell wall pathways (e.g. (1,6)-β-glucan synthesis) enable in vitro assays to be performed directly in C. albicans.

[0286] 5.5.2 Cell-Based Screening Assays

[0287] In various embodiments, the essential genes identified by the methods of the invention can be used in cell-based screening assays. Generally, the target essential gene in a cell can be engineered to be overexpressed or underexpressed constitutively or inducible. Given that the identity of an essential gene is known, the construction of such cells can be accomplished by methods well known in the art. The GRACE strains of the invention is a non-limiting example of the type of genetically engineered cells that can be used in the cell-based screening assays of the invention.

[0288] Current cell-based assays used to identify or to characterize compounds for drug discovery and development frequently depend on detecting the ability of a test compound to modulate the activity of a target molecule located within a cell or located on the surface of a cell. Most often such target molecules are proteins such as enzymes, receptors and the like. However, target molecules also include other molecules such as DNAs, lipids, carbohydrates and RNAs including messenger RNAs, ribosomal RNAs, tRNAs and the like. A number of highly sensitive cell-based assay methods are available to those of skill in the art to detect binding and interaction of test compounds with specific target molecules. However, these methods are generally not highly effective when the test compound binds to or otherwise interacts with its target molecule with moderate or low affinity. In addition, the target molecule may not be readily accessible to a test compound in solution, such as when the target molecule is located inside the cell or within a cellular compartment such as the periplasm of a bacterial cell. Thus, current cell-based assay methods are limited in that they are not effective in identifying or characterizing compounds that interact with their targets with moderate to low affinity or compounds that interact with targets that are not readily accessible.

[0289] The cell-based assay methods of the present invention have substantial advantages over current cell-based assays. These advantages derive from the use of sensitized cells in which the level or activity of at least one gene product required for fungal proliferation, virulence, or pathogenicity (the target molecule) has been reduced, and preferably specifically reduced to the point where the presence or absence of its function becomes a rate-determining step for fungal growth, survival, proliferation, virulence, or pathogenicity. Such sensitized cells become much more sensitive to compounds that are active against the affected target molecule. For example, sensitized cells are obtained by growing a GRACE strain in the presence of a concentration of inducer or repressor which provides a level of a gene product required for fungal growth, survival, proliferation, virulence, or pathogenicity such that the presence or absence of its function becomes a rate-determining step for fungal growth, survival, proliferation, virulence, or pathogenicity. Thus, cell-based assays of the present invention are capable of detecting compounds exhibiting low or moderate potency against the target molecule of interest because such compounds are substantially more potent on sensitized cells than on non-sensitized cells. The effect may be such that a test compound may be two to several times more potent, at least 10 times more potent, at least 20 times more potent, at least 50 times more potent, at least 100 times more potent, at least 1000 times more potent, or even more than 1000 times more potent when tested on the sensitized cells as compared to the non-sensitized cells.

[0290] Due in part to the increased appearance of antibiotic resistance in pathogenic microorganisms and to the significant side-effects associated with some currently used antibiotics, novel antibiotics acting at new targets are highly sought after in the art. Yet, another limitation in the current art related to cell-based assays is the problem of repeatedly identifying hits against the same kinds of target molecules in the same limited set of biological pathways. This may occur when compounds acting at such new targets are discarded, ignored or fail to be detected because compounds acting at the “old” targets are encountered more frequently and are more potent than compounds acting at the new targets. As a result, the majority of antibiotics in use currently interact with a relatively small number of target molecules within an even more limited set of biological pathways.

[0291] The use of sensitized cells of the current invention provides a solution to the above problems in two ways. First, desired compounds acting at a target of interest, whether a new target or a previously known but poorly exploited target, can now be detected above the “noise” of compounds acting at the “old” targets due to the specific and substantial increase in potency of such desired compounds when tested on the sensitized cells of the current invention. Second, the methods used to sensitize cells to compounds acting at a target of interest may also sensitize these cells to compounds acting at other target molecules within the same biological pathway. For example, expression of a gene encoding a ribosomal protein at a level such that the function of the ribosomal protein becomes rate limiting for fungal growth, survival, proliferation, virulence, or pathogenicity is expected to sensitize the cell to compounds acting at that ribosomal protein to compounds acting at any of the ribosomal components (proteins or rRNA) or even to compounds acting at any target which is part of the protein synthesis pathway. Thus an important advantage of the present invention is the ability to reveal new targets and pathways that were previously not readily accessible to drug discovery methods.

[0292] Sensitized cells of the present invention are prepared by reducing the activity or level of a target molecule. The target molecule may be a gene product, such as an RNA or polypeptide produced from the nucleic acids required for fungal growth, survival, proliferation, virulence, or pathogenicity described herein. In addition, the target may be an RNA or polypeptide in the same biological pathway as the nucleic acids required for fungal growth, survival, proliferation, virulence, or pathogenicity as described herein. Such biological pathways include, but are not limited to, enzymatic, biochemical and metabolic pathways as well as pathways involved in the production of cellular structures such as the cell membrane.

[0293] Current methods employed in the arts of medicinal and combinatorial chemistries are able to make use of structure-activity relationship information derived from testing compounds in various biological assays including direct binding assays and cell-based assays. Occasionally compounds are directly identified in such assays that are sufficiently potent to be developed as drugs. More often, initial hit compounds exhibit moderate or low potency. Once a hit compound is identified with low or moderate potency, directed libraries of compounds are synthesized and tested in order to identify more potent leads. Generally these directed libraries are combinatorial chemical libraries consisting of compounds with structures related to the hit compound but containing systematic variations including additions, subtractions and substitutions of various structural features. When tested for activity against the target molecule, structural features are identified that either alone or in combination with other features enhance or reduce activity. This information is used to design subsequent directed libraries containing compounds with enhanced activity against the target molecule. After one or several iterations of this process, compounds with substantially increased activity against the target molecule are identified and may be further developed as drugs. This process is facilitated by use of the sensitized cells of the present invention since compounds acting at the selected targets exhibit increased potency in such cell-based assays, thus; more compounds can now be characterized providing more useful information than would be obtained otherwise.

[0294] Thus, it is now possible using cell-based assays of the present invention to identify or characterize compounds that previously would not have been readily identified or characterized including compounds that act at targets that previously were not readily exploited using cell-based assays. The process of evolving potent drug leads from initial hit compounds is also substantially improved by the cell-based assays of the present invention because, for the same number of test compounds, more structure-function relationship information is likely to be revealed.

[0295] The method of sensitizing a cell entails selecting a suitable gene. A suitable gene is one whose expression is required for the growth, survival, proliferation, virulence, or pathogenicity of the cell to be sensitized. The next step is to obtain a cell in which the level or activity of the target can be reduced to a level where it is rate limiting for growth, survival, proliferation, virulence or pathogenicity. For example, the cell may be a GRACE strain in which the selected gene is under the control of a regulatable promoter. The amount of RNA transcribed from the selected gene is limited by varying the concentration of an inducer or repressor which acts on the regulatable promoter, thereby varying the activity of the promoter driving transcription of the RNA. Thus, cells are sensitized by exposing them to an inducer or repressor concentration that results in an RNA level such that the function of the selected gene product becomes rate limiting for fungal growth, survival, proliferation, virulence, or pathogenicity.

[0296] In one embodiment of the cell-based assays, GRACE strains, in which the sequences required for fungal growth, survival, proliferation, virulence, or pathogenicity of Candida albicans described herein are under the control of a regulatable promoter, are grown in the presence of a concentration of inducer or repressor which causes the function of the gene products encoded by these sequences to be rate limiting for fungal growth, survival, proliferation, virulence, or pathogenicity. To achieve that goal, a growth inhibition dose curve of inducer or repressor is calculated by plotting various doses of inducer or repressor against the corresponding growth inhibition caused by the limited levels of the gene product required for fungal proliferation. From this dose-response curve, conditions providing various growth rates, from 1 to 100% as compared to inducer or repressor-free growth, can be determined. For example, if the regulatable promoter is repressed by tetracycline, the GRACE strain may be grown in the presence of varying levels of tetracycline. Similarly, inducible promoters may be used. In this case, the GRACE strains are grown in the presence of varying concentrations of inducer. For example, the highest concentration of the inducer or repressor that does not reduce the growth rate significantly can be estimated from the dose-response curve. Cellular proliferation can be monitored by growth medium turbidity via OD measurements. In another example, the concentration of inducer or repressor that reduces growth by 25% can be predicted from the dose-response curve. In still another example, a concentration of inducer or repressor that reduces growth by 50% can be calculated from the dose-response curve. Additional parameters such as colony forming units (cfu) are also used to measure cellular growth, survival and/or viability.

[0297] In another embodiment of the present invention, an individual haploid strain may similarly be used as the basis for detection of an antifungal or therapeutic agent. In this embodiment, the test organism (e.g. Aspergillus fumigatus, Cryptococcus neoformans, Magnaporthe grisea or any other haploid organisms represented in Table I) is a strain constructed by modifying the single allele of the target gene in one step by recombination with a promoter replacement fragment comprising a heterologous regulatable promoter, such that the expression of the gene is conditionally regulated by the heterologous promoter. Like individual diploid GRACE strains, sensitized haploid cells may similarly be used in whole cell-based assay methods to identify compounds displaying a preferential activity against the affected target.

[0298] In various embodiments, the modified strain is grown under a first set of conditions where the heterologous promoter is expressed at a relatively low level (i.e. partially repressed) and the extent of growth determined. This experiment is repeated in the presence of a test compound and a second measurement of growth obtained. The extent of growth in the presence and in the absence of the test compound are then compared to provide a first indicator value. Two further experiments are performed, using non-repressing growth conditions where the target gene is expressed at substantially higher levels than in the first set of conditions. The extent of growth is determined in the presence and absence of the test compound under the second set of conditions to obtain a second indicator value. The first and second indicator values are then compared. If the indicator values are essentially the same, the data suggest that the test compound does not inhibit the test target. However, if the two indicator values are substantially different, the data indicates that the level of expression of the target gene product may determine the degree of inhibition by the test compound and, therefore, it is likely that the gene product is the target of that test compound. Whole-cell assays comprising collections or subsets of multiple sensitized strains may also be screened, for example, in a series of 96-well, 384-well, or even 1586-well microtiter plates, with each well containing individual strains sensitized to identify compounds displaying a preferential activity against each affected target comprising a target set or subset selected from, but not limited to the group consisting of fungal-specific, pathogen-specific, desired biochemical-function, human-homolog, cellular localization, and signal transduction cascade target sets.

[0299] Cells to be assayed are exposed to the above-determined concentrations of inducer or repressor. The presence of the inducer or repressor at this sub-lethal concentration reduces the amount of the proliferation-required gene product to the lowest amount in the cell that will support growth. Cells grown in the presence of this concentration of inducer or repressor are therefore specifically more sensitive to inhibitors of the proliferation-required protein or RNA of interest as well as to inhibitors of proteins or RNAs in the same biological pathway as the proliferation-required protein or RNA of interest but not specifically more sensitive to inhibitors of unrelated proteins or RNAs.

[0300] Cells pretreated with sub-inhibitory concentrations of inducer or repressor, which therefore contain a reduced amount of proliferation-required target gene product, are used to screen for compounds that reduce cell growth. The sub-lethal concentration of inducer or repressor may be any concentration consistent with the intended use of the assay to identify candidate compounds to which the cells are more sensitive than are control cells in which this gene product is not rate-limiting. For example, the sub-lethal concentration of the inducer or repressor may be such that growth inhibition is at least about 5%, at least about 8%, at least about 10%, at least about 20%, at least about 30%, at least about 40%, at least about 50%, at least about 60% at least about 75%, at least 80%, at least 90%, at least 95% or more than 95%. Cells which are pre-sensitized using the preceding method are more sensitive to inhibitors of the target protein because these cells contain less target protein to inhibit than wild-type cells.

[0301] It will be appreciated that similar methods may be used to identify compounds which inhibit virulence or pathogenicity. In such methods, the virulence or pathogenicity of cells exposed to the candidate compound which express rate limiting levels of a gene product involved in virulence or pathogenicity is compared to the virulence or pathogenicity of cells exposed to the candidate compound in which the levels of the gene product are not rate limiting. Virulence or pathogenicity may be measured using the techniques described herein.

[0302] In another embodiment of the cell-based assays of the present invention, the level or activity of a gene product required for fungal growth, survival, proliferation, virulence, or pathogenicity is reduced using a mutation, such as a temperature sensitive mutation, in the sequence required for fungal growth, survival, proliferation, virulence, or pathogenicity and an inducer or repressor level which, in conjunction with the temperature sensitive mutation, provides levels of the gene product required for fungal growth, survival, proliferation, virulence, or pathogenicity which are rate limiting for proliferation. Growing the cells at an intermediate temperature between the permissive and restrictive temperatures of the temperature sensitive mutant where the mutation is in a gene required for fungal growth, survival, proliferation, virulence, or pathogenicity produces cells with reduced activity of the gene product required for growth, survival, proliferation, virulence, or pathogenicity. The concentration of inducer or repressor is chosen so as to further reduces the activity of the gene product required for fungal growth, survival, proliferation, virulence, or pathogenicity. Drugs that may not have been found using either the temperature sensitive mutation or the inducer or repressor alone may be identified by determining whether cells in which expression of the nucleic acid encoding the proliferation-required gene product has been reduced and which are grown at a temperature between the permissive temperature and the restrictive temperature are substantially more sensitive to a test compound than cells in which expression of the gene product required for fungal growth, survival, proliferation, virulence, or pathogenicity has not been reduced and which are grown at a permissive temperature. Also drugs found previously from either the use of the inducer or repressor alone or the temperature sensitive mutation alone may have a different sensitivity profile when used in cells combining the two approaches, and that sensitivity profile may indicate a more specific action of the drug in inhibiting one or more activities of the gene product.

[0303] Temperature sensitive mutations may be located at different sites within a gene and may lie within different domains of the protein. For example, the dnaB gene of Escherichia coli encodes the replication fork DNA helicase. DnaB has several domains, including domains for oligomerization, ATP hydrolysis, DNA binding, interaction with primase, interaction with DnaC, and interaction with DnaA. Temperature sensitive mutations in different domains of DnaB confer different phenotypes at the restrictive temperature, which include either an abrupt stop or a slow stop in DNA replication either with or without DNA breakdown (Wechsler, J. A. and Gross, J. D. 1971 Escherichia coli mutants temperature-sensitive for DNA synthesis. Mol. Gen. Genetics 113:273-284) and termination of growth or cell death. Thus, temperature sensitive mutations in different domains of the protein may be used in conjunction with GRACE strains in which expression of the protein is under the control of a regulatable promoter.

[0304] It will be appreciated that the above method may be performed with any mutation which reduces but does not eliminate the activity or level of the gene product which is required for fungal growth, survival, proliferation, virulence, or pathogenicity.

[0305] When screening for antimicrobial agents against a gene product required for fungal growth, survival, proliferation, virulence, or pathogenicity, growth inhibition, virulence or pathogenicity of cells containing a limiting amount of that gene product can be assayed. Growth inhibition can be measured by directly comparing the amount of growth, measured by the optical density of the culture relative to uninoculated growth medium, between an experimental sample and a control sample. Alternative methods for assaying cell proliferation include measuring green fluorescent protein (GFP) reporter construct emissions, various enzymatic activity assays, and other methods well known in the art. Virulence and pathogenicity may be measured using the techniques described herein.

[0306] It will be appreciated that the above method may be performed in solid phase, liquid phase, a combination of the two preceding media, or in vivo. For example, cells grown on nutrient agar containing the inducer or repressor which acts on the regulatable promoter used to express the proliferation required gene product may be exposed to compounds spotted onto the agar surface. A compound's effect may be judged from the diameter of the resulting killing zone, the area around the compound application point in which cells do not grow. Multiple compounds may be transferred to agar plates and simultaneously tested using automated and semi-automated equipment including but not restricted to multi-channel pipettes (for example the Beckman Multimek) and multi-channel spotters (for example the Genomic Solutions Flexys). In this way multiple plates and thousands to millions of compounds may be tested per day.

[0307] The compounds are also tested entirely in liquid phase using microtiter plates as described below. Liquid phase screening may be performed in microtiter plates containing 96, 384, 1536 or more wells per microtiter plate to screen multiple plates and thousands to millions of compounds per day. Automated and semi-automated equipment are used for addition of reagents (for example cells and compounds) and for determination of cell density.

[0308] The compounds are also tested in vivo using the methods described herein.

[0309] It will be appreciated that each of the above cell-based assays may be used to identify compounds which inhibit the activity of gene products from organisms other than Candida albicans which are homologous to the Candida albicans gene products described herein. For example, the target gene products may be from animal fugal pathogens such as Aspergillus fumigatus, Aspergillus niger, Aspergillus flavis, Candida tropicalis, Candida parapsilopsis, Candida krusei, Cryptococcus neoformans, Coccidioides immitis, Exophalia dermatiditis, Fusarium oxysporum, Histoplasma capsulatum, Phneumocystis carinii, Trichosporon beigelii, Rhizopus arrhizus, Mucor rouxii, Rhizomucor pusillus, or Absidia corymbigera, or the plant fungal pathogens, such as Botrytis cinerea, Erysiphe graminis, Magnaporthe grisea, Puccinia recodita, Septoria triticii, Tilletia controversa, Ustilago maydis, or any species falling within the genera of any of the above species. In some embodiments, the gene products are from an organism other than Saccharomyces cerevisiae.

[0310] 5.5.2.1 Cell-Based Assays Using GRACE Strains

[0311] GRACE strains in which one allele of a gene required for fungal growth, survival, proliferation, virulence, or pathogenicity is inactivated while the other allele is under the control of a regulatable promoter are constructed using the methods described herein. For the purposes of the present example, the regulatable promoter may be the tetracycline regulated promoter described herein, but it will be appreciated that any regulatable promoter may be used.

[0312] In one embodiment of the present invention, an individual GRACE strain is used as the basis for detection of a therapeutic agent active against a diploid pathogenic fungal cell. In this embodiment, the test organism is a GRACE strain having a modified allelic gene pair, where the first allele of the gene has been inactivated by the insertion of, or replacement by, a nucleotide sequence encoding an expressible, dominant selectable marker and the second allele has been modified, by recombination, to place the second allele under the controlled expression of a heterologous promoter. This test GRACE strain is then grown under a first set of conditions where the heterologous promoter is expressed at a relatively low level (“repressing”) and the extent of growth determined. This measurement may be carried out using any appropriate standard known to those skilled in the art including optical density, wet weight of pelleted cells, total cell count, viable count, DNA content, and the like. This experiment is repeated in the presence of a test compound and a second measurement of growth obtained. The extent of growth in the presence and in the absence of the test compound, which can conveniently be expressed in terms of indicator values, are then compared. A dissimilarity in the extent of growth or indicator values provides an indication that the test compound may interact with the target essential gene product.

[0313] To gain more information, two further experiments are performed, using a second set of “non-repressing” growth conditions where the second allele, under the control of the heterologous promoter, is expressed at a level substantially higher than in the first set of conditions described above. The extent of growth or indicator values is determined in the presence and absence of the test compound under this second set of conditions. The extent of growth or indicator values in the presence and in the absence of the test compound are then compared. A dissimilarity in the extent of growth or indicator values provides an indication that may interact with the target essential gene product.

[0314] Furthermore, the extent of growth in the first and in the second set of growth conditions can also be compared. If the extent of growth is essentially the same, the data suggest that the test compound does not inhibit the gene product encoded by the modified allelic gene pair carried by the GRACE strain tested. However, if the extent of growth are substantially different, the data indicate that the level of expression of the subject gene product may determine the degree of inhibition by the test compound and, therefore, it is likely that the subject gene product is the target of that test compound.

[0315] Although each GRACE strain can be tested individually, it will be more efficient to screen entire sets or subsets of a GRACE strain collection at one time. Therefore in one aspect of this invention, arrays may be established, for example in a series of 96-well microtiter plates, with each well containing a single GRACE strain. In one representative, but not limiting approach, four microtiter plates are used, comprising two pairs where the growth medium in one pair supports greater expression of the heterologous promoter controlling the remaining active allele in each strain, than the medium in the other pair of plates. One member of each pair is supplemented with a compound to be tested and measurements of growth of each GRACE strain is determined using standard procedures to provide indicator values for each isolate tested. The collection of diploid pathogenic GRACE strains used in such a method for screening for therapeutic agents may comprise, for example, a substantially complete set of all the modified allelic gene pairs of the organism, the substantially complete set of all the modified allelic essential gene pairs of the organism or the collection may be selected from a subset of GRACE strains selected from, but not limited to the group consisting of fungal-specific, pathogen-specific, desired biochemical-function, human-homolog, cellular localization, and signal transduction cascade target sets.

[0316] The GRACE strains are grown in medium comprising a range of tetracycline concentrations to obtain the growth inhibitory dose-response curve for each strain. First, seed cultures of the GRACE strains are grown in the appropriate medium. Subsequently, aliquots of the seed cultures are diluted into medium containing varying concentrations of tetracycline. For example, the GRACE strains may be grown in duplicate cultures containing two-fold serial dilutions of tetracycline. Additionally, control cells are grown in duplicate without tetracycline. The control cultures are started from equal amounts of cells derived from the same initial seed culture of a GRACE strain of interest. The cells are grown for an appropriate period of time and the extent of growth is determined using any appropriate technique. For example, the extent of growth may be determined by measuring the optical density of the cultures. When the control culture reaches mid-log phase the percent growth (relative to the control culture) for each of the tetracycline containing cultures is plotted against the log concentrations of tetracycline to produce a growth inhibitory dose response curve for tetracycline. The concentration of tetracycline that inhibits cell growth to 50% (IC₅₀) as compared to the 0 mM tetracyline control (0% growth inhibition) is then calculated from the curve. Alternative methods of measuring growth are also contemplated. Examples of these methods include measurements of proteins, the expression of which is engineered into the cells being tested and can readily be measured. Examples of such proteins include green fluorescent protein (GFP) and various enzymes.

[0317] Cells are pretreated with the selected concentration of tetracycline and then used to test the sensitivity of cell populations to candidate compounds. For example, the cells may be pretreated with a concentration of tetracycline which inhibits growth by at least about 5%, at least about 8%, at least about 10%, at least about 20%, at least about 30%, at least about 40%, at least about 50%, at least about 60% at least about 75%, at least 80%, at least 90%, at least 95% or more than 95%. The cells are then contacted with the candidate compound and growth of the cells in tetracycline containing medium is compared to growth of the control cells in medium which lacks tetracycline to determine whether the candidate compound inhibits growth of the sensitized cells (i.e. the cells grown in the presence of tetracycline). For example, the growth of the cells in tetracycline containing medium may be compared to the growth of the cells in medium lacking tetracycline to determine whether the candidate compound inhibits the growth of the sensitized cells (i.e. the cells grown in the presence of tetracyline) to a greater extent than the candidate compound inhibits the growth of cells grown in the absence of tetracycline. For example, if a significant difference in growth is observed between the sensitized cells (i.e. the cells grown in the presence of tetracycline) and the non-sensitized cells (i.e. the cells grown in the absence of tetracycline), the candidate compound may be used to inhibit the proliferation of the organism or may be further optimized to identify compounds which have an even greater ability to inhibit the growth, survival, or proliferation of the organism.

[0318] Similarly, the virulence or pathogenicity of cells exposed to a candidate compound which express a rate limiting amount of a gene product required for virulence or pathogenicity may be compared to the virulence or pathogenicity of cells exposed to the candidate compound in which the level of expression of the gene product required for virulence or pathogenicity is not rate limiting. In such methods, test animals are challenged with the GRACE strain and fed a diet containing the desired amount of tetracycline and the candidate compound. Thus, the GRACE strain infecting the test animals expresses a rate limiting amount of a gene product required for virulence or pathogenicity (i.e. the GRACE cells in the test animals are sensitized). Control animals are challenged with the GRACE strain and are fed a diet containing the candidate compound but lacking tetracycline. The virulence or pathogenicity of the GRACE strain in the test animals is compared to that in the control animals. For example, the virulence or pathogenicity of the GRACE strain in the test animals may be compared to that in the control animals to determine whether the candidate compound inhibits the virulence or pathogenicity of the sensitized GRACE cells (i.e. the cells in the animals whose diet included tetracycline) to a greater extent than the candidate compound inhibits the growth of the GRACE cells in animals whose diet lacked tetracycline. For example, if a significant difference in growth is observed between the sensitized GRACE cells (i.e. the cells in animals whose diet included tetracycline) and the non-sensitized cells (i.e. the GRACE cells in animals whose diet did not include tetracycline), the candidate compound may be used to inhibit the virulence or pathogenicity of the organism or may be further optimized to identify compounds which have an even greater ability to inhibit the virulence or pathogenicity of the organism. Virulence or pathogenicity may be measured using the techniques described therein.

[0319] It will be appreciated that the above cell-based assays may be used to identify compounds which inhibit the activity of gene products from organisms other than Candida albicans which are homologous to the Candida albicans gene products described herein. For example, the gene products may be from animal fugal pathogens such as Aspergillus fumigatus, Aspergillus niger, Aspergillus flavis, Candida tropicalis, Candida parapsilopsis, Candida krusei, Cryptococcus neoformans, Coccidioides immitis, Exophalia dermatiditis, Fusarium oxysporum, Histoplasma capsulatum, Phneumocystis carinii, Trichosporon beigelii, Rhizopus arrhizus, Mucor rouxii, Rhizomucor pusillus, or Absidia corymbigera, or the plant fungal pathogens, such as Botrytis cinerea, Erysiphe graminis, Magnaporthe grisea, Puccinia recodita, Septoria triticii, Tilletia controversa, Ustilago maydis, or any species falling within the genera of any of the above species. In some embodiments, the gene products are from an organism other than Saccharomyces cerevisiae.

[0320] The cell-based assay described above may also be used to identify the biological pathway in which a nucleic acid required for fungal proliferation, virulence or pathogenicity or the gene product of such a nucleic acid lies. In such methods, cells expressing a rate limiting level of a target nucleic acid required for fungal proliferation, virulence or pathogenicity and control cells in which expression of the target nucleic acid is not rate limiting are contacted with a panel of antibiotics known to act in various pathways. If the antibiotic acts in the pathway in which the target nucleic acid or its gene product lies, cells in which expression of target nucleic acid is rate limiting will be more sensitive to the antibiotic than cells in which expression of the target nucleic acid is not rate limiting.

[0321] As a control, the results of the assay may be confirmed by contacting a panel of cells in which the levels of many different genes required for proliferation, virulence or pathogenicity, including the target gene, is rate limiting. If the antibiotic is acting specifically, heightened sensitivity to the antibiotic will be observed only in the cells in which the target gene is rate limiting (or cells in which genes in the same pathway as the target gene is rate limiting) but will not be observed generally in which a gene product required for proliferation, virulence or pathogenicity is rate limiting.

[0322] It will be appreciated that the above method for identifying the biological pathway in which a nucleic acid required for proliferation, virulence or pathogenicity lies may be applied to nucleic acids from organisms other than Candida albicans which are homologous to the Candida albicans nucleic acids described herein. For example, the nucleic acids may be from animal fugal pathogens such as Aspergillus fumigatus, Aspergillus niger, Aspergillus flavis, Candida tropicalis, Candida parapsilopsis, Candida krusei, Cryptococcus neoformans, Coccidioides immitis, Exophalia dermatiditis, Fusarium oxysporum, Histoplasma capsulatum, Phneumocystis carinii, Trichosporon beigelii, Rhizopus arrhizus, Mucor rouxii, Rhizomucor pusillus, or Absidia corymbigera, or the plant fungal pathogens, such as Botrytis cinerea, Erysiphe graminis, Magnaporthe grisea, Puccinia recodita, Septoria triticii, Tilletia controversa, Ustilago maydis, or any species falling within the genera of any of the above species. In some embodiments, the nucleic acids are from an organism other than Saccharomyces cerevisiae.

[0323] Similarly, the above method may be used to determine the pathway on which a test compound, such as a test antibiotic acts. A panel of cells, each of which expresses a rate limiting amount of a gene product required for fungal proliferation, virulence or pathogenicity where the gene product lies in a known pathway, is contacted with a compound for which it is desired to determine the pathway on which it acts. The sensitivity of the panel of cells to the test compound is determined in cells in which expression of the nucleic acid encoding the gene product required for proliferation, virulence or pathogenicity is at a rate limiting level and in control cells in which expression of the gene product required for proliferation, virulence or pathogenicity is not at a rate limiting level. If the test compound acts on the pathway in which a particular gene product required for proliferation, virulence, or pathogenicity lies, cells in which expression of that particular gene product is at a rate limiting level will be more sensitive to the compound than the cells in which gene products in other pathways are at a rate limiting level. In addition, control cells in which expression of the particular gene required for fungal proliferation, virulence or pathogenicity is not rate limiting will not exhibit heightened sensitivity to the compound. In this way, the pathway on which the test compound acts may be determined.

[0324] It will be appreciated that the above method for determining the pathway on which a test compound acts may be applied to organisms other than Candida albicans by using panels of cells in which the activity or level of gene products which are homologous to the Candida albicans gene products described herein is rate limiting. For example, the gene products may be from animal fugal pathogens such as Aspergillus fumigatus, Aspergillus niger, Aspergillus flavis, Candida tropicalis, Candida parapsilopsis, Candida krusei, Cryptococcus neoformans, Coccidioides immitis, Exophalia dermatiditis, Fusarium oxysporum, Histoplasma capsulatum, Pneumocystis carinii, Trichosporon beigelii, Rhizopus arrhizus, Mucor rouxii, Rhizomucor pusillus, or Absidia corymbigera, or the plant fungal pathogens, such as Botrytis cinerea, Erysiphe graminis, Magnaporthe grisea, Puccinia recodita, Septoria triticii, Tilletia controversa, Ustilago maydis, or any species falling within the genera of any of the above species. In some embodiments, the gene products are from an organism other than Saccharomyces cerevisiae. Example 6.4, infra, provided below describes one method for performing such assays.

[0325] One skilled in the art will appreciate that further optimization of the assay conditions, such as the concentration of inducer or repressor used to produce rate limiting levels of a gene product required for fungal proliferation, virulence or pathogenicity and/or the growth conditions used for the assay (for example incubation temperature and medium components) may further increase the selectivity and/or magnitude of the antibiotic sensitization exhibited.

[0326] It will be appreciated that the above methods for identifying the pathway in which a gene required for growth, survival, proliferation, virulence or pathogenicity lies or the pathway on which an antibiotic acts may be performed using organisms other than Candida albicans in which gene products homologous to the Candida albicans gene products described herein are rate limiting. For example, the gene products may be from animal fugal pathogens such as Aspergillus fumigatus, Aspergillus niger, Aspergillus flavis, Candida tropicalis, Candida parapsilopsis, Candida krusei, Cryptococcus neoformans, Coccidioides immitis, Exophalia dermatiditis, Fusarium oxysporum, Histoplasma capsulatum, Pneumocystis carinii, Trichosporon beigelii, Rhizopus arrhizus, Mucor rouxii, Rhizomucor pusillus, or Absidia corymbigera, or the plant fungal pathogens, such as Botrytis cinerea, Erysiphe graminis, Magnaporthe grisea, Puccinia recodita, Septoria triticii, Tilletia controversa, Ustilago maydis, or any species falling within the genera of any of the above species. In some embodiments, the gene products are from an organism other than Saccharomyces cerevisiae.

[0327] Furthermore, as discussed above, panels of GRACE strains may be used to characterize the point of intervention of any compound affecting an essential biological pathway including antibiotics with no known mechanism of action.

[0328] Another embodiment of the present invention is a method for determining the pathway against which a test antibiotic compound is active, in which the activity of proteins or nucleic acids involved in pathways required for fungal growth, survival, proliferation, virulence or pathogenicity is reduced by contacting cells with a sub-lethal concentration of a known antibiotic which acts against the protein or nucleic acid. The method is similar to those described above for determining which pathway a test antibiotic acts against, except that rather than reducing the activity or level of a gene product required for fungal proliferation, virulence or pathogenicity by expressing the gene product at a rate limiting amount in a GRACE strain, the activity or level of the gene product is reduced using a sub-lethal level of a known antibiotic which acts against the gene product.

[0329] Growth inhibition resulting from the presence of sub-lethal concentration of the known antibiotic may be at least about 5%, at least about 8%, at least about 10%, at least about 20%, at least about 30%, at least about 40%, at least about 50%, at least about 60%, or at least about 75%, at least 80%, at least 90%, at least 95% or more than 95%.

[0330] Alternatively, the sub-lethal concentration of the known antibiotic may be determined by measuring the activity of the target proliferation-required gene product rather than by measuring growth inhibition.

[0331] Cells are contacted with a combination of each member of a panel of known antibiotics at a sub-lethal level and varying concentrations of the test antibiotic. As a control, the cells are contacted with varying concentrations of the test antibiotic alone. The IC₅₀ of the test antibiotic in the presence and absence of the known antibiotic is determined. If the IC₅₀s in the presence and absence of the known drug are substantially similar, then the test drug and the known drug act on different pathways. If the IC₅₀s are substantially different, then the test drug and the known drug act on the same pathway.

[0332] Similar methods may be performed using known antibiotics which act on a gene product homologous to the Candida albicans sequences described herein. The homolgous gene product may be from animal fugal pathogens such as Aspergillus fumigatus, Aspergillus niger, Aspergillus flavis, Candida tropicalis, Candida parapsilopsis, Candida krusei, Cryptococcus neoformans, Coccidioides immitis, Exophalia dermatiditis, Fusarium oxysporum, Histoplasma capsulatum, Pneumocystis carinii, Trichosporon beigelii, Rhizopus arrhizus, Mucor rouxii, Rhizomucor pusillus, or Absidia corymbigera, or the plant fungal pathogens, such as Botrytis cinerea, Erysiphe graminis, Magnaporthe grisea, Puccinia recodita, Septoria triticii, Tilletia controversa, Ustilago maydis, or any species falling within the genera of any of the above species. In some embodiments, the gene products are from an organism other than Saccharomyces cerevisiae.

[0333] Another embodiment of the present invention is a method for identifying a candidate compound for use as an antibiotic in which the activity of target proteins or nucleic acids involved in pathways required for fungal proliferation, virulence or pathogenicity is reduced by contacting cells with a sub-lethal concentration of a known antibiotic which acts against the target protein or nucleic acid. The method is similar to those described above for identifying candidate compounds for use as antibiotics except that rather than reducing the activity or level of a gene product required for proliferation, virulence or pathogenicity using GRACE strains which express a rate limiting level of the gene product, the activity or level of the gene product is reduced using a sub-lethal level of a known antibiotic which acts against the proliferation required gene product.

[0334] The growth inhibition from the sub-lethal concentration of the known antibiotic may be at least about 5%, at least about 8%, at least about 10%, at least about 20%, at least about 30%, at least about 40%, at least about 50%, at least about 60%, or at least about 75%, or more.

[0335] Alternatively, the sub-lethal concentration of the known antibiotic may be determined by measuring the activity of the target proliferation-required gene product rather than by measuring growth inhibition.

[0336] In order to characterize test compounds of interest, cells are contacted with a panel of known antibiotics at a sub-lethal level and one or more concentrations of the test compound. As a control, the cells are contacted with the same concentrations of the test compound alone. The IC₅₀ of the test compound in the presence and absence of the known antibiotic is determined. If the IC₅₀ of the test compound is substantially different in the presence and absence of the known drug then the test compound is a good candidate for use as an antibiotic. As discussed above, once a candidate compound is identified using the above methods its structure may be optimized using standard techniques such as combinatorial chemistry.

[0337] Similar methods may be performed using known antibiotics which act on a gene product homologous to the Candida albicans sequences described herein. The homolgous gene product may be from animal fugal pathogens such as Aspergillus fumigatus, Aspergillus niger, Aspergillus flavis, Candida tropicalis, Candida parapsilopsis, Candida krusei, Cryptococcus neoformans, Coccidioides immitis, Exophalia dermatiditis, Fusarium oxysporum, Histoplasma capsulatum, Pneumocystis carinii, Trichosporon beigelii, Rhizopus arrhizus, Mucor rouxii, Rhizomucor pusillus, or Absidia corymbigera, or the plant fungal pathogens, such as Botrytis cinerea, Erysiphe graminis, Magnaporthe grisea, Puccinia recodita, Septoria triticii, Tilletia controversa, Ustilago maydis, or any species falling within the genera of any of the above species. In some embodiments, the gene products are from an organism other than Saccharomyces cerevisiae.

[0338] An exemplary target gene product is encoded by CaTBF1. A number of features make this C. albicans gene product a valuable drug target. First, the protein encoded by CaTBF1 is compatible with in vitro high throughput screening of compounds that inhibit its activity. Modulated expression of this gene product in whole cell assays could be performed in parallel with in vitro assays to broaden the spectrum of possible inhibitory compounds identified. In addition, demonstration of the predicted physical interaction between CaTbf1p and chromosomal telomerases could be used to develop two-hybrid assays for drug screening purposes. Finally, because CaTBF1 is a fungal specific gene, its nucleotide sequence could serve in designing PCR-based diagnostic tools for fungal infection.

[0339] Other validated drug targets included in the GRACE-derived strain collection that represent preferred drug targets include the products encoded by the following C. albicans genes: CaRHO1, CaERG8, CaAUR1, and CaCHO1, as well as those encoded by SEQ ID NOs.: 6001-6932. The ability to manipulate these genes using GRACE methods of the present invention will improve drug screening practices now in use that are designed to identify inhibitors of these critical gene products.

[0340] In another embodiment of the present invention, all potential drug targets of a pathogen could be screened simultaneously against a library of compounds using, for example a 96 well microtiter plate format, where growth, measured by optical density or pellet size after centrifugation, may be determined for each well. A genomic approach to drug screening eliminates reliance upon potentially arbitrary and artificial criteria used in evaluating which target to screen and instead allows all potential targets to be screened. This approach not only offers the possibility of identifying specific compounds which inhibit a preferred process (e.g. cell wall biosynthetic gene products) but also the possibility of identifying all fungicidal compounds within that library and linking them to their cognate cellular targets.

[0341] In still another embodiment of the present invention, GRACE strains could be screened to identify synthetic lethal mutations, and thereby uncover a potentially novel class of drug targets of significant therapeutic value. For example two separate genes may encode homologous proteins that participate in a common and essential cellular function, where the essential nature of this function will only become apparent upon inactivation of both family members. Accordingly, examination of the null phenotype of each gene separately would not reveal the essential nature of the combined gene products, and consequently, this potential drug target would not be identified. Provided the gene products are highly homologous to one another, compounds found to inhibit one family member are likely to inhibit the other and are therefore predicted to approximate the synthetic growth inhibition demonstrated genetically. In other cases however, synthetic lethality may uncover seemingly unrelated (and often nonessential) processes, which when combined produce a synergistic growth impairment (cell death). For example, although disruption of the S. cerevisiae gene RVS161 does not present any discernable vegetative growth phenotype in yeast carrying this single mutation, at least 9 other genes are known to display a synthetic lethal effect when combined with inactivation of RVS161. These genes participate in processes ranging from cytoskeletal assembly and endocytosis, to signal transduction and lipid metabolism and identifies multiple avenues to pursuing a combination drug target strategy. A directed approach to uncovering synthetic lethal interactions with essential and nonessential drug targets is now performed where a GRACE strain or heterozygote strain is identified as displaying an enhanced sensitivity to the tested compound, not because it expresses a reduced level of activity for the drug target, but because its mutation is synthetically lethal in combination with inhibition of a second drug target. Discerning whether the compound specifically inhibits the drug target in the sensitized GRACE strain or heterozygote strain or a second target may be achieved by screening the entire GRACE or heterozygote strain sets for additional mutant strains displaying equal or greater sensitivity to the compound, followed by genetic characterization of a double mutant strain demonstrating synthetic lethality between the two mutations.

[0342] 5.5.2.2 Screening for Non-Antifungal Therapeutic Agents with GRACE Strains

[0343] The biochemical similarity existing between pathogenic fungi and the mammalian hosts they infect limits the range of clinically useful antimycotic compounds. However, this similarity can be exploited using a GRACE strain collection to facilitate the discovery of therapeutics that are not used as antimycotics, but are useful for treatment a wide-range of diseases, such as cancer, inflammation, etc.

[0344] In this embodiment of the invention, fungal genes that are homologous to disease-causing genes in an animal or plant, are selected and GRACE strains of this set of genes are used for identification of compounds that display potent and specific bioactivity towards the products of these genes, and therefore have potential medicinal value for the treatment of diseases. Essential and non-essential genes and the corresponding GRACE strains carrying modified allelic pairs of such genes are useful in this embodiment of the invention. It has been predicted that as many as 40% of the genes found within the C. albicans genome share human functional homologs. It has also been predicted that as many as 1% of human genes are involved in human diseases and therefore may serve as potential drug targets. Accordingly, many genes within the GRACE strain collection are homologs to disease-causing human genes and compounds that specifically inactivate individual members of this gene set may in fact have alternative therapeutic value. The invention provides a pluralities of GRACE strains in which the modified alleles are fungal genes that share sequence, structural and/or functional similarities to genes that are associated with one or more diseases of the animal or plant.

[0345] For example, much of the signal transduction machinery that promotes cell cycle progression and is often perturbed in a variety of cancers is conserved in fungi. Many of these genes encode for cyclins, cyclin-dependent kinases (CDK), CDK inhibitors, phosphatases, and transcription factors that are both structurally and functionally related. As a result, compounds found to display specificity towards any of these functional classes of proteins could be evaluated by secondary screens to test for potential anticancer activity. However, cytotoxic compounds identified in this way need not act on cancer causing targets to display therapeutic potential. For example the taxol family of anti-cancer compounds, which hold promise as therapeutics for breast and ovarian cancers, bind tubulin and promote microtubule assembly, thereby disrupting normal microtubule dynamics. Yeast tubulin displays similar sensitivity to taxol, suggesting that additional compounds affecting other fundamental cellular processes shared between yeast and man could similarly be identified and assessed for antitumor activity.

[0346] The phenomenon of pathogenesis extends far beyond the taxonomic borders of microbes and ultimately reflects the underlying physiology. In many ways, the phenomenon of cancer is analogous to the process of pathogenesis by an opportunistic pathogen such as C. albicans. Both are non-infectious diseases caused by either the body's own cells, or microbes from its natural fauna. These cells grow in a manner unchecked by the immune system and in both cases disease manifests itself by colonization of vital organs and eventual tissue damage resulting in death. Effective drug-based treatment is also elusive for both diseases primarily because the causative agent in both cases is highly related to the host.

[0347] In fact, a number of successful therapeutic drugs affecting processes unrelated to cancer have also been discovered through anti-fungal drug screening programs. One clinically-important class of compounds includes the immunosuppressant molecules rapamycin, cyclosporin A, and FK506, which inhibit conserved signal transduction components. Cyclosporin A and FK506, form distinct drug-prolyl isomerase complexes (CyPA- Cyclosporin A and FKBP12-FK506 respectively) which bind and inactivate the regulatory subunit of the calcium and calmodulin-dependent phosphatase, calcineurin. Rapamycin also complexes with FKBP12, but this drug-protein complex also binds to the TOR family of phosphatidylinositol kinases to inhibit translation and cell cycle progression. In each case, both the mechanism of drug action, and the drug targets themselves are highly conserved from yeast to humans.

[0348] The identification of C. albicans drug targets, and grouping the targets into essential-gene, fungal-specific, and pathogen-specific target sets provide the basis for the development of whole-cell screens for compounds that interact with and inhibit individual members of any of these targets. Therefore, similar analyses can be used to identify other sets of GRACE strains having modified allelic pairs of genes encoding drug targets with other specific common functions or attributes. For example, GRACE strain subsets can be established which comprise gene targets that are highly homologous to human genes, or gene targets that display a common biochemical function, enzymatic activity, or that are involved in carbon compound catabolism, biosynthesis, transport of molecules (transporter activity), cellular localization, signal transduction cascades, cell cycle control, cell adhesion, transcription, translation, DNA replication, etc. An exemplary list of biochemical functions is provided in Section 5.4.3.

[0349] 5.5.2.3 Target Gene Dosage-Based Whole Cell Assays

[0350] Experiments involving modulating the expression levels of the encoding gene to reveal phenotypes from which gene function may be inferred can be carried out in a pathogenic diploid fungus, such as Candida albicans, using the strains and methods of the present intention. The principle of drug-target-level variation in drug screening involves modulating the expression level of a drug target to identify specific drug resistance or drug sensitivity phenotypes, thereby linking a drug target to a particular compound. Often, these phenotypes are indicative of the target gene encoding the bona fide drug target of this compound. In examples where this is not the case, the candidate target gene may nonetheless provide important insight into the true target gene that is functioning either in a pathway or process related to that inhibited by the compound (e.g. producing synthetic phenotype), or instead functioning as a drug resistance mechanism associated with the identified compound.

[0351] Variation of the expression levels of the target protein is also incorporated within both drug screening and drug target identification procedures. The total, cellular expression level of a gene product in a diploid organism is modified by disrupting one allele of the gene encoding that product, thereby reducing its functional activity in half, creating a “haploinsufficient” phenotype. A heterozygous S. cerevisiae strain collection has been used in such a haploinsufficiency screen to link drug-based resistance and hypersensitive phenotypes to heterozygous drug targets. Nonessential genes are screened directly using a haploid deletion strain collection against a compound library for specific phenotypes or “chemotypes.” However, this procedure cannot be used in a haploid organism where the target gene is an essential one.

[0352] The expression level of a given gene product is also elevated by cloning the gene into a plasmid vector that is maintained at multiple copies in the cell. Overexpression of the encoding gene is also achieved by fusing the corresponding open reading frame of the gene product to a more powerful promoter carried on a multicopy plasmid. Using these strategies, a number of overexpression screens have been successfully employed in S. cerevisiae to discover novel compounds that interact with characterized drug targets as well as to identify the protein targets bound by existing therapeutic compounds.

[0353] The GRACE strain collection replaces the surrogate use of S. cerevisiae in whole cell drug screening by providing a dramatic range in gene expression levels for drug targets directly within the pathogen (FIG. 5). In one embodiment of the invention, this is achieved using the C. albicans-adapted tetracycline promoter system to construct GRACE strains. Northern Blot analysis of 30 different GRACE strains grown under nonrepressing conditions (i.e. no tetracycline) reveals that 83% of conditionally expressed genes tested maintain an overexpression level greater than or equal to 3 fold of wild type, and 60% of all genes examined express greater than or equal to 5 times that of the wild type C. albicans strain used for GRACE strain construction. As each GRACE strain is in fact heterozygous, this expression range is presumably doubled if compared against their respective heterozygote strain. For most GRACE strains then, this represents an elevated expression level rivaling that typically achieved in S. cerevisiae using standard 2 μ-based multicopy plasmids, and an absolute level of constitutive expression comparable to that provided by the CaACT1 promoter. Therefore, the GRACE strain collections of the invention are not only useful in target validation under repressing conditions, but are also useful as a collection of strains overexpressing these same validated drug targets under nonrepressing conditions for whole cell assay development and drug screening.

[0354] Variation in the level of expression of a target gene product in a GRACE strain is also used to explore resistance to antimycotic compounds. Resistance to existing antifungal therapeutic agents reflects both the limited number of antifungal drugs available and the alarming dependence and reliance clinicians have in prescribing them. For example, dependence on azole-based compounds such as fluconazole for the treatment of fungal infections, has dramatically undermined the clinical therapeutic value for this compound. The GRACE strain collection is used to combat fluconazole resistance by identifying gene products that interact with the cellular target of fluconazole. Such products are used to identify drug targets which, when inactivated in concert with fluconazole, provide a synergistic effect and thereby overcome resistance to fluconazole seen when this compound is used alone. This is accomplished, for example, by using the GRACE strain collection to overexpress genes that enhance drug resistance. Such genes include novel or known plasma membrane exporters including ATP-binding cassette (ABC) transporters and multidrug resistance (MDR) efflux pumps, pleiotropic drug resistance (PDR) transcription factors, and protein kinases and phosphatases. Alternatively, genes specifically displaying a differential drug sensitivity are identified by screening GRACE strains expressing reduced levels (either by haploinsufficiency or threshold expression via the tetracycline promoter) individual members of the target set. Identifying such genes provides important clues to drug resistance mechanisms that could be targeted for drug-based inactivation to enhance the efficacy of existing antifungal therapeutics.

[0355] In another aspect of the present invention, overexpression of the target gene for whole cell assay purposes is supported with promoters other than the tetracycline promoter system. (see Section 5.3.1) For example, the CaPGK1 promoter is used to overexpress C. albicans drug targets genes. In S. cerevisiae, the PGK1 promoter is known to provide strong constitutive expression in the presence of glucose. See, Guthrie, C., and G. R. Fink. 1991. Guide to yeast genetics and molecular biology. Methods Enzymol. 194:373-398. A preliminary analysis of five C. albicans genes placed under the control of the CaPGK1 promoter (CaKRE9, CaERG11, CaALG7, CaTUB1 and CaAUR1) revealed dramatic overexpression versus wild type as judged by Northern blot analysis. The level of overexpression achieved for all genes exceeds that obtained by the tetracycline promoter by 3-4 fold. Moreover, CaAUR1, which was not overexpressed significantly when constitutively expressed using the tetracycline promoter, was overexpressed 5-fold relative to wild type CaAUR1 expression levels, suggesting that the CaPGK1 promoter is useful in overexpressing genes normally not overexpressed by the tetracycline promoter.

[0356] In another aspect of the present invention, intermediate expression levels of individual drug targets within the GRACE strain collection may are engineered to provide strains tailored for the development of unique whole cell assays. In this embodiment of the invention, GRACE strains are grown in a medium containing a tetracycline concentration determined to provide only a partial repression of transcription. Under these conditions, it is possible to maintain an expression level between that of the constitutively expressed overproducing strain and that of wild type strain, as well as levels of expression lower than that of the wild-type strain. That is, it is possible to titrate the level of expression to the minimum required for cell viability. By repressing gene expression to this critical state, novel phenotypes, resembling those produced by a partial loss of function mutation (i.e. phenocopies of hypomorphic mutants) may be produced and offer additional target expression levels applicable for whole cell assay development and drug screening. Repressing expression of the remaining allele of an essential gene to the threshold level required for viability, therefore will provide a strain with enhanced sensitivity toward compounds active against this essential gene product.

[0357] In order to demonstrate the utility of target level expression in whole cell assays for drug screening, both a CaHIS3 heterozygote strain and a tetracycline promoter-regulated CaHIS3 GRACE strain were compared against a wild type (diploid) CaHIS3 strain for sensitivity towards the 3-aminotriazole (3-AT) (Example 6.3). The data derived from these experiments clearly indicate that distinct levels of target gene products synthesized within the pathogen could be directly applied in whole cell assay based drug screens to identify novel antifungal compounds active against novel drug targets validated using the GRACE method.

[0358] 5.5.2.4 Uses of Tagged Strains

[0359] In still another aspect of the present invention, unique oligonucleotide sequence tags or “bar codes” are incorporated into individual mutant strains included within a heterozygous strain collection of validated targets. The presence of these sequence tags enables an alternative whole cell assay approach to drug screening. Multiple target strains may be screened simultaneously in a mixed population (rather than separately) to identify phenotypes between a particular drug target and its inhibitory agent.

[0360] Large-scale parallel analyses are performed using mixed populations of the entire bar coded heterozygous essential strain collection target set and comparing the relative representation of individual strains within a mixed population prior to and after growth in the presence of a compound. Drug-dependent depletion or overrepresentation of a unique bar-coded strain is determined by PCR-amplifying and fluorescently labeling all bar codes within the mixed population and hybridizing the resulting PCR products to an array of complementary oligonucleotides. Differential representation between bar coded strains indicates gene-specific hypersensitivity or resistance and suggests the corresponding gene product may represent the molecular target of the compound tested.

[0361] In one specific embodiment, the mutant strains are GRACE strains, and each of the GRACE strains of the set comprises at least one, and preferably two unique molecular tags, which, generally, are incorporated within the cassette used to replace the first allele of the gene pair to be modified. Each molecular tag is flanked by primer sequences which are common to all members of the set being tested. Growth is carried out in repressive and non-repressive media, in the presence and absence of the compound to be tested. The relative growth of each strain is assessed by carrying out simultaneous PCR amplification of the entire collection of embedded sequence tags.

[0362] In one non-limiting aspect of the present invention, the PCR amplification is performed in an asymmetric manner with fluorescent primers and the resulting single stranded nucleic acid product hybridized to an oligonucleotide array fixed to a surface and comprises the entire corresponding set of complementary sequences. Analysis of the level of each fluorescent molecular tag sequence is then determined to estimate the relative amount of growth of GRACE strain of the set, in those media, in the presence and absence of the compound tested.

[0363] Therefore, for each GRACE strain of the set tested, there could be, in one non-limiting example of this method, four values for the level of the corresponding molecular tag found within the surviving population. They would correspond to cell growth under repressing and non-repressing conditions, both in the presence and absence of the compound being tested. Comparison of growth in the presence and absence of the test compound provides a value or “indicator” for each set of growth media; that is, an indicator derived under repressing and non-repressing conditions. Again, comparison of the two indicator values will reveal if the test compound is active against the gene product expressed by the modified allelic gene pair carried by that specific member of the GRACE set tested.

[0364] In still another aspect of the present invention, each potential drug target gene in a heterozygous tagged or bar-coded collection, may be overexpressed. For example, in the heterozygous tagged or bar-coded collection described above, each of the potential target gene can be overexpressed by introducing either the Tet promoter or another strong, constitutively expressed promoter (e.g. CaACT1, CaADH1 and CaPGK1) upstream of the remaining non-disrupted allele. These constructions allow a further increase in the dosage of the encoded target gene product of individual essential genes to be used in mixed-population drug susceptibility studies. Although overexpression may itself disrupt the normal growth rate of numerous members of the population, reliable comparisons could still be made between mock and drug-treated mixed cultures to identify compound-specific growth differences.

[0365] In S. cerevisiae, the molecular drug targets of several well-characterized compounds including 3-amino-triazol, benomyl, tunicamycin and fluconazole were identified by a similar approach. In that study, bar-coded strains bearing heterozygous mutations in HIS3, TUB1, ALG7, and ERG11, (i.e. the respective drug targets to the compounds listed above) displayed significantly greater sensitivity when challenged with their respective compound than other heterozygote bar-coded strains when grown together in a mixed population.

[0366] In another aspect of the present invention, screens for antifungal compounds can be carried out using complex mixtures of compounds that comprise at least one compound active against the target strain. Tagging or bar-coding the GRACE strain collection facilitates a number of large scale analyses necessary to identify gene sets as well as evaluate and ultimately evaluate individual targets within particular gene sets. For example, mixed-population drug screening using a bar-coded GRACE strain collection effectively functions as a comprehensive whole cell assay. Minimal amounts of a complex compound library are sufficient to identify compounds that act on individual essential target genes within the collection. This is done without the need to array the collection. Also, strong predictions as to the ‘richness’ of any particular compound library could be made before committing to it in drug screening. It becomes possible then to assess whether, for example, a carbohydrate-based chemical library possesses greater fungicidal activity than a natural product or synthetic compound library. Particularly potent compounds within any complex library of molecules can be immediately identified and evaluated according to the priority of targets and assays available for drug screening. Alternatively, the invention provides applying this information to developing “tailored” screens, in which only those targets which were demonstrated to be inactivated in mixed population experiments by a particular compound library would be included in subsequent array-formatted screens.

[0367] Traditionally, drug discovery programs have relied on an individual or a limited set of validated drug targets. The preceding examples emphasize that such an approach is no longer necessary and that high throughput target evaluation and drug screening are now possible. However, a directed approach based on selecting individual targets may still be preferred depending on the expertise, interest, strategy, or budget of a drug discovery program.

[0368] 5.5.3 Target Evaluation in an Animal Model System

[0369] Currently, validation of an essential drug target is demonstrated by examining the effect of gene inactivation under standard laboratory conditions. Putative drug target genes deemed nonessential under standard laboratory conditions may be examined within an animal model, for example, by testing the pathogenicity of a strain homozygous for a deletion in the target gene versus wild type. However, essential drug targets are precluded from animal model studies. Therefore, the most desirable drug targets are omitted from the most pertinent conditions to their target evaluation.

[0370] In one specific embodiment of the invention, conditional expression, provided by the GRACE essential strain collection, overcomes this longstanding limitation to target validation within a host environment. Animal studies can be performed using mice inoculated with GRACE essential strains and examining the effect of gene inactivation by conditional expression. In a preferred embodiment of the invention, the effect on mice injected with a lethal inoculum of a GRACE essential strain could be determined depending on whether the mice were provided with an appropriate concentration of tetracycline to inactivate expression of a drug target gene. The lack of expression of a gene demonstrated to be essential under laboratory conditions can thus be correlated with prevention of a terminal C. albicans infection. In this type of experiment, only mice “treated” with tetracycline-supplemented water, are predicted to survive infection because inactivation of the target gene has killed the GRACE strain pathogen within the host.

[0371] In yet another embodiment of the invention, conditional expression could be achieved using a temperature-responsive promoter to regulate expression of the target gene or a temperature sensitive allele of a particular drug target, such that the gene is functional at 30° C. but inactivated within the normal body temperature of the mouse.

[0372] In the same manner as described above for essential genes, it is equally feasible to demonstrate whether nonessential genes comprising the GRACE strain collection are required for pathogenicity in a mouse model system. Included in this set are multiple genes whose null phenotype results in a reduced growth rate and may attenuate the virulence of the pathogen. Many mutants demonstrating a slow growth phenotype may represent hypomorphic mutations in otherwise essential genes (as demonstrated by alternative methods) which are simply not completely inactivated by the conditional expression method used to construct the GRACE strain. One important use of such strains is to assess whether any given essential gene doubly functions in the process of virulence. Essential genes that display substantially reduced virulence and growth rate when only partially inactivated represent “multifactorial” drug targets for which even minimally inhibitory high specificity compounds would display therapeutic value. Collectively, all GRACE strains that fail to cause fungal infection in mice under conditions of gene inactivation by tetracycline (or alternative gene inactivation means) define a subset of genes that are required for pathogenicity, i.e., GRACE pathogenicity subset. More defined subsets of pathogenicity genes, for example those genes required for particular steps in pathogenesis (e.g. adherence or invasion) may be determined by applying the GRACE pathogenicity subset of strains to in vitro assays which measure the corresponding process. For example, examining GRACE pathogenicity strains in a buccal adhesion or macrophage assay by conditional expression of individual genes would identify those pathogenicity factors required for adherence or cell invasion respectively.

[0373] The GRACE strain collection or a desired subset thereof is also well suited for evaluating acquired resistance/suppression or distinguishing between fungicidal/fungistatic phenotypes for an inactivated drug target within an animal model system. In this embodiment of the invention, GRACE strains repressed for expression of different essential drug target genes would be inoculated into mice raised on tetracycline-supplemented water. Each of the GRACE strains would then be compared according to the frequency of death associated with the different mice populations they infected. It is expected that the majority of infected mice will remain healthy due to fungal cell death caused by tetracycline-dependent inactivation of the essential gene in the GRACE strain. However, a GRACE strain harboring a drug target more likely to develop extragenic suppressors because it is a fungistatic target rather than fungicidal one, or suppressed by an alternative physiological process active within a host environment, can be identified by the higher incidence of lethal infections detected in mice infected with this particular strain. By this method, it is possible to evaluate/rank the likelihood that individual drug target genes may develop resistance within the host environment.

[0374] Although a GRACE strain is highly suited for this purpose, it is also contemplated that a strain with a modified allele of an essential gene or a modified essential gene is used in an animal model for drug target evaluation.

[0375] 5.5.4 Rational Design of Binding Compounds

[0376] Compounds identified via assays such as those described herein can be useful, for example, for inhibiting the growth of the infectious agent and/or ameliorating the symptoms of an infection. Compounds can include, but are not limited to, other cellular proteins. Binding compounds can also include, but are not limited to, peptides such as, for example, soluble peptides, comprising, for example, extracellular portions of target gene product transmembrane receptors, and members of random peptide libraries (see, e.g., Lam et al., 1991, Nature 354:82-84; Houghten et al., 1991, Nature 354:84-86) made of D-and/or L-configuration amino acids, rationally-designed antipeptide peptides, (see e.g., Hurby et al., Application of Synthetic Peptides: Antisense Peptides,” In Synthetic Peptides, A User's Guide, W. H. Freeman, NY (1992), pp. 289-307), antibodies (including, but not limited to polyclonal, monoclonal, human, humanized, anti-idiotypic, chimeric or single chain antibodies, and FAb, F(ab′)₂ and FAb expression library fragments, and epitope-binding fragments thereof), and small organic or inorganic molecules. In the case of receptor-type target molecules, such compounds can include organic molecules (e.g., peptidomimetics) that bind to the ECD and either mimic the activity triggered by the natural ligand (i.e., agonists); as well as peptides, antibodies or fragments thereof, and other organic compounds that mimic the ECD (or a portion thereof) and bind to a “neutralize” natural ligand.

[0377] Computer modeling and searching technologies permit identification of compounds, or the improvement of already identified compounds, that can modulate target gene expression or activity. Having identified such a compound or composition, the active sites or regions are preferably identified. In the case of compounds affecting receptor molecules, such active sites might typically be ligand binding sites, such as the interaction domains of ligand with receptor itself. The active site is identified using methods known in the art including, for example, from the amino acid sequences of peptides, from the nucleotide sequences of nucleic acids, or from study of complexes of the relevant compound or composition with its natural ligand. In the latter case, chemical or X-ray crystallographic methods are used to find the active site by finding where on the factor the complexed ligand is found.

[0378] The three-dimensional geometric structure of the active site is then preferably determined. This is done by known methods, including X-ray crystallographic, which determines a complete molecular structure. Solid or liquid phase NMR is also used to determine certain intra-molecular distances within the active site and/or in the ligand binding complex. Other experimental methods of structure determination known to those of skill in the art, are also used to obtain partial or complete geometric structures. The geometric structures are measured with a complexed ligand, natural or artificial, which increases the accuracy of the active site structure determined. Methods of computer based numerical modeling are used to complete the structure (e.g., in embodiments wherein an incomplete or insufficiently accurate structure is determined) or to improve its accuracy.

[0379] Finally, having determined the structure of the active site, either experimentally, by modeling, or by a combination, candidate modulating compounds are identified by searching databases containing compounds along with information on their molecular structure. Such a search seeks compounds having structures that match the determined active site structure and that interact with the groups defining the active site. Such a search can be manual, but is preferably computer assisted. These compounds found from this search are potential target or pathway gene product modulating compounds.

[0380] Alternatively, these methods are used to identify improved modulating compounds from an already known modulating compound or ligand. The composition of the known compound is modified and the structural effects of modification are determined using the experimental and computer modeling methods described above applied to the new composition. The altered structure is then compared to the active site structure of the compound to determine if an improved fit or interaction results. In this manner systematic variations in composition, such as by varying side groups, are quickly evaluated to obtain modified modulating compounds or ligands of improved specificity or activity.

[0381] Further experimental and computer modeling methods useful to identify modulating compounds based upon identification of the active sites of target or pathway gene or gene products and related transduction and transcription factors are apparent to those of skill in the art.

[0382] There are a number of articles that review the art of computer modeling of drugs that interact with specific proteins, including the following: Rotivinen et al., 1988, Acta Pharmaceutical Fennica 97:159-166; Ripka, (Jun. 16, 1988), New Scientist 54-57; McKinaly and Rossmann, 1989, Annu. Rev. Pharmacol. Toxicol. 29:111-122; Perry and Davies, OSAR: Quantitative Structure-Activity Relationships in Drug Design pp. 189-193 (Alan R. Liss, Inc. 1989); Lewis and Dean, 1989 Proc. R. Soc. Lond. 236:125-140 and 1-162; and, with respect to a model receptor for nucleic acid components, Askew et al., 1989, J. Am. Chem. Soc. 111:1082-1090.

[0383] Although generally described above with reference to design and generation of compounds which could alter binding, one could also screen libraries of known compounds, including natural products or synthetic chemicals, as well as other biologically active materials, including proteins, for compounds which are inhibitors or activators.

[0384] 5.6 Transcriptional Profiling

[0385] 5.6.1 Analysis of Gene Expression

[0386] Gene expression profiling techniques are important tools for the identification of suitable biochemical targets, as well as for the determination of the mode of action of known compounds. Completion of the C. albicans genome sequence and development of nucleic acid microarrays incorporating this information, will enable genome-wide gene expression analyses to be carried out with this diploid pathogenic fungus. Therefore, the present invention provides methods for obtaining the transcriptional response profiles for both essential and virulence/pathogenicity genes of Candida albicans. Conditional expression of essential genes serves to delineate, for example, regulatory interactions valuable for the design of drug screening programs focused upon C. albicans.

[0387] In an embodiment of the present invention, a strain or a strain collection wherein the expression of an essential gene identified by the method of the invention is modified can be used for the analysis of expression of essential genes within this pathogen. In one specific embodiment, a GRACE strain collection is used. One particularly powerful application of such a strain collection involves the construction of a comprehensive transcriptional profile database for the entire essential gene set or a desired subset of essential genes within a pathogen. Such a database is used to compare the response profile characteristic of lead antimycotic compounds with the profile obtained with new anti-fungal compounds to distinguish those with similar from those with distinct modes of action. Matching (or even partially overlapping) the transcriptional response profiles determined after treatment of the strain with the lead compound with that obtained with a particular essential target gene under repressing conditions, is used to identity the target and possible mode of action of the drug.

[0388] Gene expression analysis of essential genes also permits the biological function and regulation of those genes to be examined within the pathogen, and this information is incorporated within a drug screening program. For example, transcriptional profiling of essential drug targets in C. albicans permits the identification of novel drug targets which participate in the same cellular process or pathway uncovered for the existing drug target and which could not otherwise be identified without direct experimentation within the pathogen. These include genes not only unique to the pathogen but also broad-range gene classes possessing a distinct function or subject to different regulation in the pathogen. Furthermore, pathogen-specific pathways may be uncovered and exploited for the first time.

[0389] In another aspect of the present invention, the gene expression profile of mutant strains, such as GRACE-derived strains, under nonrepressing or induced conditions is established to evaluate the overexpression response profile for one or more drug targets. For example, overexpression of genes functioning in signal transduction pathways often display unregulated activation of the pathway under such conditions. Moreover, several signaling pathways have been demonstrated to function in the pathogenesis process. Transcriptional response profiles generated by overexpressing C. albicans GRACE strains provide information concerning the set of genes regulated by such pathways; any of which may potentially serve an essential role in pathogenesis and therefore representing promising drug targets. Furthermore, analysis of the expression profile may reveal one or more genes whose expression is critical to the subsequent expression of an entire regulatory cascade. Accordingly, these genes are particularly important targets for drug discovery and mutants carrying the corresponding modified allelic pair of genes form the basis of a mechanism-of-action based screening assays. Presently such an approach is not possible. Current drug discovery practices result in an exceedingly large number of “candidate” compounds and little understanding of their mode of action. A transcriptional response database comprising both gene shut-off and overexpression profiles generated using the GRACE strain collection offers a solution to this drug discovery bottleneck by 1) determining the transcriptional response or profile resulting from an antifungal's inhibition of a wild type strain, and 2) comparing this response to the transcriptional profiles resulting from inactivation or overexpression of drug targets comprising the GRACE strain collection.

[0390] Matching or significantly correlating transcriptional profiles resulting from both genetic alteration of a drug target and chemical/compound inhibition of wild type cells provides evidence linking the compound to its cellular drug target and suggests its mechanism of action.

[0391] Accordingly, the invention provides a method for evaluating a compound against a target gene product encoded by a nucleotide sequence comprising one of SEQ ID NOs: 6001 through to 6932, said method comprising the steps of (a) contacting wild type diploid fungal cells or control cells with the compound and generating a first transcription profile; (b) determining the transcription profile of mutant diploid fungal cells, such as a GRACE strain, which have been cultured under conditions wherein the second allele of the target gene is substantially underexpressed, not expressed or overexpressed and generating a second transcription profile for the cultured cells; and comparing the first transcription profile with the second transcription profile to identify similarities in the profiles. For comparisons, similarities of profiles can be expressed as an indicator value; and the higher the indicator value, the more desirable is the compound.

[0392] 5.6.2 Identification of Secondary Targets

[0393] Methods are described herein for the identification of secondary targets. “Secondary target,” as used herein, refers to a gene whose gene product exhibits the ability to interact with target gene products involved in the growth and/or survival of an organism (i.e., target essential gene products), under a set of defined conditions, or in the pathogenic mechanism of the organism, (i.e., target virulence gene products) during infection of a host.

[0394] Any method suitable for detecting protein-protein interactions can be employed for identifying secondary target gene products by identifying interactions between gene products and target gene products. Such known gene products can be cellular or extracellular proteins. Those gene products which interact with such known gene products represent secondary target gene products and the genes which encode them represent secondary targets.

[0395] Among the traditional methods employed are co-immunoprecipitation, crosslinking and co-purification through gradients or chromatographic columns. Utilizing procedures such as these allows for the identification of secondary target gene products. Once identified, a secondary target gene product is used, in conjunction with standard techniques, to identify its corresponding secondary target. For example, at least a portion of the amino acid sequence of the secondary target gene product is ascertained using techniques well known to those of skill in the art, such as via the Edman degradation technique (see, e.g., Creighton, 1983, “Proteins: Structures and Molecular Principles,” W. H. Freeman & Co., N.Y., pp.34-49). The amino acid sequence obtained can be used as a guide for the generation of oligonucleotide mixtures that can be used to screen for secondary target gene sequences. Screening can be accomplished, for example, by standard hybridization or PCR techniques. Techniques for the generation of oligonucleotide mixtures and for screening are well-known. (See, e.g., Ausubel, supra., and PCR Protocols: A Guide to Methods and Applications, 1990, Innis, M. et al., eds. Academic Press, Inc., New York).

[0396] Additionally, methods are employed which result in the simultaneous identification of secondary targets which encode proteins interacting with a protein involved in the growth and/or survival of an organism under a set of defined conditions, or in the pathogenic mechanism of the organism during infection of a host. These methods include, for example, probing expression libraries with labeled primary target gene protein known or suggested to be involved in or critical to these mechanisms, using this protein in a manner similar to the well known technique of antibody probing of λgt11 phage libraries.

[0397] One method which detects protein interactions in vivo, the two-hybrid system, is described in detail for illustration purposes only and not by way of limitation. One version of this system has been described (Chien et al., 1991, Proc. Natl. Acad. Sci. USA, 88:9578-9582) and is commercially available from Clontech (Palo Alto, Calif.).

[0398] Briefly, utilizing such a system, plasmids are constructed that encode two hybrid proteins: one consists of the DNA-binding domain of a transcription activator protein fused to a known protein, in this case, a protein known to be involved in growth of the organism, or in pathogenicity, and the other consists of the activator protein's activation domain fused to an unknown protein that is encoded by a cDNA which has been recombined into this plasmid as part of a cDNA library. The plasmids are transformed into a strain of the yeast S. cerevisiae that contains a reporter gene (e.g., lacz) whose regulatory region contains the transcription activator's binding sites. Either hybrid protein alone cannot activate transcription of the reporter gene, the DNA-binding domain hybrid cannot because it does not provide activation function, and the activation domain hybrid cannot because it cannot localize to the activator's binding sites. Interaction of the two hybrid proteins reconstitutes the functional activator protein and results in expression of the reporter gene, which is detected by an assay for the reporter gene product.

[0399] The two-hybrid system or related methodology is used to screen activation domain libraries for proteins that interact with a known “bait” gene product. By way of example, and not by way of limitation, target essential gene products and target virulence gene products are used as the bait gene products. Total genomic or cDNA sequences encoding the target essential gene product, target virulence gene product, or portions thereof, are fused to the DNA encoding an activation domain. This library and a plasmid encoding a hybrid of the bait gene product fused to the DNA-binding domain are cotransformed into a yeast reporter strain, and the resulting transformants are screened for those that express the reporter gene. For example, and not by way of limitation, the bait gene is cloned into a vector such that it is translationally fused to the DNA encoding the DNA-binding domain of the GAL4 protein. These colonies are purified and the library plasmids responsible for reporter gene expression are isolated. DNA sequencing is then used to identify the proteins encoded by the library plasmids.

[0400] A cDNA library of the cell line from which proteins that interact with bait gene product are to be detected is made using methods routinely practiced in the art. According to the particular system described herein, for example, the cDNA fragments are inserted into a vector such that they are translationally fused to the activation domain of GAL4. This library is co-transformed along with the bait gene-GAL4 fusion plasmid into a yeast strain which contains a lacZ gene driven by a promoter which contains GAL4 activation sequence. A cDNA encoded protein, fused to GAL4 activation domain, that interacts with bait gene product reconstitutes an active GAL4 protein and thereby drive expression of the lacZ gene. Colonies which express lacZ are detected by their blue color in the presence of X-gal. The cDNA can then be purified from these strains, and used to produce and isolate the bait gene-interacting protein using techniques routinely practiced in the art.

[0401] Once a secondary target has been identified and isolated, it is farther characterized and used in drug discovery by the methods of the invention.

[0402] 5.6.3 Use of Gene Expression Arrays

[0403] To carry out profiling, gene expression arrays and microarrays can be employed. Gene expression arrays are high density arrays of DNA samples deposited at specific locations on a glass surface, silicon, nylon membrane, or the like. Such arrays are used by researchers to quantify relative gene expression under different conditions. An example of this technology is found in U.S. Pat. No. 5,807,522, which is hereby incorporated by reference.

[0404] It is possible to study the expression of substantially all of the genes in the genome of a particular microbial organism using a single array. For example, the arrays may consist of 12×24 cm nylon filters containing PCR products corresponding to ORFs from Candida albicans. An appropriate amount of each PCR product (e.g., 10 ng) are spotted every 1.5 mm on the filter. Single stranded labeled cDNAs are prepared for hybridization to the array and placed in contact with the filter. In an embodiment, no second strand synthesis or amplification step is done, and thus the labeled cDNAs are of “antisense” orientation. Quantitative analysis is done using a phosphorimager.

[0405] In one embodiment, PCR products of essential genes can be generated using pairs of oligonucleotide primers of the invention, i.e., SEQ ID NOs: 4001 to 4932, and SEQ ID NOs: 5001 to 5932. Ten ngs of each PCR product are spotted every 1.5 mm on the filter. Each PCR product comprises a nucleotide sequence selected from the group of nucleotide sequences consisting of SEQ ID NOs: 6001 to 6932.

[0406] Hybridization of cDNA made from a sample of total cell mRNA to such an array followed by detection of binding by one or more of various techniques known to those in the art provides a signal at each location on the array to which cDNA hybridized. The intensity of the hybridization signal obtained at each location in the array thus reflects the amount of mRNA for that specific gene that was present in the sample. Comparing the results obtained for mRNA isolated from cells grown under different conditions thus allows for a comparison of the relative amount of expression of each individual gene during growth under the different conditions.

[0407] Gene expression arrays are used to analyze the total mRNA expression pattern at various time points after reduction in the level or activity of a gene product required for fungal proliferation, virulence or pathogenicity. Reduction of the level or activity of the gene product is accomplished by growing a GRACE strain under conditions in which the product of the nucleic acid linked to the regulatable promoter is rate limiting for fungal growth, survival, proliferation, virulence or pathogenicity or by contacting the cells with an agent which reduces the level or activity of the target gene product. Analysis of the expression pattern indicated by hybridization to the array provides information on other genes whose expression is influenced by reduction in the level or activity of the gene product. For example, levels of other mRNAs may be observed to increase, decrease or stay the same following reduction in the level or activity of the gene product required for growth, survival, proliferation, virulence or pathogenicity. Thus, the mRNA expression pattern observed following reduction in the level or activity of a gene product required for growth, survival, proliferation, virulence or pathogenicity identifies other nucleic acids required for growth, survival, proliferation, virulence or pathogenicity. In addition, the mRNA expression patterns observed when the fungi are exposed to candidate drug compounds or known antibiotics are compared to those observed when the level or activity of a gene product required for fungal growth, survival, proliferation, virulence or pathogenicity is reduced. If the mRNA expression pattern observed with the candidate drug compound is similar to that observed when the level of the gene product is reduced, the drug compound is a promising therapeutic candidate. Thus, the assay is useful in assisting in the selection of promising candidate drug compounds for use in drug development.

[0408] In cases where the source of nucleic acid deposited on the array and the source of the nucleic acid being hybridized to the array are from two different microorganisms, gene expression identify homologous genes in the two microorganisms.

[0409] 5.7 Proteomics Assays

[0410] In another embodiment of the present invention, and in much the same way that a mutant strain collection (e.g, GRACE strain collection) enables transcriptional profiling within a pathogen, a mutant strain collection provides an invaluable resource for the analysis of the expressed protein complement of a genome. By evaluating the overall protein expression by members of a mutant strain collection under repressing and non-repressing growth conditions, a correlation between the pattern of protein expression of a cell can be made with the non-expression or the level of expression of an essential gene. Accordingly, the invention provides a pattern of expression of a set of proteins in a mutant strain as determined by methods well known in the art for establishing a protein expression pattern, such as but not limited to two-dimensional gel electrophoresis. The set of proteins comprises proteins comprising an amino acid sequence selected from the group consisting of the amino acid sequences of SEQ ID NOs: 7000 to 7932. A plurality of protein expression patterns will be generated for a mutant strain when the strain is cultured under different conditions and different levels of expression of one of the modified allele. A preferred mutant strain collection is a GRACE strain collection.

[0411] In yet another embodiment, defined genetic mutations can be constructed to create strains exhibiting protein expression profiles comparable to those observed upon treatment of the strain with a previously uncharacterized compound. In this way, it is possible to distinguish between antimycotic compounds that act on multiple targets in a complicated manner from other potential lead compounds that act on unique fungal-specific targets and whose mode of action can be determined.

[0412] Evaluation of the full complement of proteins expressed within a cell depends upon definitive identification of all protein species detectable on two-dimensional polyacrylamide gels or by other separation techniques. However, a significant fraction of these proteins are of lower abundance and fall below the threshold level required for positive identification by peptide sequencing or mass spectrometry. Nevertheless, these “orphan” proteins are detectable using an analysis of protein expression by individual mutant strain (GRACE strains). Conditional expression of low abundance gene products facilitates their positive identification by comparing protein profiles of mutant strains (GRACE strains) under repressing versus nonrepressing or overexpression conditions. In some cases, a more complex protein profile results because of changes of steady state levels for multiple proteins, which is caused indirectly by manipulating the low abundance gene in question. Overexpression of individual targets within the GRACE strain collection can also directly aid orphan protein identification by providing sufficient material for peptide sequencing or mass spectrometry.

[0413] In various embodiments, the present invention provides a method of quantitative analysis of the expressed protein complement of a diploid pathogenic fungal cell: a first protein expression profile is developed for a control diploid pathogenic fungus, which has two, unmodified alleles for the target gene. Mutants of the control strain, in which one allele of the target gene is inactivated, for example, in a GRACE strain, by insertion by or replacement with a disruption cassette, is generated. The other allele is modified such that expression of that second allele is under the control of a heterologous regulated promoter. A second protein expression profile is developed for this mutant fungus, under conditions where the second allele is substantially overexpressed as compared to the expression of the two alleles of the gene in the control strain. Similarly, if desired, a third protein expression profile is developed, under conditions where the second allele is substantially underexpressed as compared to the expression of the two alleles of the gene in the control strain. The first protein expression profile is then compared with the second expression profile, and if applicable, a third protein expression profile to identify an expressed protein detected at a higher level in the second profile, and if applicable, at a lower level in the third profile, as compared to the level in first profile.

[0414] Accordingly, the invention provides a method for evaluating a compound against a target gene product encoded by a nucleotide sequence comprising one of SEQ ID NOs: 6001 through to 6932, said method comprising the steps of (a) contacting wild type diploid fungal cells or control cells with the compound and generating a first protein expression profile; (b) determining the protein expression profile of mutant diploid fungal cells, such as a GRACE strain, which have been cultured under conditions wherein the second allele of the target gene is substantially underexpressed, not expressed or overexpressed and generating a second protein expression profile for the cultured cells; and comparing the first protein expression profile with the second protein expression profile to identify similarities in the profiles. For comparisons, similarities of profiles can be expressed as an indicator value; and the higher the indicator value, the more desirable is the compound.

[0415] 5.8 Pharmaceutical Compositions and Uses Thereof

[0416] Compounds including nucleic acid molecules that are identified by the methods of the invention as described herein can be administered to a subject at therapeutically effective doses to treat or prevent infections by a pathogenic organism, such as Candida albicans. Depending on the target, the compounds may also be useful for treatment of a non-infectious disease in a subject, such as but not limited to, cancer. A therapeutically effective dose refers to that amount of a compound (including nucleic acid molecules) sufficient to result in a healthful benefit in the treated subject. Typically, but not so limited, the compounds act by reducing the activity or level of a gene product encoded by a nucleic acid comprising a sequence selected from the group consisting of SEQ ID NOs: 6001 through to 6932. The subject to be treated can be a plant, a vertebrate, a mammal, an avian, or a human. These compounds can also be used for preventing or containing contamination of an object by Candida albicans, or used for preventing or inhibiting formation on a surface of a biofilm comprising Candida albicans. Biofilm comprising C. albicans are found on surfaces of medical devices, such as but not limited to surgical tools, implanted devices, catheters and stents.

[0417] 5.8.1 Effective Dose

[0418] Toxicity and therapeutic efficacy of compounds can be determined by standard pharmaceutical procedures in cell cultures or experimental animals, e.g., for determining the LD₅₀ (the dose lethal to 50% of the population) and the ED₅₀ (the dose therapeutically effective in 50% of the population). The dose ratio between toxic and therapeutic effects is the therapeutic index and it can be expressed as the ratio LD₅₀/ED₅₀. Compounds which exhibit large therapeutic indices are preferred. While compounds that exhibit toxic side effects can be used, care should be taken to design a delivery system that targets such compounds to the site of affected tissue in order to minimize potential damage to uninfected cells and, thereby, reduce side effects.

[0419] The data obtained from the cell culture assays and animal studies can be used in formulating a range of dosage for use in humans. The dosage of such compounds lies preferably within a range of circulating concentrations that include the ED₅₀ with little or no toxicity. The dosage can vary within this range depending upon the dosage form employed and the route of administration utilized. For any compound used in the method of the invention, the therapeutically effective dose can be estimated initially from cell culture assays. A dose can be formulated in animal models to achieve a circulating plasma concentration range that includes the IC₅₀ (i.e., the concentration of the test compound which achieves a half-maximal inhibition of symptoms) as determined in cell culture. Such information can be used to more accurately determine useful doses in humans. Levels in plasma can be measured, for example, by high performance liquid chromatography. A useful dosage can range from 0.001 mg/kg body weight to 10 mg/kg body weight.

[0420] 5.8.2 Formulations and Use

[0421] Pharmaceutical compositions for use in accordance with the present invention can be formulated in conventional manner using one or more physiologically acceptable carriers or excipients.

[0422] Thus, the compounds and their physiologically acceptable salts and solvents can be formulated for administration by inhalation or insufflation (either through the mouth or the nose) or oral, buccal, parenteral or rectal administration.

[0423] For oral administration, the pharmaceutical compositions can take the form of, for example, tablets or capsules prepared by conventional means with pharmaceutically acceptable excipients such as binding agents (e.g., pregelatinised maize starch, polyvinylpyrrolidone or hydroxypropyl methylcellulose); fillers (e.g., lactose, microcrystalline cellulose or calcium hydrogen phosphate); lubricants (e.g., magnesium stearate, talc or silica); disintegrants (e.g., potato starch or sodium starch glycolate); or wetting agents (e.g., sodium lauryl sulphate). The tablets can be coated by methods well known in the art. Liquid preparations for oral administration can take the form of, for example, solutions, syrups or suspensions, or they can be presented as a dry product for constitution with water or other suitable vehicle before use. Such liquid preparations can be prepared by conventional means with pharmaceutically acceptable additives such as suspending agents (e.g., sorbitol syrup, cellulose derivatives or hydrogenated edible fats); emulsifying agents (e.g., lecithin or acacia); non-aqueous vehicles (e.g., almond oil, oily esters, ethyl alcohol or fractionated vegetable oils); and preservatives (e.g., methyl or propyl-p-hydroxybenzoates or sorbic acid). The preparations can also contain buffer salts, flavoring, coloring and sweetening agents as appropriate.

[0424] Preparations for oral administration can be suitably formulated to give controlled release of the active compound.

[0425] For buccal administration the compositions can take the form of tablets or lozenges formulated in conventional manner.

[0426] For administration by inhalation, the compounds for use according to the present invention are conveniently delivered in the form of an aerosol spray presentation from pressurized packs or a nebulizer, with the use of a suitable propellant, e.g., dichlorodifluoromethane, trichlorofluoromethane, dichlorotetrafluoroethane, carbon dioxide or other suitable gas. In the case of a pressurized aerosol the dosage unit can be determined by providing a valve to deliver a metered amount. Capsules and cartridges of e.g. gelatin for use in an inhaler or insufflator can be formulated containing a powder mix of the compound and a suitable powder base such as lactose or starch.

[0427] The compounds can be formulated for parenteral administration (i.e., intravenous or intramuscular) by injection, via, for example, bolus injection or continuous infusion. Formulations for injection can be presented in unit dosage form, e.g., in ampoules or in multi-dose containers, with an added preservative. The compositions can take such forms as suspensions, solutions or emulsions in oily or aqueous vehicles, and can contain formulatory agents such as suspending, stabilizing and/or dispersing agents. Alternatively, the active ingredient can be in powder form for constitution with a suitable vehicle, e.g., sterile pyrogen-free water, before use.

[0428] The compounds can also be formulated in rectal compositions such as suppositories or retention enemas, e.g., containing conventional suppository bases such as cocoa butter or other glycerides.

[0429] In addition to the formulations described previously, the compounds can also be formulated as a depot preparation. Such long acting formulations can be administered by implantation (for example subcutaneously or intramuscularly) or by intramuscular injection. Thus, for example, the compounds can be formulated with suitable polymeric or hydrophobic materials (for example as an emulsion in an acceptable oil) or ion exchange resins, or as sparingly soluble derivatives, for example, as a sparingly soluble salt.

### 6. EXAMPLES

[0430] 6.1 Construction of a GRACE Strain Containing Modified Alleles of CaKRE9

[0431] Oligonucleotide primers for PCR amplification of the SAT selectable marker used in Step 1 (i.e. gene replacement) contain 25 nucleotides complementary to the SAT disruption cassette in pRC18-ASP, and 65 nucleotides homologous to regions flanking the CaKRE9 open reading frame. FIG. 2 illustrates the 2.2 kb cakre9Δ::SAT disruption fragment produced after PCR amplification and resulting gene replacement of the first wild type CaKRE9 allele via homologous recombination following transformation. PCR conditions were as follows: 5-50 ng pRC18-ASP, 100 pmol of each primer, 200 μM dNTPs, 10 mM Tris-pH 8.3, 1.5 mM MgCl2, 50 mM KCl, 1 unit Taq DNA polymerase (Gibco). PCR amplification times were: 5 min 94° C., 1 min 54° C., 2 min 72° C., for 1 cycle; 45 sec 94° C., 45 sec 54° C., 2 min 72° C., for 30 cycles. Transformation was performed using the lithium acetate method adapted for C. albicans, by Braun and Johnson, (Braun, B. R., and A. D. Johnson (1997), Control of filament formation in Candida albicans by the transcriptional repressor TUP1, Science 277:105-109), with minor modifications, including shorter incubation times at 30° C. and 42° C. (1 hr and 5 min respectively) and a greater amount of material transformed (50 μg of ethanol-precipitated cakre9Δ::SAT PCR product). Transformed cells were spread onto YPD plates and incubated overnight at 30° C., providing a preincubation period for expression of SAT prior to replica plating onto YPD medium containing streptothricin (400 μg/ml). Streptothricin-resistant colonies were detected after 36 hr and cakre9Δ::SAT/CaKRE9 heterozygotes identified by PCR analysis using suitable primers which amplify both CaKRE9 and cakre9Δ::SAT alleles.

[0432] Oligonucleotide primers for PCR amplification of the conditional promoter used in Step 2 (i.e. promoter replacement) contain 25 nucleotides complementary to the CaHIS3-marked tetracycline regulated promoter cassette in pBSK-HT4 and 65 nucleotides of homologous sequence corresponding to promoter regions −270 to −205, relative to the point of transcription initiation, and nucleotides 1-65 of the CaKRE9 open reading frame. The resulting 2.2 kb PCR product was transformed into the cakre9Δ:SAT/CaKRE9 heterozygous strain produced in step 1, and His⁺ transformants selected on YNB agar. Bonafide CaKRE9 GRACE strains containing both a cakre9Δ::SAT allele and CaHIS3-Tet-CaKRE9 allele were determined by PCR analysis. Typically, 2 independent GRACE strains are constructed and evaluated to provide a reliable determination of the terminal phenotype of any given drug target. Terminal phenotype is that phenotype caused by the absence of the gene product of an essential gene.

[0433] 6.2 Phenotype Determination of the CaKRE9 Grace Strain

[0434] The terminal phenotype of the resulting GRACE strains was evaluated in three independent methods. In the first, rapid determination of the CaKRE9 GRACE strain terminal phenotype was achieved by streaking approximately 1.0×10⁶ cells onto both a YNB plate and YNB plate containing 100 μg/ml tetracycline and comparing growth rate after 48 hr at room temperature. For essential genes, such as CaKRE9, no significant growth is detected in the presence of tetracycline. In the second approach, the essential nature of a gene may be determined by streaking CaKRE9 GRACE cells onto a casamino acid plate containing 625 μg/ml 5-fluroorotic acid (5FOA) and 100 μg/ml uridine to select for ura-cells which have excised (via recombination between CaLEU2 sequence duplications created during targeted integration) the transactivator gene that is normally required for expression of the tetracycline promoter-regulated target gene. Again, whereas nonessential GRACE strains demonstrate robust growth under such conditions, essential GRACE strains fail to grow. Quantitative evaluation of the terminal phenotype associated with an essential GRACE strain is performed using 2×10³ cells/ml of overnight culture inoculated into 5.0 ml YNB either lacking or supplemented with 100 μg/ml tetracycline and measuring optical density (O.D.₆₀₀) after 24 and 48 hr incubation at 30° C. Typically, for essential GRACE strains, no significant increase in optical density is detected after 48 hrs. Discrimination between cell death (cidal) and growth inhibitory (static) terminal phenotypes for a demonstrated essential gene is achieved by determining the percentage of viable cells (as judged by the number of colony forming units (CFU) from an equivalent of 2×10³ washed cells at T=0) from the above tetracycline-treated cultures after 24 and 48 hours of incubation. Essential GRACE strains producing a cidal terminal phenotype are those which display a reduction in percent viable cells (i.e. <2×10³ CFU) following incubation under repressing conditions.

[0435] 6.3 Target Level Variation in Whole Cell Assays

[0436] In order to demonstrate the utility of target level expression in whole cell assays for drug screening, both a CaHIS3 heterozygote strain and a tetracycline promoter-regulated CaHIS3 GRACE strain were compared against a wild type (diploid) CaHIS3 strain for sensitivity towards the 3-aminotriazole (3-AT) (FIG. 6). 3-AT is a competitive inhibitor of the enzyme encoded by CaHIS3, imidazoleglycerol phosphate dehydratase, and together serve as a model for a drug and drug target respectively. Overexpression, achieved by the constitutive expression level of CaHIS3 maintained by the tetracycline promoter, confers 3-AT resistance at concentrations sufficient to completely inhibit growth of both wild type and CaHIS3 heterozygote strains (FIG. 6A). The phenotype observed is consistent with that expected in light of the predicted 7.5 fold overexpression of CaHIS3 determined by Northern bolt analysis (see FIG. 5). A heterozygous CaHIS3 strain demonstrates enhanced sensitivity (i.e. haploinsufficient phenotype) to an intermediate 3-AT concentration unable to effect either wild type or tetracycline promoter-based overproducing CaHIS3 strains noticeably (FIG. 6B). A third CaHIS3 expression level evaluated for differential sensitivity to 3-AT was produced by partial repression of the GRACE CaHIS3 strain using a threshold concentration of tetracycline 0.1% that normally is used to achieve complete shut-off.

[0437] This level of CaHIS3 expression represents the minimum expression level required for viability and as predicted, demonstrates an enhanced drug sensitivity relative the heterozygous CaHIS3 strain at an intermediate 3-AT concentration (FIG. 6C). Similarly, GRACE strain-specific drug resistance and sensitivity phenotypes to fluconazole and tunicamycin have been demonstrated by increasing and decreasing the level of expression of their respective known drug targets, CaERG11 and CaALG7. Together these results demonstrate that three different levels of expression are achieved using the C. albicans GRACE strain collection, and that they exhibit the predicted drug sensitivity phenotypes between known drugs and their known drug target. Moreover, these experiments clearly indicate how distinct levels of target gene products synthesized within the pathogen could be directly applied in whole cell assay based drug screens to identify novel antifungal compounds against those novel drug targets validated using the GRACE method.

[0438] 6.4 Identification of a Target Pathway

[0439] A target pathway is a genetic or biochemical pathway wherein one or more of the components of the pathway (e.g., enzymes, signaling molecules, etc) is a drug target as determined by the methods of the invention.

[0440] 6.4.1. Preparation of Stocks of GRACE Strains for Assay

[0441] To provide a consistent source of cells to screen, frozen stocks of host GRACE strains are prepared using standard microbiological techniques. For example, a single clone of the microorganism can be isolated by streaking out a sample of the original stock onto an agar plate containing nutrients for cell growth and an antibiotic for which the GRACE strain contains a gene which confers resistance. After overnight growth an isolated colony is picked from the plate with a sterile needle and transferred to an appropriate liquid growth medium containing the antibiotic to which the GRACE strain is resistant. The cells are incubated under appropriate growth conditions to yield a culture in exponential growth. Cells are frozen using standard techniques.

[0442] 6.4.2. Growth of GRACE Strains for Use in the Assay

[0443] Prior to performing an assay, a stock vial is removed from the freezer, rapidly thawed and a loop of culture is streaked out on an agar plate containing nutrients for cell growth and an antibiotic for which the GRACE strain contains a gene which confers resistance. After overnight growth, randomly chosen, isolated colonies are transferred from the plate (sterile inoculum loop) to a sterile tube containing medium containing the antibiotic to which the GRACE strain contains a gene which confers resistance. After vigorous mixing to form a homogeneous cell suspension, the optical density of the suspension is measured and if necessary an aliquot of the suspension is diluted into a second tube of medium plus antibiotic. The culture is then incubated until the cells reach an optical density suitable for use in the assay.

[0444] 6.4.3. Selection of Medium to be Used in Assay

[0445] Two-fold dilution series of the inducer or repressor for the regulatable promoter which is linked to the gene required for the fungal proliferation, virulence or pathogenicity of the GRACE strain are generated in culture medium containing the appropriate antibiotic for which the GRACE strain contains a gene which confers resistance. Several medium are tested side by side and three to four wells are used to evaluate the effects of the inducer or repressor at each concentration in each media. Equal volumes of test media-inducer or repressor and GRACE cells are added to the wells of a 384 well microtiter plate and mixed. The cells are prepared as described above and diluted in the appropriate medium containing the test antibiotic immediately prior to addition to the microtiter plate wells. For a control, cells are also added to several wells of each medium that do not contain inducer or repressor. Cell growth is monitored continuously by incubation by monitoring the optical density of the wells. The percent inhibition of growth produced by each concentration of inducer or repressor is calculated by comparing the rates of logarithmic growth against that exhibited by cells growing in medium without inducer or repressor. The medium yielding greatest sensitivity to inducer or repressor is selected for use in the assays described below.

[0446] 6.4.4. Measurement of Test Antibiotic Sensitivity in GRACE Strains in which the Level of the Target Gene Product is Not Rate Limiting

[0447] Two-fold dilution series of antibiotics of known mechanism of action are generated in the culture medium selected for further assay development that has been supplemented with the antibiotic used to maintain the GRACE strain. A panel of test antibiotics known to act on different pathways is tested side by side with three to four wells being used to evaluate the effect of a test antibiotic on cell growth at each concentration. Equal volumes of test antibiotic and cells are added to the wells of a 384 well microtiter plate and mixed. Cells are prepared as described above using the medium selected for assay development supplemented with the antibiotic required to maintain the GRACE strain and are diluted in identical medium immediately prior to addition to the microtiter plate wells. For a control, cells are also added to several wells that lack antibiotic, but contain the solvent used to dissolve the antibiotics. Cell growth is monitored continuously by incubation in a microtiter plate reader monitoring the optical density of the wells. The percent inhibition of growth produced by each concentration of antibiotic is calculated by comparing the rates of logarithmic growth against that exhibited by cells growing in medium without antibiotic. A plot of percent inhibition against log [antibiotic concentration] allows extrapolation of an IC₅₀ value for each antibiotic.

[0448] 6.4.5. Measurement of Test Antibiotic Sensitivity in the GRACE Strains in which the Level of the Target Gene Product is Rate Limiting

[0449] The culture medium selected for use in the assay is supplemented with inducer or repressor at concentrations shown to inhibit cell growth by a desired amount as described above, as well as the antibiotic used to maintain the GRACE strain. Two fold dilution series of the panel of test antibiotics used above are generated in each of these media. Several antibiotics are tested side by side in each medium with three to four wells being used to evaluate the effects of an antibiotic on cell growth at each concentration. Equal volumes of test antibiotic and cells are added to the wells of a 384 well microtiter plate and mixed. Cells are prepared as described above using the medium selected for use in the assay supplemented with the antibiotic required to maintain the GRACE strain. The cells are diluted 1:100 into two aliquots of identical medium containing concentrations of inducer that have been shown to inhibit cell growth by the desired amount and incubated under appropriate growth conditions. Immediately prior to addition to the microtiter plate wells, the cultures are adjusted to an appropriate optical density by dilution into warm sterile medium supplemented with identical concentrations of the inducer and antibiotic used to maintain the GRACE strain. For a control, cells are also added to several wells that contain solvent used to dissolve test antibiotics but which contain no antibiotic. Cell growth is monitored continuously by incubation under suitable growth conditions in a microtiter plate reader monitoring the optical density of the wells. The percent inhibition of growth produced by each concentration of antibiotic is calculated by comparing the rates of logarithmic growth against that exhibited by cells growing in medium without antibiotic. A plot of percent inhibition against log [antibiotic concentration] allows extrapolation of an IC₅₀ value for each antibiotic.

[0450] 6.4.6. Determining the Specificity of the Test Antibiotics

[0451] A comparison of the IC₅₀s generated by antibiotics of known mechanism of action under conditions in which the level of the gene product required for fungal proliferation, virulence or pathogenicity is rate limiting or is not rate limiting allows the pathway in which a gene product required for fungal proliferation, virulence or pathogenicity lies to be identified. If cells expressing a rate limiting level of a gene product required for fungal proliferation, virulence or pathogenicity are selectively sensitive to an antibiotic acting via a particular pathway, then the gene product encoded by the gene linked to the regulatable promoter in the GRACE strain is involved in the pathway on which the antibiotic acts.

[0452] 6.4.7. Identification of Pathway in which a Test Antibiotic Acts

[0453] As discussed above, the cell-based assay may also be used to determine the pathway against which a test antibiotic acts. In such an analysis, the pathways against in which the gene under the control of the regulatable promoter in each member of a panel of GRACE strains lies is identified as described above. A panel of cells, each containing a regulatable promoter which directs transcription of a proliferation, virulence or pathogenicity-required nucleic acid which lies in a known biological pathway required for fungal proliferation, virulence or pathogenicity, is contacted with a test antibiotic for which it is desired to determine the pathway on which it acts under conditions in which the gene product of the nucleic acid is rate limiting or is not rate limiting. If heightened sensitivity is observed in cells in which the gene product is rate limiting for a gene product which lies in a particular pathway but not in cells expressing rate limiting levels of gene products which lie in other pathways, then the test antibiotic acts against the pathway for which heightened sensitivity was observed.

[0454] All references cited herein are incorporated herein by reference in their entirety and for all purposes to the same extent as if each individual publication or patent or patent application was specifically and individually indicated to be incorporated by reference in its entirety for all purposes.

[0455] The present invention is not to be limited in scope by the specific embodiments described herein. Indeed, various modifications of the invention in addition to those described herein will become apparent to those skilled in the art from the foregoing description and accompanying figures. Such modifications can be made without departing from its spirit and scope, and are intended to fall within the scope of the appended claims.

The application's sequence listing, which the Patent Office published only in electronic form, follows.

SEQUENCE LISTING (8000 sequences)

SEQ ID NO: 1 - DNA, 65 bp, Candida albicans
aaaatatacattcaaaatccctaaaatcacttcatacttcaacaacaacaataataaataccatt

SEQ ID NO: 2 - DNA, 65 bp, Candida albicans
ttttaactattcatttttttagtacataattacaatttattgtgagtccccattttactaaggtc

SEQ ID NO: 3 - DNA, 65 bp, Candida albicans
cgtgttgttttgatttcgagctcacctctctttcctatttccactcatactccaatttaatgcac

SEQ ID NO: 4 - DNA, 65 bp, Candida albicans
cctcaaaacagtataacctttgcctcctttctatcctctttataattcattaaataattacaccc

SEQ ID NO: 5 - DNA, 65 bp, Candida albicans
gttcagttgcaatcaatcaaaaagtttgtctcatcgctcaacagtaagacaaaccaagccaaggg

SEQ ID NO: 6 - DNA, 65 bp, Candida albicans
caaaggtaatttcattactattgtcgttttttaggttttcacttacaattaatggtctattctta

SEQ ID NO: 7 - DNA, 65 bp, Candida albicans
tcaagtcggcgattaacccgacaataaataaacaatttcgaaaagcattccattattctatcact

SEQ ID NO: 8 - DNA, 65 bp, Candida albicans
gctggctaatgacaattttcaccacaacaaataatattaaactgacaatttaaaacgattaatgc

SEQ ID NO: 9 - DNA, 65 bp, Candida albicans
caccaaaaaatttttgatattgatcaatcacttctttcttcattgtgtaaaaactactagccgac

SEQ ID NO: 10 - DNA, 65 bp, Candida albicans
cgctgtcattttacaaagccacaccgacaccaagaagatcatttgaaagtgcacttgtacatagt

SEQ ID NO: 11 - DNA, 65 bp, Candida albicans
ctctcttttatattctcgtcaataaaatcgctcactcgaaaaccctaaaaaaaagcagacaaccc

SEQ ID NO: 12 - DNA, 65 bp, Candida albicans
gagcacacaaaaaaaaaaacaccacccagtatcgaaccaacattgtttccccaacccccattctt

SEQ ID NO: 13 - DNA, 65 bp, Candida albicans
ccatccatatatatctaccactatcaagatccctatatcttgttgatacacactttttggttaaa

SEQ ID NO: 14 - DNA, 65 bp, Candida albicans
tggtatttttcttaagaaaggataattagcatagtaaaggtcattctactatactcatataaaat

SEQ ID NO: 15 - DNA, 65 bp, Candida albicans
gcaaaaaaagaataaacaaatgcccaatatcatctgtcaagactacttgttaaacaatcagaaca

SEQ ID NO: 16 - DNA, 65 bp, Candida albicans
tacttttttttttttcaaatttttcaattacgacatcgagtattcaccccaaggtctcagtacaa

SEQ ID NO: 17 - DNA, 65 bp, Candida albicans
gaaaaaaaaaactttttgacagtacgtctaacagattattgtgatgaactaatcccacatatttc

SEQ ID NO: 18 - DNA, 65 bp, Candida albicans
tcacataaaaccacattaacattctttattcttcatttcataactaatcacccacatattccatc

SEQ ID NO: 19 - DNA, 65 bp, Candida albicans
caacaaacgatctatttaaaggatactctaagaaatcgaggggtgttcaaccatagctcataatc

SEQ ID NO: 20 - DNA, 65 bp, Candida albicans
ggaaatcattaataaaacatgcttctagggttgttctaaagtgaaaaaccacgacaaacacgtcg

SEQ ID NO: 21 - DNA, 65 bp, Candida albicans
aaaaaaatgtaggtgttcaccaagtgttaacacatactacttttccattctctacagcttctaaa

SEQ ID NO: 22 - DNA, 65 bp, Candida albicans
cttttaactttttcacatattataaaagattagacagtttctcaagcatatatccctcacagaac

SEQ ID NO: 23 - DNA, 65 bp, Candida albicans
agattccaacttcagaatattcattcagatctgaacatttctttttctccgatcatcaattggca

SEQ ID NO: 24 - DNA, 65 bp, Candida albicans
ccttttaattaacctcaattctccccatcttataacttgtttttctttttggtgttattgtcaac

SEQ ID NO: 25 - DNA, 65 bp, Candida albicans
ttttcttataatgagatgagatttgatttgatacatcgaattctacaataattatacaaccaact

SEQ ID NO: 26 - DNA, 65 bp, Candida albicans
gggaaactataaacaaagagttcagatgaggtaatagtttcaaggagaagattagttaaaaaata

SEQ ID NO: 27 - DNA, 65 bp, Candida albicans
cttaaacttcctcctcacattcagctcttcttccacttttcttactccacacatacacacctatt

SEQ ID NO: 28 - DNA, 65 bp, Candida albicans
atttagcaaacataatccgtgttttacatatattattcacccaatatcataacaaaaacaaactg

SEQ ID NO: 29 - DNA, 65 bp, Candida albicans
tggaaatggatgcaaatgagattttctactattcttttaccatgtttctttgttatggatcgtgc

SEQ ID NO: 30 - DNA, 65 bp, Candida albicans
tccctcccctcccctcttccccttttaataatacatctatcaaatataacatataaacttacata

SEQ ID NO: 31 - DNA, 65 bp, Candida albicans
cgttatactttccatattacttgtcttctttttattatatatataagtttcttttcaagaagatc

SEQ ID NO: 32 - DNA, 65 bp, Candida albicans
acattcctgctgctacaaatatacatcccccttcttctacacgtctagtttagtgtttttgcaag

SEQ ID NO: 33 - DNA, 65 bp, Candida albicans
ttttttctttttatagcgcaagagaaaagtattcagctcataaataattaatatatccatatatc

SEQ ID NO: 34 - DNA, 65 bp, Candida albicans
actatttggaaccaaaccttagatccaaacacacgcacattcacacattcacacatttacacaat

SEQ ID NO: 35 - DNA, 65 bp, Candida albicans
tctccaaaaatgtcagaactagcttgttgatgggcaaccgttgacttgtttatggccatactgca

SEQ ID NO: 36 - DNA, 65 bp, Candida albicans
tttttcacttcttgagtcattcttgtaaccataatccacttttgtttccaacgaactataaaatc

SEQ ID NO: 37 - DNA, 65 bp, Candida albicans
aggtttgaaagaagaaatcaatccttcaaacacttttgcctcataatgttacttcggtgacaaat

SEQ ID NO: 38 - DNA, 65 bp, Candida albicans
ttcttctaccctttttttcaatagaaacaactacacatatttttatcgataatataattcaaaaa

SEQ ID NO: 39 - DNA, 65 bp, Candida albicans
ttctatttttcagattgactatcctttaaccttctaatcatttacatcttcaagaactaagttcc

SEQ ID NO: 40 - DNA, 65 bp, Candida albicans
ccccccttctttttttttaaatattaaaaaccaacacccaactgatatactaacttatctttttt

SEQ ID NO: 41 - DNA, 55 bp, Candida albicans
actacgtgccattcaaaaaatagaagctgaaaacacttgactacacacaccactg

SEQ ID NO: 42 - DNA, 55 bp, Candida albicans
cgatgagacaaaaaaaaaaaaaaaatataccaaactcatatcaagagatgaataa

SEQ ID NO: 43 - DNA, 55 bp, Candida albicans
cgtcaaaaaaaaaaaatttttctaggttagacgattgagttgtgattacgtaatt

SEQ ID NO: 44 - DNA, 55 bp, Candida albicans
ttccaatagtgaaagtgtatttgtgtgtgtatacttatttctccccctaccagcc

SEQ ID NO: 45 - DNA, 55 bp, Candida albicans
ttgaaacaggacctaagtataataaagttgattaactaatcaccatcaaacagga

SEQ ID NO: 46 - DNA, 55 bp, Candida albicans
caagaatacaccacaataacaacacttgctaatcaatcttcacaacatcttcacc

SEQ ID NO: 47 - DNA, 55 bp, Candida albicans
aatagaaaacgataataaaacaagatacagatagctaatattatccaacactctt

SEQ ID NO: 48 - DNA, 55 bp, Candida albicans
taaatagtgtgtgcagcaacaaaaaattagaaaaaaaagacaactcacttcttca

SEQ ID NO: 49 - DNA, 55 bp, Candida albicans
ttataactttttttaaggagagctcaattattatcaatcttgaaatccccgaatt

SEQ ID NO: 50 - DNA, 55 bp, Candida albicans
ctaaactaatcacacaacagcttcaactttaatcttaccaatcaactgtacaaat

SEQ ID NO: 51 - DNA, 65 bp, Candida albicans
agatcatttgggtcatcattcttaattatcaaacctaatttatttataatcaaggaaaacacaac

SEQ ID NO: 52 - DNA, 55 bp, Candida albicans
tttgtatttctattttgcaagttctacttttaatatcatttgatcaagaccatct

SEQ ID NO: 53 - DNA, 55 bp, Candida albicans
acttgaaaggtaacttgagactaaccaatcatagtaacgatacattcgagtcaat

SEQ ID NO: 54 - DNA, 55 bp, Candida albicans
ttatttattaaattaatccttaataattcaagcatttctagacacacacaaatca

SEQ ID NO: 55 - DNA, 55 bp, Candida albicans
taacacccatagcaatacaccaataccgttgattttgaactaaacttattccata

SEQ ID NO: 56 - DNA, 55 bp, Candida albicans
ttggaagaactcctttccttttctatagtcattactcgaagcgaaatacataatt

SEQ ID NO: 57 - DNA, 55 bp, Candida albicans
tttttatcattaaaatcatatccctcccctctcaaaaacaactatatatctaatc

SEQ ID NO: 58 - DNA, 55 bp, Candida albicans
taaatataaaaatccattattctactgtttttcagctttgcattgctatttactc

SEQ ID NO: 59 - DNA, 55 bp, Candida albicans
aaaataaatcactctaatcatttcattcatcaatacccaccacaaaacctttcaa

SEQ ID NO: 60 - DNA, 55 bp, Candida albicans
atcacaaacactttcctaaattaatccagcgttaattatctcaatataatcaact

SEQ ID NO: 61 - DNA, 55 bp, Candida albicans
tgaacaaattcccacctccaatacagcatttttcttcactcttgatataccaatt

SEQ ID NO: 62 - DNA, 55 bp, Candida albicans
ttccttactttgaacaacttccctctcctcctcgtctcccccctcaccaacagcc

SEQ ID NO: 63 - DNA, 55 bp, Candida albicans
ttttcggttttatccaaaaataattcaataacaagtcatctataattccaaaata

SEQ ID NO: 64 - DNA, 55 bp, Candida albicans
acaacaacaacaacaacatcaacttctaaagcattatactactctttccttcacg

SEQ ID NO: 65 - DNA, 55 bp, Candida albicans
tagaactaaagatgttgaacataataaacaattgtttattaaattattggaaaca

SEQ ID NO: 66 - DNA, 55 bp, Candida albicans
taatcacctctaacgaacaagagttcaccgtcaaaaaagaataaaaaacaaatta

SEQ ID NO: 67 - DNA, 55 bp, Candida albicans
tgaccaactagttgtacatagtaatacatattttgtttttagagtataccaaacc

SEQ ID NO: 68 - DNA, 55 bp, Candida albicans
cttccctttttgcttccagcttatttattttcaagaagcatttttgaaatctaca

SEQ ID NO: 69 - DNA, 55 bp, Candida albicans
tgagaattttttaagaaatttaatctgctaataactcttttctacacaaggaacc

SEQ ID NO: 70 - DNA, 65 bp, Candida albicans
agaaaaaaaagtaacccacaatgagatgaactaaaccaacatcaatcaaccattacacaccaatc

SEQ ID NO: 71 - DNA, 65 bp, Candida albicans
caacaatttcaatccatcaaatacttccatatcttaatattcttgagatcatccaaaaaaaaaaa

SEQ ID NO: 72 - DNA, 43 bp, Candida albicans
agcttagatccgctaaaataagcactcagtactttgcataatc

SEQ ID NO: 73 - DNA, 65 bp, Candida albicans
caatattatactaatacagtctctatactttcttttgcttttcttttctttttttttttttcata

SEQ ID NO: 74 - DNA, 65 bp, Candida albicans
cctcggcggaaaaatataaacaaagatcataagtgcaaagtcattgtaactcacaacattcaact

SEQ ID NO: 75 - DNA, 65 bp, Candida albicans
ctttttttctttatcaacaataagaaagaattactcaattccgtaatatttattctacattaaca

SEQ ID NO: 76 - DNA, 65 bp, Candida albicans
taatcgacaaaaaaaacactaaataagtttactaacatttgaaaccagtaacaacgaaattttta

SEQ ID NO: 77 - DNA, 65 bp, Candida albicans
tgacatgctactatattgataacagtaaaaatgatacattgtttaatatattgttaaacacatta

SEQ ID NO: 78 - DNA, 65 bp, Candida albicans
agttttccattgattaaccatcataaacaagcaacagagacaagagactataccatatttacaca

SEQ ID NO: 79 - DNA, 65 bp, Candida albicans
aatataaacaattataaaacaaaatagtacattcaattacgttaataccaacaaaatttcattat

SEQ ID NO: 80 - DNA, 65 bp, Candida albicans
ttggtgatgagcatcaaacattaaaatacaaacaatctccaaactccaaaaaccaaacatttagc

SEQ ID NO: 81 - DNA, 65 bp, Candida albicans
aagtaaccaaaaaaaaaaacatgctgagttgaaatgtttctttcaattctcttcaccaaaacatt

SEQ ID NO: 82 - DNA, 65 bp, Candida albicans
ttaattacgaatattcagtgaaaaagaaagaaaaaagaaagattaatcatagaaaataacaagat

SEQ ID NO: 83 - DNA, 65 bp, Candida albicans
ttgatacaatgaaaaataaataatgaactttacttttattaaacattattaagacactacacata

SEQ ID NO: 84 - DNA, 65 bp, Candida albicans
ttttcgaaaactgtattactctctttctcaccccctcaagcaaactacaattatttctatcaact

SEQ ID NO: 85 - DNA, 65 bp, Candida albicans
tacagaaatcaacaccaaataaataacagcgcaataccatatagctcagtaccaaacaccaatca

SEQ ID NO: 86 - DNA, 65 bp, Candida albicans
aatttgaaattttacaacaaacaacaacattcaacgttcaccaccacccaccactagtaaacaca

SEQ ID NO: 87 - DNA, 65 bp, Candida albicans
caatttattgattgtttgaattaattgaatataaacaaaaaaaaaagaattcaaattcatttgac

SEQ ID NO: 88 - DNA, 65 bp, Candida albicans
aagacgcgttgttttaccttctttcaacatcttttagcaacaccacccattcaataaccttcaat

SEQ ID NO: 89 - DNA, 65 bp, Candida albicans
gagcctaagaaaagtttgtcaactaacaacaactgtttagtatatatttacataaaaagataaaa

SEQ ID NO: 90 - DNA, 65 bp, Candida albicans
ctcttcctcatctataaatctctaatcatctcgagtagatactgttaatctataacttcactata

SEQ ID NO: 91 - DNA, 65 bp, Candida albicans
aatcttcccattagaacttacaacacaacaacaaaaaaacccattctaaatcactattctccatt

SEQ ID NO: 92 - DNA, 65 bp, Candida albicans
tcaccctaaaaagttcccacgaataatagtgctatataaagcaaattgccttgatagtttacaaa

SEQ ID NO: 93 - DNA, 65 bp, Candida albicans
gttccagaaggcattaaaggactgaaaatacacctacttaaatattacacattcatagggaaaga

SEQ ID NO: 94 - DNA, 65 bp, Candida albicans
acttcaacttgcttttcttttttaaatcctcagttgtacattaatcagattgttcacattaaatc

SEQ ID NO: 95 - DNA, 65 bp, Candida albicans
atgtttgaactttttcaagtacagtgatcatcaagtttatcagaatcctttccacagcggctaac

SEQ ID NO: 96 - DNA, 65 bp, Candida albicans
tttgacagattttttttttttttcgacttgcaatttcaaatacagagaccattttcaacacctgg

SEQ ID NO: 97 - DNA, 65 bp, Candida albicans
tgaaattttttttttttcacataaaaaagtatctcctacatctttccgtactacactcatcagcc

SEQ ID NO: 98 - DNA, 65 bp, Candida albicans
tcaatgaaatcccaaattgaggaaccattacttttatcaaagcaatacatttgtacacaaacaat

SEQ ID NO: 99 - DNA, 65 bp, Candida albicans
ccacccattcattctttctttttgaaggtgcttgcagctaagtttaataacagacgtattctaat

SEQ ID NO: 100 - DNA, 65 bp, Candida albicans
tcaggtcatcatcatttcttctgaataaaactaacacaacaattagcaaccagaagatagaaaat

SEQ ID NO: 101 - DNA, 65 bp, Candida albicans
gcttgtattgcaaaggaagctttataaattacttttgataatctaatatcctagagtttacaacg

SEQ ID NO: 102 - DNA, 65 bp, Candida albicans
tgctagaggggtaaagagaatttttttttctttcgaaaaagctaactcaagagtaaaactatttc

SEQ ID NO: 103 - DNA, 65 bp, Candida albicans
aaaatagagcaacaaaaaagcaacacccacagtatagatatatagttaccctcaacaatagacaa

SEQ ID NO: 104 - DNA, 65 bp, Candida albicans
aaatttcaaaattctctgacacccactctttatcttattaaactcaatacactcccatatcacaa

SEQ ID NO: 105 - DNA, 65 bp, Candida albicans
ttatctacatatatatatatataccacctttttcctccttcttattcatattttacacaacaacc

SEQ ID NO: 106 - DNA, 65 bp, Candida albicans
tacaaaccatctgaacttgaataacaacttttcttttttctagctatctacatattgactcataa

SEQ ID NO: 107 - DNA, 65 bp, Candida albicans
cataaaaaaaattgtgaagcagaatgagatgctcatctgaacacgatatataacaaacctaaaaa

SEQ ID NO: 108 - DNA, 65 bp, Candida albicans
atctaattgatcaatattagactcgtatagaacacaccacctccaccactgatactactgcaatc

SEQ ID NO: 109 - DNA, 65 bp, Candida albicans
aaatcttgcaccaaactgaaccccatctcatcatctactttactaaacatatacatatatcagtc

SEQ ID NO: 110 - DNA, 65 bp, Candida albicans
aaccgaaaaaaaaaaagaccaggaacagtatatatctacacctcccatatacccgaaagctcagt

SEQ ID NO: 111 - DNA, 65 bp, Candida albicans
cccaacaaacatccttcatctgttgcgtatcagtaatctattaatccaattttcaaagacttatc

SEQ ID NO: 112 - DNA, 65 bp, Candida albicans
atcatatcaatacgatccagacttttcgatcatcttcttataatcttgtcaaaccaaaaagaaaa

SEQ ID NO: 113 - DNA, 65 bp, Candida albicans
tcatccaaaacacacataatctacatcaagctcgttattacggaccaactacttaacatttcact

SEQ ID NO: 114 - DNA, 65 bp, Candida albicans
aattatggattagaactaaagatgttgaacataataaacaattgtttattaaattattggaaaca

SEQ ID NO: 115 - DNA, 65 bp, Candida albicans
aaaagcatctcatctcatctctctcttgttatattgaagtcgatcaaccacaccactatacaatc

SEQ ID NO: 116 - DNA, 65 bp, Candida albicans
tgcgttttttcctctcttctcagtaaagtgatacattatatcaaatcatcaatagactcattacc

SEQ ID NO: 117 - DNA, 65 bp, Candida albicans
caatcaatcaattaattaattaaccttccttccttcctttctctattcaaataaacaccctagca

SEQ ID NO: 118 - DNA, 65 bp, Candida albicans
aaaatttcgaagaatcaaaaacttatttatttgtgaaaccagtctcctaacaacattccattgag

SEQ ID NO: 119 - DNA, 65 bp, Candida albicans
tgaggtataaactttcccccctattttagcctataattatttatatcctgtttccatattacaca

SEQ ID NO: 120 - DNA, 65 bp, Candida albicans
gttgatcccaactcatcaaaacaccataactatcaccatttacaaagaggttttgctctgaaaaa

SEQ ID NO: 121 - DNA, 65 bp, Candida albicans
agaaattgaaacaatcggaaaacaacaatatcaaactgatgcccaataacactgtatgtacctag

SEQ ID NO: 122 - DNA, 65 bp, Candida albicans
aacgacagattatcaacacgaaattattttttaattgactgtatttcatagaacttgttattcaa

SEQ ID NO: 123 - DNA, 65 bp, Candida albicans
aatattaattgcgaataggtttcttcgtacattgacaaattataaaaaaaaactagcaacaagaa

SEQ ID NO: 124 - DNA, 65 bp, Candida albicans
aaaaagaaaaaggaacactgacatctttctgtacttctggtgaatctatactttttactctaatc

SEQ ID NO: 125 - DNA, 65 bp, Candida albicans
aatttttcaatattcaaaaactacacttattcattaatcaatcatcaaccattaaactatttgtc

SEQ ID NO: 126 - DNA, 65 bp, Candida albicans
aaaactcataagttcgtacttaccttcattatcctagaaatacatcgtagcgaacaaccttaaca

SEQ ID NO: 127 - DNA, 65 bp, Candida albicans
tacttactactattgttattattattagttttttatcatcattatagatttcatcaattacacca

SEQ ID NO: 128 - DNA, 65 bp, Candida albicans
taacaaatcctaaaactcatcgacaattcctctttctccattgaatattgcatagtcatttaaac

SEQ ID NO: 129 - DNA, 65 bp, Candida albicans
aagaagatacatatcattattataacaacaacgacaacgacaacaacagcaacaaaaactaaact

SEQ ID NO: 130 - DNA, 65 bp, Candida albicans
ctatgaagcgatcctaccaggcgaatgtagcatcattgacataaaacaagaaagaaatttactga

SEQ ID NO: 131 - DNA, 65 bp, Candida albicans
tatttatcaactaataaaagagggacagctctgttaaatctattattttggtttgatcgtcagtt

SEQ ID NO: 132 - DNA, 65 bp, Candida albicans
cacttttgttctcaattttgttcccttttttttatttgtttttgtaatattaagtaaagccaatt

SEQ ID NO: 133 - DNA, 65 bp, Candida albicans
attttgaaaaaaaaaacaaaacaagccatacccaatacgtgaatagtattgaataatcaacccat

SEQ ID NO: 134 - DNA, 65 bp, Candida albicans
agtaatcaaaaaaaaaaaaaattccaaaaaaaaaaagaaccaacgatggcgtacttacaccagac

SEQ ID NO: 135 - DNA, 65 bp, Candida albicans
tcttctcttttttcttttttcttttcctttccttgccttcccttcccttcctactaaaccattgt

SEQ ID NO: 136 - DNA, 65 bp, Candida albicans
taaataaatcacatctcatcggattttcttcaatcatcacaacctaatctcatcaattaataata

SEQ ID NO: 137 - DNA, 65 bp, Candida albicans
tcaacatcttttataaagaaacaatttcacacatatatatatataatacataatttttttaaaca

SEQ ID NO: 138 - DNA, 65 bp, Candida albicans
ataggaagagaaaaaaaaaaaaaaatgaacaacaaaaaaagaatctcgtttactctctccacgtc

SEQ ID NO: 139 - DNA, 65 bp, Candida albicans
gaaaaagacttgaatcacattccccaaagtatttcgatcctataaatagttgacatttactaaac

SEQ ID NO: 140 - DNA, 65 bp, Candida albicans
agaaaacaccatttatattattcttctaaagcaaaactagaaagaaacttatcatattcaacttc

SEQ ID NO: 141 - DNA, 65 bp, Candida albicans
catcccactcctacttaacactatcagcatcgattcttctccgttctaaaaaatatttataaaag

SEQ ID NO: 142 - DNA, 65 bp, Candida albicans
atattgaagaaatagaaaccaaatagaaccacttattatatcttaatatcaacaaatccaaaacc

SEQ ID NO: 143 - DNA, 65 bp, Candida albicans
caataccaattcattgtaatccaccaattatctaataaaaagtaacgcccttatagaaaccaatc

SEQ ID NO: 144 - DNA, 65 bp, Candida albicans
aattttgagatgatcttctctaatttatttatttaatttatcctacaacttaaacaaatactatc

SEQ ID NO: 145 - DNA, 65 bp, Candida albicans
cccaaatcttcaacctatttttatcacaaaccaacaaaaatatctacaccaagaagtttttaatt

SEQ ID NO: 146 - DNA, 65 bp, Candida albicans
aagtaaaaaaaaaaaatccattgctaaatctcatctctatttcaaccaagcatactctaacaaat

SEQ ID NO: 147 - DNA, 65 bp, Candida albicans
tgacgataataacagactttatataaatttgtgttagagacaataatccatgaaagccaggtctt

SEQ ID NO: 148 - DNA, 65 bp, Candida albicans
ttaaaaaattgtttgtctttttttttattcatcaccttgactattataacatcataccattaaag

SEQ ID NO: 149 - DNA, 65 bp, Candida albicans
cattaattcactcgcttcgataccatttcattttcatcaattacattcattctttaataccaaca

SEQ ID NO: 150 - DNA, 65 bp, Candida albicans
ttactcatctatcgatttaactgttgtcgttggattagttgttatttattcattcattttctatc

SEQ ID NO: 151 - DNA, 65 bp, Candida albicans
atatattttgtacagcttccctttttcttttcttggttcttgccccttgtccataattccataca

SEQ ID NO: 152 - DNA, 65 bp, Candida albicans
ctttcttaaagaagcttctcttttttttattgtcatttaccataacacaccccttcctaaggata

SEQ ID NO: 153 - DNA, 65 bp, Candida albicans
caatactgcctttcgaaatacagttcagattggattattagtttgatgaatatttgtatatcaca

SEQ ID NO: 154 - DNA, 65 bp, Candida albicans
agttagtcaccttttaatattaggggaaccaatttgtgaaactacatcaatatagactataaact

SEQ ID NO: 155 - DNA, 65 bp, Candida albicans
tatatatatccatcaattgtggttgcattaattatatcttccccctcctctccccttcattaatt

SEQ ID NO: 156 - DNA, 65 bp, Candida albicans
tgtgatacattcttacaatgatgcgaatctgaaaaaaaaaatacctcgaataaaatgaaaaccag

SEQ ID NO: 157 - DNA, 65 bp, Candida albicans
atccttttctacacatacacacatagtctatatcaatagcatattctatcatcttagttacagta

SEQ ID NO: 158 - DNA, 65 bp, Candida albicans
atatatacgtaccactcaattgactgttaatccatcttattttacaaacagaatcaaaaagtatc

SEQ ID NO: 159 - DNA, 65 bp, Candida albicans
atggtgatgatagaattaatcaatcaaagtcttcttgcggaaaaatgagttgaaaaaaaaaagcg

SEQ ID NO: 160 - DNA, 65 bp, Candida albicans
agatcccatttagtattttatgttctatccaagtcaacatacaaactagaaactcccattacaat

SEQ ID NO: 161 - DNA, 65 bp, Candida albicans
ttcccttctcttcattctattaaatcaaatacttaatatcaattatcaaaaaacttataaggaca

SEQ ID NO: 162 - DNA, 65 bp, Candida albicans
ctttactcccccaaaaaaataaagtgtgaaatttcaaactaaagaacaaaacaacatattaaaca

SEQ ID NO: 163 - DNA, 65 bp, Candida albicans
cttttttttttccataggccacggatacaactcatcatcgacctacaagattgcattttttatca

SEQ ID NO: 164 - DNA, 65 bp, Candida albicans
agagctagtggtgtttactagacttatttgttggtaatatgtattaattaatagtagtaatatga

SEQ ID NO: 165 - DNA, 65 bp, Candida albicans
ctgtttatttcattttagttctatagaacctttagtatttccaaatacttcaaaaaattgccatt

SEQ ID NO: 166 - DNA, 65 bp, Candida albicans
agtatattactattttgatattttcagatataaactcatatacacatagaatataagttctagca

SEQ ID NO: 167 - DNA, 65 bp, Candida albicans
caaggacgaaaaaaaaatcaatacatcaaaacaaaactatcattattcctggtaataccacaaat

SEQ ID NO: 168 - DNA, 65 bp, Candida albicans
ctttgccccattcttttgttttaaagtattgttttgaaattagtaaagaaaaatattcataaaag

SEQ ID NO: 169 - DNA, 65 bp, Candida albicans
gttgttttataggtatcaatttatatacttgactcaactatcaaaatcaaataaaagactcaagc

SEQ ID NO: 170 - DNA, 65 bp, Candida albicans
caccaactacaacaacaacaacaacaacaaacacacacttcagagtgaaaatataaatcctagtc

SEQ ID NO: 171 - DNA, 65 bp, Candida albicans
ttatttatcaaatcgaaaagatcatttttatcatataaacataatagcataacgacaacatcatc

SEQ ID NO: 172 - DNA, 65 bp, Candida albicans
gcacatacacccaacacttttcaaaccatttgtgttctaaattcaaaaagttctaagtgataata

SEQ ID NO: 173 - DNA, 65 bp, Candida albicans
gtacattcaagaggagaataaaaactcaaaaattcaaaacaccataaagcaacaactacaagttg

SEQ ID NO: 174 - DNA, 65 bp, Candida albicans
aaagtaatccatcaaaacaagagagttaacgaactttcataatacaacaaagaaccccttcgcca

SEQ ID NO: 175 - DNA, 65 bp, Candida albicans
agatacgcgtctgtcccgcaactacttcttactcgaacagtaatttcaacggatactaatcaacc

SEQ ID NO: 176 - DNA, 65 bp, Candida albicans
aaagattttttttttttctctacctttctttttttcaaccaactctccttcaccaacattaaaca

SEQ ID NO: 177 - DNA, 65 bp, Candida albicans
catacaaattttttttttttttcaagtagtatctatagaaatatcaactatcaaattgcatcata

SEQ ID NO: 178 - DNA, 65 bp, Candida albicans
agtaatcacccatcgttgtcaaaataatcatctcatacttaccccctctggtttcctttattata

SEQ ID NO: 179 - DNA, 65 bp, Candida albicans
aaaatttggaagctcatcccagattactaatttactttcttttgctgtaccagctatttgataaa

SEQ ID NO: 180 - DNA, 65 bp, Candida albicans
cattcactcattcactcatttacatctaatcaatactataaattagtcaaagagttctatcagcc

SEQ ID NO: 181 - DNA, 65 bp, Candida albicans
caattaccaccccactagcaataccaaagctacgtaatctcataactcaaacaccttttataatc

SEQ ID NO: 182 - DNA, 65 bp, Candida albicans
caccagtgttgttctttcttgcacgataactttttatgatacactgctaaccagatctagacatc

SEQ ID NO: 183 - DNA, 65 bp, Candida albicans
tggtcaatcccccccttgtttaatatcataccataccataccattcaacctaaaagagaaagata

SEQ ID NO: 184 - DNA, 65 bp, Candida albicans
atttttcagctcatctcacccttctttataagtaattctattatctcaaatcaattattacaacg

SEQ ID NO: 185 - DNA, 65 bp, Candida albicans
accaaagaagctaactttaacaactaatcaacgattcattcattcagtattccaaagtacccaca

SEQ ID NO: 186 - DNA, 65 bp, Candida albicans
attgaaactaaaactagtgccaggcattaaacctaacaaaaacaacaaagaaatattcatcaaag

SEQ ID NO: 187 - DNA, 65 bp, Candida albicans
aaaaccccaatcatctatagaacctaagaccttccccttatatttaatcaaatcaaaatactaat

SEQ ID NO: 188 - DNA, 65 bp, Candida albicans
gaattgacagaacaggtgttatagattacagccttttttcattaaccaactatattaattagcta

SEQ ID NO: 189 - DNA, 65 bp, Candida albicans
aattacacacaactagtgttttcttttttctattgttgcttgatctttagtgtgtttattttctc

SEQ ID NO: 190 - DNA, 65 bp, Candida albicans
cagatttttcacgcaaaaaaaaaaataagcaagtcgatcttttatacaattactaatccagctcc

SEQ ID NO: 191 - DNA, 65 bp, Candida albicans
aacaatatatttacaagtttaatctactcttttcttttaatcgtgcattacctttatccaacaag

SEQ ID NO: 192 - DNA, 65 bp, Candida albicans
ctttcttcccttcttttaccactttagttattgactttattaattacattactatttaatcaacc

SEQ ID NO: 193 - DNA, 65 bp, Candida albicans
gaagaaatattaaacacaaatcatccgctatctttatatctacacattcatatatacatacatta

SEQ ID NO: 194 - DNA, 65 bp, Candida albicans
ccaattaacagtcctttatcgactttacatattcataacctttatatttataaacacaattaaag

SEQ ID NO: 195 - DNA, 65 bp, Candida albicans
atatttcaaataatctcttacttcattcaaccatcaatttgttagaaaacaacccatagcctaat

SEQ ID NO: 196 - DNA, 65 bp, Candida albicans
tatttataatcaattgatcttaaacattataaccatacttcaagacaagacaagatattataatc

SEQ ID NO: 197 - DNA, 65 bp, Candida albicans
tttttgaaggaagaatcagactaacactaggcacttttttatttatcagaagaatatttccaatt

SEQ ID NO: 198 - DNA, 65 bp, Candida albicans
aaaatttttttcttctcttccgtctattactcatctatacatcaacaagttggtactttacagat

SEQ ID NO: 199 - DNA, 65 bp, Candida albicans
tcattttcttataccactacccaggtttgtgatatattgcagttgacacttttagttctcatatt

SEQ ID NO: 200 - DNA, 65 bp, Candida albicans
ggagtatctttttaatattttcacttgtctcaattacttaatataggttatcctactcttatatc

SEQ ID NO: 201 - DNA, 65 bp, Candida albicans
tatattttgtttaaacttttattacttttttccccaattcagcaactaacttactgaaaaacttt

SEQ ID NO: 202 - DNA, 65 bp, Candida albicans
taacctcattttacatttatatttacatttacaaattgatagaattataataataataatagatc

SEQ ID NO: 203 - DNA, 65 bp, Candida albicans
tttcatttgtttccagagtttaggaagactaccattttacaattttcaattcaaatattttccca

SEQ ID NO: 204 - DNA, 65 bp, Candida albicans
ttttcaattctaaacctctgtcttttgatatttgataaaatactacacttaagtactattaaaca

SEQ ID NO: 205 - DNA, 65 bp, Candida albicans
tgctgtcactattgaatatacacaagaccagaataatagacaaataaaaggaatagaacaagaga

SEQ ID NO: 206 - DNA, 65 bp, Candida albicans
acaacatgtttactaaccaactatagaacacacacatcccaagccaagaccaacacttattgcaa

SEQ ID NO: 207 - DNA, 65 bp, Candida albicans
tcttaccaagagtatattcaataaactcaattgaattatatctaactaatcaaacatctacaatc

SEQ ID NO: 208 - DNA, 65 bp, Candida albicans
caatgtaagtagaagaataaacaattctattttttggttgataaatctatcaacaagtattcaaa

SEQ ID NO: 209 - DNA, 65 bp, Candida albicans
taatattgtccactaccagcaccagcagcactaccaccacattggaaagaggaaaggaaaaaaaa

SEQ ID NO: 210 - DNA, 65 bp, Candida albicans
agtagagagcccctcctgattacatccacaaatatacatataagttaacaacttcttcttttact

SEQ ID NO: 211 - DNA, 65 bp, Candida albicans
atgttgtaaggaaaaaaaaaaaagcgagcaaaaaaaaaaattgagttgaaacatgaatcattagt

SEQ ID NO: 212 - DNA, 65 bp, Candida albicans
aatttccaaattatattcaccccccaaaaactatatctttagtgtgtagttatcctgaaaagacc

SEQ ID NO: 213 - DNA, 65 bp, Candida albicans
ctctgatttccacccataaacaatcttaccaacacagcatttagccaacgttatacatccacaat

SEQ ID NO: 214 - DNA, 65 bp, Candida albicans
agagaaactatagaaacctttgaaaacctcctatttctgtttcgttctattaaaaattcaaataa

SEQ ID NO: 215 - DNA, 65 bp, Candida albicans
gtcttcgctcttcttctctttctagattactatttattacaaagtaattgctacaaccaaacatc

SEQ ID NO: 216 - DNA, 65 bp, Candida albicans
agcctacattttcaattacttctcttcctttttgaatttttgacttctattatctgaggtgcaac

SEQ ID NO: 217 - DNA, 65 bp, Candida albicans
ttacaacaaatttactttcattcattgataaactcctttcctttcttaaaccattttagctgact

SEQ ID NO: 218 - DNA, 65 bp, Candida albicans
tcttatattttctaattcaatttttcaatcaagcgattatcaattgcagaagaataactatcaaa

SEQ ID NO: 219 - DNA, 65 bp, Candida albicans
ctataccaatattctttccattagattccattcagttcgccacgccagaacattaataatctaat

SEQ ID NO: 220 - DNA, 65 bp, Candida albicans
aacccattctatttaagaaatctaagtgtattttaatttgagtcaacacacataagcaactagac

SEQ ID NO: 221 - DNA, 65 bp, Candida albicans
taacagtgagaaaatttccttacacattaaatatctgtgcttgttttgtttccaatttagccagc

SEQ ID NO: 222 - DNA, 65 bp, Candida albicans
aatttctagagaaaaattgagagttgcacactttctagcatgtacacatttatgtaatcacaacc

SEQ ID NO: 223 - DNA, 65 bp, Candida albicans
tgtcacactcccaaaaaaaaaaaagaaaaaaatttccaacacatttttctttcttcatcacacac

SEQ ID NO: 224 - DNA, 65 bp, Candida albicans
atacatttaaatcgactttcgtcagtcatacaagtagccatagggtatatataactatttgaacc

SEQ ID NO: 225 - DNA, 65 bp, Candida albicans
ccagcaagaaaaaaacaacagcaacaaccattaccactgtttatcatacaaacatacaaccaatc

SEQ ID NO: 226 - DNA, 65 bp, Candida albicans
aaaacaaactagaagcttgatttttctttacagagcaacaacaaaaacatccatcatcaataatc

SEQ ID NO: 227 - DNA, 65 bp, Candida albicans
tcttatcccacatttagtttatatttttatttctacaccataaatttctacaaataacacaaatt

SEQ ID NO: 228 - DNA, 65 bp, Candida albicans
caatttacattattcaatttcatcctccttttcctcctcctcctcctactcacatcaaataatca

SEQ ID NO: 229 - DNA, 65 bp, Candida albicans
atgaatcatccaaaaaaaaattttctgggtgctcttttttctttttcacattttccacgccaaca

SEQ ID NO: 230 - DNA, 65 bp, Candida albicans
atcaactatcaagctgaccttattctaacaccctatccaatccaatagaacccttcttaaccgtc

SEQ ID NO: 231 - DNA, 65 bp, Candida albicans
ttaatcaaagacgtatttggtttctaccatcatacaatcaaatccatcagtgaaccacatcaatc

SEQ ID NO: 232 - DNA, 65 bp, Candida albicans
ttgttctacacaattgtatttcttaatcaattaatactcaataatcaattaatatcaaattaaca

SEQ ID NO: 233 - DNA, 65 bp, Candida albicans
gtttggcagaatgctattgacgttgttgatctttaatgaatataaaactatttagacatttacct

SEQ ID NO: 234 - DNA, 65 bp, Candida albicans
acagttttcctagcatctacacccaagcattataaagttgttatttaattaaaagatggaattat

SEQ ID NO: 235 - DNA, 65 bp, Candida albicans
ggaagttcaaaaaaagggacaccgagaaaaaaaaaaatcatgaatcatctaaattacaaccatcg

SEQ ID NO: 236 - DNA, 65 bp, Candida albicans
tatgaatgaaaatacataacacttagttttctttcataattgaaaacaaattcaaatcactacaa

SEQ ID NO: 237 - DNA, 65 bp, Candida albicans
gagtttcactagagtaaccacaaactactactactactactaccaccaccaccacgacctttccg

SEQ ID NO: 238 - DNA, 65 bp, Candida albicans
agtaacggcttttattctttctttgctagtaaatcaatcaagaaaacagaaagaacagaaaagct

SEQ ID NO: 239 - DNA, 65 bp, Candida albicans
aattcttcatttaacatttatctatcggtgttggcaaattcaactttatatcattcatactcatc

SEQ ID NO: 240 - DNA, 65 bp, Candida albicans
catttaatccttcgtttattgaagtatcaaacacaaattcaacaaaattaaaacttttcgatatc

SEQ ID NO: 241 - DNA, 65 bp, Candida albicans
cttaaacgaaacaaaactatcaaatcggcaacgagggaattgtcattaacacaagatcggcccat

SEQ ID NO: 242 - DNA, 65 bp, Candida albicans
aacacaacccaatttattagagtcattattgtagtctccataagcaattataccaatttttacag

SEQ ID NO: 243 - DNA, 65 bp, Candida albicans
atcctaccctaaccaaacaacaacaacgacatacaatgaaagtttactctatattaattctaaat

SEQ ID NO: 244 - DNA, 65 bp, Candida albicans
acaattcgtctacacttcccacctgatttgttggtttaaatataataagacaaacctcagaagct

SEQ ID NO: 245 - DNA, 65 bp, Candida albicans
actagtttaattgttttcttatatctcaaaccacatcttttaatattattgtacactgaaaacca

SEQ ID NO: 246 - DNA, 65 bp, Candida albicans
acaattacttatcctccaccagttccatccatccaacctatacttatcattccacatcttcaatc

SEQ ID NO: 247 - DNA, 65 bp, Candida albicans
gaagatggcatcaccattttttaccatccagtcctcaatccaaccctacaccagactaaccatcc

SEQ ID NO: 248 - DNA, 65 bp, Candida albicans
atacttatttattgtgctttgttatttttcttttaaggtctacatttctaaataacttactagta

SEQ ID NO: 249 - DNA, 65 bp, Candida albicans
caacttaccaggaaaagtaattgaaactgtcacagctcgagattagtaataaaagatcttcaaag

SEQ ID NO: 250 - DNA, 65 bp, Candida albicans
tgttggtcgaataaaccttctatcaatttatttgaatactttattcatagattacatttaacatt

SEQ ID NO: 251 - DNA, 65 bp, Candida albicans
taaagtataaataaggcaacaactccattacatatctcaatttactgaatcgaacgaattacatt

SEQ ID NO: 252 - DNA, 65 bp, Candida albicans
ctttgctcctatctcaattattgtacaatttgaatatagttcaagctttcaaatattaagacaat

SEQ ID NO: 253 - DNA, 65 bp, Candida albicans
attgaaaataactatactacagtttctttaatatttatacattacaatctgcatcaacatacaaa

SEQ ID NO: 254 - DNA, 65 bp, Candida albicans
cacatcaatattaaacgtactataaactagccaagccctcaaacctttcccttgctccgccaatc

SEQ ID NO: 255 - DNA, 65 bp, Candida albicans
cacaatatttcaacgtcctgaaattaaagacttcataaggacagcatttgatttaactgtggaga

SEQ ID NO: 256 - DNA, 65 bp, Candida albicans
taatctaatcaattcaaattttatactctaatttaaaccaccgataaaataacctcaaaccaaca

SEQ ID NO: 257 - DNA, 65 bp, Candida albicans
tgattcaattaagctaaatcatctagattaactcaattgccttttttttttaattctgtcaaaag

SEQ ID NO: 258 - DNA, 65 bp, Candida albicans
tcacactacaactcatctcattttattaaaacacccccccctttagaagaacacattcaataaca

SEQ ID NO: 259 - DNA, 65 bp, Candida albicans
agatggcaactcgtttgatatttttaaaggtttagtatataagaagaattaattcgcgttccccc

SEQ ID NO: 260 - DNA, 65 bp, Candida albicans
atggcaaatctccttccttccttccttcctttctatctattcatcatttacaaccattgcaaaac

SEQ ID NO: 261 - DNA, 65 bp, Candida albicans
caacagattactgtcaacaagtttcttccattaacaattctaaacatcaaatcaccctagaagta

SEQ ID NO: 262 - DNA, 65 bp, Candida albicans
taaaaagtttctattatttcctcccgtccatttctatatagtcaacaatttatttacatacaaaa

SEQ ID NO: 263 - DNA, 65 bp, Candida albicans
acccaagtcttcttgaataaaatctgaagtttaccataccaaatcaaagtatcagcaagaacata

SEQ ID NO: 264 - DNA, 65 bp, Candida albicans
aatttaaatataacaacaacaactactacaacaacccacaacctacagccacaattactcctata

SEQ ID NO: 265 - DNA, 65 bp, Candida albicans
aattgccctaggcatttcttggtggttcattcattcatttgttattcaaaataaaagaactattc

SEQ ID NO: 266 - DNA, 65 bp, Candida albicans
ataatcaccatacaaatttaaaccaaacccaccaccacaaccccctaagttacattctagatacc

SEQ ID NO: 267 - DNA, 65 bp, Candida albicans
cattcacattctgctcttttttttaagactccttctccatctatcgcccaacacccacaatcatt

SEQ ID NO: 268 - DNA, 65 bp, Candida albicans
tcagttaacctcgaagaagaaaaaaaaaaataactttgagatgccactaccaacaaaccccagcc

SEQ ID NO: 269 - DNA, 65 bp, Candida albicans
acaacttctattaacataagcattttagcatcatcactcccatccaagtaaataaatcatttatc

SEQ ID NO: 270 - DNA, 65 bp, Candida albicans
cacaactgatctttttaaaccatatattatcaactacacctacaatcacaactagttaaatcaca

SEQ ID NO: 271 - DNA, 65 bp, Candida albicans
acatctctattataatttaaaatcaagaatacatcaaattcctcttctacacaccaacaacaata

SEQ ID NO: 272 - DNA, 65 bp, Candida albicans
gaaattacaacaccaccccaattcaaaagaatatcaacacatatcatgagtacaaaaggaaaagg

SEQ ID NO: 273 - DNA, 65 bp, Candida albicans
ataccaaaccagcaacaaagtgaacaatttatcaattccaatacaaattatcaatataacaacaa

SEQ ID NO: 274 - DNA, 65 bp, Candida albicans
cttatactagttgtaactccagaagaaagcatttactttacttaagaaaaagagaaactacagta

SEQ ID NO: 275 - DNA, 65 bp, Candida albicans
caccagcaaaacgaaatctattagaactctttaataattcaattcaataacaaagcttatcaata

SEQ ID NO: 276 - DNA, 65 bp, Candida albicans
ttactcaacaccaaataatacctccacattttaattgaagtacaaataaaccccaatgcttattg

SEQ ID NO: 277 - DNA, 65 bp, Candida albicans
caacatttaaagtcaactaagttcagtttaccattttcttgttaatcttttagaatcatacaata

SEQ ID NO: 278 - DNA, 65 bp, Candida albicans
gttgtcaccataactatcaattgttcacctcttgaaccaacatcaaattgaataaacataggatc

SEQ ID NO: 279 - DNA, 65 bp, Candida albicans
ttgtcatctaactatatctttatatatatatatatactagcaaacttaacaacgggggtggaact

SEQ ID NO: 280 - DNA, 65 bp, Candida albicans
caacacaacaagaagtctcttgattacaaacatcaaattcaaaaccacaagccatacaaaacaac

SEQ ID NO: 281 - DNA, 65 bp, Candida albicans
ttttggttctttatttattcattatataatcttccacatccatactaaatcttactacagcagca

SEQ ID NO: 282 - DNA, 65 bp, Candida albicans
ttctacattgtaaccgacagatttctttcaggtcaaacagtattcttcaaataccatgaagccaa

SEQ ID NO: 283 - DNA, 65 bp, Candida albicans
ataatttcttaaactccattttaatcagctagactataacaaaacaagaaaagttatgtcgaaag

SEQ ID NO: 284 - DNA, 65 bp, Candida albicans
tcgccacttgaatttctagtcagcaatactaaaccttattattcaccacaaagaagttttaggag

SEQ ID NO: 285 - DNA, 65 bp, Candida albicans
tcaatttcaatttcattttcattttttaattcaattcatatcagcaacaacaacaacaaaatgtt

SEQ ID NO: 286 - DNA, 65 bp, Candida albicans
agtagaagatcactaaatctttgtttgaccaacccactacaccacaatctaaaacatccattata

SEQ ID NO: 287 - DNA, 65 bp, Candida albicans
tcaacaattttaggagaaatatttcccatatttatagacaatcatttttatcaaattatagaacc

SEQ ID NO: 288 - DNA, 65 bp, Candida albicans
atattatatatatatatcacattttattttaactacttagatcaaaaacaatatataaccccaaa

SEQ ID NO: 289 - DNA, 65 bp, Candida albicans
tttaaagattaattgcaaggagcccttacttttccatttaatagtctgaactaaattatttacaa

SEQ ID NO: 290 - DNA, 65 bp, Candida albicans
caacacctttttcttttataataatcactagatagaagcaaactctttataactttacattcgtt

SEQ ID NO: 291 - DNA, 65 bp, Candida albicans
ttttcaatacaaattatacagtactctactatcactaattgaatacataacaagtattgccaaac

SEQ ID NO: 292 - DNA, 65 bp, Candida albicans
atttgttgaaggcaaaaaaaaagagaactttatagatcactcttatttcaactaaccaacccaca

SEQ ID NO: 293 - DNA, 65 bp, Candida albicans
aagtttaaaaaagaacttgaatctctcagaactacactagaacagcatagtggaaccatagaaac

SEQ ID NO: 294 - DNA, 65 bp, Candida albicans
aaaattttaattttaatttttaatcacttcgtctcttttcttgtaactcatagcaacaactgata

SEQ ID NO: 295 - DNA, 65 bp, Candida albicans
acccaattgaatagaatatctcaatagattataaattactatcctcattctcaatttaacagatc

SEQ ID NO: 296 - DNA, 65 bp, Candida albicans
cattcaatttcttccatttgttcaaccttcccatcaatcgaagaaaactctgtgttgtataaatt

SEQ ID NO: 297 - DNA, 65 bp, Candida albicans
aaaatggaaaaaatttattgtgaaaatttcctgcatactctcaacccgtaaacaacacaaaaact

SEQ ID NO: 298 - DNA, 65 bp, Candida albicans
ttttcttcttctttttttatgtatggcatgttcgtgtctttttggataaaatcataaaaacaaga

SEQ ID NO: 299 - DNA, 65 bp, Candida albicans
tcccatcccatctcaaactcatctctctaatacaaccaaccaaccaaccaacctacctaccaatt

SEQ ID NO: 300 - DNA, 65 bp, Candida albicans
ttttattttttaatttttgttcaaaatcatttcaagaaaaacatactaagtattaacaattcatc

SEQ ID NO: 301 - DNA, 65 bp, Candida albicans
cttgttgagttcaattattctacgtcattttttttttaaattattaatcattgccacgtcatata

SEQ ID NO: 302 - DNA, 65 bp, Candida albicans
atcatttgacaagagcttaacatagactatacaccatacatacatcacatacaaatcattccact

SEQ ID NO: 303 - DNA, 65 bp, Candida albicans
tttaatttcttgagtattttcttctcacaccgataagtcagacagcaactcaactacttataatt

SEQ ID NO: 304 - DNA, 65 bp, Candida albicans
tcttttccttctttgactgtaattacaggtaacactcatatcccccattctttatatcttaaacc

SEQ ID NO: 305 - DNA, 65 bp, Candida albicans
ctcgacaggttacttttttcttttgccacacaactatggaaagattacaaagattattaggccaa

SEQ ID NO: 306 - DNA, 65 bp, Candida albicans
agtgaaaacaaatctagattaaaatttcaacacaattacatatcatcaacaagagaacacaaaca

SEQ ID NO: 307 - DNA, 65 bp, Candida albicans
atttaagtttttatattttgtataacttttttttttgaaaaacaggaagaaaacaatcacgaaaa

SEQ ID NO: 308 - DNA, 65 bp, Candida albicans
atttgggatagaatcaacaaaaagtgatatcttcacattcctttcaactctcttattcatcgatc

SEQ ID NO: 309 - DNA, 65 bp, Candida albicans
taatatatctatatcatgtctactccaattggtatgtataaattagcaatgcatcctcatctttg

SEQ ID NO: 310 - DNA, 65 bp, Candida albicans
atcgagttcaacttttttttttttccagttcgccaccaccaactacttttaccaccactaacaac

SEQ ID NO: 311 - DNA, 65 bp, Candida albicans
aaattaaaaatttaaacctacaataaacgtttaattcttctctttcaattaacaacatcattacc

SEQ ID NO: 312 - DNA, 65 bp, Candida albicans
taaataaagtactagtttaaagaatactctttaacaatcattactctgtttttactgtgtcagtc

SEQ ID NO: 313 - DNA, 65 bp, Candida albicans
ttccatttttccattcatttatttattaactttttcttttttgttccaaaatgatatctgaaact

SEQ ID NO: 314 - DNA, 65 bp, Candida albicans
ttttctgttctataaacagttgatagctctgttactcacttcaaaaaatttttttctcttttgta

SEQ ID NO: 315 - DNA, 65 bp, Candida albicans
acgtgacttaacatactctttcttttcacagacaacagtcaatatatctatcaattcaatcaaat

SEQ ID NO: 316 - DNA, 65 bp, Candida albicans
ttttcatttcatcatactttcagtaataccaaactaaagcatgtcatacgacgatatagaaaatg

SEQ ID NO: 317 - DNA, 65 bp, Candida albicans
atcgtaaaggctgggctcgccaaaaaattccacaacatagtttaaatagctttttttctctcgac

SEQ ID NO: 318 - DNA, 65 bp, Candida albicans
cacttctgatataatctaccccaagttggagaatttaatagtagataaaattatgtagcccccca

SEQ ID NO: 319 - DNA, 65 bp, Candida albicans
aattataaacatctacatcttttcattgtattactcgtgcgaaatcccaatccgaaacttttatc

SEQ ID NO: 320 - DNA, 65 bp, Candida albicans
acacaactttagaatcttttcatcacagcatttctttctattgccaaaaggatattatacaaaaa

SEQ ID NO: 321 - DNA, 65 bp, Candida albicans
tttttcaatctttgtttttggttaattaatcttaagaataagggatttttatatatatataaacc

SEQ ID NO: 322 - DNA, 65 bp, Candida albicans
aacaagtttcatatagtagtataatcccaattgatcattactttattccacacaattcataaaca

SEQ ID NO: 323 - DNA, 65 bp, Candida albicans
aaaaatcttgaagcactgccaatttttcaaacttggcaacaaaataacaggaacaatattcagca

SEQ ID NO: 324 - DNA, 65 bp, Candida albicans
ttcaggtagtgtacccaaatacattagttaaagacaaaggggaaaaaaacatctcatagaaaaaa

SEQ ID NO: 325 - DNA, 65 bp, Candida albicans
atttctttcctctgtttttcaatcacgagaacaagatctattaacttcatcaccctatagaagaa

SEQ ID NO: 326 - DNA, 65 bp, Candida albicans
aatcgttcagaataaacttattctctagttcgtgtatttaaatatattccatattactttgagtc

SEQ ID NO: 327 - DNA, 65 bp, Candida albicans
caataatcacaacactaaatatcaatctctgacaaatggtggcattgaaaagagaggcagagcct

SEQ ID NO: 328 - DNA, 65 bp, Candida albicans
tgaagagttgtttgctagttcttcaccaaatatatcaatttactacaaattaaactacctacagc

SEQ ID NO: 329 - DNA, 65 bp, Candida albicans
tttaggaagcaattgttgaccacgtttcatacaatcagacccaatctctatagacttttataaaa

SEQ ID NO: 330 - DNA, 65 bp, Candida albicans
acaaatagacaaaatctaaagaattcaaggctagtctttagaaattcaggaccactatacacttt

SEQ ID NO: 331 - DNA, 65 bp, Candida albicans
ctaatccctacattttttttttcaccgtactctaacatatctccttacttgtaaaggcaaaacca

SEQ ID NO: 332 - DNA, 65 bp, Candida albicans
ttttgttttgtttttctaaccaaccaagcccataatttataaaaaatggaagttttgcatcaatt

SEQ ID NO: 333 - DNA, 65 bp, Candida albicans
actctttcttaattcctttcctttcatttcctttcatttcttttcttttcttggtttagatttat

SEQ ID NO: 334 - DNA, 65 bp, Candida albicans
tctaaatttttcagattttataactatcactttgttcagactccatcaaaccaaacaaacataaa

SEQ ID NO: 335 - DNA, 65 bp, Candida albicans
aagaatcttgttctttattattaattcttttttcaacttgttttgtttgaatatatctcatcagt

SEQ ID NO: 336 - DNA, 65 bp, Candida albicans
atatctctcaaatgtctgaagaaggagctcatattgataaaaaagctaaaatagaagatacagac

SEQ ID NO: 337 - DNA, 65 bp, Candida albicans
aaagaccataaaaactaataaattcctattctagacaaacatcttatcttaccttctaagtaact

SEQ ID NO: 338 - DNA, 65 bp, Candida albicans
actacacttaaaagacgaaccaataatcaatataattggaaaaaacatattcatattatgtcaat

SEQ ID NO: 339 - DNA, 65 bp, Candida albicans
acaactaagttgacgtgaaactaacaatctttctatctccaattgcattctcaaattagaccaat

SEQ ID NO: 340 - DNA, 65 bp, Candida albicans
ttttgtagagactttcctttcctttcttttcttctctaacaacgtcaacttagaaacaagcaata

SEQ ID NO: 341 - DNA, 65 bp, Candida albicans
tgatggaaaatattcattactccataccaatttttatattacaactactacaataatgtttggct

SEQ ID NO: 342 - DNA, 65 bp, Candida albicans
aatgttatgagtcttttcccagttgtttctttactttcaagactttaacgaaagcaacaatcact

SEQ ID NO: 343 - DNA, 65 bp, Candida albicans
tattcagagatttgagactagtgacagataatcaattatttaattcacacaccacatagtacgga

SEQ ID NO: 344 - DNA, 65 bp, Candida albicans
acaagtttcaagacatccaccatcaatgctaagtagaagaacaataactaggaaactaaataaag

SEQ ID NO: 345 - DNA, 65 bp, Candida albicans
cattgcccataaccgtcaacagcaacacaaataatagtttagctcaactacccatactctttatc

SEQ ID NO: 346 - DNA, 65 bp, Candida albicans
aaatcaaacatcagtaggttcttgttattggcattccataattaaacaccctggaacattgacaa

SEQ ID NO: 347 - DNA, 65 bp, Candida albicans
aattcggatagtctgctcttagctggaacagtttatccttaaaccaatacttcatccacaatgca

SEQ ID NO: 348 - DNA, 65 bp, Candida albicans
gccaaaagaagtgttccaacaaaccacaacaaggtacaattttagcaaattcaaaccaagtcaac

SEQ ID NO: 349 - DNA, 65 bp, Candida albicans
cttctcattcatattttatacatctatcttatctacacttaccttaagttaacatcatttaccca

SEQ ID NO: 350 - DNA, 65 bp, Candida albicans
caacaaaacacattactcatcaaccatggcatctcctcaaagagaaggattcagcatcccatcat

SEQ ID NO: 351 - DNA, 65 bp, Candida albicans
caattagttaatcattacgatactatcatatctaatactactttaaatatcaaacatccacaacc

SEQ ID NO: 352 - DNA, 65 bp, Candida albicans
tcaaacatctcctccatcgcaagacaatctagtctatctaatatcagtacaaccatttacacaca

SEQ ID NO: 353 - DNA, 65 bp, Candida albicans
ccattgttttgttttgattattggccacttttctaaacaaccagccaacaaactcaccacaatca

SEQ ID NO: 354 - DNA, 65 bp, Candida albicans
aacagaatcagaccaaccttatacaacatacacaatacatttctatcacaatgtcttttaacgat

SEQ ID NO: 355 - DNA, 65 bp, Candida albicans
ccaacccaatattttttcaccacctgttgtcaaatttattccacattaaaccaccaatatataca

SEQ ID NO: 356 - DNA, 65 bp, Candida albicans
ccttcctgcccatttctcgattaatatattctattgtattattactaatattattcttcactgac

SEQ ID NO: 357 - DNA, 65 bp, Candida albicans
gtaacaggtacatcccaccgtactacctttcaatccgaatattgcacaaatatagacagtacact

SEQ ID NO: 358 - DNA, 65 bp, Candida albicans
caattaattagttttgttttgttattttttttgtcaagtttaaataaagttataacaagtaaact

SEQ ID NO: 359 - DNA, 65 bp, Candida albicans
tcttttgtttctctaactatcaacaatgtctgaagttgcagataaagtcaaggacttgtcgttga

SEQ ID NO: 360 - DNA, 65 bp, Candida albicans
aaatttcatattcttgatggtcaaagacgtaactattgtttcatacagctacaccttcattaaag

SEQ ID NO: 361 - DNA, 65 bp, Candida albicans
aaaacgcgtctttgtaagaatttacaaaaaattttatctttttgtttgtttcttcttgtccaact

SEQ ID NO: 362 - DNA, 65 bp, Candida albicans
taataacaatcacccaagaagaataagtttaaaccaccctaaacctccccggacatccccttatt

SEQ ID NO: 363 - DNA, 65 bp, Candida albicans
aaaactagtggcaaaccaccttaatcaacaatttcctaacatcatcaaacatagcataatcaaca

SEQ ID NO: 364 - DNA, 65 bp, Candida albicans
aaaattttcccacaaaataccaaccaactaaccacgggacaacctgtttataccaaatcatctaa

SEQ ID NO: 365 - DNA, 65 bp, Candida albicans
attcatagtaaaattcaatccattaaccatcaaacattacaaccaactacaaaagatggatgact

SEQ ID NO: 366 - DNA, 65 bp, Candida albicans
atcactgaagcaccactttgtctaatcatcttggagtagttcttttgtaacgataaaaactcaat

SEQ ID NO: 367 - DNA, 65 bp, Candida albicans
aagaaaaactaaccaaacccacaacaacaacatcaatacatagaacgttctctttcaaaaaaaaa

SEQ ID NO: 368 - DNA, 65 bp, Candida albicans
agtaccaccaccaacccttacctagtcatatacattttcaaatttaacttgttttaccttttcaa

SEQ ID NO: 369 - DNA, 65 bp, Candida albicans
aattcatttactcttcttcttcttcttcattaatcaaatcttattaataacaacaactttcagtt

SEQ ID NO: 370 - DNA, 65 bp, Candida albicans
cacttatcaccccctttccatactaatagaataatactcatactcatactcatacttatataaat

SEQ ID NO: 371 - DNA, 65 bp, Candida albicans
cacccattccttctttacaacacaaccaattaccaattaccaaaaaccaactcattcacttcaca

SEQ ID NO: 372 - DNA, 65 bp, Candida albicans
ttactttttaatcgcacaactttctttactttcaaccttctttataatattcaacaacatccata

SEQ ID NO: 373 - DNA, 65 bp, Candida albicans
aaaagaaaaaaattcgttcacgtaaatcatctttgctgtgacaccgttccaacacaccaccaaca

SEQ ID NO: 374 - DNA, 65 bp, Candida albicans
tgttgccttttgttgtattatttgtcatcagtttagcttgattctttttgcagtagtatatcatc

SEQ ID NO: 375 - DNA, 65 bp, Candida albicans
acattctctaactacttctacatacccaagtagcaaacaattttcacatctcatttatagacaat

SEQ ID NO: 376 - DNA, 65 bp, Candida albicans
tttttattttacattttttaaaatatttacggaataaagaaaggtttagttttgtatatatagca

SEQ ID NO: 377 - DNA, 65 bp, Candida albicans
atcattcccttcttctcttcgatttaaaaccatcaccaatattatacacagcaaaccatcataca

SEQ ID NO: 378 - DNA, 65 bp, Candida albicans
tttcatatatagaaaactttttattcgattaaacctcaactttgatactaatcaactagcccaag

SEQ ID NO: 379 - DNA, 65 bp, Candida albicans
aaaataaaccctcagtttaactaacaaatagacagcaataacggctgaataacccttctataata

SEQ ID NO: 380 - DNA, 65 bp, Candida albicans
catatactttgaagaaatttttttgatcacgtaagctagacattcattccaccaactcaaccatt

SEQ ID NO: 381 - DNA, 65 bp, Candida albicans
cccacaatgaatactaagagatatcggtctttttaactccaccatagtcatcttcatggacgatt

SEQ ID NO: 382 - DNA, 65 bp, Candida albicans
tgaatttcttcaaaacaattatatccctgttttttcttaatatagtatcatccttttcactcatc

SEQ ID NO: 383 - DNA, 65 bp, Candida albicans
tctttgaattatatatattttttgggaagaatcattagaataataatatacatagatacattcgc

SEQ ID NO: 384 - DNA, 65 bp, Candida albicans
gttttcgtatacattgatcaagtcatatcatctacaacaacattgattcatagttctactttgtt

SEQ ID NO: 385 - DNA, 65 bp, Candida albicans
tttcacatacacttaaatctagtaacgtcaaaagtaaatccaacgaatataaaccacaaaaagca

SEQ ID NO: 386 - DNA, 65 bp, Candida albicans
aatttctctcctcctcctccatctcattaatatatcattcattactctaaattaaataactaatc

SEQ ID NO: 387 - DNA, 65 bp, Candida albicans
tttattacaaattgtatacaacgatttatttcatttgccacagtaggaacaagttttaatacaag

SEQ ID NO: 388 - DNA, 65 bp, Candida albicans
acacttgcaatacccaactaagcaaacctagaacgccaaatagtccagttgcaaaggggacgctg

SEQ ID NO: 389 - DNA, 65 bp, Candida albicans
cctttatttgtcattgcaagagatatttgggagtgttcatctagagattggtttcagacctgttg

SEQ ID NO: 390 - DNA, 65 bp, Candida albicans
tcctttataatttttcattccgaagactcttaatcttttattatacatttcaattaccaacacaa

SEQ ID NO: 391 - DNA, 65 bp, Candida albicans
aacaattcagcctttggcatatattgaaatacatccccgaagaaataaaactacacattgtcaag

SEQ ID NO: 392 - DNA, 65 bp, Candida albicans
cctttcatttactccttctttttttcaataacattatacatatatatctacaacaatgaggattt

SEQ ID NO: 393 - DNA, 65 bp, Candida albicans
gctcatcttcatcgtcttgctataaacgcattatcacatcctccattagcacattacttcaagat

SEQ ID NO: 394 - DNA, 65 bp, Candida albicans
caaaagagttactacagcaccaacttttctgattcaagtgtatatccattactatttggtggcaa

SEQ ID NO: 395 - DNA, 65 bp, Candida albicans
atcaattgtcagtggattctccgatggcatttaaataaaaacttttctcgtttataaacgtgtag

SEQ ID NO: 396 - DNA, 65 bp, Candida albicans
tgctcccatcagtacaaagttgagatacgagttacatataccactactaactttacacttctaca

SEQ ID NO: 397 - DNA, 65 bp, Candida albicans
tacattgatcaacatcattatacaaaccacaacaacaaagatcgtaactcccagtctccttacta

SEQ ID NO: 398 - DNA, 65 bp, Candida albicans
tatcagaaaacaataatagcattcatttctcttttggcacaccatcgcttgcaacacatctagct

SEQ ID NO: 399 - DNA, 65 bp, Candida albicans
tactgattgatacttccttattgttcttcatcaatctattattcaaactctttatttcataagca

SEQ ID NO: 400 - DNA, 65 bp, Candida albicans
tcataaacatacttcttcttctatactcatctcattatattgacagtttggaactcatttacccg

SEQ ID NO: 401 - DNA, 65 bp, Candida albicans
aaaagctcatcacttttttcagatttcatttcattattatctttcttgaactttgaacacaaact

SEQ ID NO: 402 - DNA, 65 bp, Candida albicans
caagaaactactcatctagaaaaaaacagctttcaacagcaaccattagaccaaattaatcacag

SEQ ID NO: 403 - DNA, 65 bp, Candida albicans
attcaagtagtatactaactgattctttccctttttgttttatttcgacagtgacacctaccgca

SEQ ID NO: 404 - DNA, 65 bp, Candida albicans
tcatttatcactcacattgaatactgtcttctttctttttgattaaccaacaaaaactcaaaaat

SEQ ID NO: 405 - DNA, 65 bp, Candida albicans
ataaactttgattgacttagacaaccaaccaaccaaccgaccaaccaaccaaactagtcatttat

SEQ ID NO: 406 - DNA, 65 bp, Candida albicans
gattgtttttaattgactattcccttacctcccttttttatatagaaaaccctttattaataaca

SEQ ID NO: 407 - DNA, 65 bp, Candida albicans
cagataaaatttcactttttcaattcaaacctaatcacaaccaaaccttctttatctcttcaaat

SEQ ID NO: 408 - DNA, 65 bp, Candida albicans
gcataaattacaggctaactagcaccttccttcaatttgaatatagacaaaataaatattacaac

SEQ ID NO: 409 - DNA, 65 bp, Candida albicans
tatataatacaataaaaactttatagaactctttactatacagattatattcttaatatcatacc

SEQ ID NO: 410 - DNA, 65 bp, Candida albicans
ttactactcacactttcttattttcttaatattattcaccaacactttagtagcattagaatatc

SEQ ID NO: 411 - DNA, 65 bp, Candida albicans
gaaaattgaaaatcctacaccactttcacttctcatcaaacactagatacttacttctaccaact

SEQ ID NO: 412 - DNA, 65 bp, Candida albicans
gaaattagaaagctttcaaataactttgttaatacatcacatccaacgtgtactgaaacaatgaa

SEQ ID NO: 413 - DNA, 65 bp, Candida albicans
aaaaagaacactcatcaaagtcaagtcttggctgaataactccccaccaaagatataaccaatcg

SEQ ID NO: 414 - DNA, 65 bp, Candida albicans
gatttcttttcttgttcatcgaatctgatcaaaacaacagaccaatcaatcatatatatttaaag

SEQ ID NO: 415 - DNA, 65 bp, Candida albicans
tctcaatttactttctgatttttaattttattttattttaaaacgatggatattcttcaaatatt

SEQ ID NO: 416 - DNA, 65 bp, Candida albicans
tttcaacgctactatcttttcttcttccaacaacactattatgagcggatttcgtgttttagatt

SEQ ID NO: 417 - DNA, 65 bp, Candida albicans
gcactcatatcgtcattgagattgagtgctacaagtaacggaacaactctatattcctttaagat

SEQ ID NO: 418 - DNA, 65 bp, Candida albicans
aaacgacaacaacaaatcatctactgacttaacaaccacacgtccgtcacaattgagatcataat

SEQ ID NO: 419 - DNA, 65 bp, Candida albicans
tttctttctttctcgaaacaaggtttttcaacaacaaactaacttataaataacaagcgttttca

SEQ ID NO: 420 - DNA, 65 bp, Candida albicans
caattgccatcaacatcacccaccaacaacaacgacaatatctcattataaattaaactatagaa

SEQ ID NO: 421 - DNA, 65 bp, Candida albicans
aatagtcaaatatattcacaattctaactcatctcttcaccggagctaacttattatagggaaaa

SEQ ID NO: 422 - DNA, 65 bp, Candida albicans
ttttgttcaaaccgaattcattactgtcaatcgttacattctagtctgtttgtatttcattgaaa

SEQ ID NO: 423 - DNA, 65 bp, Candida albicans
aagaagcttccctcctcatttgttttccttccaagcatatattccaatcagatctaaaattacat

SEQ ID NO: 424 - DNA, 65 bp, Candida albicans
gaatcatgatgatatgatccctcacttgtttgttttacgaacgtccccatcccacaccccttcca

SEQ ID NO: 425 - DNA, 65 bp, Candida albicans
tcttccactgtcacactcgaaaacattcataataacgattacagacgacaacgacaacaataaag

SEQ ID NO: 426 - DNA, 65 bp, Candida albicans
ttcactcatcaaatcaatctcaacgtaaagagccaccacaatagatatacatatacaataacacc

SEQ ID NO: 427 - DNA, 65 bp, Candida albicans
cgtcgtaacaacttgacaaccacaaactatttgctattgggaaatcctttttgacgatataacta

SEQ ID NO: 428 - DNA, 65 bp, Candida albicans
aacaaacagaaagaaatacagttttaccacacatccatctaataccactgtaatctatctcaaat

SEQ ID NO: 429 - DNA, 65 bp, Candida albicans
atgatgtataacaaaaataaaacttctctggacctcatattctatttcagacatcaattctaaaa

SEQ ID NO: 430 - DNA, 65 bp, Candida albicans
atttaacagcacattatattcaacaatgggtaaatcatccggtaaaggaaaaggaggtaaaaata

SEQ ID NO: 431 - DNA, 65 bp, Candida albicans
aatagaaacaaagaaagaaaaaagagtgaaacaccaaaatataaaccaaagaatattttaaagtc

SEQ ID NO: 432 - DNA, 65 bp, Candida albicans
aaaagtgaatttgtttcaccagctagtttccttcacatctcccaccagatcagatcaattgagct

SEQ ID NO: 433 - DNA, 65 bp, Candida albicans
agaaatcatctgagtccttcttccacattcaacaacattatatttatttacaaaaagaattcaag

SEQ ID NO: 434 - DNA, 65 bp, Candida albicans
ttactttgtccaaatatactccgctcattaacaaaactcccatccaatagacaactacttcttca

SEQ ID NO: 435 - DNA, 65 bp, Candida albicans
tttgaaaaggtctactacagttttaaaccttacctgaatacgtaattatcatcatataagcaaaa

SEQ ID NO: 436 - DNA, 65 bp, Candida albicans
caacttaaaccaattctttttcttttaacaaatcaccaaatcaatatattcgacgattataaact

SEQ ID NO: 437 - DNA, 65 bp, Candida albicans
gtacaatcatctatctatctacaacacctagcccatcttaacaattcatatttaaattttccata

SEQ ID NO: 438 - DNA, 65 bp, Candida albicans
taaacaacttcttttactttttcctttcttttcctttcaaacctctacaacagatccaattaatt

SEQ ID NO: 439 - DNA, 65 bp, Candida albicans
ttttaaaaccaagttcttctaattataccaataacatacaacatcatggattcagacgccactaa

SEQ ID NO: 440 - DNA, 65 bp, Candida albicans
gacaagaaaaaggaatcaagactttatctaggttttcaaattaattgttatttttactccattgt

SEQ ID NO: 441 - DNA, 65 bp, Candida albicans
acacaccataaacacagaactagaacactctatattaagttcccagttcgcctcaacttctttct

SEQ ID NO: 442 - DNA, 65 bp, Candida albicans
cggaagtaaacaccatatacaataaatcgaccacaacacaacaattaaacaaagcaagacaaacc

SEQ ID NO: 443 - DNA, 65 bp, Candida albicans
gattgtaaagccagaatttggaaatggaccaaaaaataagtgtgtagtatatatatatgtgagaa

SEQ ID NO: 444 - DNA, 65 bp, Candida albicans
gaaactaccatactgcattctaaaaccctacatcaccaaaatactataaatacacatttccaata

SEQ ID NO: 445 - DNA, 65 bp, Candida albicans
aatataattattacaacacacatctaatagaaactgttcaaccttactaatcaggtatttcatta

SEQ ID NO: 446 - DNA, 65 bp, Candida albicans
aaactttctcttttccttgaaccagtaaccaaacgatgtctaaaccagttacgttagaactacca

SEQ ID NO: 447 - DNA, 65 bp, Candida albicans
aaagtaagtatatacacacaaagtgatttgaatctgaactgaatgctaaccttgtttttttagtt

SEQ ID NO: 448 - DNA, 65 bp, Candida albicans
aaactcatcatctcttgcttattctttaatctaaccactaaataatcaactaaccaactaacaac

SEQ ID NO: 449 - DNA, 65 bp, Candida albicans
taactctacaattaattacgatgtcttacaaatcataaattaatggaataatgtctgaaacaaaa

SEQ ID NO: 450 - DNA, 65 bp, Candida albicans
ttccttttcttttccttcatcttatcaatttgatatataccaacaatgtcccacagaaagtacga

SEQ ID NO: 451 - DNA, 65 bp, Candida albicans
attccaacaataacccaagttacttttcattttcattcaattgaatcataaatatacatcccaat

SEQ ID NO: 452 - DNA, 65 bp, Candida albicans
tttgtaaaacatcatctcatctcactagtttgccatatctacttatagagtaaccaccacgagct

SEQ ID NO: 453 - DNA, 65 bp, Candida albicans
tgctagggaaagactcgacctctcccaattacagaatactacaactgtatcaacaatggttacct

SEQ ID NO: 454 - DNA, 65 bp, Candida albicans
tgccattcaatcaaccttgcaccaccttctactcctcccttcaagattaaacattttcatcaacc

SEQ ID NO: 455 - DNA, 65 bp, Candida albicans
tttttgggaggcaaaaatacatcaaccactactcttcccatattcaatctccccaattactatca

SEQ ID NO: 456 - DNA, 65 bp, Candida albicans
aaattacaaaacaaatttcaagttacatccactgtcagaccatcaactagagtattcctttaata

SEQ ID NO: 457 - DNA, 65 bp, Candida albicans
aaattgttgatggtattactaatatccaacaacttgttattaacaaaaagatgtcaccaaaaact

SEQ ID NO: 458 - DNA, 65 bp, Candida albicans
aaacattaagcaactatagatttaagtcaataataataacaataataatcatgtccaatactgaa

SEQ ID NO: 459 - DNA, 65 bp, Candida albicans
tgaaaaggaatcgaattagatgagatcctgtaacatccaccactttttcaatcattaatggaaaa

SEQ ID NO: 460 - DNA, 65 bp, Candida albicans
tccatcacataatattcttcatctatattcaaaataacaaaaccccccaaaacttttcttaaata

SEQ ID NO: 461 - DNA, 65 bp, Candida albicans
tttcttcctccttttcaaatgttattttgttttttcatcctaaaagatcatacaatcaatcaatt

SEQ ID NO: 462 - DNA, 65 bp, Candida albicans
ccactaccacctttctccttttcctatacccctttccctcccaattacacaactatagattaaca

SEQ ID NO: 463 - DNA, 65 bp, Candida albicans
aggaacaataaaaaggttattaccactttacacatctacattcttaccaaaagaaaaattaaaac

SEQ ID NO: 464 - DNA, 65 bp, Candida albicans
tattacaatacaattaagtcttcattactccctgcaataaaaaaattgattaaatagtaaacata

SEQ ID NO: 465 - DNA, 65 bp, Candida albicans
aattaattcttctttaagttttattttgaaaaaatacatacagcagcaggatactaccgttaatc

SEQ ID NO: 466 - DNA, 65 bp, Candida albicans
ttcatattttttcccaataacacctcttcataatcctactgcctaccaataactccaactgaaaa

SEQ ID NO: 467 - DNA, 65 bp, Candida albicans
aaaagtagaaatttatctctttctttaccatacatatatacatctataataataacttagtccta

SEQ ID NO: 468 - DNA, 65 bp, Candida albicans
cttacctggatatattcgtcttcattgaagtttgtttcaacttttctaatatttaacaaaaaacc

SEQ ID NO: 469 - DNA, 65 bp, Candida albicans
ccacattacactcaagaagttactcatcatatttaacacccactttaattttacttattaggtat

SEQ ID NO: 470 - DNA, 65 bp, Candida albicans
ctcctatttataatacttcttatattgtataaagaaaagaaacattcatatatacaattttcaaa

SEQ ID NO: 471 - DNA, 65 bp, Candida albicans
tcaacaacaatcttgctggaataatcctaattgcaaatatctacgatgtcattaaatatatcttt

SEQ ID NO: 472 - DNA, 65 bp, Candida albicans
ttctttattttatttttaatatttcaatttactttatggcttgatatattccatgagtgactacc

SEQ ID NO: 473 - DNA, 65 bp, Candida albicans
acgagttccacgtcattttccaacgtctttcacccaacattacccatacgatcaaactgcaaact

SEQ ID NO: 474 - DNA, 65 bp, Candida albicans
tttcattttttattcttgattttgcatcttactttactggatttgaataagttatattatacgat

SEQ ID NO: 475 - DNA, 65 bp, Candida albicans
atattctacaaacctgatcgccctatttaaccctccatcaatattggtccatttaattaccttca

SEQ ID NO: 476 - DNA, 65 bp, Candida albicans
aatcaaggtaccatatcattaccaaattagacatcatgcctatgcaaaaagaattcagaacctct

SEQ ID NO: 477 - DNA, 65 bp, Candida albicans
acgtcatccctcctctcctcccctctcccttatattttcatactaattctatctatccatttatt

SEQ ID NO: 478 - DNA, 65 bp, Candida albicans
tgctgtctacaaaaacattaatcacatcattcatttaaaattatactttatactgcttgatcaat

SEQ ID NO: 479 - DNA, 65 bp, Candida albicans
atcggttccacttgggggaagtagaaatggtcatggcccttaaagcccaggaaagagtggaagaa

SEQ ID NO: 480 - DNA, 65 bp, Candida albicans
tttatattcaacctttttctttttctatttctatttcttttccttttaatctagacaacaattct

SEQ ID NO: 481 - DNA, 65 bp, Candida albicans
tcatacaacctgctcaacgtgttcataagataaatttctttcttgaaatcaaataatgagtgaag

SEQ ID NO: 482 - DNA, 65 bp, Candida albicans
aaaaacttattaaaatctaaacaaaagtcataaattgtatagtgtcaactaattacacaagaacc

SEQ ID NO: 483 - DNA, 65 bp, Candida albicans
ttgaatcaatttataagaaagtgttgatcttatctttggatatataaacaaattccgaggtcatt

SEQ ID NO: 484 - DNA, 65 bp, Candida albicans
aacacttctgaagagttttcgtagaagactttgaacattcttttaacactcaacacaattatgga

SEQ ID NO: 485 - DNA, 65 bp, Candida albicans
ctcatcccttcttttttcaaatattgactatcccttcaccccccttctctttatattgaaaaatc

SEQ ID NO: 486 - DNA, 65 bp, Candida albicans
atacaatcgataacaggaagactcataataacaataataacaacctacatacatatatacacacg

SEQ ID NO: 487 - DNA, 65 bp, Candida albicans
aaattattttattcaagtaattacttgttatactcaacacatcactaagactttaaaatcaacac

SEQ ID NO: 488 - DNA, 65 bp, Candida albicans
gtcctcggattttgccttcagatacatttctatcaccattcaagtattagtatcattaagcaatc

SEQ ID NO: 489 - DNA, 65 bp, Candida albicans
ttcaagtattagacatatcatcgataaaataccaataaaaaaaggcaatagtataatgtcagata

SEQ ID NO: 490 - DNA, 65 bp, Candida albicans
caagaaactaatattccatcaccttaccttctatttttgttcccaccataaccataaccataacc

SEQ ID NO: 491 - DNA, 65 bp, Candida albicans
caaccccaattgataaaccatattacttgatctcagtatctgcaaaaatttttgattagaaaaca

SEQ ID NO: 492 - DNA, 65 bp, Candida albicans
accaattgcttaatatacatagaacgaacaccactaccctaacaataacaaccctttattgaacc

SEQ ID NO: 493 - DNA, 65 bp, Candida albicans
aactgaaaaaataaacagcggacctcatctctttttttcaaatccactttttattactttattca

SEQ ID NO: 494 - DNA, 65 bp, Candida albicans
tttttcaggatggaattagaatctatcatcaacaaaaacctcaaatcatctaactaattccgcct

SEQ ID NO: 495 - DNA, 65 bp, Candida albicans
caccccggctttccacgtaacattccgacaaatatacaaaaacttatttaatcaactaattaaca

SEQ ID NO: 496 - DNA, 65 bp, Candida albicans
tgttgtttcccgttattacttaattattgagatcatttcgacttaatggcattagacaaattaga

SEQ ID NO: 497 - DNA, 65 bp, Candida albicans
ttcacactagcaattcacgatacgaataaagcaacaacgataacaataataatactagaataaca

SEQ ID NO: 498 - DNA, 65 bp, Candida albicans
gttctttttttccttttgtttaccatttcatcacaattctatagtgacaagagtcaaccataaat

SEQ ID NO: 499 - DNA, 65 bp, Candida albicans
atagtagtccaccacatcaatcatctttgataataacacatatcattctgttataaccactaaac

SEQ ID NO: 500 - DNA, 65 bp, Candida albicans
taaacaaacccctaccctttctttctttaatccccaacaccaaaccaatcatgaattattctact

SEQ ID NO: 501 - DNA, 65 bp, Candida albicans
ataaaacctcttattcaattcaattcaattcatactattatataaatactatctaatcaccatca

SEQ ID NO: 502 - DNA, 65 bp, Candida albicans
ttctataattcaaacctactcccttattcccttcaataatagtaataaataaataactagaaata

SEQ ID NO: 503 - DNA, 65 bp, Candida albicans
catttggcccttttcctctagattaaaacaaatcatatcagttatagagatagtttcccttacca

SEQ ID NO: 504 - DNA, 65 bp, Candida albicans
taatttctccattcaccattaacttctagcaactcatatcaattgatcttttatcccctactacc

SEQ ID NO: 505 - DNA, 65 bp, Candida albicans
aattttccactaataaaagagagaaaagtttgttgggaccactttcaacattatattaagaaact

SEQ ID NO: 506 - DNA, 65 bp, Candida albicans
attgactgacaacttcttgctttaaatagaacattataccatagccagtctactgccacaaaata

SEQ ID NO: 507 - DNA, 65 bp, Candida albicans
tgaaaatgtcttccatttggtatgacgacattttggaaacttttatgtctcgcttaaagatagaa

SEQ ID NO: 508 - DNA, 65 bp, Candida albicans
cgaggttaactgaaaagctcactatcagaaaaatcaacaaacccaccttcaacttcttcaaccag

SEQ ID NO: 509 - DNA, 65 bp, Candida albicans
caaaaatggatgataccgatagagctgtttctcgtttattcagaagttttaaaaccgttaaagaa

SEQ ID NO: 510 - DNA, 65 bp, Candida albicans
ttataacatcagttcatttgtttgtggactatattatatattctagatactgattggatttgacg

SEQ ID NO: 511 - DNA, 65 bp, Candida albicans
aaacaaaaatatctcctacaattacaacttctacccaaatcatcttttaccaacagtttcacaat

SEQ ID NO: 512 - DNA, 65 bp, Candida albicans
atcttaactgttctcattcacaagtccactgaaagcgccatacacccagacacacagctattgtc

SEQ ID NO: 513 - DNA, 65 bp, Candida albicans
actgacaaatcaaggcaaacaattatcttcccattcttcagttatactactacgttctatatggt

SEQ ID NO: 514 - DNA, 65 bp, Candida albicans
aaagaacatcaatcaatcctttaaccaaccaactccattactaatcaagtaaaaaatgttacaaa

SEQ ID NO: 515 - DNA, 65 bp, Candida albicans
ttttatttttttcgtttttctttttgtttacttttctttatactattcaaacactttaaataata

SEQ ID NO: 516 - DNA, 65 bp, Candida albicans
aaactaccacaacatgtgccataactaactaaacaaccaccctttatggcacaacctactaccca

SEQ ID NO: 517 - DNA, 65 bp, Candida albicans
cgtcttttgcttagaacattctacttatcgaaacatataaacaatagcaagtaactataatcata

SEQ ID NO: 518 - DNA, 65 bp, Candida albicans
attaaaaaaacaaaacaaccagaaaactctaaccacagctctcacccaatcaacgcacaaccaga

SEQ ID NO: 519 - DNA, 65 bp, Candida albicans
taattactttgttgtaacttattcccaaacaattattagtaccctggatctaaccaactagccaa

SEQ ID NO: 520 - DNA, 65 bp, Candida albicans
taacatacaactaggatcaagaatactctgtccatcccatcccacctcaatccgtacttcctgaa

SEQ ID NO: 521 - DNA, 65 bp, Candida albicans
acatctcgagatatttcttcctcaacaacctcattaacagtttctatatttatattcgtttttgt

SEQ ID NO: 522 - DNA, 65 bp, Candida albicans
tttcaattttcattattattattattattatttgcttaagttattagacttctttatgtcaccaa

SEQ ID NO: 523 - DNA, 65 bp, Candida albicans
tagaaatagaaaaatttctcattccttttgagttttccaccataatcaactagtaataaccaaca

SEQ ID NO: 524 - DNA, 65 bp, Candida albicans
tttcagcggcaccatcagccaataatgcatcaatttcaccatctaaaagacattatcttcaacaa

SEQ ID NO: 525 - DNA, 65 bp, Candida albicans
gtttatatctttcatgccagatcagaaataactctagtcaatatcataacttataatgtccaatt

SEQ ID NO: 526 - DNA, 65 bp, Candida albicans
gctatacttccccttttctgtcgttttacttatattacaattatctgactaaacttgaaccaaag

SEQ ID NO: 527 - DNA, 65 bp, Candida albicans
atcccgaattgaaaatagcaagtagagagaatggtgaattcaatcctgtcaatgtggcatacaca

SEQ ID NO: 528 - DNA, 65 bp, Candida albicans
taaatattctcaattggtcttatcaaatctatcaaatctttcttctcttaataactttggtatag

SEQ ID NO: 529 - DNA, 65 bp, Candida albicans
ttgtctttttgatgatacacacaccacaacatgaagttggtacgctttcttatgaatatccccaa

SEQ ID NO: 530 - DNA, 65 bp, Candida albicans
tttaaaaattttctgttctttccaattcacatttacgatcaactgttatctcaatacaccatatt

SEQ ID NO: 531 - DNA, 65 bp, Candida albicans
aaatatacatacttctttacccaagacatatcaaccaagcccaccatgtcaaaaccagagctata

SEQ ID NO: 532 - DNA, 65 bp, Candida albicans
caaaagaaaagctacatttcttaaattactaagctaaaagacaaaacacatatacaacttgacaa

SEQ ID NO: 533 - DNA, 65 bp, Candida albicans
tttaatcaatataactcatacaatattttgatttgatttcaataaaacgaacaatttaaagaaga

SEQ ID NO: 534 - DNA, 65 bp, Candida albicans
tttttatatttccatcaactttcctgtattattaacaacaagataaaaggatatatttgatcact

SEQ ID NO: 535 - DNA, 65 bp, Candida albicans
aatttattattcaattctttgatattaaagtcccactaagaatcaataaaccaatactatcaaat

SEQ ID NO: 536 - DNA, 65 bp, Candida albicans
aattacacatacaatcccaaaagtcatctcaaaatatgcaaaccattacaatataaaaccatgaa

SEQ ID NO: 537 - DNA, 65 bp, Candida albicans
tattattctttatctttatcatctgtctttaaagattaacacaacttaataacatccatctcata

SEQ ID NO: 538 - DNA, 65 bp, Candida albicans
tttttctttcaactcatccgtcattctttatttacatcccactcaaccaacgacaacgaacaaga

SEQ ID NO: 539 - DNA, 65 bp, Candida albicans
aattttaactgtatttgagtatatattgagttaccaattgattatatttataccaataattaaca

SEQ ID NO: 540 - DNA, 65 bp, Candida albicans
tttcttacaatttagataattttttatttctttcacttgaacaagaaagccattaattcaagaaa

SEQ ID NO: 541 - DNA, 65 bp, Candida albicans
agagtttccctcaaataatagacaattttaagtcttgagtatcgaatgtacaaactataaataca

SEQ ID NO: 542 - DNA, 65 bp, Candida albicans
tttttctttctttccttgctccaattatcctttgattcttcaatttcagtacataatatcacata

SEQ ID NO: 543 - DNA, 65 bp, Candida albicans
tcttattctttttgtagtcgattttctctctcaatcccacagtgtccacgttgtcttccctaaac

SEQ ID NO: 544 - DNA, 65 bp, Candida albicans
gcatttctttattgtttatactttctagatcatcaacattttcacagcaacaagatcaaatcgtc

SEQ ID NO: 545 - DNA, 65 bp, Candida albicans
cccagagaaaaagctttctgcatctactacaacaaagccaaaatcatttctttaaaggggataca

SEQ ID NO: 546 - DNA, 65 bp, Candida albicans
ttaattttaattttaatttattttagtacggtattttttcttttccatttttacgatagacaata

SEQ ID NO: 547 - DNA, 65 bp, Candida albicans
atataacaatttcccttttcccaatcgattggattttaattcaacaagttactacaagtcatgtc

SEQ ID NO: 548 - DNA, 65 bp, Candida albicans
cttcttgatattacaattctctaatatcaaaaacttctggtaaagcccatttcgatcaactagta

SEQ ID NO: 549 - DNA, 65 bp, Candida albicans
aaacaaaaccgtgccagttttttctgatcggtacaatctcaacacaaccttagttacatccaaat

SEQ ID NO: 550 - DNA, 65 bp, Candida albicans
attctggcaacaccaacttataataacaaataatcgtactagtacacctatatttaccgcatgac

SEQ ID NO: 551 - DNA, 65 bp, Candida albicans
cgtgtgttttatttgttcaaaattactaacaaaatttagatttctatattctttttaaatcaatc

SEQ ID NO: 552 - DNA, 65 bp, Candida albicans
ttcaaacgaaaacatattaatcaacaatagctaatcctcccaacaatccctacaaactcataccc

SEQ ID NO: 553 - DNA, 65 bp, Candida albicans
aaaaatacaacgttttctttcatcaatctttctttcattctttcttttaaatctataccattaag

SEQ ID NO: 554 - DNA, 65 bp, Candida albicans
gattaaagtgttgataagtgcgaaattaattcaatactttcataaaaactcacatactaccttgt

SEQ ID NO: 555 - DNA, 65 bp, Candida albicans
ttttagttgatgagatgacctgatacatcttactcttcacaactgtttcttaccaacaacaaaaa

SEQ ID NO: 556 - DNA, 65 bp, Candida albicans
tttcaacaaagtatatactaacgacaacaacaattaaaacaattaaaacatttcctccttgaatt

SEQ ID NO: 557 - DNA, 65 bp, Candida albicans
aaagtaaacataacaaggatcaatatcagtgtataagattttcatccagtccccgtacgtgcatt

SEQ ID NO: 558 - DNA, 65 bp, Candida albicans
cactcttcattcttactaagtaataccaatcaatttactattatacttatatacatacattcata

SEQ ID NO: 559 - DNA, 65 bp, Candida albicans
ccatcaactctaccactaaccgttcctgacaatcctaatttgttaaactttgggctatatcaatc

SEQ ID NO: 560 - DNA, 65 bp, Candida albicans
tcaaaatctgtactccaaagaatacgacagccatttatctatcataatactaataaaatcaaact

SEQ ID NO: 561 - DNA, 65 bp, Candida albicans
ttttcctttttattgttatacttaaacatatacacttaagatacatatctaattatactcacatc

SEQ ID NO: 562 - DNA, 65 bp, Candida albicans
gaaggcaaaattcattctttgactttatcaatcacctcaattacaacaacaacaataataataaa

SEQ ID NO: 563 - DNA, 65 bp, Candida albicans
tcctcccacaagttcatataaattgttatatatttgacagagtgcatatacattgactactgtgt

SEQ ID NO: 564 - DNA, 65 bp, Candida albicans
tattcaacaaaattacctataatcaattatagattatgtctgatattagtaaacaaatgaataat

SEQ ID NO: 565 - DNA, 65 bp, Candida albicans
ttcttcttcttcttccttcatcaaatggttttcttatcatcttaacctctatccacttttccatt

SEQ ID NO: 566 - DNA, 65 bp, Candida albicans
ataaaactgaacagaagaacgaaacctgttcctagcttattcataatgaaagattctatatcacg

SEQ ID NO: 567 - DNA, 65 bp, Candida albicans
aacaaaaacaaaactcaatttgtacattttagctatatattcgaatacaataccattttgcatct

SEQ ID NO: 568 - DNA, 65 bp, Candida albicans
aagtaattcccgccctcctgcctttctgcccccacacttttccataaaatagtaaaccattgaat

SEQ ID NO: 569 - DNA, 65 bp, Candida albicans
aaaactaacaagctacatctaatgaagtcagacaccgtaaaagttaatcaaaaaactatagaatc

SEQ ID NO: 570 - DNA, 65 bp, Candida albicans
tttgtcgtttgctttaaccgccaacattcaatattgcttccccttttcaacaacatactatcaat

SEQ ID NO: 571 - DNA, 65 bp, Candida albicans
attttctttctattattgctttgctttgaattcagttataatacctgcctgtcctcaattttacg

SEQ ID NO: 572 - DNA, 65 bp, Candida albicans
atccctttgattatctgtcttattttttagattccgatctccattaaataatggcgattggtaat

SEQ ID NO: 573 - DNA, 65 bp, Candida albicans
acaagggcaggagggaaaagaaaatttttctagttatgacaggtgaaataactatattatacgga

SEQ ID NO: 574 - DNA, 65 bp, Candida albicans
attacaatatcgtttcaccaatcaaactaatacaaagtatttaagcttgtattactaagcatatt

SEQ ID NO: 575 - DNA, 65 bp, Candida albicans
ctttggtattttcaattataaaaaaaacaccacatatttattacaatggaagttgccaaactaga

SEQ ID NO: 576 - DNA, 65 bp, Candida albicans
tggtttcacattacatacttgtgactttctttttatttagatcaattgttcaaacatgtctggta

SEQ ID NO: 577 - DNA, 65 bp, Candida albicans
aacaaacaacaaacaacaaaactattcttcttctattcatatcaacacacttctacctctacatt

SEQ ID NO: 578 - DNA, 65 bp, Candida albicans
ggaaaggaaatccaaaccaccaattcttgaactcggtcgaaattgatattgaacaggagaaacaa

SEQ ID NO: 579 - DNA, 65 bp, Candida albicans
aaactggatgaatacaagtaactgtatttttcacactcagcttccacaacaaattaaagaatgtc

SEQ ID NO: 580 - DNA, 65 bp, Candida albicans
gaaattatacgcaattgctacttttgaatataactattttctttctcaaccatcatatattaaca

SEQ ID NO: 581 - DNA, 65 bp, Candida albicans
ttcattctttaattatttgatcctcaattttagtctttagtttttcatttttttcattttggaat

SEQ ID NO: 582 - DNA, 65 bp, Candida albicans
gtctactacttttcagtcttcaaggtcaatttatcccctagaagacgagccaattcaattcatta

SEQ ID NO: 583 - DNA, 65 bp, Candida albicans
gtttgttgaatttataaaaagtatcatcattaataataattgtttctctttataagttatagacc

SEQ ID NO: 584 - DNA, 65 bp, Candida albicans
agcactcagtgtgttatggttggttacgttaccacaagatgggaattaccgtaatgtttacattt

SEQ ID NO: 585 - DNA, 65 bp, Candida albicans
agactaaactctcctgatacttgctaattatttgacaacaaaagtaccataacacacaacctaga

SEQ ID NO: 586 - DNA, 65 bp, Candida albicans
tttccttttaaaatcaatttccaatccaaaccttatatatccaaaatcacttagaaacataaagg

SEQ ID NO: 587 - DNA, 65 bp, Candida albicans
actttatttgataaattttacaagatttaattagatcaattagattatagaatcatttcaatata

SEQ ID NO: 588 - DNA, 65 bp, Candida albicans
accaattaaaaaaagcccctgctattccagttcataatacaggagagaaaaagaacttatcaatt

SEQ ID NO: 589 - DNA, 65 bp, Candida albicans
agtcactttagaggtactagaaaacatgcaaaaattggaaaccaatttccccatattggctactg

SEQ ID NO: 590 - DNA, 65 bp, Candida albicans
tcaactcatttatttgattagatcattgatcatttctttatctttacaacaaattattattagaa

SEQ ID NO: 591 - DNA, 65 bp, Candida albicans
tgtcattccttatttaaatttccagaataccctttaaactacataatatcatgaagaatccattt

SEQ ID NO: 592 - DNA, 65 bp, Candida albicans
atggaagaaaaacacacacacataaatctccttctttcttgaaacatacaacaaacaacttaaaa

SEQ ID NO: 593 - DNA, 65 bp, Candida albicans
cactctcacccaatctctactataattaatgagaagactgttgttagttcttttttttttcactt

SEQ ID NO: 594 - DNA, 65 bp, Candida albicans
attatattttctttatttcctttttatttacttcccaagtctttctttttaaattacaatcaaca

SEQ ID NO: 595 - DNA, 65 bp, Candida albicans
ctttattcaagtacttcatcattcacaatccatactaatcaagagttgaacatctaaccaaaaac

SEQ ID NO: 596 - DNA, 65 bp, Candida albicans
ccacccctctcctcaaagaaataaaaacaaaaataaaatccctgaaagtttttagaacataaaca

SEQ ID NO: 597 - DNA, 65 bp, Candida albicans
ctttatagactaatcaacatatatataaatacttcaccccccctccctcctccacaacattcatc

SEQ ID NO: 598 - DNA, 65 bp, Candida albicans
aagatgcagacactagcaattcatttgacgatggaattggcttcaatgagaataagcataccatc

SEQ ID NO: 599 - DNA, 65 bp, Candida albicans
catcattcgtctccttcccccctttctgttagagttgtttattttgagatcagtgtaattccaat

SEQ ID NO: 600 - DNA, 65 bp, Candida albicans
actcttctaatcatatactcccccttttcttgatattttaatcaattaacttcccccccctaatt

SEQ ID NO: 601 - DNA, 65 bp, Candida albicans
ctttttcccatctatttttattttattcaattgataactaaataccaaattaatcatgttagaag

SEQ ID NO: 602 - DNA, 65 bp, Candida albicans
aacaacattcacacaacaaatacatctacatcatcttgattgaattttaattctaactatctatc

SEQ ID NO: 603 - DNA, 65 bp, Candida albicans
aattctagaagatttttcttttaatagggaacctcaaattgcacatctcatcactatgacaacca

SEQ ID NO: 604 - DNA, 65 bp, Candida albicans
aagaactaaaaccagctacatccttctttcttttcagtacaaatcattcattagtaaattaaatc

SEQ ID NO: 605 - DNA, 65 bp, Candida albicans
tgaaaacaggtggtaaatacaattaatgtctgaacaagaagaagaaacagccctgaagtcacagg

SEQ ID NO: 606 - DNA, 65 bp, Candida albicans
ttgactgcttaaatcatatccaccttcttttctttcctttcttaccactatcattatatcccgcc

SEQ ID NO: 607 - DNA, 65 bp, Candida albicans
acttgtgttgagttattaatccatttccttctctctccattccattcatccttccttttttgcaa

SEQ ID NO: 608 - DNA, 65 bp, Candida albicans
agagagaaaatcataacacagcgacatccaaacatcaatagtttattcgacgacattgactggat

SEQ ID NO: 609 - DNA, 65 bp, Candida albicans
gaagaagtttttgaaattctatctatacaccagatcatctcaattcaataacaacaataacttca

SEQ ID NO: 610 - DNA, 65 bp, Candida albicans
ttgcccgttgactcataatactttaaacaacaacccaccaaacaacaataatgtccttggaggta

SEQ ID NO: 611 - DNA, 65 bp, Candida albicans
aattaattaattaatttatttatttgtttgtcaatagttccacataagtcatggttacctcttca

SEQ ID NO: 612 - DNA, 65 bp, Candida albicans
tttttaaagattgattattgcccaataagaattataaatacaaaacaatagttgaaaaaaaaaaa

SEQ ID NO: 613 - DNA, 65 bp, Candida albicans
cctgtacgcaaaggtcttatgcctggataaagtctaatcatgagtgtggaacaacaaagaaaaaa

SEQ ID NO: 614 - DNA, 65 bp, Candida albicans
atttttctagaatagtcttccttccatttttacctttacttatttcaatacaaccatcaagaata

SEQ ID NO: 615 - DNA, 65 bp, Candida albicans
aactgagatccccagaataagctacacacaagcagcacaacgactatgccagatgcaaatgaggt

SEQ ID NO: 616 - DNA, 65 bp, Candida albicans
taactcatcctttcgtatcaaaaactccaacagtgaacaaacaccatgtctagtttagcttcaca

SEQ ID NO: 617 - DNA, 65 bp, Candida albicans
atgaaatagaaaaatgaaaaatctgactcaagatgagatcttacattcaaactttataaaccaaa

SEQ ID NO: 618 - DNA, 65 bp, Candida albicans
tttaatcttcacagtttaacactgttaagatcttaccagcattatacatatcgtcacaccgtaat

SEQ ID NO: 619 - DNA, 65 bp, Candida albicans
agtgctgtacaaattttatattttatggccaactactaagtatacccagatctgatttatagaaa

SEQ ID NO: 620 - DNA, 65 bp, Candida albicans
aaatccttctctcgttgaaatctacctagtttggcccaccttaatattacattaatcacatatat

SEQ ID NO: 621 - DNA, 65 bp, Candida albicans
gcacgaagtcaacgacatcagaaccagcaacccaggcagcgctaaaacgaatatccaagaaagcg

SEQ ID NO: 622 - DNA, 65 bp, Candida albicans
tttttcacttgactttttagtttttgttttttgttcattaactaccaccaaatcaactatcaaca

SEQ ID NO: 623 - DNA, 65 bp, Candida albicans
ttttcactaatcccacttttttggtaagaaagaagcatagctatttgccgacaagccaattcaag

SEQ ID NO: 624 - DNA, 65 bp, Candida albicans
atgtttacaataaactctttcatttactctttgctcatcagaccccaactaaattcaacaaagat

SEQ ID NO: 625 - DNA, 65 bp, Candida albicans
cttataatttctttctttctttcttcttcttctttttcttctttttatcaacaacattttggaaa

SEQ ID NO: 626 - DNA, 65 bp, Candida albicans
ttcattcctttcttgttttgttctgttataccccaaaagtttgaataagtcttcagatatctagc

SEQ ID NO: 627 - DNA, 65 bp, Candida albicans
ctctattaaacttctttggtgtataagtggtattatatttttatgttactttgaatattatccaa

SEQ ID NO: 628 - DNA, 65 bp, Candida albicans
ataaagtaatttcatcaaatcttgacgatcctttaagtgtatcagatatagattccgacaccagt

SEQ ID NO: 629 - DNA, 65 bp, Candida albicans
cttttcctttacaaccaaataataatctattcttaattattgtttgattgaatcactcatctaca

SEQ ID NO: 630 - DNA, 65 bp, Candida albicans
tttttgttttcattgccattgactcatcttcattgaatccccaataagaacaaccaattaatatc

SEQ ID NO: 631 - DNA, 65 bp, Candida albicans
tacagttgttttcctcctttttttctttaaagcaaactgaacaacttgcatgggattgataaatt

SEQ ID NO: 632 - DNA, 65 bp, Candida albicans
tctaagtactgaaatcatcacttgactaacaaggactagaatataaatcactccacatttcatta

SEQ ID NO: 633 - DNA, 65 bp, Candida albicans
ttttcgttcctacaccaaagccagtggtgaatcactagacttgttcatcatatttttgaagtgag

SEQ ID NO: 634 - DNA, 65 bp, Candida albicans
ttaattcttgcaacaactttctctttccattgcttatagctaattattctccaaataacatcatt

SEQ ID NO: 635 - DNA, 65 bp, Candida albicans
tttctaaagcactcgtttcaactatacattcagtaacaacacccttaatttaccaaactacatta

SEQ ID NO: 636 - DNA, 65 bp, Candida albicans
ttttcgatttttccacattggtgaacatacaatataaacatccacactttctatttgtcgacact

SEQ ID NO: 637 - DNA, 65 bp, Candida albicans
ttcattaataacctccctctttaccctccaatctgccacaccatcatggaacaacaacaacaatc

SEQ ID NO: 638 - DNA, 65 bp, Candida albicans
attgttcttcatatatttcattaaagttctacagtttcttccaactagacattcttcagttaatc

SEQ ID NO: 639 - DNA, 65 bp, Candida albicans
ttcagaagtcaatccagtaggaaaaccctaaccttcttctagctcatttaaaatcaaacaatatc

SEQ ID NO: 640 - DNA, 65 bp, Candida albicans
aataaaaaaataaccaaaaatgaaaaatttcaagcttaataaatcattaattgtactataccgcc

SEQ ID NO: 641 - DNA, 65 bp, Candida albicans
gtactcattgatttgattgcatttgtattattagttggaagccatatttatattaaaaacctaaa

SEQ ID NO: 642 - DNA, 65 bp, Candida albicans
aacctacgcatacctgagatgagatacaattatcatctctactccaaacaatgtcagacgacgaa

SEQ ID NO: 643 - DNA, 65 bp, Candida albicans
agattgtttgtctgttttaaaagattgtatgcgaaaacaacattactgggccttacgcgatcatc

SEQ ID NO: 644 - DNA, 65 bp, Candida albicans
ggattttacacaactatcatcactataaccaccaacagctacaaatagaaatgcaactttcatgg

SEQ ID NO: 645 - DNA, 65 bp, Candida albicans
gttaactaacacttgttttactataggcatttgacaacactgcaaccaatgttactgcctctcaa

SEQ ID NO: 646 - DNA, 65 bp, Candida albicans
tctgaacagcacagagatcaccaacaacaggaccatcaccatcaccaccacctacactctcatca

SEQ ID NO: 647 - DNA, 65 bp, Candida albicans
tgtaaaatttttttttcttgcttcttcatcaccccaaaacatctcacataaacttcctttcttta

SEQ ID NO: 648 - DNA, 65 bp, Candida albicans
tccccttttgacgctttttaaagttatacatattttagcatttcattaacactcccccccccctt

SEQ ID NO: 649 - DNA, 65 bp, Candida albicans
tcaaaaacacgtttgtttctaccataccgttctaaactacctaataatcacaaacaccttttccg

SEQ ID NO: 650 - DNA, 65 bp, Candida albicans
tacctttctttttttcaaccaactctccttcaccaacattaaacaatgtccaaaatagagccagt

SEQ ID NO: 651 - DNA, 65 bp, Candida albicans
tcccaaacatcaaaatatttcaaacaacaacaatataagagaacttcattagacaatggtgcaaa

SEQ ID NO: 652 - DNA, 65 bp, Candida albicans
gacaaccaaccaccaactaaccttaataactgaaactcactagaaaactaacccttatagaccat

SEQ ID NO: 653 - DNA, 65 bp, Candida albicans
tcccccgtcccccttcctccctttttacccttctccaaaattaataataataacgattattcata

SEQ ID NO: 654 - DNA, 65 bp, Candida albicans
ttttctgtacaactataaaattaatcaagtggtcaatgatttcgagatttgtcagaactttagca

SEQ ID NO: 655 - DNA, 65 bp, Candida albicans
gtggaagatgaaatttttttgtagtgatgagatgagaggaaaaatgaatgggaaattctttgtgt

SEQ ID NO: 656 - DNA, 65 bp, Candida albicans
ataataataacaatagatcttaaacaaccgattcttcatcaagacatggtggaaaaacagtttaa

SEQ ID NO: 657 - DNA, 65 bp, Candida albicans
aatagatcaaactcattaatacacaagctctctttcctttattaagcatcagtgtttgacaaaat

SEQ ID NO: 658 - DNA, 65 bp, Candida albicans
aactaatttcacagaactcaaacccctacaagaggaagtatacccaataatatacacatttgagt

SEQ ID NO: 659 - DNA, 65 bp, Candida albicans
caaaaaccacaaaacattcactttaatgaattcaacagaggtcgataacttaccttttcaacaac

SEQ ID NO: 660 - DNA, 65 bp, Candida albicans
ttttccacaaaataaccaaccaaagttaactttcaatgaaatcgtcaaaattgaatccagtcaca

SEQ ID NO: 661 - DNA, 65 bp, Candida albicans
agacaacacctgctaatagttgtttctagagttagggtttaagttattagttagagagatccatt

SEQ ID NO: 662 - DNA, 65 bp, Candida albicans
taacccacaacaatcttcactcttagatacaacacacatctacaacatgccgtctgcatctaacc

SEQ ID NO: 663 - DNA, 65 bp, Candida albicans
tcacttggcttccactctttacgattacaccagcgtccaatcattgtatttttacaacagaaata

SEQ ID NO: 664 - DNA, 65 bp, Candida albicans
acttttctttccaaaggcaggacaaccaaacacgacataaatccgattcagatatttccacaaac

SEQ ID NO: 665 - DNA, 65 bp, Candida albicans
aatttaactcattataatttatttctttactcatttgattgcctgaatacccgtttccaataacg

SEQ ID NO: 666 - DNA, 65 bp, Candida albicans
aatagccaaaatcaatcatcgttttctctttgtacagcacccatcatgagttcgattaaaacaag

SEQ ID NO: 667 - DNA, 65 bp, Candida albicans
ttttcatttcttttcatttcaaccaactactacctaactatcctaactaactgtctaaccaaata

SEQ ID NO: 668 - DNA, 65 bp, Candida albicans
tcttaatgtacattaaaatctgtcttttagtttacctttttttaataccagtattcaatcatggg

SEQ ID NO: 669 - DNA, 65 bp, Candida albicans
aataaacctttgaaaattcattatccttctaaccataaccacaactcaccctaccttctttaact

SEQ ID NO: 670 - DNA, 65 bp, Candida albicans
ctcatttaccagaaatatttttttgctctagattttgttttgattctttacccaatcaacaagca

SEQ ID NO: 671 - DNA, 65 bp, Candida albicans
tggtgaaaagattgaagatgtgtatctgaaagaagtggttgatttggtgaaatcaagatttgaag

SEQ ID NO: 672 - DNA, 43 bp, Candida albicans
acgtgttctactagtttgtcacactacgacacaagtccttgaa

SEQ ID NO: 673 - DNA, 43 bp, Candida albicans
accattcatatatatatatataattacttgataagacctcaaa

SEQ ID NO: 674 - DNA, 43 bp, Candida albicans
accaagataacacaactacaatctatcagacacatctagcaaa

SEQ ID NO: 675 - DNA, 43 bp, Candida albicans
aattaagagtatatctccccttttgttttttttcttcccagcc

SEQ ID NO: 676 - DNA, 43 bp, Candida albicans
atttttttttcaacaagtcaaactcacaatcgatagttaaaca

SEQ ID NO: 677 - DNA, 43 bp, Candida albicans
aaaatctatatgtcaactcgttattactgtcaatcaatcctca

SEQ ID NO: 678 - DNA, 43 bp, Candida albicans
gtcaactttctactttatattaacaaacaagttatccacagcc

SEQ ID NO: 679 - DNA, 43 bp, Candida albicans
ataactcctcttcctcttcatcaaccacccatcacctccacct

SEQ ID NO: 680 - DNA, 43 bp, Candida albicans
aatcaaacattatttgtatatcccatactccaagcaagcaatc

SEQ ID NO: 681 - DNA, 43 bp, Candida albicans
tttcaaagaaagacgtacaatataaactaatttgacattcata

SEQ ID NO: 682 - DNA, 43 bp, Candida albicans
ttcaacatagcaagatcgtaaactaacgaattctattcttacc

SEQ ID NO: 683 - DNA, 43 bp, Candida albicans
aattcaaatctgacgaaccttacgttgtcccgtgattagttca

SEQ ID NO: 684 - DNA, 43 bp, Candida albicans
ccttgttcttccttatcatctagtagtaaacacgcttagtcta

SEQ ID NO: 685 - DNA, 43 bp, Candida albicans
attcacatttatactcactgtttgtcattttcatctcatagta

SEQ ID NO: 686 - DNA, 43 bp, Candida albicans
catttgattaataccgtttttctacatccttccgatacaaaat

SEQ ID NO: 687 - DNA, 43 bp, Candida albicans
aatattctttctttctgttcacattatatattcttctcaacaa

SEQ ID NO: 688 - DNA, 43 bp, Candida albicans
atctgtcatagaagatagaagttacaaccaacccacacatact

SEQ ID NO: 689 - DNA, 43 bp, Candida albicans
tgtttattcaactaacttgtttttatttctcccccaattaaca

SEQ ID NO: 690 - DNA, 43 bp, Candida albicans
taatagtagtagtagtagtagtagcagtatcgttctaacaaca

SEQ ID NO: 691 - DNA, 43 bp, Candida albicans
aaccacacaaagtatcacagtatcaccgacaaatttatacata

SEQ ID NO: 692 - DNA, 43 bp, Candida albicans
ttacaacacccatacccgataacaaatatctattttgaaaatc

SEQ ID NO: 693 - DNA, 43 bp, Candida albicans
tacatttgaatcaaacatatcaaagattaatacataatcagct

SEQ ID NO: 694 - DNA, 43 bp, Candida albicans
cttttctaacaaaaagattcatatggtataagaactttctatc

SEQ ID NO: 695 - DNA, 43 bp, Candida albicans
tcttttaacgacagggcaaagtaccaaagaagcctcaccgaaa

SEQ ID NO: 696 - DNA, 43 bp, Candida albicans
tgacacatcttcaacaactttcttcccgcctcaaaactacatc

SEQ ID NO: 697 - DNA, 43 bp, Candida albicans
tttgttgaagttgtttttttcaaccagagataaatcattaatc

SEQ ID NO: 698 - DNA, 43 bp, Candida albicans
ttgcatagttgatatcaaaatcaaaaaacccactaatcatcta

SEQ ID NO: 699 - DNA, 43 bp, Candida albicans
ttttataatactacaacaacatatattatacaactaatcaaag

SEQ ID NO: 700 - DNA, 43 bp, Candida albicans
ttcaaccacgtcttcgaatacccaactttttcaaccaataatc

SEQ ID NO: 701 - DNA, 43 bp, Candida albicans
ttgttgggaaaaaggaaaaacttgatactggattgtcctttgc

SEQ ID NO: 702 - DNA, 43 bp, Candida albicans
ttttggcaacctcatcaggaatctaacggacagaatatcaata

SEQ ID NO: 703 - DNA, 43 bp, Candida albicans
cattcttaatatagtcagatataaccttaacttattaattatc

SEQ ID NO: 704 - DNA, 43 bp, Candida albicans
tttttctttcttataaccaattcaattcaatcaaatactaaaa

SEQ ID NO: 705 - DNA, 43 bp, Candida albicans
gatattattcaacactgtttctgttttatcaaccaaaaccagg

SEQ ID NO: 706 - DNA, 43 bp, Candida albicans
aataacaactactacaaaaacacgtatacattacctaccaaag

SEQ ID NO: 707 - DNA, 43 bp, Candida albicans
tttcattttcttcctttcttcttcttttccagattcaactcca

SEQ ID NO: 708 - DNA, 43 bp, Candida albicans
caatcacccaatcgttccctgcgtgtgactttttcttgtggct

SEQ ID NO: 709 - DNA, 43 bp, Candida albicans
ttgagatgcctttacaacatcttcttttccaaactatccaaca

SEQ ID NO: 710 - DNA, 43 bp, Candida albicans
tatacctgtattatcatcattatcatcaccactctttctaatt

SEQ ID NO: 711 - DNA, 43 bp, Candida albicans
tgactccactactactactactactatcaccacttctgcaatt

SEQ ID NO: 712 - DNA, 43 bp, Candida albicans
aacaaaagactaaggatatatctacatatagctaaccatttgg

SEQ ID NO: 713 - DNA, 43 bp, Candida albicans
aacttccccttatagatttgtatacttgtgtacatagacaaca

SEQ ID NO: 714 - DNA, 43 bp, Candida albicans
tatctatttcacattcacaataccccctatcaatctatacata

SEQ ID NO: 715 - DNA, 43 bp, Candida albicans
actttatatctccttcacaaacaaataactattctactttacc

SEQ ID NO: 716 - DNA, 43 bp, Candida albicans
tttgattgtcacattcacttttttcatcattcattaactaacg

SEQ ID NO: 717 - DNA, 43 bp, Candida albicans
attcatttcctacgagtatccacctattatttcttccactaca

SEQ ID NO: 718 - DNA, 43 bp, Candida albicans
tttcccactttgcctttggcccttttagcagcaaccaataatc

SEQ ID NO: 719 - DNA, 43 bp, Candida albicans
tgtatagaccagcataagccacattcccttgatctatattacc

SEQ ID NO: 720 - DNA, 43 bp, Candida albicans
cattgaaaaaatttgttttagctaacttgaactttctacatac

SEQ ID NO: 721 - DNA, 43 bp, Candida albicans
taaacaaatcttttcttttattcttggtgaacactgagtaata

SEQ ID NO: 722 - DNA, 43 bp, Candida albicans
ttacggccaatctaattaatttgatacaactgggcttcaaaca

SEQ ID NO: 723 - DNA, 43 bp, Candida albicans
taaaagtgaatatcaaggaattgccaatttggaaacccaaacc

SEQ ID NO: 724 - DNA, 43 bp, Candida albicans
attataagccttacttatcttgattattatttttttgcaagta

SEQ ID NO: 725 - DNA, 43 bp, Candida albicans
tagtctaattcaagaaatcaacaaataacatctaattgatcaa

SEQ ID NO: 726 - DNA, 43 bp, Candida albicans
ctcataaacatcccacaactaagtcaatatatattccaataaa

SEQ ID NO: 727 - DNA, 43 bp, Candida albicans
tcagctgggcaggttcattgcaactttattgacagacttcgtc

SEQ ID NO: 728 - DNA, 43 bp, Candida albicans
ttaatttctccgacattttatatatcaattaccatcacatatt

SEQ ID NO: 729 - DNA, 43 bp, Candida albicans
ttgagattctctgagattatttatgtttttgtagtcaagacca

SEQ ID NO: 730 - DNA, 43 bp, Candida albicans
atttccatcaacttcacccctccttccaccatcaccaacaata

SEQ ID NO: 731 - DNA, 43 bp, Candida albicans
tttttttcaactctaaacttctacaatcaatactttctaactc

SEQ ID NO: 732 - DNA, 43 bp, Candida albicans
atttttgatcccattgacgacataatgggtgttcggattactg

SEQ ID NO: 733 - DNA, 43 bp, Candida albicans
aacatattcttccttctctcttatttgcttactttatccagaa

SEQ ID NO: 734 - DNA, 43 bp, Candida albicans
tcatcattatatagtctatcatacaaagttcaccttatttgcc

SEQ ID NO: 735 - DNA, 43 bp, Candida albicans
tcctatattaatacacacagagtatacattactcccatttgtt

SEQ ID NO: 736 - DNA, 43 bp, Candida albicans
aaccagtgtgggggtgctatatcactttcgcctttcttacaaa

SEQ ID NO: 737 - DNA, 43 bp, Candida albicans
cctcttcctttttttctagttttctctcaatcaacaactaatc

SEQ ID NO: 738 - DNA, 43 bp, Candida albicans
cgcctttaatttttgtagttgaacaaacatctataagaaagat

SEQ ID NO: 739 - DNA, 43 bp, Candida albicans
atcaatctacttaaacaaacaaaacaacttaattatttataat

SEQ ID NO: 740 - DNA, 43 bp, Candida albicans
caattctacaaaccaatcaaatcataaaatagtaccactgtcg

SEQ ID NO: 741 - DNA, 43 bp, Candida albicans
tctatcttatattgatcttaatcctttaaccacaccaccaaat

SEQ ID NO: 742 - DNA, 43 bp, Candida albicans
tactatcaacaaatcatcggttgctgcaatatatatttcctca

SEQ ID NO: 743 - DNA, 43 bp, Candida albicans
aaaaaaagtgtttgttgtcctctttctttcttaaccatccgcc

SEQ ID NO: 744 - DNA, 43 bp, Candida albicans
ctaacactaacacttaaacctataataaacttatattttactg

SEQ ID NO: 745 - DNA, 43 bp, Candida albicans
ataatcaaatatatatatatttatatataacatttttaacaca

SEQ ID NO: 746 - DNA, 43 bp, Candida albicans
cattaatatagttcaataatttgccattcttaattattctgtc

SEQ ID NO: 747 - DNA, 43 bp, Candida albicans
gtgtggtaatcccggatcgattttctaaaaaatcagcattgca

SEQ ID NO: 748 - DNA, 43 bp, Candida albicans
tcctatatatacactgacacccattggttaaaagaaaagaata

SEQ ID NO: 749 - DNA, 43 bp, Candida albicans
atatgatttagttcattattcatttgcaactataaatgaagat

SEQ ID NO: 750 - DNA, 43 bp, Candida albicans
gttatttatcttagctgtttttattttttgaaatcccgcccat

SEQ ID NO: 751 - DNA, 43 bp, Candida albicans
atctgctattatttaggaaatactataaaaagttattagaagt

SEQ ID NO: 752 - DNA, 43 bp, Candida albicans
tctttattcttattaattaaactacttaacattctcaattaca

SEQ ID NO: 753 - DNA, 43 bp, Candida albicans
tttcccactttcttttattatcacttactatatcattgctata

SEQ ID NO: 754 - DNA, 43 bp, Candida albicans
tttattttattattcattccgtctgtaactgaaataagaagat

SEQ ID NO: 755 - DNA, 43 bp, Candida albicans
tacacaacaaatcatacacatatatatatatatacctatcatt

SEQ ID NO: 756 - DNA, 43 bp, Candida albicans
ttccacatattaaacctacacatctactgttgaacatatctca

SEQ ID NO: 757 - DNA, 43 bp, Candida albicans
tattacaaatcactatcaataaataactttcccacattttgta

SEQ ID NO: 758 - DNA, 43 bp, Candida albicans
ctcattccttcaatccccttcgaacagtacttagtgtacttgg

SEQ ID NO: 759 - DNA, 43 bp, Candida albicans
tagaaagaaatagaacaccattgcattaacattaagccatact

SEQ ID NO: 760 - DNA, 43 bp, Candida albicans
aaagcatacaacataattttgtcttattattcattagttgaac

SEQ ID NO: 761 - DNA, 43 bp, Candida albicans
ctaatttatattcgagctttgcctatcgctctaggtttcacca

SEQ ID NO: 762 - DNA, 43 bp, Candida albicans
taatttttatttagttttttatccttgctcttaccaattaaga

SEQ ID NO: 763 - DNA, 43 bp, Candida albicans
aattaatttatattattttataaccgtcaattgattataagaa

SEQ ID NO: 764 - DNA, 43 bp, Candida albicans
ttatataagaagttaattttgtttgttgcgtcttgtaatttca

SEQ ID NO: 765 - DNA, 43 bp, Candida albicans
ttgttacatcaaatcactctgaatcatatatctttgggagact

SEQ ID NO: 766 - DNA, 43 bp, Candida albicans
gtttgattcagcctagtttgtaataattattcaatatcccatt

SEQ ID NO: 767 - DNA, 43 bp, Candida albicans
ccacaagagtacactgaatattcatcccataataataaaaaca

SEQ ID NO: 768 - DNA, 43 bp, Candida albicans
ttacatttatatacgccaacaaccaaggataatacatttatgt

SEQ ID NO: 769 - DNA, 43 bp, Candida albicans
tctcctccttcttgaaacatattaccaaaaaagttagtatcaa

SEQ ID NO: 770 - DNA, 43 bp, Candida albicans
aaaaaattttcttcctcatcttacaccttctcctaccatagcc

SEQ ID NO: 771 - DNA, 43 bp, Candida albicans
tgaatatcaattcttattactttttgcttgttttcccttcatt

SEQ ID NO: 772 - DNA, 43 bp, Candida albicans
aaaggtcaaccataaatctaggtttagcgaaatataataaatc

SEQ ID NO: 773 - DNA, 43 bp, Candida albicans
gacaattaataataacatttgattatacaagaacatttcaatc

SEQ ID NO: 774 - DNA, 43 bp, Candida albicans
tcaatctaataaaccatccttccccctagcctgccacaacaac

SEQ ID NO: 775 - DNA, 43 bp, Candida albicans
tcttcattcaatcatcaattgataattcaggaatattacaaca

SEQ ID NO: 776 - DNA, 43 bp, Candida albicans
tttaaattccaggccaccccttcaatatcttggttaaacaatt

SEQ ID NO: 777 - DNA, 43 bp, Candida albicans
acaaaaaatggaatttcataatgggttggaacagctgaaagaa

SEQ ID NO: 778 - DNA, 43 bp, Candida albicans
caggcaaaagaaatttagactataatcagtcaaaaagattttg

SEQ ID NO: 779 - DNA, 43 bp, Candida albicans
tatttcattggatattcttttttgctatagttctccctttatc

SEQ ID NO: 780 - DNA, 43 bp, Candida albicans
atttgccttccgccccttttttttcttttctttctttcttttg

SEQ ID NO: 781 - DNA, 43 bp, Candida albicans
cctttcttcattagtgaacaggatttttttcagaaaagcgatc

SEQ ID NO: 782 - DNA, 43 bp, Candida albicans
gataacatatatatacaagaataaaaataataacaataacaat

SEQ ID NO: 783 - DNA, 43 bp, Candida albicans
acaatcgttccaaacatacgtacaacctgagcctgaccattac

SEQ ID NO: 784 - DNA, 43 bp, Candida albicans
tatttttttcttacatgggagaaaattggaggaacttataata

SEQ ID NO: 785 - DNA, 43 bp, Candida albicans
caaccctttaacacttaacacatagttatattttttttcaaag

SEQ ID NO: 786 - DNA, 43 bp, Candida albicans
aaggtttacaacgattatacatcccacataaacttgttgtcta

SEQ ID NO: 787 - DNA, 43 bp, Candida albicans
ttcaaaaatctacttgccctgcttgaaattaagattttgcgaa

SEQ ID NO: 788 - DNA, 43 bp, Candida albicans
gtactaccaatagtattagcctctgttgacgatatattcaata

SEQ ID NO: 789 - DNA, 43 bp, Candida albicans
attttcttctacaggctttatacatttatttcaatgattttca

SEQ ID NO: 790 - DNA, 43 bp, Candida albicans
ccaatcaacactgggttaaaccttcacatcatatagaaacaac

SEQ ID NO: 791 - DNA, 43 bp, Candida albicans
ttttcatccctatttttttggaattcctatttattatctcatt

SEQ ID NO: 792 - DNA, 43 bp, Candida albicans
atctatctctaaactaaatcactaatccattatcaacccagtc

SEQ ID NO: 793 - DNA, 43 bp, Candida albicans
ttttgcaagaaagagaaaacagtaccaacaacaaaaacaaata

SEQ ID NO: 794 - DNA, 43 bp, Candida albicans
attccatcactcacatgtttatatattatttccatttatcatc

SEQ ID NO: 795 - DNA, 43 bp, Candida albicans
taataaacatttcaatcaattttttttttttaatcaacaaact

SEQ ID NO: 796 - DNA, 43 bp, Candida albicans
aatcagatttcttcttcacaccatgagaacataaacaacaagc

SEQ ID NO: 797 - DNA, 43 bp, Candida albicans
tcttttgcctttataattgacatcccttttgttatctcaattc

SEQ ID NO: 798 - DNA, 43 bp, Candida albicans
tatctttgcaacatcttcctggattaaaaaactaccttcaaca

SEQ ID NO: 799 - DNA, 43 bp, Candida albicans
cttattaacaccaatttcataacacatacatacaatagcaacc

SEQ ID NO: 800 - DNA, 43 bp, Candida albicans
aaaccacttctaattcaaaatttcactgtgtttctaattacaa

SEQ ID NO: 801 - DNA, 43 bp, Candida albicans
gcaagaagtgatagaattttcatacatattacaagtcaattaa

SEQ ID NO: 802 - DNA, 43 bp, Candida albicans
taacatatattaacatttcaaattcaattacttttattcaact

SEQ ID NO: 803 - DNA, 43 bp, Candida albicans
aattacatttctttttctttatgtgattaaacattcgattata

SEQ ID NO: 804 - DNA, 43 bp, Candida albicans
tcaaacacgtgataaaacgcaggaaaaaaaaaaaagaaacaaa

SEQ ID NO: 805 - DNA, 43 bp, Candida albicans
tgttctctaaattgttcctttcctttgcaatctcaaccccact

SEQ ID NO: 806 - DNA, 43 bp, Candida albicans
ttatttctgatttttgaaattacaacatcaatatcgtcataca

SEQ ID NO: 807 - DNA, 43 bp, Candida albicans
aaaattagaatattactgttcattttacacagtattgtttacc

SEQ ID NO: 808 - DNA, 43 bp, Candida albicans
acaacagcaaggacccattttgataccactttaacaactgaca

SEQ ID NO: 809 - DNA, 43 bp, Candida albicans
atctttccgttagatccagcaaaagcaaccacagttaacataa

SEQ ID NO: 810 - DNA, 43 bp, Candida albicans
catactcataacacaacatagcttacggcagtagaatttaagc

SEQ ID NO: 811 - DNA, 43 bp, Candida albicans
attctatttctaccacttcaaatgacataagattaccctcatt

SEQ ID NO: 812 - DNA, 43 bp, Candida albicans
ttgtaagaaatgtaattacacaacaagatatttataaaacaca

SEQ ID NO: 813 - DNA, 43 bp, Candida albicans
attatttttaaaactaaaacaaatattatattaaacaagagat

SEQ ID NO: 814 - DNA, 43 bp, Candida albicans
atttagtgattatcagaatcttgataatcgattgtcattaaaa

SEQ ID NO: 815 - DNA, 43 bp, Candida albicans
atttcaaaatacaaagtcttcacttgattgtctcttcacaacc

SEQ ID NO: 816 - DNA, 43 bp, Candida albicans
tagccgacaattaaccaattggcagtgtacttattacataaca

SEQ ID NO: 817 - DNA, 43 bp, Candida albicans
aaaaatagacaacaagtaagtactttttattcttcattaaaca

SEQ ID NO: 818 - DNA, 43 bp, Candida albicans
ttttacaaaccaaactcatctattccaacaataattattaaca

SEQ ID NO: 819 - DNA, 43 bp, Candida albicans
aagacgcaatggtgtttgggtttattgttcatcagttactcat

SEQ ID NO: 820 - DNA, 43 bp, Candida albicans
tatttatacatataacatattcaaagctcaagtagaaggaaat

SEQ ID NO: 821 - DNA, 43 bp, Candida albicans
cctattcaacaattcaagaagctcaagatcaaaatcattatac

SEQ ID NO: 822 - DNA, 43 bp, Candida albicans
attctgttggttattccagtttcactttgaacactcaacaact

SEQ ID NO: 823 - DNA, 43 bp, Candida albicans
tctattatatctttaataacaataattataataataagagaaa

SEQ ID NO: 824 - DNA, 43 bp, Candida albicans
gaatatgtttttggtggtagctctctaaaaattaacaacatca

SEQ ID NO: 825 - DNA, 43 bp, Candida albicans
tacttttccaggtattactaagcaagcactacacacataagca

SEQ ID NO: 826 - DNA, 43 bp, Candida albicans
atacggtgttccctacaacctttgctcagcgccaaaaacacac

SEQ ID NO: 827 - DNA, 43 bp, Candida albicans
gttcacggtaaccccctaatccttgtttgttcattaatcagag

SEQ ID NO: 828 - DNA, 43 bp, Candida albicans
atatatccatattgctgtacctactttagttaaaccgactacc

SEQ ID NO: 829 - DNA, 43 bp, Candida albicans
ttattttgaaaagaaagaaagaaacaacactagaataaacaca

SEQ ID NO: 830 - DNA, 43 bp, Candida albicans
tttcacatagtaatccaacacagacacattcacaactcatcaa

SEQ ID NO: 831 - DNA, 43 bp, Candida albicans
aaagattgatcactaccacaatttattcaaccacttgaaaagc

SEQ ID NO: 832 - DNA, 43 bp, Candida albicans
aaatattaagataaactccatatcacacctacacacacacaat

SEQ ID NO: 833 - DNA, 43 bp, Candida albicans
tacagaatttatcacatcaactctaaatcaacaaccattaaat

SEQ ID NO: 834 - DNA, 43 bp, Candida albicans
atttttttttcatatttctcaccttttgtctacaacaaagact

SEQ ID NO: 835 - DNA, 43 bp, Candida albicans
aattatttagacaactccgaaaacaaacaactttgttctcata

SEQ ID NO: 836 - DNA, 43 bp, Candida albicans
tgaagcacaattgattggtcaaaatgttgatggcggagaagtt

SEQ ID NO: 837 - DNA, 43 bp, Candida albicans
actggatacacttcttcttcttcttccttcttctaatcaaacg

SEQ ID NO: 838 - DNA, 43 bp, Candida albicans
ttgacatcaagaactcttagaaccttttttattttgatcaact

SEQ ID NO: 839 - DNA, 43 bp, Candida albicans
caaaaaaaaaacacacacactttcttgatagacaaccatttaa

SEQ ID NO: 840 - DNA, 43 bp, Candida albicans
ttatttgaaataactttaacgaccttcaattaattccacaaca

SEQ ID NO: 841 - DNA, 43 bp, Candida albicans
tttgtttgctttctgatctagaagaattcaactcaacccagca

SEQ ID NO: 842 - DNA, 43 bp, Candida albicans
cgtgaatagcatagtatagaagtcaaaaactaacagaatcaca

SEQ ID NO: 843 - DNA, 43 bp, Candida albicans
agcacagtcgaaccattttaacatatatcttgattattagacc

SEQ ID NO: 844 - DNA, 43 bp, Candida albicans
tttaaaatctgttcaagattggtggacaagtccaagatcattg

SEQ ID NO: 845 - DNA, 43 bp, Candida albicans
tcttcaaaccccatttataacggttattatcaaaatattcaca

SEQ ID NO: 846 - DNA, 43 bp, Candida albicans
acaacaacaacagccaacagaattactacccaaccttgttcat

SEQ ID NO: 847 - DNA, 43 bp, Candida albicans
ttaaatttctcgcacgctcaaaaaatgacttcgacaaaaagca

SEQ ID NO: 848 - DNA, 43 bp, Candida albicans
ctatacaaaactagacttattaatcaagttaatcaacgtcgca

SEQ ID NO: 849 - DNA, 43 bp, Candida albicans
atatataactacaacttaagtctgtcccacttcagttaatact

SEQ ID NO: 850 - DNA, 43 bp, Candida albicans
agtgttagtcatacaagaaaccatcattatcaacaaagtgcaa

SEQ ID NO: 851 - DNA, 43 bp, Candida albicans
tcattttacatcctttactatataccactagattgtcttaatc

SEQ ID NO: 852 - DNA, 43 bp, Candida albicans
agaaataaatcacctatcccggttgcttagttaataggaagat

SEQ ID NO: 853 - DNA, 43 bp, Candida albicans
ttctcatgtagaacagcactgttacaaacacaaacaaacaacc

SEQ ID NO: 854 - DNA, 43 bp, Candida albicans
ggattaaagaaagcaactaagcaaatacaagcaatacagccct

SEQ ID NO: 855 - DNA, 43 bp, Candida albicans
ttgtttcgtaataaatcatctgttttcgctttttctcccaaca

SEQ ID NO: 856 - DNA, 43 bp, Candida albicans
tatattatatttcatttaaaactcacaaattatcaaatttaca

SEQ ID NO: 857 - DNA, 43 bp, Candida albicans
ttttttttatatattttgattgagtcccttatactgtcttata

SEQ ID NO: 858 - DNA, 43 bp, Candida albicans
tggattggtgttattgtttactaattcagtttatcgctcggag

SEQ ID NO: 859 - DNA, 43 bp, Candida albicans
ttatcaattcccagcataaaattagttaacactgaccctgact

SEQ ID NO: 860 - DNA, 43 bp, Candida albicans
ttttgcctccctgtttgcttctgtattctttttactggtagca

SEQ ID NO: 861 - DNA, 43 bp, Candida albicans
tttttcaacatcccttaataacatacgttaattctgctcagtg

SEQ ID NO: 862 - DNA, 43 bp, Candida albicans
tatgtgaaaaatttcttattctgactcattcttctcttcacca

SEQ ID NO: 863 - DNA, 43 bp, Candida albicans
acaaccacatatataaatatagacaacaatatttcgatcaaca

SEQ ID NO: 864 - DNA, 43 bp, Candida albicans
ttcaattcaatattgttctaacttacttccattgcaacagaaa

SEQ ID NO: 865 - DNA, 43 bp, Candida albicans
tcaagacccgaccaaattcattcatctaggaaatacccaagcc

SEQ ID NO: 866 - DNA, 43 bp, Candida albicans
tttttcctccccatattgaaaccatattcaagacatttacaag

SEQ ID NO: 867 - DNA, 43 bp, Candida albicans
ttcatcgaataccatttgccgaggcaagctatagttattgacc

SEQ ID NO: 868 - DNA, 43 bp, Candida albicans
aaaaaattgtcgaacacgcgtttctaccaatacttacccaacg

SEQ ID NO: 869 - DNA, 43 bp, Candida albicans
atttcgtcgaccttagtagttttctttctcttatcaggcaacc

SEQ ID NO: 870 - DNA, 43 bp, Candida albicans
aacaacaacaataacccaaatacgttaaccacttttattacat

SEQ ID NO: 871 - DNA, 43 bp, Candida albicans
tatcagtatcactactactactactactactactactactact

SEQ ID NO: 872 - DNA, 43 bp, Candida albicans
attaatttttggaaacacatacaaagatactattcaattaaac

SEQ ID NO: 873 - DNA, 43 bp, Candida albicans
tttaaaacaactaatcacatatatatatatatactatccaata

SEQ ID NO: 874 - DNA, 43 bp, Candida albicans
accgtttatgaatttaacgctataacaatcatttaatatatta

SEQ ID NO: 875 - DNA, 43 bp, Candida albicans
tcttttccatttaatacaaagactatacataactggttcaaaa

SEQ ID NO: 876 - DNA, 43 bp, Candida albicans
agtgataagtaaagagcaagatcatattgaaaatgtatggaaa

SEQ ID NO: 877 - DNA, 43 bp, Candida albicans
tacttatagttgttcttattagccgctcaattcatcaaaaacc

SEQ ID NO: 878 - DNA, 43 bp, Candida albicans
ttcataaacaaaaccatttcaatctatttcgtactctcaacca

SEQ ID NO: 879 - DNA, 43 bp, Candida albicans
catatacacttaaacaagcaaggaaacgaacaacgtatcaact

SEQ ID NO: 880 - DNA, 43 bp, Candida albicans
caaattgctattgaaataaataaaacaaaacccacatttatca

SEQ ID NO: 881 - DNA, 43 bp, Candida albicans
ttagtttcattttttgcaaccctctaatagttcaccaatcacg

SEQ ID NO: 882 - DNA, 43 bp, Candida albicans
cgatttaagtgtccacaatttctaacaacatcaccctcatccc

SEQ ID NO: 883 - DNA, 43 bp, Candida albicans
tttttcccacttccacacctaatccatcaactaatcaatcgtt

SEQ ID NO: 884 - DNA, 43 bp, Candida albicans
caatacaccgattcatctttacttactatgcacccaagacaca

SEQ ID NO: 885 - DNA, 43 bp, Candida albicans
cggatttccattaccaccaatctaaattcttacgtaaccctcc

SEQ ID NO: 886 - DNA, 43 bp, Candida albicans
caattgatattgatatctctgcaaggcttaatcaaagaagaaa

SEQ ID NO: 887 - DNA, 43 bp, Candida albicans
agaaacttttcttggtgtaccagttcattcccacccttcaact

SEQ ID NO: 888 - DNA, 43 bp, Candida albicans
ttaatatattattttcttatttattaactaataactatacttc

SEQ ID NO: 889 - DNA, 43 bp, Candida albicans
tcctcgtatccacttaccaattaatcacctaaattgaaaaaaa

SEQ ID NO: 890 - DNA, 43 bp, Candida albicans
gaaacacctttagattccttgcttatactgaaccatcccacta

SEQ ID NO: 891 - DNA, 43 bp, Candida albicans
ataatttttcacttcaactaccctttctttttccacaacaacg

SEQ ID NO: 892 - DNA, 43 bp, Candida albicans
ctttgattctttctttgttttctttaacactttaaaagatatc

SEQ ID NO: 893 - DNA, 43 bp, Candida albicans
ttcaatacttactatactttacttaaaaatcacttgataaaat

SEQ ID NO: 894 - DNA, 43 bp, Candida albicans
actatattatttcattttccttatttatcttacaagtgcaacc

SEQ ID NO: 895 - DNA, 43 bp, Candida albicans
ctttttttatattttaattttaatttgcatttaatcctacaaa

SEQ ID NO: 896 - DNA, 43 bp, Candida albicans
aatcactcaagccactttttccagtattcacactctgttataa

SEQ ID NO: 897 - DNA, 43 bp, Candida albicans
aagagttatagaataactatatacatatatactataagaaaac

SEQ ID NO: 898 - DNA, 43 bp, Candida albicans
cattaccaggttttctcttcatcatggcaataaagaactcatt

SEQ ID NO: 899 - DNA, 43 bp, Candida albicans
tattctaatataaattaaagaataaacattaataatatctacc

SEQ ID NO: 900 - DNA, 43 bp, Candida albicans
ttatttccttacaatcagtataccgaagccaaccaaataatca

SEQ ID NO: 901 - DNA, 43 bp, Candida albicans
accaaccgatgacaacacccagttaacgcaagcatcattataa

SEQ ID NO: 902 - DNA, 43 bp, Candida albicans
acaccaagactaatcaagcataactcacaattctaataccata

SEQ ID NO: 903 - DNA, 43 bp, Candida albicans
ctttccatctgatttcttttcttttttttttttttccacatat

SEQ ID NO: 904 - DNA, 43 bp, Candida albicans
catacattgcataaatcacttgactaacatcactttataatca

SEQ ID NO: 905 - DNA, 43 bp, Candida albicans
atatcaactttcataataaacataattctttccagacaactaa

SEQ ID NO: 906 - DNA, 43 bp, Candida albicans
ttctccaactacagcatacaagacaaaccagaataagaataga

SEQ ID NO: 907 - DNA, 43 bp, Candida albicans
atatttattcatcagataattcccatcactaccttcattgaaa

SEQ ID NO: 908 - DNA, 43 bp, Candida albicans
ctagtttttgaaatttctcttctttctcttcaacttatcagcc

SEQ ID NO: 909 - DNA, 43 bp, Candida albicans
aaaaaaattttttttttgtttcgggttagagactcatctctta

SEQ ID NO: 910 - DNA, 43 bp, Candida albicans
tttcaaggttcaaagttactatttataaatcaattcagcaatc

SEQ ID NO: 911 - DNA, 43 bp, Candida albicans
ttctttaacttgtactgttaaaaccactaccaacatttgactt

SEQ ID NO: 912 - DNA, 43 bp, Candida albicans
tttcttcgaatcaatcattaacttattcaaataattatcaatc

SEQ ID NO: 913 - DNA, 43 bp, Candida albicans
tcatttcaggttctttccagtctttctactttaataatactga

SEQ ID NO: 914 - DNA, 43 bp, Candida albicans
ctcaaactatccatgtgctattcattaaccactagccttcatc

SEQ ID NO: 915 - DNA, 43 bp, Candida albicans
ccttttttcaattcttcaattgaatataatctaacttattatc

SEQ ID NO: 916 - DNA, 43 bp, Candida albicans
ggcatttttttcatgttttggatcagctttaggattaagacaa

SEQ ID NO: 917 - DNA, 43 bp, Candida albicans
attacaacaccatatcatacaagataccatacaaactttaaaa

SEQ ID NO: 918 - DNA, 43 bp, Candida albicans
ttctgttaagtaaagaagatccgtttttactgtgaaacaagac

SEQ ID NO: 919 - DNA, 43 bp, Candida albicans
catatatctttttttgtttgaaacttctactgactttacaaat

SEQ ID NO: 920 - DNA, 43 bp, Candida albicans
atttattctttacttctaatcaaaacaactatatatcaatatt

SEQ ID NO: 921 - DNA, 43 bp, Candida albicans
attagaatcatctttcaaaaaatctaaaagaacaaatgataat

SEQ ID NO: 922 - DNA, 43 bp, Candida albicans
ccactattgattccattcctaacacttattataagtacttact

SEQ ID NO: 923 - DNA, 43 bp, Candida albicans
catttatttttattaatcaagttttttttattaagaacagaca

SEQ ID NO: 924 - DNA, 43 bp, Candida albicans
ttcaaggaatcatcgtcaaagaaactacacacattcgatcgct

SEQ ID NO: 925 - DNA, 43 bp, Candida albicans
ttttttttattcacatctataatcacaaactttctctcgaaat

SEQ ID NO: 926 - DNA, 43 bp, Candida albicans
ttcctcgctatagaataacagaatacctttagttttgagaaat

SEQ ID NO: 927 - DNA, 43 bp, Candida albicans
acaattttccagatatttcatagaaacttaaaacacactctcg

SEQ ID NO: 928 - DNA, 43 bp, Candida albicans
actattgttaaacttacaccaccaaacttgtcaattgactatc

SEQ ID NO: 929 - DNA, 43 bp, Candida albicans
atttttgcttttgtttagggctttgcactaaatctacttcaat

SEQ ID NO: 930 - DNA, 43 bp, Candida albicans
attatttgcatcaccaccctatccacaacttatattactgata

SEQ ID NO: 931 - DNA, 43 bp, Candida albicans
gttgttgtatcatttgcaaaataatgatgagtataacaagaac

SEQ ID NO: 932 - DNA, 43 bp, Candida albicans
actctatcttctctctctttccacctccatactattcactata

SEQ ID NO: 933-1000 - skipped (68 entries)

SEQ ID NO: 1001 - DNA, 65 bp, Candida albicans
tttgtaaatattaaatagtacacacacacacaattcttgtatataatacgaacaaacagtaatag

SEQ ID NO: 1002 - DNA, 65 bp, Candida albicans
agctgatccatccaatttctctaataatctttcttggttgatcattgattcgttgtcttgatacc

SEQ ID NO: 1003 - DNA, 65 bp, Candida albicans
attaaataaagatcaatagtccccggagctgcctgtacaattacactatatacacaaaaacttat

SEQ ID NO: 1004 - DNA, 65 bp, Candida albicans
gagggggtatttcactccatatttgctctattatttgtaattcttgctatttattatccatggtc

SEQ ID NO: 1005 - DNA, 65 bp, Candida albicans
gttaaaacaccaacccccctatatttacatatttttatatacttttaaatagacattttcattca

SEQ ID NO: 1006 - DNA, 65 bp, Candida albicans
catactgaatttgccacctacacgaagtgataccaatggctgtcgtattctggacaactttaaac

SEQ ID NO: 1007 - DNA, 65 bp, Candida albicans
cgttgggaaacgtaacagctcccgataaagaaaaagattcctttttgatattttttttaatctat

SEQ ID NO: 1008 - DNA, 65 bp, Candida albicans
ggtaaattattagaggaacttcttacaataaaaattactttgataacagtatttatttatgggct

SEQ ID NO: 1009 - DNA, 65 bp, Candida albicans
catcatcatcattgtaaatctatttctttttatggaggtgggaattgttgttccatttcaatgac

SEQ ID NO: 1010 - DNA, 65 bp, Candida albicans
acacacacatatatttgtatataagccatgaaatttattttattttattttgatgtaacttggtt

SEQ ID NO: 1011 - DNA, 65 bp, Candida albicans
ctctatatcaatataccataatactcgacacggctatactgttgatataaactttcccactggac

SEQ ID NO: 1012 - DNA, 65 bp, Candida albicans
gaacttgtacatatattacatacacaaattacggtttattgtgcattattttatctattgattta

SEQ ID NO: 1013 - DNA, 65 bp, Candida albicans
gaatattggtaaaatactacataatgatgcaaatagatatttatagagacaacaacgacaacgac

SEQ ID NO: 1014 - DNA, 65 bp, Candida albicans
acaacaacacatctaagggttgtagttattctttacttgtttgtatcttgtgagattacttcaac

SEQ ID NO: 1015 - DNA, 65 bp, Candida albicans
cttagcttcagtacatttagcccacctaaattggacctatgacaagttctactttcccgacaatg

SEQ ID NO: 1016 - DNA, 65 bp, Candida albicans
aaatcataaactagtccttaacaaatctaatagtctatgcattactaattatttatctccatgtc

SEQ ID NO: 1017 - DNA, 65 bp, Candida albicans
aagagagaaacaacttcttacatcatacttattaataagtcatatatacattataccagcatcta

SEQ ID NO: 1018 - DNA, 65 bp, Candida albicans
tgtagtactattgatattatagcattaaaattttcttccttttttgtcaaatgtatctgtagtat

SEQ ID NO: 1019 - DNA, 65 bp, Candida albicans
acatgtattaacaaattatataatgacataaaacattttacatctgctagttcttaaacttaaac

SEQ ID NO: 1020 - DNA, 65 bp, Candida albicans
aggtcaggtcttacgttgtatttttaagaacttctagtacgccgattgtatccctagataaagga

SEQ ID NO: 1021 - DNA, 65 bp, Candida albicans
tagaaactccataggatgtataaaaaaaaacacgtatcgaattcttattactttgtttataaaac

SEQ ID NO: 1022 - DNA, 65 bp, Candida albicans
tatgaaataaagtgggtttctaaattagatataacgataataagtgttgtgtattcttttttgca

SEQ ID NO: 1023 - DNA, 65 bp, Candida albicans
atatgttaaaacgggtagcagaaaatctaatcgaaatcaccttgtagacatatcctagtgatatt

SEQ ID NO: 1024 - DNA, 65 bp, Candida albicans
gacttgttctctaaattctgtatttacgtatttggattctttcctgtggggttaatacccaattt

SEQ ID NO: 1025 - DNA, 65 bp, Candida albicans
tatatatatatataaatatttacaaagtgaatcttggataaatatcatacactatctttactctt

SEQ ID NO: 1026 - DNA, 65 bp, Candida albicans
aagatagattaattaacaatacaaatataatgctacatggaaataaatagtaaatataaaaactc

SEQ ID NO: 1027 - DNA, 65 bp, Candida albicans
taatcgactcctacagcgtctgataataccaaaaaaagagaaaaggattctattttagaatcatc

SEQ ID NO: 1028 - DNA, 65 bp, Candida albicans
gatagtgtaggtattgaacataaaatcattaattaggaggaaataaagaaattaatagaaactgc

SEQ ID NO: 1029 - DNA, 65 bp, Candida albicans
tccacaaatgtcaaatacatatatttgcacctaccaattagagggatcttgaattaataacttac

SEQ ID NO: 1030 - DNA, 65 bp, Candida albicans
aactcataagagggcttcaggtttctttctattctgactttgccttttgttgtatttgcttgact

SEQ ID NO: 1031 - DNA, 65 bp, Candida albicans
gtatatgtgttaatccaactaagtaacaaaatgaaaacaatctgaacactgaatcgaaagaaagt

SEQ ID NO: 1032 - DNA, 65 bp, Candida albicans
tgtcagttctataactctacgtcatttatttatcttattctctattaagctatactaggcaatga

SEQ ID NO: 1033 - DNA, 65 bp, Candida albicans
gatagatattcaatatctcatgtatgccctatttccaatatcctctatcttctagtatcgccgac

SEQ ID NO: 1034 - DNA, 65 bp, Candida albicans
caaatatattgttaatttatgttttattctttaaaaattcaaaaattcaaaaattggatattatt

SEQ ID NO: 1035 - DNA, 65 bp, Candida albicans
taaagactgattctaggattacaaatgatacactacattacatcataacaggtcaggaagtcctg

SEQ ID NO: 1036 - DNA, 65 bp, Candida albicans
catagtattattgatatctctaaacaaaaagttatgtattaaaagcaacctaaacaagactctat

SEQ ID NO: 1037 - DNA, 65 bp, Candida albicans
aacatgagtatgaatttttcttaaaacattctaacaaaaagcattgccaaacaacattattctct

SEQ ID NO: 1038 - DNA, 65 bp, Candida albicans
agacctttgtaattaaaaaaatttaaacattagcaacaaagtaagaacacgatcaaccatactac

SEQ ID NO: 1039 - DNA, 65 bp, Candida albicans
ctacgatgtatatacatacaaaagctgtacattaatactgatagaacatttaagttataggttca

SEQ ID NO: 1040 - DNA, 65 bp, Candida albicans
aatggatttgtagaataaggggtggtacttccagtaaaacgagtactcaaataactccaagtgta

SEQ ID NO: 1041 - DNA, 55 bp, Candida albicans
gtgtttgtaatgtaaaatatttaacctatttattcttatgaacaaaaatgtattt

SEQ ID NO: 1042 - DNA, 55 bp, Candida albicans
ttattattattatcaatactattactactaccaagatggactttatattaaggtt

SEQ ID NO: 1043 - DNA, 55 bp, Candida albicans
cttcgccgatcctcaaacaatacttggctagacagttctacttagaagacggaaa

SEQ ID NO: 1044 - DNA, 55 bp, Candida albicans
ttactccataatgcacatttttatacaaaaaaaaaggatagcctccagcccatct

SEQ ID NO: 1045 - DNA, 55 bp, Candida albicans
ggtttgtcacattacacgcactacactaaatttatattagataaaacgaaacatt

SEQ ID NO: 1046 - DNA, 55 bp, Candida albicans
tatactagattatgactataatttctaacgaacaataatagaacatatatttaaa

SEQ ID NO: 1047 - DNA, 55 bp, Candida albicans
tataataggaggcactccaatatatgtgcatgtatgtatcaaaaaagaaaaaaaa

SEQ ID NO: 1048 - DNA, 55 bp, Candida albicans
aatcgttataagaagagagggtacaactattggcgcaggtacggttattgatttt

SEQ ID NO: 1049 - DNA, 55 bp, Candida albicans
cgaatcattaactagtttaacaaatacctataactacatctattcatttcctaat

SEQ ID NO: 1050 - DNA, 55 bp, Candida albicans
aaatgtaagtcatttataaaaaaaaaaatacaaactttctttgtttttaaaaaac

SEQ ID NO: 1051 - DNA, 65 bp, Candida albicans
attgttctcgtgggttatattattttatttttttcttttctctttcaagtgcttttatccatttt

SEQ ID NO: 1052 - DNA, 55 bp, Candida albicans
attccaattgtctgaattcttactccaatctctgcttccttttccttcccattgc

SEQ ID NO: 1053 - DNA, 55 bp, Candida albicans
gatgtttctatttaatgatttatagaataaggatatagcgtgttattgcacaagc

SEQ ID NO: 1054 - DNA, 55 bp, Candida albicans
aaaaaaagtatggttaaaaaggaaaaaaaataagctatcatcatcttcttcttaa

SEQ ID NO: 1055 - DNA, 55 bp, Candida albicans
aaataatacaattaactttataacaatatataaatctatattatcaaacaactac

SEQ ID NO: 1056 - DNA, 55 bp, Candida albicans
ataaatctatattatagttataaaacctccaaaaaattgtacatcttcctatgtc

SEQ ID NO: 1057 - DNA, 55 bp, Candida albicans
taaatcatgtacatatattattattttgcattactaatctattactattttacat

SEQ ID NO: 1058 - DNA, 55 bp, Candida albicans
gtaacatgtctcaatttagtttggcatttgaatcgactaattcaccccatttcat

SEQ ID NO: 1059 - DNA, 55 bp, Candida albicans
agagttattatatgtacacattttttttaatataaacatgtagcaatatacttta

SEQ ID NO: 1060 - DNA, 55 bp, Candida albicans
taaaaataagtaaattataaatgctaatcgtttattatgcagctattcaaccaag

SEQ ID NO: 1061 - DNA, 55 bp, Candida albicans
ttcagttctagttcctctggagtttctggtttaatatgcaaatccctctttctat

SEQ ID NO: 1062 - DNA, 55 bp, Candida albicans
tgaattggccccatatgatatgttttcctatttcttcatatcatctaattattgc

SEQ ID NO: 1063 - DNA, 55 bp, Candida albicans
gtgtccatttgttccccctacttctgcaataaatcctagcctcgaaaacttaaaa

SEQ ID NO: 1064 - DNA, 55 bp, Candida albicans
aatactcatatatatatgtatgtatatatatatattacataaccattcaccccaa

SEQ ID NO: 1065 - DNA, 55 bp, Candida albicans
acactattcgtgccttgttggttgcttttggcgattggtgtttctcttttttttt

SEQ ID NO: 1066 - DNA, 55 bp, Candida albicans
aaaacaaactgatattaaacagctatactgctactcaactgagctacacaccgtt

SEQ ID NO: 1067 - DNA, 55 bp, Candida albicans
aaagtcgtgccttcaaaaaaaaaaggtgtcccctttattaatatatacaagctat

SEQ ID NO: 1068 - DNA, 55 bp, Candida albicans
aacgaaaatgaaagttttagtctatttttctttctttttttctttcttcttttat

SEQ ID NO: 1069 - DNA, 55 bp, Candida albicans
atgtaatattattatcgtgtattaacacaactgtaaattatttgttaaatctaaa

SEQ ID NO: 1070 - DNA, 65 bp, Candida albicans
attatcgtaacattaaatttatacatcagatatttataattacacttcttaaataaaatattcag

SEQ ID NO: 1071 - DNA, 65 bp, Candida albicans
tgtaaaaaaacaaaacaaatatacattaaaaagttaagactataaaatagccacccaaggcattt

SEQ ID NO: 1072 - DNA, 65 bp, Candida albicans
tatgtacaagaatagctgtaaaagaataatatatcttcggatgattgagtagctcccattccccc

SEQ ID NO: 1073 - DNA, 65 bp, Candida albicans
gtagtaattccttcaacttctatatctatacatactattttaatttactgtcatttcatttcatt

SEQ ID NO: 1074 - DNA, 65 bp, Candida albicans
attttatctatcttgatttttaatgactagtaattatatccgcaaatttttctttattttttatt

SEQ ID NO: 1075 - DNA, 65 bp, Candida albicans
cataattttttatattttgattgaaagaaaatcttgaaaaagttttataatcccctcaagttaac

SEQ ID NO: 1076 - DNA, 65 bp, Candida albicans
cgtatttctatttatatattaacatttattaacattttgtatgttttttcttttaattctcctgt

SEQ ID NO: 1077 - DNA, 65 bp, Candida albicans
acaactttatttaacgattacacctatttacttgtaaagatatcttttgttgactaatgatttat

SEQ ID NO: 1078 - DNA, 65 bp, Candida albicans
catattaattcattgatgcaagtatgtatcaataattttgcaaaaaacgctctttttcattcaag

SEQ ID NO: 1079 - DNA, 65 bp, Candida albicans
gatgcatctgaagtgattgcaacagtaataaactagactagttatctactaaaaaatatacaaca

SEQ ID NO: 1080 - DNA, 65 bp, Candida albicans
ctgtcaatgaaccaataaatgaatgcaatcatgtaaatacacacatacatattaacttatttaat

SEQ ID NO: 1081 - DNA, 65 bp, Candida albicans
gatctgaactatacaaatacaaaaaaaaataataataacagggttaccacgtgatgtctagtcca

SEQ ID NO: 1082 - DNA, 65 bp, Candida albicans
taaatgcaaaaaatttcttttgtatataacgacaaacaacactaaagaaaaaccgagctatttga

SEQ ID NO: 1083 - DNA, 65 bp, Candida albicans
ctattaaagctatgaaatattttaaattaccatctcatagctactgcctgtacgtacatttctat

SEQ ID NO: 1084 - DNA, 65 bp, Candida albicans
ggtggtatttttgtgcggagcgttctgaaaagagaatttgtacattacttttgctatacaattca

SEQ ID NO: 1085 - DNA, 65 bp, Candida albicans
ataaatagagaaaaaatataacaaacagttgaacccacggcatgtaattacaatcactatttata

SEQ ID NO: 1086 - DNA, 65 bp, Candida albicans
atattattacaaaaattatggtttgaatgcaatatagtagtatatttttctttcgctttctttcc

SEQ ID NO: 1087 - DNA, 65 bp, Candida albicans
tcaagaagacgtttttttttttttttccacgttttttttttgtttaatttacatttgtgttgtct

SEQ ID NO: 1088 - DNA, 65 bp, Candida albicans
ggtattcacgataactgctagaatgacctacttcttaatacaaattactttctagtattaactat

SEQ ID NO: 1089 - DNA, 65 bp, Candida albicans
ataaatcaatctcacccatttaagccccttccccccccccccctccgcttgttagctctttttta

SEQ ID NO: 1090 - DNA, 65 bp, Candida albicans
ttcaaggtatttgcattttagtttttgctacttctataacattacaaattatatacaactatttg

SEQ ID NO: 1091 - DNA, 65 bp, Candida albicans
atcaaaggataatctgaagtcttcaataaaagttcgatcttcaggttttgtgtgggcaatttctt

SEQ ID NO: 1092 - DNA, 65 bp, Candida albicans
attcctgaatttgaaaagtatgagttgaataataaaccaataatgaatacatttatggaaaagtt

SEQ ID NO: 1093 - DNA, 65 bp, Candida albicans
atgcaattcaaatttcaaactaactttctttatttctcttcattcttttatactatataagcagt

SEQ ID NO: 1094 - DNA, 65 bp, Candida albicans
gatagagctaaaaacgtttataacaaattaataatatttgactaaactaacttcctattcacctt

SEQ ID NO: 1095 - DNA, 65 bp, Candida albicans
accaccgccactagaacgccaatgttaaaaaagtttaaagcaataggaaaacttggaacacgtcc

SEQ ID NO: 1096 - DNA, 65 bp, Candida albicans
tttattgaagaccaaaacaccgaatgcccaggtgggtgtggctaccagataatatagtaagaaaa

SEQ ID NO: 1097 - DNA, 65 bp, Candida albicans
aaatggtaatttgtagggttttacatattcaatctagacataacatttattaattgtttcctcta

SEQ ID NO: 1098 - DNA, 65 bp, Candida albicans
tacaagagaaacctcagggatgaccaataaactacgacacacttttagctgtatgtattgtcagc

SEQ ID NO: 1099 - DNA, 65 bp, Candida albicans
acccccatatatatttagcatcaatttttataaatgtatattagatccttattccactcacttat

SEQ ID NO: 1100 - DNA, 65 bp, Candida albicans
ggaaaaggtagagtaaccaaaactcgttaacagtattgtatcctattgtaagtaagaattattgt

SEQ ID NO: 1101 - DNA, 65 bp, Candida albicans
tttttatctctatatgtaaagtgtataaaaaaaagaaatacaaacctaaaaaacttatatgtaga

SEQ ID NO: 1102 - DNA, 65 bp, Candida albicans
taatgatgttagcaatgggtttatgtttatttacattctcaaaagcactaaaagcaacctataac

SEQ ID NO: 1103 - DNA, 65 bp, Candida albicans
aaatacacgtatccgtacatttatatgtatatataggtacattttacctcaatagtatagccagt

SEQ ID NO: 1104 - DNA, 65 bp, Candida albicans
tggtgtaaatgagaaatccttttgcattactactatctactcattagtatacttatatgatgacc

SEQ ID NO: 1105 - DNA, 65 bp, Candida albicans
cattatagttaacatctactctctataaaattatatcaattaaatacctacttctcttctttgtt

SEQ ID NO: 1106 - DNA, 65 bp, Candida albicans
ctcccaatgaattaaagggtcgccgaattatttgtccgcaaatttttttctattccttgcccaca

SEQ ID NO: 1107 - DNA, 65 bp, Candida albicans
agaattgtgccattgtttgttgaatatctcaatagaagcctaaatagtgaagactaaatacatac

SEQ ID NO: 1108 - DNA, 65 bp, Candida albicans
aaacaaaataaactaaaatgatcgggtttattatcaaaaaacaaaacagccttgatatgaaaagt

SEQ ID NO: 1109 - DNA, 65 bp, Candida albicans
acatctcttaacctatatatatagacactttttaaatcccttggaatgcattattcaattcttgc

SEQ ID NO: 1110 - DNA, 65 bp, Candida albicans
cctacagatgaaagacactgcgttaacagcgtgtcaattaaatttaacccacaagatcaacaaag

SEQ ID NO: 1111 - DNA, 65 bp, Candida albicans
aaaaagacaatgaaaaaaaatttcaccaaattacattcaacctatatgcacgacttaatggattc

SEQ ID NO: 1112 - DNA, 65 bp, Candida albicans
aaagtgaaaaccattgtaccagaacaatataacgccttttaacataatgcattttcttctttatt

SEQ ID NO: 1113 - DNA, 65 bp, Candida albicans
cacacgactcaaccacatataatatgtacattctttctaattctaatattacaaattatgtcaac

SEQ ID NO: 1114 - DNA, 65 bp, Candida albicans
tatatatattacactattcgtgccttgttggttgcttttggcgattggtgtttctcttttttttt

SEQ ID NO: 1115 - DNA, 65 bp, Candida albicans
acacatctatgcataaacacacacacatacttacaaacgcactactactacctttatacacccgc

SEQ ID NO: 1116 - DNA, 65 bp, Candida albicans
gaattattaacttcagaagagtttgacgaatgggtcagaccagaaaaaatgattggtccaaagga

SEQ ID NO: 1117 - DNA, 65 bp, Candida albicans
caatctacttcttctatttttatctttactatacacaaattatcaatcctatctttttaatctat

SEQ ID NO: 1118 - DNA, 65 bp, Candida albicans
caaccacaattagtagaaaacaacacgtgctagacgattttaacaaacaaaatacatctatattt

SEQ ID NO: 1119 - DNA, 65 bp, Candida albicans
aggtcctttaaatagcaagtaaatagaaattttatacatttatttattatctatacattctaagt

SEQ ID NO: 1120 - DNA, 65 bp, Candida albicans
ttggttatacaataaatatttatggaacttgtatttttttttttttcattccatcaatcaataaa

SEQ ID NO: 1121 - DNA, 65 bp, Candida albicans
ggaaattcgacaagatgtaaacgagcagatagacaagtttgaaagtgctgtattataataaataa

SEQ ID NO: 1122 - DNA, 65 bp, Candida albicans
tctacattatttatgataaaatattctaaagctttatgaattatgcattctaactatacaacttt

SEQ ID NO: 1123 - DNA, 65 bp, Candida albicans
aatgggaatctcaatcatgataaagcaatatattataaaataatacaatattcgtataacttgac

SEQ ID NO: 1124 - DNA, 65 bp, Candida albicans
taatttgttgttgttgtttaccagttgttgcttatagatgtatatatgcgttattttataattgt

SEQ ID NO: 1125 - DNA, 65 bp, Candida albicans
tttagtattaagtaaatatctctttctctctctctctctatatatatatatatatgtatctttga

SEQ ID NO: 1126 - DNA, 65 bp, Candida albicans
cgatattacgacggtttgacattggatgtccaagaatcaaaagtcatatgaataatacatactac

SEQ ID NO: 1127 - DNA, 65 bp, Candida albicans
tatgaataatgttaaattaagtttaattattattatgcaaaaactatttatatttatagttatat

SEQ ID NO: 1128 - DNA, 65 bp, Candida albicans
cttcttcctttcttcagcagcatctttgtcttgggtaaaagagcttgtaatctctggcttttctt

SEQ ID NO: 1129 - DNA, 65 bp, Candida albicans
actctttattctattattatcagtctccttatttttaatctatattattatttctctcctatatt

SEQ ID NO: 1130 - DNA, 65 bp, Candida albicans
ctcaatattgctagcagtgatgacaagaaaaatggccgtgccttgctcaagtcatctgcaatcgt

SEQ ID NO: 1131 - DNA, 65 bp, Candida albicans
tcaaaataagaatactaaaagagatcgagctatacacgtacacacctgttaacgcacaatgctta

SEQ ID NO: 1132 - DNA, 65 bp, Candida albicans
acatagattctctttttgttgtatatatatgtgtataatatttaatcagtcttaaagctcaacgc

SEQ ID NO: 1133 - DNA, 65 bp, Candida albicans
gtagatatctattatttgattcatattatttaatactaatacacaaaaaattctctcaattttct

SEQ ID NO: 1134 - DNA, 65 bp, Candida albicans
aagatggagtctgatcgtatagcctcatttgggtttgattgctttagtattattagcgatttgca

SEQ ID NO: 1135 - DNA, 65 bp, Candida albicans
acttcaattagttattcaaaaacaagaataaataaggaatttctcttattctcttattctcttat

SEQ ID NO: 1136 - DNA, 65 bp, Candida albicans
atttgtacatacatacatatctataatattatatactcattgaagcaagtgttcaacctctttat

SEQ ID NO: 1137 - DNA, 65 bp, Candida albicans
aaacaaaactatgtaaaactcaattctaccaaattgtattgttcaaaagtatactcttgaaaaat

SEQ ID NO: 1138 - DNA, 65 bp, Candida albicans
tgccaaacgcaagcttgtcattcctacaactatcaaactccctaaaaaacctagacttgcccgcc

SEQ ID NO: 1139 - DNA, 65 bp, Candida albicans
caacaatctaacaactacatggccatctttaattgaaagaagaaacaaacctgtctaaatcaaga

SEQ ID NO: 1140 - DNA, 65 bp, Candida albicans
attaattataactaccattaaaggagtaaagtaatccattttatacctgccaatatacaatttga

SEQ ID NO: 1141 - DNA, 65 bp, Candida albicans
ctaaaatacataaatgcaatttgttaaaatacttctactatttactgtatacaaggtgtagcaat

SEQ ID NO: 1142 - DNA, 65 bp, Candida albicans
acccatacatacacacacacacaccaaacaaaggtagcgtttgttcctgtagttaaatcaagaaa

SEQ ID NO: 1143 - DNA, 65 bp, Candida albicans
ttgtttactatatgcagtattttattagttaatttattacaatagtatatacttgtgcccatttt

SEQ ID NO: 1144 - DNA, 65 bp, Candida albicans
ctatatcacatttttagtacaaattatttaccaatatagatatacatatttgttttattttcacc

SEQ ID NO: 1145 - DNA, 65 bp, Candida albicans
atcaatatacatacaatacaatacgtatacatataaatatataataatagagacaattcttagta

SEQ ID NO: 1146 - DNA, 65 bp, Candida albicans
tctacttgatacgtaagtccgtaaaaaggcaaataaaaaaacaaggggggagagaatcaaacact

SEQ ID NO: 1147 - DNA, 65 bp, Candida albicans
ccgacatgtacctcttgataattgacattagatttatcaatttgagttcaacttctttagactct

SEQ ID NO: 1148 - DNA, 65 bp, Candida albicans
atatacttcattgagaatccacaaaattggtagtgactatgtatttgttctacttctgcacaatt

SEQ ID NO: 1149 - DNA, 65 bp, Candida albicans
cagatttgaaaaagatgattcccattttgataaaggtatataactagtgtacatttaatattatt

SEQ ID NO: 1150 - DNA, 65 bp, Candida albicans
cgtaacgacgtatttatttattattgatatataatgtatatatatatatttaacctacagatttt

SEQ ID NO: 1151 - DNA, 65 bp, Candida albicans
acatatctttcctattaagaaaaaccaagaaaacatggaactggcctcaaatagttctttttttt

SEQ ID NO: 1152 - DNA, 65 bp, Candida albicans
taataggatttatttttatattaatatgaggtatatttactatctataaaggaaaaaaaaatccc

SEQ ID NO: 1153 - DNA, 65 bp, Candida albicans
gcaattgaaactccaaatcttcttggtcttgttccaattctattttgtttgcattgctgtccagt

SEQ ID NO: 1154 - DNA, 65 bp, Candida albicans
tttcgagtatcatatatttaatgctatttgaaaaattatccatatatatatatctatacatccat

SEQ ID NO: 1155 - DNA, 65 bp, Candida albicans
aatgtttacataggactgattttaaatataataagaataataaattatattatgtaactatttat

SEQ ID NO: 1156 - DNA, 65 bp, Candida albicans
tatatacactctatgcgacttgtgcttgtttctatacagccctatattatctatgactttcccac

SEQ ID NO: 1157 - DNA, 65 bp, Candida albicans
ggtagcgcccaccttcatatcgaaaataactttaatattattacatgtacaacaaaactatctat

SEQ ID NO: 1158 - DNA, 65 bp, Candida albicans
tcaatacataatagacgtatatatttatcaaaactttcttgggtatcggtttaaaactaactaat

SEQ ID NO: 1159 - DNA, 65 bp, Candida albicans
gttgatatttcgttgatgatccaccctttctagtattagcatttaaatgataatcttggattaat

SEQ ID NO: 1160 - DNA, 65 bp, Candida albicans
atgtttactttaatttttatgtattctgttctttaatataaatataaaccattattttacatact

SEQ ID NO: 1161 - DNA, 65 bp, Candida albicans
gggatctattagtaaaatagtagcactattattattctaatgttacactaactttccttttcttt

SEQ ID NO: 1162 - DNA, 65 bp, Candida albicans
attcttgatgatgtgttagacttgtaattaagatccagtttaaacatataaacggtaatattaac

SEQ ID NO: 1163 - DNA, 65 bp, Candida albicans
aaaagtagtgcgaccgtttcaacttttattggcactacataatacaagtattttatattcattcg

SEQ ID NO: 1164 - DNA, 65 bp, Candida albicans
atcttaacaaaccagaatactgcctaagaaatacaaaacaaaactaagcattagcaaagccataa

SEQ ID NO: 1165 - DNA, 65 bp, Candida albicans
tttaattttacattacataaatatacattctattaacgccttggtgtgtatgttctttttcattc

SEQ ID NO: 1166 - DNA, 65 bp, Candida albicans
gtattatttcatatttacgtcaattctactttcctatcctataaactcgactaatgttagtgagc

SEQ ID NO: 1167 - DNA, 65 bp, Candida albicans
agatatgtttacatttgtttgcgattatacaatcttattacattgttcaactatacaagggagct

SEQ ID NO: 1168 - DNA, 65 bp, Candida albicans
ttatttattaatttatttatttacgtaaattttttttttggtcatttgattttaaactcttactc

SEQ ID NO: 1169 - DNA, 65 bp, Candida albicans
ataaaataatacaagatagaacctatgtaagcgtggtttaacaattatttcttttctttttgtga

SEQ ID NO: 1170 - DNA, 65 bp, Candida albicans
ggagatctatcctttaaccaatgtgccagtacctatgcaagcctttcaagttcattcctatacat

SEQ ID NO: 1171 - DNA, 65 bp, Candida albicans
aaaatttaaaaatttcttcatcatcgaaaccaaacccgtccaccaaacttacatacacacatcat

SEQ ID NO: 1172 - DNA, 65 bp, Candida albicans
gactaatcaaaactttacaattcctaataaatgaatgaacgaataacaaaagtgggaagctaagc

SEQ ID NO: 1173 - DNA, 65 bp, Candida albicans
caagcaaacaagcaactacacaaaagctacatgactatttttgtttgtttccataaattttaaga

SEQ ID NO: 1174 - DNA, 65 bp, Candida albicans
cagtttgcaattggagcaatgagcagcacaatgaaactcaccaatatctggaaaaaaccccattg

SEQ ID NO: 1175 - DNA, 65 bp, Candida albicans
caataatccatacatacaaaccctactaagtttagttgaatacataaatagctcaaatcacaaga

SEQ ID NO: 1176 - DNA, 65 bp, Candida albicans
cgacataaagtcctaaagcgttatcaaacaatggtgccttaggtttttcattcatcaaagcattg

SEQ ID NO: 1177 - DNA, 65 bp, Candida albicans
tctctatctattgtagtacatgcattacaaattgtcctagtttatttataccatccctaagtttc

SEQ ID NO: 1178 - DNA, 65 bp, Candida albicans
atatttgtatccaagacctatataactaagctttctttttcttttttgggttttcatcttcaaca

SEQ ID NO: 1179 - DNA, 65 bp, Candida albicans
cttacaaagacgcgttttgtaatagcgtgttgtgcaaaaaaaaatatctcttacaattacataat

SEQ ID NO: 1180 - DNA, 65 bp, Candida albicans
ttcacctttaatacttatgcaaatgatttattgggaaggggggggataaggggccagaggcccat

SEQ ID NO: 1181 - DNA, 65 bp, Candida albicans
cgtcaaaacaagataagataagataatcttaattacatttataatatgcctaaatagattattgt

SEQ ID NO: 1182 - DNA, 65 bp, Candida albicans
atgagctttacaaaagcacaacaagaataaaacagagaaaatgaaaaatatggtacactattcat

SEQ ID NO: 1183 - DNA, 65 bp, Candida albicans
tcttcttttaatttcgttataaaaaatatatacaagttttaaatttccactaatgaccaaacaat

SEQ ID NO: 1184 - DNA, 65 bp, Candida albicans
ttaatgcaatcattatttttgaaaaacaccaaaatccttttcacaagaaagatacacctatatat

SEQ ID NO: 1185 - DNA, 65 bp, Candida albicans
ctatcaattggaaatataatatactataaaattcaaaataaaacactacaaaatacactcgtttc

SEQ ID NO: 1186 - DNA, 65 bp, Candida albicans
tatctatatttgaaaatttagtttataagttagctaaagaaatgtaaagttaaaaactacaacac

SEQ ID NO: 1187 - DNA, 65 bp, Candida albicans
aataataataataataataatcaatgaacaactaaccattacctaacttctctgcttcctttctc

SEQ ID NO: 1188 - DNA, 65 bp, Candida albicans
aactcaacaattcaaggcactaaataagatcaaatctcgtagtcttggcacatatagcttgttta

SEQ ID NO: 1189 - DNA, 65 bp, Candida albicans
atctattgaacgctaacttcttggtgtaacttacaacgtatctacacagaacctactaaaactat

SEQ ID NO: 1190 - DNA, 65 bp, Candida albicans
ttagtttgctagcaaaggaaaagtgataaaaaaaagaagaagcaactgaaaaataccttcgcggc

SEQ ID NO: 1191 - DNA, 65 bp, Candida albicans
taaattcggcaactgagtccgaaacttacaaacaaaatcaatctctttcttaatttttttttttt

SEQ ID NO: 1192 - DNA, 65 bp, Candida albicans
atactaataatacaaacaataacaataactataacaaactattaaaaccataacccactaatcac

SEQ ID NO: 1193 - DNA, 65 bp, Candida albicans
cctataattatttacttgcttgaaccatagcctctatactcagttttaatgttagtaaaaaaaaa

SEQ ID NO: 1194 - DNA, 65 bp, Candida albicans
ttcaacacattcgaattgaatcacaacagatcaaatcaaatcaaatcaaatacaggttaaattat

SEQ ID NO: 1195 - DNA, 65 bp, Candida albicans
aaaagtacagctcgataaaggttaaaaatcagccaactggtacaagtctcaaaaaactttattat

SEQ ID NO: 1196 - DNA, 65 bp, Candida albicans
gaaaagaacttgaatttcagtataaccatgtataacttaaccatgatgtaaataacaaatactac

SEQ ID NO: 1197 - DNA, 65 bp, Candida albicans
tgcactcttctgattattttatctgggagaaccaagcaaaccttaatataaatactcaataatat

SEQ ID NO: 1198 - DNA, 65 bp, Candida albicans
aaaacactagcagtggttggaggcgctggtatcagtacatgggaaatcttgtattaattatctat

SEQ ID NO: 1199 - DNA, 65 bp, Candida albicans
tacacatgttgtgatagattttacatttataaaaaactattaaataaataaattgtcttgctgtc

SEQ ID NO: 1200 - DNA, 65 bp, Candida albicans
aaaacatcttgaaatactacattttttgagaatgaacaagtacatttacatgccacaaatcacac

SEQ ID NO: 1201 - DNA, 65 bp, Candida albicans
tgaacaatcattactaatactaatgtttatatattttttttgtttttgttctataaaaacttaat

SEQ ID NO: 1202 - DNA, 65 bp, Candida albicans
tttgggtaagctgttcttgttatgttggactatatacaaattttatacattagttgaacacatga

SEQ ID NO: 1203 - DNA, 65 bp, Candida albicans
ttatgttttaattccagtgttaactttaaaaccgattctatagtattcaaatatagttaatcttt

SEQ ID NO: 1204 - DNA, 65 bp, Candida albicans
ttttagtttccctcttctttcttctacatatattattatacagtaatacactaatttattttaaa

SEQ ID NO: 1205 - DNA, 65 bp, Candida albicans
taaaatatgctaaacaggtggtaaaaacaaaaataaaaaatgaaaaacataaagaacacaccaat

SEQ ID NO: 1206 - DNA, 65 bp, Candida albicans
acagtttgattttttttccgttttttcttttcgatgtcgatattttattgaggaggcgacaagat

SEQ ID NO: 1207 - DNA, 65 bp, Candida albicans
atatttaattcaatttaaattttttgctctcgagataaaaacaaaaactacaacttgacggatag

SEQ ID NO: 1208 - DNA, 65 bp, Candida albicans
tattaatattattacataaattatacaatgttcaaatctccgcaatctgtatgttttatatgata

SEQ ID NO: 1209 - DNA, 65 bp, Candida albicans
aaacaaacagacaaagaaagaaacaaactataatttacaaaccataaacactaaactcattttaa

SEQ ID NO: 1210 - DNA, 65 bp, Candida albicans
ctatctaaaattttttagaaatacttatacaaatgtagaactatacaagccgttgtttttatttt

SEQ ID NO: 1211 - DNA, 65 bp, Candida albicans
acttttcttaattttttcgtaaagatccttgacccaaaaaatgctacacactacccagacatatc

SEQ ID NO: 1212 - DNA, 65 bp, Candida albicans
cccccctcatgactacttaaacagcgtcgttgatctatatttcaaaaccacataaacatacttat

SEQ ID NO: 1213 - DNA, 65 bp, Candida albicans
attattattgttattattactcgtcgtatttttcatttcgataaatgttgtaattcttaatttag

SEQ ID NO: 1214 - DNA, 65 bp, Candida albicans
aaaataaacacccagtataatagcttgtatatattgttatttttttctcttgacattccgtttat

SEQ ID NO: 1215 - DNA, 65 bp, Candida albicans
tatgtatatatgtatatcgagctatgtcttatttattaagtctttcagtttctatctgtacacgt

SEQ ID NO: 1216 - DNA, 65 bp, Candida albicans
ggcaaaaaaaaaattattcaaagtaatctctttctatacatgataaatacaccaacaaaaactac

SEQ ID NO: 1217 - DNA, 65 bp, Candida albicans
ttaggtttaccaaaaaataaaaaattttatctattatttaatcactactactactactactacta

SEQ ID NO: 1218 - DNA, 65 bp, Candida albicans
attaatattcaagatacatataacacttatatattatataacgtaactatattatcgactatcaa

SEQ ID NO: 1219 - DNA, 65 bp, Candida albicans
agttggttgcaagaaaataatctattacagtataattcactaattagattgcctatttgattact

SEQ ID NO: 1220 - DNA, 65 bp, Candida albicans
tttttttggttaaaatatttaaggtcgtgttattgcgtacaataactataaactactattttctt

SEQ ID NO: 1221 - DNA, 65 bp, Candida albicans
ttgttttactattttactttttattactttctatagaccttatttatcaaactgacatccttcat

SEQ ID NO: 1222 - DNA, 65 bp, Candida albicans
tctattttccgctttacaagctatttatgatctcaattaaaaggaaaccattatctactaaatca

SEQ ID NO: 1223 - DNA, 65 bp, Candida albicans
tctttcgccttcgttgcgtgatagttgtatagaaggatttattaatttataatatataactgtct

SEQ ID NO: 1224 - DNA, 65 bp, Candida albicans
attacatataaacaaatgaagcattgaaaagatgtaatatagtcctatatgaatgtatatatata

SEQ ID NO: 1225 - DNA, 65 bp, Candida albicans
ataagacagtagttaaattatacaaaatgtatgaataaaatatattcaattttttcggtaggcac

SEQ ID NO: 1226 - DNA, 65 bp, Candida albicans
tagtcatgttgcacatcctaatttcgaacaaacaatattataggttctttcccattttcttatac

SEQ ID NO: 1227 - DNA, 65 bp, Candida albicans
aaataactcgttacctagtcagtcctctagtagcaaatcaaagctacgccaactcgctaaatttc

SEQ ID NO: 1228 - DNA, 65 bp, Candida albicans
agaaaaaagatagttttgtaaaactgtttagtcggaggaggaggagcagcagcaggaggtataat

SEQ ID NO: 1229 - DNA, 65 bp, Candida albicans
gcgaattaattcttcttatatactaaacctttaaaaatatcaaacgagttgccatctggttgtaa

SEQ ID NO: 1230 - DNA, 65 bp, Candida albicans
actatttgggctgattaaactgattattactattattattattattattattattaaattgttgt

SEQ ID NO: 1231 - DNA, 65 bp, Candida albicans
gagaatacgttaaagatctataccataaataacaaataactatacacacacatatatatagaaac

SEQ ID NO: 1232 - DNA, 65 bp, Candida albicans
cttctcctttctatacatttaacatgaaaacaaaaagctatacaacaaacttacaattgtccttt

SEQ ID NO: 1233 - DNA, 65 bp, Candida albicans
tttatgaaatatcagtgtcaaactactaaacttcctatatacatccgtcgtataatacattgcca

SEQ ID NO: 1234 - DNA, 65 bp, Candida albicans
atagaatgtattataaagttatatcaaatcgaaatgctgtatgcgtgtaaatatatttattcaaa

SEQ ID NO: 1235 - DNA, 65 bp, Candida albicans
ctaaggagaagtcatgagtcccaacctgttcaaatttgttactcagtttcttaccaagattgttt

SEQ ID NO: 1236 - DNA, 65 bp, Candida albicans
ttaattttctttttattgtttaacaactatctctctatatacctagatataacaatatatgtatc

SEQ ID NO: 1237 - DNA, 65 bp, Candida albicans
tacacagatatattcagtcatttgaagaggttgttacatgtttccccttccccccccaccttgtt

SEQ ID NO: 1238 - DNA, 65 bp, Candida albicans
cgagcggataacaaaatccaatgtcaataattactatagataaacatacactattaacgtctcca

SEQ ID NO: 1239 - DNA, 65 bp, Candida albicans
gctatagagtcagccctgcaaatgatacttctactttcatttagtctagaacaattaaattattt

SEQ ID NO: 1240 - DNA, 65 bp, Candida albicans
caaatgttggatcatgcaaagactcggttatattgtgaattggttacctttccatgtatatccaa

SEQ ID NO: 1241 - DNA, 65 bp, Candida albicans
tctactgatagttgaagaaccatcgtaattatttaaaaatgtgcattaataataccagttgctac

SEQ ID NO: 1242 - DNA, 65 bp, Candida albicans
tgaaacaaaattccaaaatattgaatatattaatgaatttacataaacgactattgttattatta

SEQ ID NO: 1243 - DNA, 65 bp, Candida albicans
attccatagacacaacaaagatccataatttgggatggtctccgaaaatatctcttgttcaaggt

SEQ ID NO: 1244 - DNA, 65 bp, Candida albicans
accacttttacgtatatcaaactatacaatgcattatctatgtaacttacttttgtagatcttgg

SEQ ID NO: 1245 - DNA, 65 bp, Candida albicans
taattaaagatttattagaagactgaagatatatagaagagcatgacaatataagacatgtaaat

SEQ ID NO: 1246 - DNA, 65 bp, Candida albicans
cggaaagctatagtgaagtcatatatatattattggcaaacaccaatactaaagtgagacaaaat

SEQ ID NO: 1247 - DNA, 65 bp, Candida albicans
gttaggtaaaataaaacacgacatcactacataattcatatctacctacgcatttatagatatat

SEQ ID NO: 1248 - DNA, 65 bp, Candida albicans
ttgcaccgcattttaattatatgagtttgattacaagtctatgaaccatcctatatccacattct

SEQ ID NO: 1249 - DNA, 65 bp, Candida albicans
cttgtctatcgctgtaaccattcaagcttgtaattttctattaaattcattttatttctgtcgct

SEQ ID NO: 1250 - DNA, 65 bp, Candida albicans
atctataaatgttttaatgagaattgatgagagttaaaacaacagagtatccttaacaatattat

SEQ ID NO: 1251 - DNA, 65 bp, Candida albicans
cgggatatattctaacactctatacataaacccctttttaattcctatattttgagaaacccaat

SEQ ID NO: 1252 - DNA, 65 bp, Candida albicans
tatacaagcactatcctataagccataaggtaataagtaccaaaaaaataatacactaattctat

SEQ ID NO: 1253 - DNA, 65 bp, Candida albicans
gtgtacataagtgtatagagaaatgctagtgtacaaaaaaaggaatattgccagaccatttgatt

SEQ ID NO: 1254 - DNA, 65 bp, Candida albicans
acatcaacgatgtatactttgaaacaactagtattactatgattattaaacaatcttgcttctgt

SEQ ID NO: 1255 - DNA, 65 bp, Candida albicans
attatgataacattataaggcattgagaaatccggtgtaggtaatgtcaacaataaactagttgt

SEQ ID NO: 1256 - DNA, 65 bp, Candida albicans
aatattatagatagatgtcgttgattcgatgtaataataactgttggatttctatatttattttt

SEQ ID NO: 1257 - DNA, 65 bp, Candida albicans
ttatagtgcactatcaagggactatttagcatttctagaaaatgttcaatttgtggaaacaaaat

SEQ ID NO: 1258 - DNA, 65 bp, Candida albicans
actaatactattaggtccacttattgtcttccatacatacaaaaaccacaaatcttatcatttca

SEQ ID NO: 1259 - DNA, 65 bp, Candida albicans
gatttatgagttgaacaatgaacaactgggaaatttttctggactgcgcatttttcgtctttttt

SEQ ID NO: 1260 - DNA, 65 bp, Candida albicans
tactacaaaaacgactgatagtatatagagaaaaactctttatatatatatgttatatatttagt

SEQ ID NO: 1261 - DNA, 65 bp, Candida albicans
tatccaagattcactttgtaaatatttatatatatatatatagatggatgtatattattttaaac

SEQ ID NO: 1262 - DNA, 65 bp, Candida albicans
tgatgtaaatcaaaatgtatcaaacatattgtcatcaccattggtaaattctttaatttcacact

SEQ ID NO: 1263 - DNA, 65 bp, Candida albicans
acaatctttctatatatctttacaaaaaatacttttagcccttttcgtgattatgtgtcgtttgc

SEQ ID NO: 1264 - DNA, 65 bp, Candida albicans
tactactaattatacccaatttcaaaaaaaaataaaagtaagtaccaaaggatttattattcaat

SEQ ID NO: 1265 - DNA, 65 bp, Candida albicans
aagtgaggacattgaaatgaaagaataaaagttatgtatacttaatatatatatattcttgtttg

SEQ ID NO: 1266 - DNA, 65 bp, Candida albicans
tgacatactattataatgttttaataaaatggagtataacatgcactataaacatctaattctta

SEQ ID NO: 1267 - DNA, 65 bp, Candida albicans
tttgcatagacgataaggtgtatatgtattatagaatataatctagattaattttattactatat

SEQ ID NO: 1268 - DNA, 65 bp, Candida albicans
acattaacaaatgacagacgcaactggacgaaattccatcttaaatgtataggtagtaatgccaa

SEQ ID NO: 1269 - DNA, 65 bp, Candida albicans
tttagtgttattagtgggtggtgttatgttgctaatgatatgcttactaatggatattagtcggg

SEQ ID NO: 1270 - DNA, 65 bp, Candida albicans
tccaatatcaatagaattacaggattttattcacaatttctttttctttctctctcctttcatat

SEQ ID NO: 1271 - DNA, 65 bp, Candida albicans
tttctaattctacaatataaaccccttcaggtgtcttgatattgagattctcatatatattttac

SEQ ID NO: 1272 - DNA, 65 bp, Candida albicans
ccaccccaaaatacaagaaccaaagtaattgactgtaacaaatgctgggacgaaagctattttcc

SEQ ID NO: 1273 - DNA, 65 bp, Candida albicans
tctttgcatagaaattaataaatacacatataaaatacaaacctgcaaaaagcaaagacaaagca

SEQ ID NO: 1274 - DNA, 65 bp, Candida albicans
aaggatatagaagaatttatagttagcatttatatatttatataaacaacatatttgtgacaaat

SEQ ID NO: 1275 - DNA, 65 bp, Candida albicans
tatgtacttggggattactagtggttatttgagatacatatacatttagctacctaacacgctac

SEQ ID NO: 1276 - DNA, 65 bp, Candida albicans
aaagtcaatagagagtgagtaatacacatatatatattgattaatagcctttctctgtacatgca

SEQ ID NO: 1277 - DNA, 65 bp, Candida albicans
attcacatctattaaacaccatacacatagaataaactaccagttttaatgagcatgaggatctt

SEQ ID NO: 1278 - DNA, 65 bp, Candida albicans
tcgttgttgttaatgtatatatgtttgtttattgacaaaatgaaactatgaaaacagtgtactct

SEQ ID NO: 1279 - DNA, 65 bp, Candida albicans
acttataatacatgtgaatattgatttattagaagtgattctatttaaaactttttgtactcatt

SEQ ID NO: 1280 - DNA, 65 bp, Candida albicans
agacataaatattaaatgctaaaagtgccaatcatttcagaatctaagtatcttctaattttgat

SEQ ID NO: 1281 - DNA, 65 bp, Candida albicans
attcgtattaactaatcgaacacatgtatacttctaattccccgtgtattgttttatatggctct

SEQ ID NO: 1282 - DNA, 65 bp, Candida albicans
tctatacatttatactctctttctagttgcaaatatagattgcataaattaatggctgcgtttcc

SEQ ID NO: 1283 - DNA, 65 bp, Candida albicans
gcaaaaatggtgataatacaatattagtgttatacaaatcatacacaaagtccgtcaaagttgat

SEQ ID NO: 1284 - DNA, 65 bp, Candida albicans
acgttttgttttatttaattttatttcattctttactttacaaaataataaaaaagctagtaaat

SEQ ID NO: 1285 - DNA, 65 bp, Candida albicans
taatatacccgttattaatttaattgtagtattaatatacaaatttttatacatgcgcagctcta

SEQ ID NO: 1286 - DNA, 65 bp, Candida albicans
cattgtaactttaacaacttatattaaactactatacatgcaaatatgtcttacaatcactctat

SEQ ID NO: 1287 - DNA, 65 bp, Candida albicans
ttaaattgttctaaaagttctttccaactaatcatctctaatacaactttcacactatattacaa

SEQ ID NO: 1288 - DNA, 65 bp, Candida albicans
tcttttgtttttagagattcatcaccatattcccttattttggaccttgttgcatcaataaagca

SEQ ID NO: 1289 - DNA, 65 bp, Candida albicans
acatatactacttaattgatcatatcattatatatacaaataatagtttgaattgcatttactac

SEQ ID NO: 1290 - DNA, 65 bp, Candida albicans
aatacacttggcctacaaaaattatagacctaattataagtgaaaatttgtctctctatgcttcc

SEQ ID NO: 1291 - DNA, 65 bp, Candida albicans
gtttcttaatttctttcttttcatttattcaactaatatacatactattgcttggttcctataat

SEQ ID NO: 1292 - DNA, 65 bp, Candida albicans
ttgtagagtttaaaagaagtgatagtttctcataaatattatacatatatacttatagatctact

SEQ ID NO: 1293 - DNA, 65 bp, Candida albicans
aaaaatatatcttgtattacactctaaaaatcctatacaaaaggttcttaaactttttagttgat

SEQ ID NO: 1294 - DNA, 65 bp, Candida albicans
ataattctataaatagagcatgaaaaaacaaataccctcaagcaaaaaaaaaatacactgggtaa

SEQ ID NO: 1295 - DNA, 65 bp, Candida albicans
ctttcctacgagaaaactcgaataaatcaaatcatgtattatctgctaactttataacatataaa

SEQ ID NO: 1296 - DNA, 65 bp, Candida albicans
tgaaagggaaaggggaaatacccattagtattagtaatatgattaaagcaaatacttctattctt

SEQ ID NO: 1297 - DNA, 65 bp, Candida albicans
agatatcttaaacacttacacatatacatatggcttgtgttgaaatcaatttttacgaaattcat

SEQ ID NO: 1298 - DNA, 65 bp, Candida albicans
aattcatatcatcattgcatgatgtgcaatgtcaaaccataaatagcatacagttttaaaaacaa

SEQ ID NO: 1299 - DNA, 65 bp, Candida albicans
attaatgtttttagtagtagtagtagtagtggtggtggtggtggtggtggtggttatggttatgg

SEQ ID NO: 1300 - DNA, 65 bp, Candida albicans
ttcttcttcttcttcgttcatggtaaaatataatctaacagataaagtaaaacaaacaagcttct

SEQ ID NO: 1301 - DNA, 65 bp, Candida albicans
ccccttccactcccactccacttcttaaatgggtattattggacaaaatcccccgaactaatgtc

SEQ ID NO: 1302 - DNA, 65 bp, Candida albicans
taaattatctcttcttatttacatttatttaattcatctattaatcgagaacctctaaatatcta

SEQ ID NO: 1303 - DNA, 65 bp, Candida albicans
ccactgatatttcatcatcttttcctttcacacactcacaaagagacaccttctccactttgctt

SEQ ID NO: 1304 - DNA, 65 bp, Candida albicans
tatattatattatattctctatgtatatagtcaacgtttctaaattttctaaatttatttatcat

SEQ ID NO: 1305 - DNA, 65 bp, Candida albicans
ggattgctcatggtgaaaaaaaaagttgtgtattttttaaagttgtgtatttgtattttttcgca

SEQ ID NO: 1306 - DNA, 65 bp, Candida albicans
ccatgttttctctattattaaaaatacaaaactataaaaaaaatacctattagatacagaagttt

SEQ ID NO: 1307 - DNA, 65 bp, Candida albicans
tttagaggaaaaaaattctacaacttaattgaagtaacaaattcaagtctcgtatactaataact

SEQ ID NO: 1308 - DNA, 65 bp, Candida albicans
atacaactctagaataatatacacaatacacaattatctgtttggttggatactctgtttcttgc

SEQ ID NO: 1309 - DNA, 65 bp, Candida albicans
ctacagctagtgtataaaatatttatatctatgttaatgaaaatacaaaatcatatatgtaaacc

SEQ ID NO: 1310 - DNA, 65 bp, Candida albicans
gatttttgagtgtcatcgctttagctgctggtattgccttactttagtttatatattgattctat

SEQ ID NO: 1311 - DNA, 65 bp, Candida albicans
ctactataagataaaagataaaaaatacaattaaaccaataatcaatctatacatccttcctatt

SEQ ID NO: 1312 - DNA, 65 bp, Candida albicans
ttgtcatgcatactctccagtagcgatagtctcaaaacttagatcttatattatacaatatctat

SEQ ID NO: 1313 - DNA, 65 bp, Candida albicans
tgtatacatgttaatctattgtgtgtaaatgtgtatgagtgtgcaaaaaaccataaaaaaggaaa

SEQ ID NO: 1314 - DNA, 65 bp, Candida albicans
tgccattcatatgagtaaacacggctgttccatcaattaattaaaatatatactatctacggtaa

SEQ ID NO: 1315 - DNA, 65 bp, Candida albicans
tctgtttaatagacatgaagaagattttaaagtccaccgtgtctgtacacgtctttccccttaat

SEQ ID NO: 1316 - DNA, 65 bp, Candida albicans
ttatatattcgaatatataaatgcaataactaatctacaaatgtatgcttggtggtttcccggtt

SEQ ID NO: 1317 - DNA, 65 bp, Candida albicans
tttttgttgtcgctaaaaatttgtaactacacactctataaaccttggagagcctcttcttcttc

SEQ ID NO: 1318 - DNA, 65 bp, Candida albicans
tacacccacccttacacaatacttgtcaatttcaagaacaatatccatattgctatacaaactac

SEQ ID NO: 1319 - DNA, 65 bp, Candida albicans
catattaataaagattacatttaaattagctacaaaaaatcgaattatacatctatatgtgcgta

SEQ ID NO: 1320 - DNA, 65 bp, Candida albicans
agaaatatcatatatgctcattgtttgtcattcaacatctatcttcataaaccacatttgactaa

SEQ ID NO: 1321 - DNA, 65 bp, Candida albicans
agtaataacaattgtcaattaatattaatctccaattattcacaccaacaacgatatcatcaaat

SEQ ID NO: 1322 - DNA, 65 bp, Candida albicans
tgttttgttttgatttgcttcgattaatgtaatagaaaaaatatacacacatcttataactatat

SEQ ID NO: 1323 - DNA, 65 bp, Candida albicans
tataatttgttatatgtatatttgttcttttcgaggaggtttatctataaacttagttcttttct

SEQ ID NO: 1324 - DNA, 65 bp, Candida albicans
aagttgattattttttaaaaaattactaaccaaatctatatacccagtttccaacaactcatagt

SEQ ID NO: 1325 - DNA, 65 bp, Candida albicans
catcatcatcagttattattggaaagtctcttattcacatatacacatacatacacataatgcat

SEQ ID NO: 1326 - DNA, 65 bp, Candida albicans
tgccagagttgtatcgacttttcttgatttcttttctctctctatgctttgcttattctaattgt

SEQ ID NO: 1327 - DNA, 65 bp, Candida albicans
aattggtgagacccacaaagaagagttctataggtatgtttataataaaatcactatacaaacta

SEQ ID NO: 1328 - DNA, 65 bp, Candida albicans
tgtagttttataaacatttttataaaggttaataatacacatgctacacaccaactaaagatata

SEQ ID NO: 1329 - DNA, 65 bp, Candida albicans
taaataatataaatattaattctataaatccttctttattttcttttgtattccatttatgtgat

SEQ ID NO: 1330 - DNA, 65 bp, Candida albicans
attcttttcccagaaaccgagaaagaatcaaactctatttttattggtcatgaagcatatgcaat

SEQ ID NO: 1331 - DNA, 65 bp, Candida albicans
tttactttgccacactgatctcctatatacaagtttactctgacaatatttgggtaaatacgtct

SEQ ID NO: 1332 - DNA, 65 bp, Candida albicans
aaaaaccctcatatatatatgtatatatatttattcataatctttctctctaaaaaaacataaat

SEQ ID NO: 1333 - DNA, 65 bp, Candida albicans
tatctactttaaacacacataatcaacattctaacaacataactttaatactactactaacctct

SEQ ID NO: 1334 - DNA, 65 bp, Candida albicans
aattataatcaaatacattaccagattttctacactttgatataaactgctattcacatttccga

SEQ ID NO: 1335 - DNA, 65 bp, Candida albicans
ataaaaattaatttctgaaatacacacagatatatatatttatagaagctctaatattatacaaa

SEQ ID NO: 1336 - DNA, 65 bp, Candida albicans
tagtttgtttttaatgaaaaataaaacattagaattataacctatacatatttatttaatatggt

SEQ ID NO: 1337 - DNA, 65 bp, Candida albicans
ataaaactcttttgttaggcttttttgggggtggggaaagtcaactgtagaaactagaaggtttc

SEQ ID NO: 1338 - DNA, 65 bp, Candida albicans
gaaaaccaaatataagttaaagtactatattactaatttttaaacaccaaatctataataagttg

SEQ ID NO: 1339 - DNA, 65 bp, Candida albicans
atttatttctgcttaggaaaaattgtatacaattgtattgtgtgaaaaaatgaaaaacagcttgt

SEQ ID NO: 1340 - DNA, 65 bp, Candida albicans
caccaaattttcataatgacaacatatatctgaatattgagactgtgtagtcaagttcaagatgc

SEQ ID NO: 1341 - DNA, 65 bp, Candida albicans
gtagggtttttcagtaggaattcttgtatatatacatgattatttatttttttggagagggaaat

SEQ ID NO: 1342 - DNA, 65 bp, Candida albicans
gtttttgctttgtctcattctagtatatatgaatatatgtacatattataaacataaaacgtagc

SEQ ID NO: 1343 - DNA, 65 bp, Candida albicans
taaattctttaaatattattatttatacaatagtatagaaacacttatagaagaatatacttgct

SEQ ID NO: 1344 - DNA, 65 bp, Candida albicans
gtgtatctattatcattttttggtgtaaatacatgtatatatacaagaatggtattccacttcat

SEQ ID NO: 1345 - DNA, 65 bp, Candida albicans
aattttataactcgattaatttgtattatttcatactttatacacttgcattatatacacttatt

SEQ ID NO: 1346 - DNA, 65 bp, Candida albicans
aagtttgtgtttattttgcaacattttctctttttttgaaaacatgcacgactacttaaactaac

SEQ ID NO: 1347 - DNA, 65 bp, Candida albicans
gcaacatcgtaatataaaaatatcactcccaggaatgaaatgactgtttgtgggtctgcaatctc

SEQ ID NO: 1348 - DNA, 65 bp, Candida albicans
aatacaatttaaagctctggaaaaagttaatcatgacattaaacaataaattacatactatacac

SEQ ID NO: 1349 - DNA, 65 bp, Candida albicans
gtattgtaataacagtgtacaatgaaatgtcaaacttataattcaaatactataagtataccttc

SEQ ID NO: 1350 - DNA, 65 bp, Candida albicans
tttcagtgtgcccacggaaggccttctatagttccaatagcaaaccttatgtaaatatattcaac

SEQ ID NO: 1351 - DNA, 65 bp, Candida albicans
gctatatcagtataactctttcttttcaattcacacacatacacacatcaaatctgtctttctaa

SEQ ID NO: 1352 - DNA, 65 bp, Candida albicans
agatagattcaagaaacttgccagtggcgagttaaaacacaagttgtagtattaatatatatgca

SEQ ID NO: 1353 - DNA, 65 bp, Candida albicans
ttaattttaatttcaataatatacaaaaatagcggtcagacagtcatagtattgcaaactttctc

SEQ ID NO: 1354 - DNA, 65 bp, Candida albicans
aataaatatcactatgattgttgaagggtatatagaacaatcttaatagaatgtatacacgaggg

SEQ ID NO: 1355 - DNA, 65 bp, Candida albicans
ctagtatatcttttgtaaatgcataaataatactctttgatgtgtaaaagcaaataatttatctt

SEQ ID NO: 1356 - DNA, 65 bp, Candida albicans
tagtctatttttagcgtatgaaaataaggtataattcagataattgactttctctttagttgtat

SEQ ID NO: 1357 - DNA, 65 bp, Candida albicans
cgagatatagacttctattgacaaaacttgtaatttatttatactacagataatcttttataaca

SEQ ID NO: 1358 - DNA, 65 bp, Candida albicans
tgttaaaaatcttatattttattatcatttcaatctatacattctgtaacaatatttattcatca

SEQ ID NO: 1359 - DNA, 65 bp, Candida albicans
gctcgacttttatacacacaaaaaaatttaccgcaatacatatacttgctttattctacacgctt

SEQ ID NO: 1360 - DNA, 65 bp, Candida albicans
agcataatatatagtaagctaatgaaaccaatttttcttttttgcaaatggcgttcataaataca

SEQ ID NO: 1361 - DNA, 65 bp, Candida albicans
tgtttggaaacgagataggatgtcccgttacatagagtatatatatatataaacctatttatatc

SEQ ID NO: 1362 - DNA, 65 bp, Candida albicans
aatatatattaatttatattaactaactataaccaaaaaaaaagtgtatatatacaacctcttct

SEQ ID NO: 1363 - DNA, 65 bp, Candida albicans
atggtcaattaattttgaaaataactcagattatcttattctatctaccgaatataaaagcattt

SEQ ID NO: 1364 - DNA, 65 bp, Candida albicans
aatccgattaatgcatgtacagagaaaggctattaatcaatatatatatgtgtattactcactct

SEQ ID NO: 1365 - DNA, 65 bp, Candida albicans
ttagaattattggaaatgatgaatataagtatacgtcaatgttgatggcaaagttagctttaacc

SEQ ID NO: 1366 - DNA, 65 bp, Candida albicans
tctagaacactattaaatttttaataatacataacacctattaatcttgatttaaaattttgcag

SEQ ID NO: 1367 - DNA, 65 bp, Candida albicans
ttggtttcttcttcaattctattaatacataccacccctatttatttatttatttatttatttag

SEQ ID NO: 1368 - DNA, 65 bp, Candida albicans
tgaaacgaaaaccatacattatattatgatcacaactatttacattaatctaatcttaacctccc

SEQ ID NO: 1369 - DNA, 65 bp, Candida albicans
tcaattggtatataatatattactgctactcgtaaatctataatcacaaagtactactccttcta

SEQ ID NO: 1370 - DNA, 65 bp, Candida albicans
ctgtcttccatcctctcctctcctctcttctcctatccattaattaatcatatcaatattacttt

SEQ ID NO: 1371 - DNA, 65 bp, Candida albicans
gcattattttattttattttattttattataataattatgaatttatatctctatggacaactct

SEQ ID NO: 1372 - DNA, 65 bp, Candida albicans
aaacctactatctatctatctctgtctatctatttgtctgtctatttacttgtatcattaatcgt

SEQ ID NO: 1373 - DNA, 65 bp, Candida albicans
acacatgttgttaaactatctacttttcactgaagtgaaacatgtcattgtagctggctgaatca

SEQ ID NO: 1374 - DNA, 65 bp, Candida albicans
gttaccaaatctatacaacttgtctctatttattttcatttttcatcaaactccaatatcttgat

SEQ ID NO: 1375 - DNA, 65 bp, Candida albicans
aatattaattgactaaatactttatacacataatacgcagatctatagaaataataataatcaaa

SEQ ID NO: 1376 - DNA, 65 bp, Candida albicans
gacaactccaatctaagcaatttttatcgtactgtactactctgtttaataaactatacaaatat

SEQ ID NO: 1377 - DNA, 65 bp, Candida albicans
gcaaaatgtgccgtatgatattgaaagtgtattaagtcaatttatataaaaacaatatttagatt

SEQ ID NO: 1378 - DNA, 65 bp, Candida albicans
ctttctttgtttggttccatgaaaatttcttttcttgatttcttgttttttttggttttctttcc

SEQ ID NO: 1379 - DNA, 65 bp, Candida albicans
caaaaagacatatttttttgtccatattacacgactatataaataaattaagttaataaattaag

SEQ ID NO: 1380 - DNA, 65 bp, Candida albicans
aaacaattgaaaacaagaaagtataaaatttcttcatttattttgcttaccctctaccttggtaa

SEQ ID NO: 1381 - DNA, 65 bp, Candida albicans
atattgcttaatatggacaaaaagtggacatataataattttcaattttcttcgttattcccctt

SEQ ID NO: 1382 - DNA, 65 bp, Candida albicans
tatataaacttatgtatagatagatcaaaatagatattaccttttttagttattacttttctgtg

SEQ ID NO: 1383 - DNA, 65 bp, Candida albicans
atttgacacactccacacagactctcaaaactaataaaaacacacacagacatcatacactttca

SEQ ID NO: 1384 - DNA, 65 bp, Candida albicans
ttatacttacatacatatgtattttgtctttatgtatatacacatgcatctatagaaaaaagtat

SEQ ID NO: 1385 - DNA, 65 bp, Candida albicans
accaagtggtgaaggaagtgtacatttaattatattgcatatattgacttgttgaactgaatttc

SEQ ID NO: 1386 - DNA, 65 bp, Candida albicans
ggaatcgaattttttgtgtatttatttatttcaccatgtcgctatttatacatcaactctattct

SEQ ID NO: 1387 - DNA, 65 bp, Candida albicans
tataatatatctaaatctctgttgttagttagttatttatatcaaataattataccgttgttagt

SEQ ID NO: 1388 - DNA, 65 bp, Candida albicans
actcatggtctacttcagcacttggtaagaaaagttcactcaatattggccaaacatactcttgt

SEQ ID NO: 1389 - DNA, 65 bp, Candida albicans
taatgaactgtttttaatagaatgtacatagaaagtatatagatatatttatatcctggatggga

SEQ ID NO: 1390 - DNA, 65 bp, Candida albicans
aagaactactacttggttcataaaatagatggcgtgaattacaaacttacatacatgtatacata

SEQ ID NO: 1391 - DNA, 65 bp, Candida albicans
ttatttatgttgatgattattgttttgaattctgtataagtacgtatagtttcatgtatacaacc

SEQ ID NO: 1392 - DNA, 65 bp, Candida albicans
tcagaaaaacttcaacactaaagaaaaagtgtgcaatatccaacatctttcaagttatgtattat

SEQ ID NO: 1393 - DNA, 65 bp, Candida albicans
ctggaacataactaagataagcatctattaataaaaaagattctatacacttgtctagtttagtt

SEQ ID NO: 1394 - DNA, 65 bp, Candida albicans
aattctaaataagattaaataattaataaaatgctttaccggaatctaacttcttaattaattaa

SEQ ID NO: 1395 - DNA, 65 bp, Candida albicans
agaagacaaaaaagtattgtgggaacaagtacgactggatgtattccaacgagctggtttgtagt

SEQ ID NO: 1396 - DNA, 65 bp, Candida albicans
aaactaatcgctaaaccttatatttctatttgaaattacaaaaatacttcagcgtttatttcaac

SEQ ID NO: 1397 - DNA, 65 bp, Candida albicans
tagaaggaaatccatgaatatcattggttaattactaatacttttcttatattactaattactta

SEQ ID NO: 1398 - DNA, 65 bp, Candida albicans
tttgtaataaaagtatctgtatgtacaaaggagtaagaaaactagatcatcctatcttgaatcac

SEQ ID NO: 1399 - DNA, 65 bp, Candida albicans
atttactgacaattaagacgagcatcaccttggaacattcgaagatggaggtggaggcagaggtg

SEQ ID NO: 1400 - DNA, 65 bp, Candida albicans
attgtatattggttttgaattttacatgtttcattttgttaattttatagcttattgattcacta

SEQ ID NO: 1401 - DNA, 65 bp, Candida albicans
tactatcaatagtctgattaactcaatatgctgtgtatttacaataaaaaatgaattctatgcct

SEQ ID NO: 1402 - DNA, 65 bp, Candida albicans
atatattgtaagtttataaaacatactattaaaagtatcaacttttcaattccaatttttttctc

SEQ ID NO: 1403 - DNA, 65 bp, Candida albicans
atacatgtagcctatattctactctatttgattatatatattcatgtatttatatacagaccatt

SEQ ID NO: 1404 - DNA, 65 bp, Candida albicans
tgtatattcaaggtatgcttattagtctttagtgagtagtttttgatatgtacaagataaacaaa

SEQ ID NO: 1405 - DNA, 65 bp, Candida albicans
ggattgaatcggttatacaatttacatgaaagaaacaaagcaaagcaaacattagcatgttttct

SEQ ID NO: 1406 - DNA, 65 bp, Candida albicans
tatacgacgtaaaacctctagctttgcatcttcgaaaattttctaaaaaacagtgacactcctct

SEQ ID NO: 1407 - DNA, 65 bp, Candida albicans
taaaatttgatcaaaaatgtattaatgttcaacaaaaatataaacataaaaaatataaaactcaa

SEQ ID NO: 1408 - DNA, 65 bp, Candida albicans
gtaatcctagattattctcttctattcctttcaagtacacaatacaagaagataacgaaaagtgt

SEQ ID NO: 1409 - DNA, 65 bp, Candida albicans
catagataatgaatttgtttataataactcttattctatgaacacctatcacacaccaagataaa

SEQ ID NO: 1410 - DNA, 65 bp, Candida albicans
tataaatacagcaatgctttagtaaacttctcacagtggaattagactaggcaacctcagctcat

SEQ ID NO: 1411 - DNA, 65 bp, Candida albicans
acttgattgaacaaagaaaaaagagggaaatcgaagtttgtacatatatctataataaatatatt

SEQ ID NO: 1412 - DNA, 65 bp, Candida albicans
tacaaacaaaacgagaaagtgagaagagtgttataacttttgttcaaggtacactactatataat

SEQ ID NO: 1413 - DNA, 65 bp, Candida albicans
caaaagtaaaaagaagagagttcaaacggcatattagttaataattaaaaatggtctcatctcgt

SEQ ID NO: 1414 - DNA, 65 bp, Candida albicans
agcaaatgttgcattcccttttgtttttgtttgattcattgtaaaacactcactttttactttgt

SEQ ID NO: 1415 - DNA, 65 bp, Candida albicans
atggtgataataagggaagataggaagaaaggaaccaagaaaggaactaagaaggaggaggaggg

SEQ ID NO: 1416 - DNA, 65 bp, Candida albicans
tacacgtttataaacgagaaaagtttttatttaaatgccatcggagaatccactgacaattgatt

SEQ ID NO: 1417 - DNA, 65 bp, Candida albicans
tgtatgtatgtatactttattctgtctatggatttatacttaataatatcgttaacgactcctcc

SEQ ID NO: 1418 - DNA, 65 bp, Candida albicans
gtaataaatagctattgaattgtttaaagaatggaacttaatttgaacgtggctttttacaccaa

SEQ ID NO: 1419 - DNA, 65 bp, Candida albicans
acatattctgagggttaattgaaaaaacaatacgaccctcagtatccgtggactttcccgcctct

SEQ ID NO: 1420 - DNA, 65 bp, Candida albicans
ttattccctacatggtggttgaattaaccaaaaaatttttaaacgtatatttatttttgcttcat

SEQ ID NO: 1421 - DNA, 65 bp, Candida albicans
tatcttacaattattgtaatgtacatattctatgtgttgtttttatcacaccatcaattggactc

SEQ ID NO: 1422 - DNA, 65 bp, Candida albicans
tttctatatacaattcaaaacaacggtcttttcaattaaaaacaaaacacttggtctttttcaaa

SEQ ID NO: 1423 - DNA, 65 bp, Candida albicans
acagaattaatatattattacagacatatatacatacatatatatagatatacacatatatttat

SEQ ID NO: 1424 - DNA, 65 bp, Candida albicans
gcgtagatgatgaagaagttggacgatatactattcttcttcttctaatctatgtacatatatat

SEQ ID NO: 1425 - DNA, 65 bp, Candida albicans
acatacatatgtatatatatatatatatatatttatgtccaatttattactagttgttggtagca

SEQ ID NO: 1426 - DNA, 65 bp, Candida albicans
taaagaaattcagaaatcttttcccttaaatagttcctgcagcagcagctctttcagttctttct

SEQ ID NO: 1427 - DNA, 65 bp, Candida albicans
tagaaaggagtctttattgttattatttattttattgtgaatacactctattaaactttttagca

SEQ ID NO: 1428 - DNA, 65 bp, Candida albicans
tagacaaaaatctgaactggcaaagatcagttgttgtacttggttatacacaaactaatataaat

SEQ ID NO: 1429 - DNA, 65 bp, Candida albicans
ccattggaatctaattttgatttaagtaccgattttaatagattttcataaaattatataactat

SEQ ID NO: 1430 - DNA, 65 bp, Candida albicans
gtacaataaaagttatatgcaactttttctctctctctcttctctcctgacaaaaccatttgctt

SEQ ID NO: 1431 - DNA, 65 bp, Candida albicans
tattgattgaaattatgtatatatatatataagcgtgtgtgtgtatatccgaatattagaggttt

SEQ ID NO: 1432 - DNA, 65 bp, Candida albicans
agaaatcttgcttctatatctgcccctaagaaactactactaagtcatgctctgttctcccagtc

SEQ ID NO: 1433 - DNA, 65 bp, Candida albicans
actcgaaccttcaacttttcttttctctttctatttaatctttatctatatcgctgatgcttccc

SEQ ID NO: 1434 - DNA, 65 bp, Candida albicans
caaaatttcaaaactagtgtatctctcatactctctgtaaattaaactcaccaattgtgacttgt

SEQ ID NO: 1435 - DNA, 65 bp, Candida albicans
aggagaggagaagctgttacaaagaatcattaatatgtatttattatctgatatacaaataggtt

SEQ ID NO: 1436 - DNA, 65 bp, Candida albicans
atctatgtatacctatacattgaaaaaataaacaaaaacaagacaagacaagcttcaatctactc

SEQ ID NO: 1437 - DNA, 65 bp, Candida albicans
ataatattacttagccaacttcatccattaatgcaaataaacctcctgtctcctcttgattttat

SEQ ID NO: 1438 - DNA, 65 bp, Candida albicans
aattactactattgtgttgttgttattatattattttaaactaaaagtaatacatattaactttc

SEQ ID NO: 1439 - DNA, 65 bp, Candida albicans
aaggatgcaccacttctaaaactgaaagttctgttgttgttgattcgagtccatcccaaaaccaa

SEQ ID NO: 1440 - DNA, 65 bp, Candida albicans
agctggaacattataggaacaagttccactctattcctgttacttgtttgttgtttccataaaac

SEQ ID NO: 1441 - DNA, 65 bp, Candida albicans
atagcccttacagatagatatcaattgtacagtttcaatgctttactataaacgctctatttact

SEQ ID NO: 1442 - DNA, 65 bp, Candida albicans
tttctttatatttttaagctaaaagagagaaatatgataatatatacttgtataaaacaaagtta

SEQ ID NO: 1443 - DNA, 65 bp, Candida albicans
ggaattactaaaagcaagtataaaaagctgtatagaagatggcaacaccgacaggttgaagcaat

SEQ ID NO: 1444 - DNA, 65 bp, Candida albicans
caaacgtcctattctattttctataatacattttcgccaccactaatcgtaactatttcaaatca

SEQ ID NO: 1445 - DNA, 65 bp, Candida albicans
agagcatgtacataacaaaagaaagaacaaaactctattgcagatgaaaacgagaaacctcccat

SEQ ID NO: 1446 - DNA, 65 bp, Candida albicans
agcaactctttccttgaagagcagattttacatttccaaacgttgacagatgcatatactaaaca

SEQ ID NO: 1447 - DNA, 65 bp, Candida albicans
aaaccctgtagggttttaaagaaatctttagactaaatatacactacaagtttgtgcccaaaata

SEQ ID NO: 1448 - DNA, 65 bp, Candida albicans
agttatatataatacattaagattaatttttatttcctatcataatataatacggtcgtcacaca

SEQ ID NO: 1449 - DNA, 65 bp, Candida albicans
aatataatttggttacatagaataattttactaatctattgcattaaacatccgtataaatataa

SEQ ID NO: 1450 - DNA, 65 bp, Candida albicans
atgttcaagtattttggtattttaaaacaaaaagctattaaaatcatcaactacttaagcactac

SEQ ID NO: 1451 - DNA, 65 bp, Candida albicans
tcttactaaataactagattttcaatcttacattcaacatcctcttcatacctttgtctcttcaa

SEQ ID NO: 1452 - DNA, 65 bp, Candida albicans
ctcatgttactgtgctaaacactaaaaacacttcctcaagcactggctgctacttcacaacatga

SEQ ID NO: 1453 - DNA, 65 bp, Candida albicans
tattattattgattttataaaatacacaacaacataaaactcccattatgcgtagaaattgactg

SEQ ID NO: 1454 - DNA, 65 bp, Candida albicans
tagtatatagtgtttggttatcttagatcatgtgaatttatttgtttaaaaacacttcaataatt

SEQ ID NO: 1455 - DNA, 65 bp, Candida albicans
ttgtttctttttacaaacaaattagaggcactcatatttaatctttaataattgcgttaatattt

SEQ ID NO: 1456 - DNA, 65 bp, Candida albicans
tatgataataattggtaatttctctaattatatacatttaatatacatggttataacggctcagc

SEQ ID NO: 1457 - DNA, 65 bp, Candida albicans
aatattagccacctcagaagaactcatgttattgttcattttttagcagcatcttctttcaagct

SEQ ID NO: 1458 - DNA, 65 bp, Candida albicans
actcttttatttctatttaaatgttttaccattctgattcaccattagctttatggaaaacataa

SEQ ID NO: 1459 - DNA, 65 bp, Candida albicans
atatgagaatatccgttattttatttacaatttctttaaaacacgtcacctaatcttaatcttgg

SEQ ID NO: 1460 - DNA, 65 bp, Candida albicans
tatgtatgtgagttctctgtcaactctaggccctaggatatgcgaaactgctcgacccctctccc

SEQ ID NO: 1461 - DNA, 65 bp, Candida albicans
tggatatttactaatatagtattcatacaaataatagttctgattgtcattatacattcccttcc

SEQ ID NO: 1462 - DNA, 65 bp, Candida albicans
ttatattcatattctaattataataacaccttgccattgccgtagctaaacgatagcctcctcct

SEQ ID NO: 1463 - DNA, 65 bp, Candida albicans
tttaatacagaaccataaaccaaagacacatcaaatcaattgtcatcttcagatttgacaacacc

SEQ ID NO: 1464 - DNA, 65 bp, Candida albicans
agcacatgcacataaatatacacacatacattagtacataacaatgatttgtttgaccgctgctc

SEQ ID NO: 1465 - DNA, 65 bp, Candida albicans
acttttaaaataaaagctacaagcttagcccatagttatatatattcttatttttgatcttattt

SEQ ID NO: 1466 - DNA, 65 bp, Candida albicans
ttttaattagtaataatactccatgaatgtatgtatttatatataaattccaagctagatatatt

SEQ ID NO: 1467 - DNA, 65 bp, Candida albicans
tcttttcaaaagaacacattaagtcaaattaaaacccattcttctactacctacttttttctccc

SEQ ID NO: 1468 - DNA, 65 bp, Candida albicans
ctattttacataaattactatgaaccctcctttctacttaaacatgcaatggtttactttctaaa

SEQ ID NO: 1469 - DNA, 65 bp, Candida albicans
gatcatctattcctatacacaatatttgtaatagcttgtcacttgtataaacaatattataattt

SEQ ID NO: 1470 - DNA, 65 bp, Candida albicans
aattcctaaatatatataatctaatctaatctataatacaataaccaccacagactatctcagtt

SEQ ID NO: 1471 - DNA, 65 bp, Candida albicans
attggctcaacctacttctttatatatttgcttccacgtgagcttgcattcttgaaaacctcgta

SEQ ID NO: 1472 - DNA, 65 bp, Candida albicans
aaagtgtatattatcttctataaggtcagctttgtatacttgacttcattaactttggtttcgcc

SEQ ID NO: 1473 - DNA, 65 bp, Candida albicans
ggtgtaaaaagtacgttgttccacacaaccgtataaaacctataatacaaatatatacatacaat

SEQ ID NO: 1474 - DNA, 65 bp, Candida albicans
ctagtagttaccacaaaggaaaagaatagtactatagaaaatgtatctcttttaactacttaaac

SEQ ID NO: 1475 - DNA, 65 bp, Candida albicans
tttattagaaatgcatttcttcttcgcgctgcaaattccatcccttttctaaaaccatagtccct

SEQ ID NO: 1476 - DNA, 65 bp, Candida albicans
tattacctacctatatatatatacttttttcaaaaatttaatttgattttataatttattcttgt

SEQ ID NO: 1477 - DNA, 65 bp, Candida albicans
ttgtagctacatacatacatacatacatacataaatatatatatatatatatattcacattctat

SEQ ID NO: 1478 - DNA, 65 bp, Candida albicans
aagctttattctaccatagaacttcaatattatatatatgtgtatatatgtatatgtactacttt

SEQ ID NO: 1479 - DNA, 65 bp, Candida albicans
tctttgttatattggatccattttgattctatcatcttgctaacaaacactctttcgttcaatta

SEQ ID NO: 1480 - DNA, 65 bp, Candida albicans
tataaacaaaataaacaaaataaacaaaataaacaacttcaaactcatctaacttcccaatttta

SEQ ID NO: 1481 - DNA, 65 bp, Candida albicans
gaaaatataccaacatgtgtatatttctataccctatattttctttttgtttttactatggccct

SEQ ID NO: 1482 - DNA, 65 bp, Candida albicans
tttattatgttttaaatagtttctttcaattagtaacactaatcagatacacatatatattacaa

SEQ ID NO: 1483 - DNA, 65 bp, Candida albicans
ttacataataattttttaattaataatatacaaatatatatataatatgcccttgaaaaactata

SEQ ID NO: 1484 - DNA, 65 bp, Candida albicans
aatacacaattatcctactgattatcccttttaatatagtaaatgatggaatataagaaggtggc

SEQ ID NO: 1485 - DNA, 65 bp, Candida albicans
gaaacaatataaatatatatattttactgtatattttttctttttttgaataaacaagaaaactc

SEQ ID NO: 1486 - DNA, 65 bp, Candida albicans
gttgcataatagttactgtagtttattatcagatttgtaaatttatattaatgaatccattcttt

SEQ ID NO: 1487 - DNA, 65 bp, Candida albicans
atacattttgcttatgatttaataaatcgtataattaaattactatacatgctgatactagtact

SEQ ID NO: 1488 - DNA, 65 bp, Candida albicans
gttaaacaatggataaacattttccgttgcgagtggtaatagatttacccctcaatttattatcc

SEQ ID NO: 1489 - DNA, 65 bp, Candida albicans
gtttaatatataccattattgaccaattggacaatttctcaaatattcagctttatttttcaata

SEQ ID NO: 1490 - DNA, 65 bp, Candida albicans
acgtgtattattattattgacaggttaaggagaagggagaggggagcaggggggtgatcataaat

SEQ ID NO: 1491 - DNA, 65 bp, Candida albicans
tttacaaatctccaaaccctcttccataatgccctacaaaagtaacagcccattatttgttccaa

SEQ ID NO: 1492 - DNA, 65 bp, Candida albicans
attgctttgctacaaaaataaatcataaattaaaacgacctaaagaaacagataacacaatgtct

SEQ ID NO: 1493 - DNA, 65 bp, Candida albicans
ataaaaagcccacaaaaaatataaaataaagaaataaaaatgtataatataattttaaatgtata

SEQ ID NO: 1494 - DNA, 65 bp, Candida albicans
tggtctcctttttcttattcctttaacaattcgtctactcctgggttaatcaatagttctatcgt

SEQ ID NO: 1495 - DNA, 65 bp, Candida albicans
ttgttttattttctaatatacagttcaatacatttgttgaatttacactatatgttataaaacat

SEQ ID NO: 1496 - DNA, 65 bp, Candida albicans
ttggtttggtttggctttgcattgtttggctgtttgtttatattcttttttgcttccaatctcat

SEQ ID NO: 1497 - DNA, 65 bp, Candida albicans
aacactatactagtaaactgtttttcatcttcatgatcataattcgtagagtacttgggatctct

SEQ ID NO: 1498 - DNA, 65 bp, Candida albicans
ccagtaacacatatttatattatttgtaatttgtgaaaatttacagtatttgacgtttctattaa

SEQ ID NO: 1499 - DNA, 65 bp, Candida albicans
cgtttttagttgtatcgttttaattttcatttacataaatatatactgtctataaagcacatacc

SEQ ID NO: 1500 - DNA, 65 bp, Candida albicans
gagttgttgaaagagcaagatctcaaaacaagtatatttgacgacattgttacaaaatattctat

SEQ ID NO: 1501 - DNA, 65 bp, Candida albicans
tgtataactatgtataataaactattttatctcccccatcattttttaatcaaagggaatcaaaa

SEQ ID NO: 1502 - DNA, 65 bp, Candida albicans
acctcttctatttctatatatagttgtgtgtattaagtagcgaaatacgaaaaatactgtttaat

SEQ ID NO: 1503 - DNA, 65 bp, Candida albicans
acaacacgactgtaacaagtcatagaaatttatcactattaaatctttgctataaaacaaaatta

SEQ ID NO: 1504 - DNA, 65 bp, Candida albicans
taggttaggttaggttagttaatatatatcttgtacataaattgatacacacataacatagtact

SEQ ID NO: 1505 - DNA, 65 bp, Candida albicans
aaatgaaataagaacgaatgaaatacattaataactaagtaaaatttatacttcaaaaattctct

SEQ ID NO: 1506 - DNA, 65 bp, Candida albicans
atttggagtaatatcagactatatattcatggtaaacaaatgaaaaccagaaagggtgataatcc

SEQ ID NO: 1507 - DNA, 65 bp, Candida albicans
atatttataatctgtatcactattactattactactgttatctgtataattataattataaatcc

SEQ ID NO: 1508 - DNA, 65 bp, Candida albicans
tgtcagtgcgcctattcagggttgttaactaaatactatacatcaaattcttgcttatatatgtt

SEQ ID NO: 1509 - DNA, 65 bp, Candida albicans
atttaattatttaattgaattaatacatatacaaattattcttttttcttgaagaattttctctt

SEQ ID NO: 1510 - DNA, 65 bp, Candida albicans
acctagataaggtttacatatatgattttgtattttcattaacatagatataaatattttataca

SEQ ID NO: 1511 - DNA, 65 bp, Candida albicans
cattttgcaattgtttggatttcaacatcattaatgtaggacttgcttcaagacttagactcaaa

SEQ ID NO: 1512 - DNA, 65 bp, Candida albicans; identical to SEQ ID NO: 1240

SEQ ID NO: 1513 - DNA, 65 bp, Candida albicans
gaagtttgctctttattagtgaatgtaattatatgtatatttacaaaaattttatctattaaagt

SEQ ID NO: 1514 - DNA, 65 bp, Candida albicans
tcaaattcatcgattattaggataatgatatataacttagttaagttaagtgatggtggtagctt

SEQ ID NO: 1515 - DNA, 65 bp, Candida albicans
caaactataacatacacataaaaatacaaacaccaaagtcatcatctttgttttaccttgttcgg

SEQ ID NO: 1516 - DNA, 65 bp, Candida albicans
aagaagttgtgatattttttcaacaatcacgcttttcttttttctattataaactatttagtaat

SEQ ID NO: 1517 - DNA, 65 bp, Candida albicans
tatacaagctatcttatttgaaaactgaggaaacaaatctaaggtacaaacgtccacaacaatca

SEQ ID NO: 1518 - DNA, 65 bp, Candida albicans
tcaatcttcgcaacacagtaaaaatacagttgatttatttttttcctatactacatctataacga

SEQ ID NO: 1519 - DNA, 65 bp, Candida albicans
gatactatagatgtaccatcttgaaatctagttctaaatactcgattagcattagtagacattcc

SEQ ID NO: 1520 - DNA, 65 bp, Candida albicans
gtttatgattaatatatacaacatatatattgctataaaatcaaataaccctctaataaattaat

SEQ ID NO: 1521 - DNA, 65 bp, Candida albicans
ctaaacaacgaaaataatgaattgaaaaatataatgattatagacacacttcatctatatcctat

SEQ ID NO: 1522 - DNA, 65 bp, Candida albicans
aatgactctattaaatccatcctaattaaatctataaaataaatacattgcattaattgtctgcc

SEQ ID NO: 1523 - DNA, 65 bp, Candida albicans
gtttttgatatatttgattctccttaaacgtgtaaacataaaaagatattctacccctttaaaac

SEQ ID NO: 1524 - DNA, 65 bp, Candida albicans
tcatgttttttgtttctgttttaatttttgtcataatttagagcaaaatgtttccccaaaaaata

SEQ ID NO: 1525 - DNA, 65 bp, Candida albicans
aatataatacaaccatataaacaaatatatatataaaaatacaagtatgattattccctttcgaa

SEQ ID NO: 1526 - DNA, 65 bp, Candida albicans
tgagttatatagatttagatacaaatatctaccagttattaactacaacgatacattcttgtggt

SEQ ID NO: 1527 - DNA, 65 bp, Candida albicans
aacatttccacagtatatacatttttctgtgatccaaagtatataagaaaaaactgcccaataat

SEQ ID NO: 1528 - DNA, 65 bp, Candida albicans
aaccaaattactttcaagagaacaggttctgtgaatgtttaaaagaattcaattaaagtgcatac

SEQ ID NO: 1529 - DNA, 65 bp, Candida albicans
aaaagagagaaaaacgtaaaaagacatggttctaagattactacatacttgtaaatatacacact

SEQ ID NO: 1530 - DNA, 65 bp, Candida albicans
ctacataaacatgtatagatattaattaaatttcacattcatctaaattacccaatagctatata

SEQ ID NO: 1531 - DNA, 65 bp, Candida albicans
gaagaagacccctttttcttagcctttttggataatctcttattgtgcgacagaacttgctgtga

SEQ ID NO: 1532 - DNA, 65 bp, Candida albicans
caagtagtaaagttgcatatattatcgtcacttaatctacacttttattgctagtatctatggca

SEQ ID NO: 1533 - DNA, 65 bp, Candida albicans
aaaaagaaaaacagaaggtaacccaaacaacagaaattaagtggaagtaatatattgctagcaaa

SEQ ID NO: 1534 - DNA, 65 bp, Candida albicans
caaaaggagacgacgattcttgtatttccccactaaatttattattattattattattattatta

SEQ ID NO: 1535 - DNA, 65 bp, Candida albicans
tagataaaatacgatgcacatagactattaatatacttgtacatactttaaggctatatttatgt

SEQ ID NO: 1536 - DNA, 65 bp, Candida albicans
cctcccaaaccatgtgtaacgaatattttgaaatacatacatacattctatgaaaactatagatt

SEQ ID NO: 1537 - DNA, 65 bp, Candida albicans
aaattaacatcatcaagtaaaaaggaataacacccaacacgatcaaaagaaagcatgctgttgct

SEQ ID NO: 1538 - DNA, 65 bp, Candida albicans
tccaaggaacaaaatatatttggtcgtgtcactaccacaactacacactataatgagctaatgaa

SEQ ID NO: 1539 - DNA, 65 bp, Candida albicans
tatcattcaactatacaatatactaaattacaaaacgatcgataaccaaatcaagaataaacaaa

SEQ ID NO: 1540 - DNA, 65 bp, Candida albicans
acctcctctccttgaactttcagttattgcggacaaaatgcaaagcaacaaatctttaatcacat

SEQ ID NO: 1541 - DNA, 65 bp, Candida albicans
cataagataaaaattacacttgattatcccaaaagagaaaaacaaatagtctattccaaatcgtg

SEQ ID NO: 1542 - DNA, 65 bp, Candida albicans
ggtagcatatatatttattaaaaatacataattctatattatgaattcttcagttcgggccaagc

SEQ ID NO: 1543 - DNA, 65 bp, Candida albicans
atttacaaacaattttttaagcttctctttactcacaacatacttaatacaaaaacactcttctc

SEQ ID NO: 1544 - DNA, 65 bp, Candida albicans
tagaaccgccttggaaaatcgagttaaaagtataagtacttttgtttttaatttctataactaat

SEQ ID NO: 1545 - DNA, 65 bp, Candida albicans
tcggttcgataacttttggaaagacagtatatgtatatatacaagagctgtaattactataccac

SEQ ID NO: 1546 - DNA, 65 bp, Candida albicans
aattccaaaaaattcctaatccctaattaaaaaaataataaaaaaccaaaactcttgactcccaa

SEQ ID NO: 1547 - DNA, 65 bp, Candida albicans
tgtctctggtgtctgaattgatcacttcgtgtctttccattatatatagagctttctctaatgca

SEQ ID NO: 1548 - DNA, 65 bp, Candida albicans
atacatttgtgttaattaagaagtgcttatttattacctgtacatatactaaatattaatttaaa

SEQ ID NO: 1549 - DNA, 65 bp, Candida albicans
atcgcatttcatttaatataagctttaattactgcggagtagagggcatttacacaaagacagaa

SEQ ID NO: 1550 - DNA, 65 bp, Candida albicans
tcggaaaactcaacgaattatatattaaacgagtgttacataatcatagtaaaatatcctgggtt

SEQ ID NO: 1551 - DNA, 65 bp, Candida albicans
ctcttcttttagtatatgattaaactcgcacattcacataaacactcattgatattgctgttgat

SEQ ID NO: 1552 - DNA, 65 bp, Candida albicans
acaaggatatttagaagagataatataacaaacaagaatatatatatattaagtatacataactt

SEQ ID NO: 1553 - DNA, 65 bp, Candida albicans
gtgctaattggtgtcaacaacaatttggattcaaaaatgtataaattaggaggttactattatta

SEQ ID NO: 1554 - DNA, 65 bp, Candida albicans
actattagtagggttattgttattgttgtacacaccagaataaaagtatttgtatccgtattact

SEQ ID NO: 1555 - DNA, 65 bp, Candida albicans
tgatacaatgaattatcactattatatttctatataaagatatgacctattaaaacttatgagtc

SEQ ID NO: 1556 - DNA, 65 bp, Candida albicans
tgctttttattgttattgttgttgttgttgttgttgtagttgttcatcttttactttcaaattat

SEQ ID NO: 1557 - DNA, 65 bp, Candida albicans
taatacataactacagatccattagacaatacgtagacgccagggaacagtaatatactaattat

SEQ ID NO: 1558 - DNA, 65 bp, Candida albicans
caacactactactactactactataacaacaacaacatagattaactacttatttacttatctat

SEQ ID NO: 1559 - DNA, 65 bp, Candida albicans
ttatactacaaatcggtcgtgtgacaaacaaaaatttttgggcgttgattttttgtagttctttt

SEQ ID NO: 1560 - DNA, 65 bp, Candida albicans
gaaagagaatatgaggccattacattgtgtatacatatctagcaacgtgttttctacatatcgac

SEQ ID NO: 1561 - DNA, 65 bp, Candida albicans
agcattatcaccctgactaaatgctttggtgcaagtatattgttattgtttgatgtttatctaga

SEQ ID NO: 1562 - DNA, 65 bp, Candida albicans
tccaaactcactaaaattttatatagcgtgtgaattattaatattctaaccctttgatttgtgct

SEQ ID NO: 1563 - DNA, 65 bp, Candida albicans
taataataataataataaatatcatgtatttaatttataactgcatgcccaattggccatctctt

SEQ ID NO: 1564 - DNA, 65 bp, Candida albicans
agcaatcaaagtggtaatggaactgtcaccaaagtaaccgctggtttaccaccaggagttggaac

SEQ ID NO: 1565 - DNA, 65 bp, Candida albicans
tcattatcgtatatatatatatatgcccgtttcttactagatgcatctattctaccttttacctt

SEQ ID NO: 1566 - DNA, 65 bp, Candida albicans
ggtatagctgctagtgaaagtctaaaacatgagaggaagggcaacattccgtttgattaggttat

SEQ ID NO: 1567 - DNA, 65 bp, Candida albicans
taagaaataaacaattgatttttatcatcaggtccatgaaattgcaatgaacaaagtataacaaa

SEQ ID NO: 1568 - DNA, 65 bp, Candida albicans
aaaggtactttgtcctttaataacaccatttacttcttggtgtaatgatagttgtagcggccctt

SEQ ID NO: 1569 - DNA, 65 bp, Candida albicans
acaccacctctgttcactgcaaaccaattacggtttgggtggtaaatatatatatagatatatat

SEQ ID NO: 1570 - DNA, 65 bp, Candida albicans
atatatatatataaaggaaaaattaattacaaacaccactaaatgaaactttgaatttaaaattc

SEQ ID NO: 1571 - DNA, 65 bp, Candida albicans
ttttcattcatttattcatttgtaaatattttttggccattttggtttatttttaattatccaat

SEQ ID NO: 1572 - DNA, 65 bp, Candida albicans
aaatgtttctaaaaggtattggcaatgaataggctaattaaatattattggagcagtacaaatac

SEQ ID NO: 1573 - DNA, 65 bp, Candida albicans
caataagtttattaatcaactttcttaatctataattatctataaaaacaaaaatatacctaata

SEQ ID NO: 1574 - DNA, 65 bp, Candida albicans
gagggtaaaggattaacagtggcgacaccgctgtattagttttttggtattttctccaattttac

SEQ ID NO: 1575 - DNA, 65 bp, Candida albicans
taatttaatcaataactacataagtttgtatcaattactacccccctccccccgcctaccattta

SEQ ID NO: 1576 - DNA, 65 bp, Candida albicans
ttacagaataaacattatatattccaactcagactagagacctactaacaaataataataatgat

SEQ ID NO: 1577 - DNA, 65 bp, Candida albicans
caacaacaaaaggtgatatttatttcaattgacatttatatttatatttcctatatttaattaca

SEQ ID NO: 1578 - DNA, 65 bp, Candida albicans
atggatgatgtgcttcagaaaatcgacactatatctggtattctaagcttaaaccaatcaattaa

SEQ ID NO: 1579 - DNA, 65 bp, Candida albicans
tcaacactgagttatcgttgacctattttacatatatattatattatattttagaacaatacata

SEQ ID NO: 1580 - DNA, 65 bp, Candida albicans
aaatatagagtttattcctataatattcctgtttcttgtatatttcacattattactacgagaat

SEQ ID NO: 1581 - DNA, 65 bp, Candida albicans
aagaactctcagaaagtgatatcacctacattgaattctattctacctttcttttaattataatt

SEQ ID NO: 1582 - DNA, 65 bp, Candida albicans
atttatatatcccattttcctcttgttctatttcagatacactatcattagtaatctctatgcta

SEQ ID NO: 1583 - DNA, 65 bp, Candida albicans
atttgcttttactttgcttttggattggattggattggattggatcctattctattctatttcat

SEQ ID NO: 1584 - DNA, 65 bp, Candida albicans
ttggaactgccaacagtccaggcctcgtcatagactttaaatagtgtattctgtatatagctaaa

SEQ ID NO: 1585 - DNA, 65 bp, Candida albicans
cgtacattcctttacaacaactacttgctacctaccgagtctcccgatgcaaagcaatcactcac

SEQ ID NO: 1586 - DNA, 65 bp, Candida albicans
aataaaattcgtgtgtacaatcttgcctagtctatttcttttccctatctactgtacaaaatgca

SEQ ID NO: 1587 - DNA, 65 bp, Candida albicans
tattttattttattctttttttcgaagagaactaaacattggaatgcttatatacatagtattaa

SEQ ID NO: 1588 - DNA, 65 bp, Candida albicans
attgtttagtgccataattgaatgactaatattgaattaatgcatgaaagtgatctgtctaatat

SEQ ID NO: 1589 - DNA, 65 bp, Candida albicans
tttatttctgtatgtgtaattaaatttatatcaaattataaactatataaactataagcaatata

SEQ ID NO: 1590 - DNA, 65 bp, Candida albicans
agtaaaaacttgaaatattttatgcaataaattacacaacaactcatcatcaccgaattgatcct

SEQ ID NO: 1591 - DNA, 65 bp, Candida albicans
tgattattaattctaaacacctatttagctctaacatcaccacggtcttcattttagagggaggg

SEQ ID NO: 1592 - DNA, 65 bp, Candida albicans
ctacacaataatatacactttaaaataagctatacattatttcctattcagttgtccccgcgtgc

SEQ ID NO: 1593 - DNA, 65 bp, Candida albicans
ctatttactctaagtattacacatgattttatttgcttatcaaatactacagtatattaactgat

SEQ ID NO: 1594 - DNA, 65 bp, Candida albicans
cgctcagaaaagaacaatttaagaagaacagaaaatataagcaaaaaaaaccccgtattggtctc

SEQ ID NO: 1595 - DNA, 65 bp, Candida albicans
tcccggagtcgacataaatatcttaaattcagaatgtttaatactatgaattagttacatacttt

SEQ ID NO: 1596 - DNA, 65 bp, Candida albicans
ataatcaattacacaacaatcatgtatgaaaaatacaaaggaatatttaacttttctcttcttct

SEQ ID NO: 1597 - DNA, 65 bp, Candida albicans
tctccctataattctacatgtttacatcttttaataaccatctataaatatatttattgacttat

SEQ ID NO: 1598 - DNA, 65 bp, Candida albicans
ggtaaaaaggggttcaggaaaagaagataaaacgtacaatagtatacatatataaatatcaattc

SEQ ID NO: 1599 - DNA, 65 bp, Candida albicans
cggatgtgtgtatgttctgccatcctcctttttataaaaatattattattatatatctactttaa

SEQ ID NO: 1600 - DNA, 65 bp, Candida albicans
ttgttcaattactatttcccactaagagactatcaatgattacttaactatacagactttattat

SEQ ID NO: 1601 - DNA, 65 bp, Candida albicans
tttaagtaaatcatgaattatcaataagtacttagaatggaagaactataatacatttatttttt

SEQ ID NO: 1602 - DNA, 65 bp, Candida albicans
tatacaacaacaacagcaattgtatgagtaaattgatttttaattttgtccacctctctcactat

SEQ ID NO: 1603 - DNA, 65 bp, Candida albicans
aataaaaacacttatgaaaacttctgtacattaatttagataatatatgccttttctattgtgca

SEQ ID NO: 1604 - DNA, 65 bp, Candida albicans
ttatagtttacccaagtaaataagtttttgtgtatatagtgtaattgtacaggcagctccgggga

SEQ ID NO: 1605 - DNA, 65 bp, Candida albicans
taaatgatacacttacagttgttttaacataattgataaattattattatacattattcctactt

SEQ ID NO: 1606 - DNA, 65 bp, Candida albicans
atcattctgtagtactaaatataaataaaagtaactttttattaatacaacattataaattcttt

SEQ ID NO: 1607 - DNA, 65 bp, Candida albicans
tcgggccaatttatagcaatagggtgggtaagaggggtgagtcatttggtgtttgacaaacttct

SEQ ID NO: 1608 - DNA, 65 bp, Candida albicans
aagtatatataccccctttgattagtaatctcgccacagttgcctgccgcggaaaaattcattga

SEQ ID NO: 1609 - DNA, 65 bp, Candida albicans
atagataatactctaattatttaatgtccttgagggaggagggaggagaagggcgaacccatcaa

SEQ ID NO: 1610 - DNA, 65 bp, Candida albicans
caaaaaagtgaaaaatactgtcaattctgcatatttctattgtatacaatatactctaaatagct

SEQ ID NO: 1611 - DNA, 65 bp, Candida albicans
ttatttttattacatgatatcgatgtataatatgtatatatgtatatttttaaggtctatttgct

SEQ ID NO: 1612 - DNA, 65 bp, Candida albicans
caaactaactaacaaactaacaaactaacaaactaacaaactaaactataattattatatataat

SEQ ID NO: 1613 - DNA, 65 bp, Candida albicans
ggtgttgaaaccaatggggtaaaagattcattgaaaattataaagtttatacaaaagggacacgc

SEQ ID NO: 1614 - DNA, 65 bp, Candida albicans
gacgcggaattgtctataaatgactctatacgctatatggccaaatttgatgaaatatttcaaag

SEQ ID NO: 1615 - DNA, 65 bp, Candida albicans
atctcgaataaatacacaatgaaagttcaaaatatacaaacaaaaaaagagggccattgaataac

SEQ ID NO: 1616 - DNA, 65 bp, Candida albicans
cactgaacaaaattgcacgactaacaatatcaactgtttactaacaaaaactacattccctactt

SEQ ID NO: 1617 - DNA, 65 bp, Candida albicans
tttacttacaagagttggtaaatacactactagataatatgtatattaatatatcctaactatat

SEQ ID NO: 1618 - DNA, 65 bp, Candida albicans
attcttctattgtcattaaatatatattctctgtttgctcttgaccggccatgggaacttattca

SEQ ID NO: 1619 - DNA, 65 bp, Candida albicans
agaaaaaaatcaattgtaatcatggtcccatgcataagcaagataaactttttttgacgtcgact

SEQ ID NO: 1620 - DNA, 65 bp, Candida albicans
aacattcagttatctactttttcttttctcatttctttcccccctcctccttagtctatcatcaa

SEQ ID NO: 1621 - DNA, 65 bp, Candida albicans
aacgcttatcctcgcaaatattactattattaatacacaaagatatgaaaagtgaagtgtaaaat

SEQ ID NO: 1622 - DNA, 65 bp, Candida albicans
ttaacaaacatcaaaaaagattattcaaataccaaaataatttcctaattattattcattcatct

SEQ ID NO: 1623 - DNA, 65 bp, Candida albicans
tacattagaatactatacaactatattactattgcatcccttagttagcctttaaggtcaagtga

SEQ ID NO: 1624 - DNA, 65 bp, Candida albicans
gaagacaatgcgatggaattcccgaatataaaactctataatcaataatatacattcagatctat

SEQ ID NO: 1625 - DNA, 65 bp, Candida albicans
ctctctatctctctcttctaattggtgtggggggagggaatgaaaaaactctttagtgatcaaac

SEQ ID NO: 1626 - DNA, 65 bp, Candida albicans
aaaagcctgtttacacaaatgacggtcgttgactcgaaaaagcaaaaaatagcctattcagtcat

SEQ ID NO: 1627 - DNA, 65 bp, Candida albicans
aaatgaaatataatataataatactaccacatacttttaaacgtcaagttcgtttttttacctca

SEQ ID NO: 1628 - DNA, 65 bp, Candida albicans
atttaatgcatgtttagggaataactatacatgaatacgtctataatgtaaataaacaaataata

SEQ ID NO: 1629 - DNA, 65 bp, Candida albicans
agagctggactttatacatacagtcaaatctattggttctaattttacacatatacaacagtttt

SEQ ID NO: 1630 - DNA, 65 bp, Candida albicans
atggccacatcgtatctgtcttttctgtaacaatttcacacatattgcctgttttactggataat

SEQ ID NO: 1631 - DNA, 65 bp, Candida albicans
tatattgttgcttagttctttaatatgtaactatatttataggataaatttccatatataatcaa

SEQ ID NO: 1632 - DNA, 65 bp, Candida albicans
ttctaattaatatctatagattatctactatataaatatgtatctccattgtattcaatcctgat

SEQ ID NO: 1633 - DNA, 65 bp, Candida albicans
tttcagatacacttataatgtgtctcttttctgtttattatcacagtggtatactactatatcaa

SEQ ID NO: 1634 - DNA, 65 bp, Candida albicans
cctgagtatgtggtgtgtacatatatgttttatgttgatctcttttcacacttttgtcgtccccc

SEQ ID NO: 1635 - DNA, 65 bp, Candida albicans
tggaggtaaataactaaattaatgaacctttgtttctataggaaatgcttgtatatatgctaaat

SEQ ID NO: 1636 - DNA, 65 bp, Candida albicans
tattcccttgattcttatttatcaataattatctaattaatacaagtatacataccattaactat

SEQ ID NO: 1637 - DNA, 65 bp, Candida albicans
acatgtttaacatttcctatctggctagattaatatagattactgttaactttttacacacttac

SEQ ID NO: 1638 - DNA, 65 bp, Candida albicans
gtactaattatatatatttctttataacattatttttagtttataatatgcacatcctctatcat

SEQ ID NO: 1639 - DNA, 65 bp, Candida albicans
ttacggtaattagttctaagaatgtcagacttctggcataaatacacttctacacacactgcaaa

SEQ ID NO: 1640 - DNA, 65 bp, Candida albicans
gctgttgacgtatttccatatcttaagcgagggaatgacgtttatttaaacatattacatacatt

SEQ ID NO: 1641 - DNA, 65 bp, Candida albicans
tttacacgactaaaatatacagaacaattaaaagcctaattttcatccttcttaggaggctctgg

SEQ ID NO: 1642 - DNA, 65 bp, Candida albicans
aaaaaccgaagtttcggtgaaataaataggtatatatatatatgaatattacaaagtatatgtat

SEQ ID NO: 1643 - DNA, 65 bp, Candida albicans
ttacaatgaaacttaatatcatcatgactagttttgttcttttcccctatacagctataattcca

SEQ ID NO: 1644 - DNA, 65 bp, Candida albicans
acaggaaaaccaagtatttatcacgtattccctcatcaacgtctatcggtagaaccaatacctct

SEQ ID NO: 1645 - DNA, 65 bp, Candida albicans
attcacaattaaataggtactttgatttttgattatcaattctttgggaaatattagcttttctc

SEQ ID NO: 1646 - DNA, 65 bp, Candida albicans
ttggtttatattaaagtacaaagtacgactatagaagctagtatgttggagagaaggggcttggt

SEQ ID NO: 1647 - DNA, 65 bp, Candida albicans
cattttccttaaatcggaaccgaaatttatgtctatttggtagctaccaatctatacacattatc

SEQ ID NO: 1648 - DNA, 65 bp, Candida albicans
caataattatcaatcctatccatatatatatatatatatagttagttagttgacatctccttttt

SEQ ID NO: 1649 - DNA, 65 bp, Candida albicans
aaagaataacaaataacaaataaaaacaggttatcaaaagaaatgaacttaacatacatgtacaa

SEQ ID NO: 1650 - DNA, 65 bp, Candida albicans
tagtcatatatttattactttcattaaaggctacatatattctaagtaaagggcaagtagatgtt

SEQ ID NO: 1651 - DNA, 65 bp, Candida albicans
gtatttttatataaaaactaattttacacaatctatattatagcctatcctatacttaaaggaag

SEQ ID NO: 1652 - DNA, 65 bp, Candida albicans
tatgaatctaaatttactattaattactattggatattactatttctacaagtctatatatttaa

SEQ ID NO: 1653 - DNA, 65 bp, Candida albicans
ctatatatatgaatgaaaaaaacatacaaacaaacaaacaaacagagaagtaaagtttgttattg

SEQ ID NO: 1654 - DNA, 65 bp, Candida albicans
atatgtgtaaacgaagaattagaagaagtcaaaatctttaatataacaaactacactataagaac

SEQ ID NO: 1655 - DNA, 65 bp, Candida albicans
taaaactttacgagatatacgcctctaaataaataaaagtacatagactcgtgcatacattttaa

SEQ ID NO: 1656 - DNA, 65 bp, Candida albicans
gatatacagtggttatatttatacctgaatgttatagtacttttcgttaaatacttgtacatata

SEQ ID NO: 1657 - DNA, 65 bp, Candida albicans
cattcttctattcgttttaatttattttactatgactctactaactttaacagttcatatatata

SEQ ID NO: 1658 - DNA, 65 bp, Candida albicans
tctgtcacttgtgtttcaaccatgttttataaccttccaaacaggacgaaacatcaatcaatcaa

SEQ ID NO: 1659 - DNA, 65 bp, Candida albicans
gttttagtttattgtttgtactacttgtttgtactacttgttttgacctacttatttccctctct

SEQ ID NO: 1660 - DNA, 65 bp, Candida albicans
aaaaagaacgtatactaaagaactgttaggaacaagaaaagtattcgctttccttgtttgttttc

SEQ ID NO: 1661 - DNA, 65 bp, Candida albicans
ttagcgaatatatatgtagctttttttctgctctcaaatatacctatttgtatatataaatttat

SEQ ID NO: 1662 - DNA, 65 bp, Candida albicans
cctgatggtttgaaaaagatttcaatacttgtatagtttagagttgtgtgtattatttccgaaaa

SEQ ID NO: 1663 - DNA, 65 bp, Candida albicans
gagaacctcaaacaatgtatatacgtaattaatcaagatttatttctataaacttaacaaaagct

SEQ ID NO: 1664 - DNA, 65 bp, Candida albicans
ccttgtgagaaaacaaaacacatgcatttctcgattcataatttatatttctctacataccgatc

SEQ ID NO: 1665 - DNA, 65 bp, Candida albicans
tttaatctatagggaagaaaccatctttcatttgtatgtagggtggggatggggggttgcacaat

SEQ ID NO: 1666 - DNA, 65 bp, Candida albicans
ctatcaagtttcttgtgtcatcatccctaaagtttaattttatgtatatttaatatataaatctg

SEQ ID NO: 1667 - DNA, 65 bp, Candida albicans
tttcttggtaactacttaaatatataacatatataatctataacataataacagtgctatttcat

SEQ ID NO: 1668 - DNA, 65 bp, Candida albicans
aacacaaaaaatttaaactgaacattaattgtaaagtaaaaaaagatatcgcctacttcttgcaa

SEQ ID NO: 1669 - DNA, 65 bp, Candida albicans
atatatacaccaatcaataactactctcttacaatttgaaaaaatattaatggtcttttatataa

SEQ ID NO: 1670 - DNA, 65 bp, Candida albicans
taaaatagatacgtttcacgaaagagaaaaaaaataataaacaagtcgtgtaccactatacaata

SEQ ID NO: 1671 - DNA, 65 bp, Candida albicans
ctttgtctacgaaagaatgaaaaagttcttaggtatatagagagcctatttatatgtacatgaaa

SEQ ID NO: 1672 - DNA, 43 bp, Candida albicans
cgtttcaggagttctcactatttattccatgtgactttgacaa

SEQ ID NO: 1673 - DNA, 43 bp, Candida albicans
gaaaacaagtagtagtagtaatagtagtaccatcttttatttt

SEQ ID NO: 1674 - DNA, 43 bp, Candida albicans
ccaatgttagcattatctaagttataagcaccgtttccctcat

SEQ ID NO: 1675 - DNA, 43 bp, Candida albicans
aaaaaacaaaccatcaaactctgtggcatttctttgattattc

SEQ ID NO: 1676 - DNA, 43 bp, Candida albicans
attactaacaccaagaagttaagaccaaatgcaaaaacagaat

SEQ ID NO: 1677 - DNA, 43 bp, Candida albicans
cattacttgggtgatgggttatggaactatcaagaataaatga

SEQ ID NO: 1678 - DNA, 43 bp, Candida albicans
gtagtatatatatttcaatggttaattgtaaattttcttttat

SEQ ID NO: 1679 - DNA, 43 bp, Candida albicans
gattttattataaacatacctatagaactcttctttgtgggtc

SEQ ID NO: 1680 - DNA, 43 bp, Candida albicans
tcgtttaaccggatgtagcctgaaaaacattggctttgaagta

SEQ ID NO: 1681 - DNA, 43 bp, Candida albicans
tgtttctttttttaatgtggtttttgctatttttgtcaccttc

SEQ ID NO: 1682 - DNA, 43 bp, Candida albicans
tttctgtttttgtttaagatggtggctaatacttagaaaaagt

SEQ ID NO: 1683 - DNA, 43 bp, Candida albicans
tttttgatttttgattatagcccaagttataaaacatgaagaa

SEQ ID NO: 1684 - DNA, 43 bp, Candida albicans
aaagacaagaaggaagagaaacaacacatatatatttcattat

SEQ ID NO: 1685 - DNA, 43 bp, Candida albicans
gcattgtaaagataagaacctagatccaatagtcatcaaaact

SEQ ID NO: 1686 - DNA, 43 bp, Candida albicans
gaatatagttgtttgtattacataccatgtgcccaattgatgt

SEQ ID NO: 1687 - DNA, 43 bp, Candida albicans
ttttagtatttacttttcattactgttgtattcagtatcactt

SEQ ID NO: 1688 - DNA, 43 bp, Candida albicans
ttcttggtgtgtaggtctaataataataattattgtattgtat

SEQ ID NO: 1689 - DNA, 43 bp, Candida albicans
tttttgatcagatatacacgaatatttctaaacactactaatt

SEQ ID NO: 1690 - DNA, 43 bp, Candida albicans
tctgagtctggaaattgttctttttttgttaatgttaaacttt

SEQ ID NO: 1691 - DNA, 43 bp, Candida albicans
tcaacctccccctccctccacattgttattcttattcttattc

SEQ ID NO: 1692 - DNA, 43 bp, Candida albicans
gatatatgcaattaaacaaaataaattttcgtgtagaggattt

SEQ ID NO: 1693 - DNA, 43 bp, Candida albicans
tttttaaaattattattgctcttgtagaatcaagacgccttaa

SEQ ID NO: 1694 - DNA, 43 bp, Candida albicans
aaatcatataggaacccaaatccctaaaaataaaaatatctaa

SEQ ID NO: 1695 - DNA, 43 bp, Candida albicans
tatactgacctattttcaagttattataatgtaatttagttat

SEQ ID NO: 1696 - DNA, 43 bp, Candida albicans
caaaacacaaatacatgccagtggatgacgaatcaaaacaaga

SEQ ID NO: 1697 - DNA, 43 bp, Candida albicans
tcaaaaataaagatattaaatagagaaatacattttttttttt

SEQ ID NO: 1698 - DNA, 43 bp, Candida albicans
caacgtttttattgacttgtcttgcaaaatcaggaaggccctt

SEQ ID NO: 1699 - DNA, 43 bp, Candida albicans
acaaaccttatacatatatatattgtttaaattgtttttttgt

SEQ ID NO: 1700 - DNA, 43 bp, Candida albicans
atcatactcgtgtataataaaacctgaacattgctctatttca

SEQ ID NO: 1701 - DNA, 43 bp, Candida albicans
tattagatgtatctagtgatgaataaaatataaggacatctca

SEQ ID NO: 1702 - DNA, 43 bp, Candida albicans
tgctttcttcaatgataactaccagtacattattaatacacct

SEQ ID NO: 1703 - DNA, 43 bp, Candida albicans
ttgaatttgggctatttctctatttctatatatatatattcat

SEQ ID NO: 1704 - DNA, 43 bp, Candida albicans
gttcttttatttatttattttttatatacacataaacttctat

SEQ ID NO: 1705 - DNA, 43 bp, Candida albicans
aattaacattgttgtgccaataaatacaattttatttttacat

SEQ ID NO: 1706 - DNA, 43 bp, Candida albicans
aactttttctttcattctcttttttttttttcttttttttttt

SEQ ID NO: 1707 - DNA, 43 bp, Candida albicans
attatagtctatatagaatctaataaatgcgtttccccatttc

SEQ ID NO: 1708 - DNA, 43 bp, Candida albicans
aatgtcttagggctatagccctaacccgcaaaaaattactaaa

SEQ ID NO: 1709 - DNA, 43 bp, Candida albicans
gatgccattcaagctagaaataagtagatatatatatatatat

SEQ ID NO: 1710 - DNA, 43 bp, Candida albicans
atcaatagtcaactctatctaataacaacaacaacaactcccg

SEQ ID NO: 1711 - DNA, 43 bp, Candida albicans
cgtaatcataagcctgtccatatcgtgtcagtcaatcttttct

SEQ ID NO: 1712 - DNA, 43 bp, Candida albicans
tatgtaaattaaaaaaaacaaacatagatctctaataattgaa

SEQ ID NO: 1713 - DNA, 43 bp, Candida albicans
tcaagccatcactttctcgaggtggtttattaatatcatcttt

SEQ ID NO: 1714 - DNA, 43 bp, Candida albicans
aacattattattattactgttgttgttgtcgttgtcattattt

SEQ ID NO: 1715 - DNA, 43 bp, Candida albicans
attaatatattaagaagcgatattactataaagcaacaaatga

SEQ ID NO: 1716 - DNA, 43 bp, Candida albicans
aattggatactggcaaaatcaataacttgcatcccctgattat

SEQ ID NO: 1717 - DNA, 43 bp, Candida albicans
caaacattaaatagagacattcttgtgttgttcaatggttgca

SEQ ID NO: 1718 - DNA, 43 bp, Candida albicans
atcttacaacatcgtgtcaaatcataattctagttcatctttt

SEQ ID NO: 1719 - DNA, 43 bp, Candida albicans
agtctaatgttattcataagaaacaattgctgtctatactaac

SEQ ID NO: 1720 - DNA, 43 bp, Candida albicans
aagtttggtacgacagattttttgttacaaggtactcctgttc

SEQ ID NO: 1721 - DNA, 43 bp, Candida albicans
ctcaaaactgtttcctatgtttataatatgtagcagccaatac

SEQ ID NO: 1722 - DNA, 43 bp, Candida albicans
atatacatgaataaaaaaatacacatcaacttatctcactttt

SEQ ID NO: 1723 - DNA, 43 bp, Candida albicans
aaaggatagttctaattagtatgtaagtagttttagatcgtga

SEQ ID NO: 1724 - DNA, 43 bp, Candida albicans
catcaaatagttcaacaataactcaattcatgagctattgttg

SEQ ID NO: 1725 - DNA, 43 bp, Candida albicans
ataaaataatgcatgaaattatagccacaaatctaataatttc

SEQ ID NO: 1726 - DNA, 43 bp, Candida albicans
aaaccttaagtttctataaatattactcaactgaatagataac

SEQ ID NO: 1727 - DNA, 43 bp, Candida albicans
ctatattactataaaaaaatgcataaactttaatatatgtgtt

SEQ ID NO: 1728 - DNA, 43 bp, Candida albicans
ggtctaactaaaatctcaatacatgttagctgttgttgtactt

SEQ ID NO: 1729 - DNA, 43 bp, Candida albicans
tggtggtacatttctgcacacatgccataactcattttatact

SEQ ID NO: 1730 - DNA, 43 bp, Candida albicans
gtttggctgtaagtagggtttttttttttttcttgtttgtcat

SEQ ID NO: 1731 - DNA, 43 bp, Candida albicans
tctttgaatatgtaaataaaaggtgaacattctttttttcttt

SEQ ID NO: 1732 - DNA, 43 bp, Candida albicans
attaaatgttaagttttaatcgtaatattcaatgtcactgctt

SEQ ID NO: 1733 - DNA, 43 bp, Candida albicans
ttctaaatatctaattctaaaaacaaaagttctactgtagtac

SEQ ID NO: 1734 - DNA, 43 bp, Candida albicans
ccaaaagagctccctgtacccatgcaatacatattgggaacat

SEQ ID NO: 1735 - DNA, 43 bp, Candida albicans
ctaataggtaagttaatccatattgcaaaacttgaataagatt

SEQ ID NO: 1736 - DNA, 43 bp, Candida albicans
atatcaaataaaccaaaatgaaacagaatgcatgatcgtccat

SEQ ID NO: 1737 - DNA, 43 bp, Candida albicans
ctcactgataaaagtttatatattcggtacatctatctataca

SEQ ID NO: 1738 - DNA, 43 bp, Candida albicans
ggtatacatattgattttctaatctttatatactactacctaa

SEQ ID NO: 1739 - DNA, 43 bp, Candida albicans
cctatacaaataaaataactctctcctggactagtggacacta

SEQ ID NO: 1740 - DNA, 43 bp, Candida albicans
taatttaagcatgtgatctaaactaataaggaaaacgcccaat

SEQ ID NO: 1741 - DNA, 43 bp, Candida albicans
attaacactgggccaaatagtaactagcttagctcagcttagc

SEQ ID NO: 1742 - DNA, 43 bp, Candida albicans
ttgcaattatattaacaatcaactgggtatcagcagtctaatc

SEQ ID NO: 1743 - DNA, 43 bp, Candida albicans
ttgatggaagcaacaaagaaaatcggtgaagaaagtatatagt

SEQ ID NO: 1744 - DNA, 43 bp, Candida albicans
ccaaccaaccaaccaaacagagaaacggacaaattggaatacc

SEQ ID NO: 1745 - DNA, 43 bp, Candida albicans
tttaaaatacataacatgcagacatatatacatataaaagtat

SEQ ID NO: 1746 - DNA, 43 bp, Candida albicans
tacgggtaagacttctattagtttaaaattaatatgctaggta

SEQ ID NO: 1747 - DNA, 43 bp, Candida albicans
atttagcaaaaatacacgccgagacatatcataacaatattgt

SEQ ID NO: 1748 - DNA, 43 bp, Candida albicans
gaaggtcttcactcttatgttaaaacgttttcgtttcttcttt

SEQ ID NO: 1749 - DNA, 43 bp, Candida albicans
tctaattcttggtacaaacaaagtatctgaaaatccctcaatt

SEQ ID NO: 1750 - DNA, 43 bp, Candida albicans
tattaacataactgacgtacacgtatcaaaactagtttagtaa

SEQ ID NO: 1751 - DNA, 43 bp, Candida albicans
tggaaactgaacttattcgaacactgccttttaacctctctag

SEQ ID NO: 1752 - DNA, 43 bp, Candida albicans
gatggggataacaactaagaaaccattaatattcgacttacca

SEQ ID NO: 1753 - DNA, 43 bp, Candida albicans
ggagacaaacaaaaagtaaacattagtaattatcgttaaaccc

SEQ ID NO: 1754 - DNA, 43 bp, Candida albicans
gcatattatttgagctaagttggatattaaatatatttgatac

SEQ ID NO: 1755 - DNA, 43 bp, Candida albicans
taacaaaatgccaacaaaatgccaacaaaaacaagtcttcttc

SEQ ID NO: 1756 - DNA, 43 bp, Candida albicans
aaaaataaactctttacacttaaactataaataatcatatcat

SEQ ID NO: 1757 - DNA, 43 bp, Candida albicans
ttcaattcccaaggtctagctctaaaagcataaggttttgaag

SEQ ID NO: 1758 - DNA, 43 bp, Candida albicans
tacatttcctaaatccacaaattatggtgagtatttttctatt

SEQ ID NO: 1759 - DNA, 43 bp, Candida albicans
tctattcgtaaaatatatactaattaattaaatgtaaaactca

SEQ ID NO: 1760 - DNA, 43 bp, Candida albicans
actgttatacacttattctctacacaaatcacataaaactttt

SEQ ID NO: 1761 - DNA, 43 bp, Candida albicans
attttttttttttttttggtagttctcacattaatacacaaat

SEQ ID NO: 1762 - DNA, 43 bp, Candida albicans
atactgtttataatacagcccaataacctgggcttcatattca

SEQ ID NO: 1763 - DNA, 43 bp, Candida albicans
atataattcattcattcaatccatccatctatccctggatctt

SEQ ID NO: 1764 - DNA, 43 bp, Candida albicans
ttcaattttttgcaacccaatctatacaacaaactaattacta

SEQ ID NO: 1765 - DNA, 43 bp, Candida albicans
tgaagatatccaattaaaactaactctatagaaaatcctaaca

SEQ ID NO: 1766 - DNA, 43 bp, Candida albicans
ttcttattattaaaatatataaacttatatgcaaacagaatgt

SEQ ID NO: 1767 - DNA, 43 bp, Candida albicans
tactcttccctaaagaacaaacaattcaccggttatttgcgtc

SEQ ID NO: 1768 - DNA, 43 bp, Candida albicans
atcatcatcctcctcctcatcttggacattactattgttttgg

SEQ ID NO: 1769 - DNA, 43 bp, Candida albicans
ttacgacaagaacaattgaatctattaaaacaacaatattcta

SEQ ID NO: 1770 - DNA, 43 bp, Candida albicans
attttggtggtggtaattttttttttatttatttctatacaca

SEQ ID NO: 1771 - DNA, 43 bp, Candida albicans
aatattaatctcataaacaagcgcattatttctatgcaactct

SEQ ID NO: 1772 - DNA, 43 bp, Candida albicans
ataagaacaaatcacaaaaaaaaaaaccaaaccgaagatacat

SEQ ID NO: 1773 - DNA, 43 bp, Candida albicans
ttgatataggaacaaagagtaaaccaaccaactcttcgtatga

SEQ ID NO: 1774 - DNA, 43 bp, Candida albicans
ataaatagatatagatgatggttctatatatatactttttttt

SEQ ID NO: 1775 - DNA, 43 bp, Candida albicans
aaaaaaaaagcaccagcttttttttatttaatcagaggcaaac

SEQ ID NO: 1776 - DNA, 43 bp, Candida albicans
aataatacataatttatatttatttcaattatacagtacataa

SEQ ID NO: 1777 - DNA, 43 bp, Candida albicans
atttatagaatcgtatatttcctaatatagttcatgcggccta

SEQ ID NO: 1778 - DNA, 43 bp, Candida albicans
gtttacatttctttttcaactatttaaatgcttcaaattctgt

SEQ ID NO: 1779 - DNA, 43 bp, Candida albicans
aaactcaaaggaaggactgaatggaataagtcaaactattcat

SEQ ID NO: 1780 - DNA, 43 bp, Candida albicans
ctacaaatagtccagtaaaatctagctacagattgtatcaaac

SEQ ID NO: 1781 - DNA, 43 bp, Candida albicans
taactttttgggtgtacaacaactcacccaacaaccacccttc

SEQ ID NO: 1782 - DNA, 43 bp, Candida albicans
atcaacatttacagttattttttcttttttttttttttcgatt

SEQ ID NO: 1783 - DNA, 43 bp, Candida albicans
acactctaatataaaaccattaaaaagacataataaaacaact

SEQ ID NO: 1784 - DNA, 43 bp, Candida albicans
tttttttttccaactcacctcattcatatacaattccatctct

SEQ ID NO: 1785 - DNA, 43 bp, Candida albicans
catcaataatacaatcatccaaaactattattagactatcttc

SEQ ID NO: 1786 - DNA, 43 bp, Candida albicans
gtttaagttttagattaaagttcaactatatacatgttaatct

SEQ ID NO: 1787 - DNA, 43 bp, Candida albicans
atgtatgaatactattccattttgatgatttactcttcaacgc

SEQ ID NO: 1788 - DNA, 43 bp, Candida albicans
attgcgcctaatgttttaagctgataacaaagttctatcattt

SEQ ID NO: 1789 - DNA, 43 bp, Candida albicans
gggggaaggtaaaaaaattaattatttattattagagatatat

SEQ ID NO: 1790 - DNA, 43 bp, Candida albicans
tgcttttttttttttcggtttatatcatcattccaatttctct

SEQ ID NO: 1791 - DNA, 43 bp, Candida albicans
ggaaatttggcgagtattttgatatagaagatatcttggaaaa

SEQ ID NO: 1792 - DNA, 43 bp, Candida albicans
tgtatattgttttgcaaaagtctataaaatttatacttgtttt

SEQ ID NO: 1793 - DNA, 43 bp, Candida albicans
caaagcaaatggtgaatgggtatgatcaaggtgattaattagt

SEQ ID NO: 1794 - DNA, 43 bp, Candida albicans
aaaagcaaatataacccattaaaaactcaaaatctgtaccccc

SEQ ID NO: 1795 - DNA, 43 bp, Candida albicans
tacgagataacaaaaatctatgtctctggttggttaagaggat

SEQ ID NO: 1796 - DNA, 43 bp, Candida albicans
ttacatctattactactctaaaatgatgttacacatcagatat

SEQ ID NO: 1797 - DNA, 43 bp, Candida albicans
tttaaacaatagtaatattttctaaaattgctactacaactac

SEQ ID NO: 1798 - DNA, 43 bp, Candida albicans
atagagcagagttatttacagactctagttttaactaactcat

SEQ ID NO: 1799 - DNA, 43 bp, Candida albicans
taaattatataattctattttagctatcattatcattattgag

SEQ ID NO: 1800 - DNA, 43 bp, Candida albicans
tatttacaggtatatacaaactaatctatgttgtcttatttat

SEQ ID NO: 1801 - DNA, 43 bp, Candida albicans
tttttagagattggttatgcattgtttgtagttagctatagct

SEQ ID NO: 1802 - DNA, 43 bp, Candida albicans
ataaaatatacgtatatccgaaacctaaattgccatataaatt

SEQ ID NO: 1803 - DNA, 43 bp, Candida albicans
cttttttgggtcttttcgtttttttgcttttattggcaaatta

SEQ ID NO: 1804 - DNA, 43 bp, Candida albicans
gatttacaaagttttcaattgaaggacaaaatgcaaactattt

SEQ ID NO: 1805 - DNA, 43 bp, Candida albicans
ttagaatcaaaacatatacactgccccccccccttaataattt

SEQ ID NO: 1806 - DNA, 43 bp, Candida albicans
aagttctttgtttacaaaaggaatacaaaaaatacagactaac

SEQ ID NO: 1807 - DNA, 43 bp, Candida albicans
tctattgtacatagttgtatacatgccgtaaaagactataagg

SEQ ID NO: 1808 - DNA, 43 bp, Candida albicans
tatcaaatgattaaaatgtatgcacgagtctatgtacttttat

SEQ ID NO: 1809 - DNA, 43 bp, Candida albicans
ttgtatctattaaactacacactataggttgtcaaatgtatat

SEQ ID NO: 1810 - DNA, 43 bp, Candida albicans
cctataaaaaacattctaatataacttaaccccatgagccaat

SEQ ID NO: 1811 - DNA, 43 bp, Candida albicans
ctaaaaagagacgatagccaatagtatgcatgtatgtattata

SEQ ID NO: 1812 - DNA, 43 bp, Candida albicans
ttatttagataatgataaggaaatccctttttttatttaaagc

SEQ ID NO: 1813 - DNA, 43 bp, Candida albicans
agaaaaaccctaaaaaaaactttcacttatctgacaagtcttt

SEQ ID NO: 1814 - DNA, 43 bp, Candida albicans
attataaattatacattctatgtaaataaatgcattctgtggc

SEQ ID NO: 1815 - DNA, 43 bp, Candida albicans
tggcttattttttttaatattattcttttgtatattagtatat

SEQ ID NO: 1816 - DNA, 43 bp, Candida albicans
gtttttcttatctctattacaacagtatctaatatctacaatt

SEQ ID NO: 1817 - DNA, 43 bp, Candida albicans
tatagactttttgtaatatatattaaaaagttttcttctggtt

SEQ ID NO: 1818 - DNA, 43 bp, Candida albicans
ttaaggtcataatcttattactactattttgtgtcttacgtga

SEQ ID NO: 1819 - DNA, 43 bp, Candida albicans
atatatatgatttgtatactagataatgatcaaactattatat

SEQ ID NO: 1820 - DNA, 43 bp, Candida albicans
gctgcgacaaagattatttaaataaataaacggttttctttat

SEQ ID NO: 1821 - DNA, 43 bp, Candida albicans
tatataatattgttctagatctattgacataatccaaaaatat

SEQ ID NO: 1822 - DNA, 43 bp, Candida albicans
ctgcttgagatacttctggtggggaccaaagaatttatttcca

SEQ ID NO: 1823 - DNA, 43 bp, Candida albicans
attcgtttcaatatgcacaagtcaagaattgtaacttatataa

SEQ ID NO: 1824 - DNA, 43 bp, Candida albicans
atattagtatgttctgtagtaatgtatatatgtatacggaaat

SEQ ID NO: 1825 - DNA, 43 bp, Candida albicans
aagtgaaataaaaaaatttccgcgcattaccaaatcgggaaat

SEQ ID NO: 1826 - DNA, 43 bp, Candida albicans
aataaataaattaattagacagtacatactaaataacaaggaa

SEQ ID NO: 1827 - DNA, 43 bp, Candida albicans
gaaacacattatttaagtttcttatatctttaacctactttgt

SEQ ID NO: 1828 - DNA, 43 bp, Candida albicans
ccaggaaaagcttagcatcttaaaacttgttatagcatcacaa

SEQ ID NO: 1829 - DNA, 43 bp, Candida albicans
tgtatatctgctttttttttttaagttcttatacaacctccaa

SEQ ID NO: 1830 - DNA, 43 bp, Candida albicans
gataatgtaatttaacttaactctatacatcacaacaaattgc

SEQ ID NO: 1831 - DNA, 43 bp, Candida albicans
atatatatagtatttagaataatctatgcatgagatatcacaa

SEQ ID NO: 1832 - DNA, 43 bp, Candida albicans
gaattagagcttattgtttatatatttatataattttatggta

SEQ ID NO: 1833 - DNA, 43 bp, Candida albicans
ttttttttttttaaaaaaagcatggtgtctagtttaaactaat

SEQ ID NO: 1834 - DNA, 43 bp, Candida albicans
cttcatcctgataataactgaagcaaattccgttatatgcaat

SEQ ID NO: 1835 - DNA, 43 bp, Candida albicans
tataaacatttgtatacgatagtctaaaacaacaattgtctcc

SEQ ID NO: 1836 - DNA, 43 bp, Candida albicans
tcccacagctcctaactctctatttaagtaaacagatgtcttt

SEQ ID NO: 1837 - DNA, 43 bp, Candida albicans
tattttcccctgttatacatatttactttattttatttaattt

SEQ ID NO: 1838 - DNA, 43 bp, Candida albicans
tattctatactataccagactttccacaaaatcccaagaaagt

SEQ ID NO: 1839 - DNA, 43 bp, Candida albicans
atgataagttacatcttgaggttttaaaaatttcacatcaaca

SEQ ID NO: 1840 - DNA, 43 bp, Candida albicans
acataagttctcctttcctggtattttaactttgaagtattac

SEQ ID NO: 1841 - DNA, 43 bp, Candida albicans
cgaattcttaacaagatcggtatcaaatttgaacttatcactt

SEQ ID NO: 1842 - DNA, 43 bp, Candida albicans
ttagggaaaccgttaattaaactttgacgaaatgattataagt

SEQ ID NO: 1843 - DNA, 43 bp, Candida albicans
tctaagaaagaagaaaagtccattcactatttacaaatttgaa

SEQ ID NO: 1844 - DNA, 43 bp, Candida albicans
acttgatgatatagattattatatattatctaaacattcatca

SEQ ID NO: 1845 - DNA, 43 bp, Candida albicans
tgcattgttgttagtaaataagaattggttgcaaatcaataaa

SEQ ID NO: 1846 - DNA, 43 bp, Candida albicans
atctataagcttatttcttttttttaatatgcgttaaactagc

SEQ ID NO: 1847 - DNA, 43 bp, Candida albicans
ttttgtcaaacagcttcatttgatgaatgcagtaaatttcaat

SEQ ID NO: 1848 - DNA, 43 bp, Candida albicans
ttgtaaatctatctataaattaaaacaccagtaattataaatc

SEQ ID NO: 1849 - DNA, 43 bp, Candida albicans
aaacaaaaaaaaagtacttacgtaaacacatacataacattcc

SEQ ID NO: 1850 - DNA, 43 bp, Candida albicans
tttcttctattcaatcgacatacatacacacgaattctcctca

SEQ ID NO: 1851 - DNA, 43 bp, Candida albicans
atatttgttaacgtacatatatatatatatatatatatacata

SEQ ID NO: 1852 - DNA, 43 bp, Candida albicans
ataattagtattgtctttgcttaaatggttaacgaaacacatt

SEQ ID NO: 1853 - DNA, 43 bp, Candida albicans
tatacatatgtgtttgtgcgtgtgtttgcttataggtacacgt

SEQ ID NO: 1854 - DNA, 43 bp, Candida albicans
cagaaatctttatattgaaggggttggttattggttttttttt

SEQ ID NO: 1855 - DNA, 43 bp, Candida albicans
aaaaactaaaatttttgtattgtctttagtattggttttctca

SEQ ID NO: 1856 - DNA, 43 bp, Candida albicans
gtaaaaatagctatcataaattctttgctgttcaacaacacat

SEQ ID NO: 1857 - DNA, 43 bp, Candida albicans
ataataactatctaaaaaatttcatactctttttgtggcaagt

SEQ ID NO: 1858 - DNA, 43 bp, Candida albicans
cttgctgctgcccgtaatcacgtgtgtgtgtgtgtggcaacgc

SEQ ID NO: 1859 - DNA, 43 bp, Candida albicans
taaaacgcataaaaagatataatgaaaacacaagtgtccgtgc

SEQ ID NO: 1860 - DNA, 43 bp, Candida albicans
gaaatgaaacaaacatttaggttttggtaatatatatatatat

SEQ ID NO: 1861 - DNA, 43 bp, Candida albicans
atgataattctacgttgctttatttggttggattttaattgtt

SEQ ID NO: 1862 - DNA, 43 bp, Candida albicans
ttcttggatatacgtatacaggaggaagagtctttctatgtat

SEQ ID NO: 1863 - DNA, 43 bp, Candida albicans
tatcaagagaaatgtacaaaaaaatttcccagcttttctttct

SEQ ID NO: 1864 - DNA, 43 bp, Candida albicans
attattataaaatctacacaatgtgcccagttctttgaccaat

SEQ ID NO: 1865 - DNA, 43 bp, Candida albicans
ttaataaattatcattcaatttctaatcatctataaaacaatt

SEQ ID NO: 1866 - DNA, 43 bp, Candida albicans
tatcatcataaagcattctataagcttggtcattcaatcccaa

SEQ ID NO: 1867 - DNA, 43 bp, Candida albicans
gtagggcttacacacattaaattcgaatactatacacgaccct

SEQ ID NO: 1868 - DNA, 43 bp, Candida albicans
cgaagaaaaaccaggtccttacgaatataaacagatatagaca

SEQ ID NO: 1869 - DNA, 43 bp, Candida albicans
gtgagagccgcattactacacacgtgggctacttatcgtgtga

SEQ ID NO: 1870 - DNA, 43 bp, Candida albicans
tgtatcaattatattcacagattcaaacctatatacgttggat

SEQ ID NO: 1871 - DNA, 43 bp, Candida albicans
atatattaaagacacaacttacagatcacgttattttcttttt

SEQ ID NO: 1872 - DNA, 43 bp, Candida albicans
agttattctaatactatgaaagagactatacatttggttccta

SEQ ID NO: 1873 - DNA, 43 bp, Candida albicans
gaccgtattaaccgtattaaccgtattaaccgtattgaccgtc

SEQ ID NO: 1874 - DNA, 43 bp, Candida albicans
ttcataatacctatatatatatatacaacccttgatattaact

SEQ ID NO: 1875 - DNA, 43 bp, Candida albicans
atctataaataaaatcatcattgtgaaaaatcacctacccagg

SEQ ID NO: 1876 - DNA, 43 bp, Candida albicans
gtaaagattttgtacatacaaaaagaaacctgcagacttttca

SEQ ID NO: 1877 - DNA, 43 bp, Candida albicans
ggtttatttataaacatttacaaattaaaaaacgtcttgacga

SEQ ID NO: 1878 - DNA, 43 bp, Candida albicans
agatgaatctgatttgttacgtgttggtccagatccttctaca

SEQ ID NO: 1879 - DNA, 43 bp, Candida albicans
tcatatctaaaaacaaaagaagacaaaaaaaaacactttgcct

SEQ ID NO: 1880 - DNA, 43 bp, Candida albicans
gaaaggagacttttcttaaatgtaaatgtatatctagttttaa

SEQ ID NO: 1881 - DNA, 43 bp, Candida albicans
ttattgtaaccactatacataatataaaaaaaacgcctcatat

SEQ ID NO: 1882 - DNA, 43 bp, Candida albicans
actaagttaacatattttaaccagaatcaatctatacaactat

SEQ ID NO: 1883 - DNA, 43 bp, Candida albicans
cggggtgcctatgcggaggaccgcaaacatatattaacactat

SEQ ID NO: 1884 - DNA, 43 bp, Candida albicans
tcagatttcatgatggatgattaataataataacaatagtcgt

SEQ ID NO: 1885 - DNA, 43 bp, Candida albicans
ccgtaacactttttgatctccttcgtccccccttcttcttttt

SEQ ID NO: 1886 - DNA, 43 bp, Candida albicans
attctattgtctccaacataaatatatgcaaactacacatact

SEQ ID NO: 1887 - DNA, 43 bp, Candida albicans
catttactatctatctagaacaatacttaatctaatgcataac

SEQ ID NO: 1888 - DNA, 43 bp, Candida albicans
atgattataggctttactctaaaaatgtattatctataaaaat

SEQ ID NO: 1889 - DNA, 43 bp, Candida albicans
ttgtttattgtgtacaacaacttctatttaataacttctaagt

SEQ ID NO: 1890 - DNA, 43 bp, Candida albicans
gtgtttgtgtgtatattttaattttttatataatatgtaatgt

SEQ ID NO: 1891 - DNA, 43 bp, Candida albicans
cagccaaaaagaaatattgattcccgagttcaacatatattca

SEQ ID NO: 1892 - DNA, 43 bp, Candida albicans
tatctagtatacaaatcatatatatttataagaaggtttttat

SEQ ID NO: 1893 - DNA, 43 bp, Candida albicans
actgtattgacaaaaaacaattgctatatatatatagtctaaa

SEQ ID NO: 1894 - DNA, 43 bp, Candida albicans
ctgcaaaaaacagtaaatcagtaagaacattcttttggaattt

SEQ ID NO: 1895 - DNA, 43 bp, Candida albicans
tgttttgttctgtattttttatttctttgacctgtttagttga

SEQ ID NO: 1896 - DNA, 43 bp, Candida albicans
agtcaaaagtttataatcgtctatagtatatacgtgtacgttt

SEQ ID NO: 1897 - DNA, 43 bp, Candida albicans
atataaatggcaatttgtctactaattatatttgacacgacaa

SEQ ID NO: 1898 - DNA, 43 bp, Candida albicans
gatagaacaaaattacaatctagaaatgctatgtagttattta

SEQ ID NO: 1899 - DNA, 43 bp, Candida albicans
taagttctgtttctttactaatttacacttctatccctcaaaa

SEQ ID NO: 1900 - DNA, 43 bp, Candida albicans
cacaaaacattaaactatttattaatacttttttattactgtt

SEQ ID NO: 1901 - DNA, 43 bp, Candida albicans
ctttgtagcaattcatttatgtccatttagcacattgtggtga

SEQ ID NO: 1902 - DNA, 43 bp, Candida albicans
tataagcatctctattctatgtacatgtacatgccatctaatt

SEQ ID NO: 1903 - DNA, 43 bp, Candida albicans
gagccaggtgggataacaaccactctaagttttctcttcttat

SEQ ID NO: 1904 - DNA, 43 bp, Candida albicans
taagtttattacagcctatataagttaccctattcataatcaa

SEQ ID NO: 1905 - DNA, 43 bp, Candida albicans
tctattaatacataacctaccacttagtcaagaatttggctaa

SEQ ID NO: 1906 - DNA, 43 bp, Candida albicans
atctatacataagtttatataatatatttctatgtatgtatat

SEQ ID NO: 1907 - DNA, 43 bp, Candida albicans
tactatacatttgttaaaacctatattgcaacctgtgcaattt

SEQ ID NO: 1908 - DNA, 43 bp, Candida albicans
ctattgtggttatccattttgggatgtaaatatattgctcaac

SEQ ID NO: 1909 - DNA, 43 bp, Candida albicans
gtttcaatatctctatttctctataaaatttgtgtacatcatt

SEQ ID NO: 1910 - DNA, 43 bp, Candida albicans
tttctctttttctttttctttctctggttgtcccccacttgat

SEQ ID NO: 1911 - DNA, 43 bp, Candida albicans
tgtattctatctctctattttcaatctatttagtaatatgtct

SEQ ID NO: 1912 - DNA, 43 bp, Candida albicans
actgacatgtcttgatcttttttttttttgtttatttgtttgt

SEQ ID NO: 1913 - DNA, 43 bp, Candida albicans
agactgtgcttactgaccctattatctttttcacaaaacccca

SEQ ID NO: 1914 - DNA, 43 bp, Candida albicans
ttcttcttcttcttttctatctattatattctatttaaatgaa

SEQ ID NO: 1915 - DNA, 43 bp, Candida albicans
caaaaattttttttaaaaaaacaatattattcaattaattgaa

SEQ ID NO: 1916 - DNA, 43 bp, Candida albicans
cacacacaataaacaaatagtagtcctctatctaatttttatt

SEQ ID NO: 1917 - DNA, 43 bp, Candida albicans
gttatttatatcatctaaaaataataaatccatctccatctta

SEQ ID NO: 1918 - DNA, 43 bp, Candida albicans
ttacaagctagacactaccaacataaattatttaccaattctt

SEQ ID NO: 1919 - DNA, 43 bp, Candida albicans
aatgagatataataaatactgttttatgcaaaactataaacta

SEQ ID NO: 1920 - DNA, 43 bp, Candida albicans
aaaagctctatgtccattaagtattaaattatataaattaaga

SEQ ID NO: 1921 - DNA, 43 bp, Candida albicans
acaaaaattaaattatatcacaactctttcaactacaaaatga

SEQ ID NO: 1922 - DNA, 43 bp, Candida albicans
caataggaagcaataatgtgtgtgtgtgtgtttcttcgtcagc

SEQ ID NO: 1923 - DNA, 43 bp, Candida albicans
atctgttttgtcttctctttttctttttttattataattatta

SEQ ID NO: 1924 - DNA, 43 bp, Candida albicans
gtgtatgtaaatatatatttgaatcacggttttaaaaattata

SEQ ID NO: 1925 - DNA, 43 bp, Candida albicans
ccatgaaacaccttaaaaattgtttaatgcctgaacttaacaa

SEQ ID NO: 1926 - DNA, 43 bp, Candida albicans
agtcagcataaaattcgcacatacattatatctatctattaac

SEQ ID NO: 1927 - DNA, 43 bp, Candida albicans
attatggtattagtatactatttacagaatctaacaagcttgt

SEQ ID NO: 1928 - DNA, 43 bp, Candida albicans
tattattcaatttggtcgcttgttttgatttagttggtactta

SEQ ID NO: 1929 - DNA, 43 bp, Candida albicans
aaaatttgttgaagaaataaatatcacacctaatactgaatag

SEQ ID NO: 1930 - DNA, 43 bp, Candida albicans
ctatatatattagttacatcattatacaatgttcttttttata

SEQ ID NO: 1931 - DNA, 43 bp, Candida albicans
cccctcccccccctccacttcacactcctctcttttctcatat

SEQ ID NO: 1932 - DNA, 43 bp, Candida albicans
tgttgatatcatcaaatctagattataaacagtatattaaaaa

SEQ ID NO: 1933-2000 - skipped (68 entries)

SEQ ID NO: 2001 - DNA, 65 bp, Candida albicans
ttttgaattgcgaagaatacgtgtagtaatatggatcttattttaagtagggtataactgattca

SEQ ID NO: 2002 - DNA, 65 bp, Candida albicans
acagacttgaattagtattagaaactagaaccacagcatctttaaaatcaacttatttgcatcga

SEQ ID NO: 2003 - DNA, 65 bp, Candida albicans
gggtacgtcgggcgaccacaatttgtcgcaaacaaaatctaggcccatttttttggccacaagat

SEQ ID NO: 2004 - DNA, 65 bp, Candida albicans
gtagttaaacaatatatattgcactaacaccaaaacagtacaatttttttttttcctttctaaag

SEQ ID NO: 2005 - DNA, 65 bp, Candida albicans
tgtcatattttgtagatagtgttaattaaaggttgtgagttatcaaagtaatctaatgttgtcgg

SEQ ID NO: 2006 - DNA, 65 bp, Candida albicans
tataattaatgtatacaattaaggtttattaatataaaaaaattatattaaacaggttacaaaaa

SEQ ID NO: 2007 - DNA, 65 bp, Candida albicans
ttggttccaagaggggaaaaaaacaattgactcaaatagttttttaaatcgttccaactttttag

SEQ ID NO: 2008 - DNA, 65 bp, Candida albicans
caaaaaaaaaaataatgagcttcaaaaatcaaaggctggctaatgacaattttcaccacaacaaa

SEQ ID NO: 2009 - DNA, 65 bp, Candida albicans
atgacagaatttgttgaaatgatccagcaaatgttttcacttttttaaatggtggtcgctcatta

SEQ ID NO: 2010 - DNA, 65 bp, Candida albicans
tgtgtcattctgattgtttgtaagtttgccctctcaccaagaaatatttgtaaacatttacacga

SEQ ID NO: 2011 - DNA, 65 bp, Candida albicans
ttctcttaaaaatgacttatatttaatatacacttgcaaaactgttagtataacgctactcaaag

SEQ ID NO: 2012 - DNA, 65 bp, Candida albicans
ctcaccgcttaggttcacatgtaataggttacaaaactagagcatataccagcgttctatgtgtg

SEQ ID NO: 2013 - DNA, 65 bp, Candida albicans
aaagacaagattgaaactttgttgatctaagtagtaaatgcaattcaaactattatttgtatata

SEQ ID NO: 2014 - DNA, 65 bp, Candida albicans
tagaacagccaattctgttattatttttttttgtgagtgtgtgtgtcgtcgtgcataatttcatt

SEQ ID NO: 2015 - DNA, 65 bp, Candida albicans
ttaacaataaagacattttccggggaaaagaaaatctcttttaaaactatgtaatatgtgatgta

SEQ ID NO: 2016 - DNA, 65 bp, Candida albicans
tacaatacaattgaaaatgatgaaaaccgagaaagtagtgcgaattgcaacaaaacttcaggact

SEQ ID NO: 2017 - DNA, 65 bp, Candida albicans
ttctaacaactatagctgcaagtattgttgagcgtttaatattgtgtttaaatgaattggatgtg

SEQ ID NO: 2018 - DNA, 65 bp, Candida albicans
tgaggttctatgaacataaagtggtttgtaagttcaactaataagttgggcgctcacacagaatg

SEQ ID NO: 2019 - DNA, 65 bp, Candida albicans
tttcggtacagtggagattagagatcttgtagatttatataacgaataatagtttgatttttatt

SEQ ID NO: 2020 - DNA, 65 bp, Candida albicans
cttattatttgttcttgtttataattattaaggaagaaagagtttaaaatattctggtgaaaatt

SEQ ID NO: 2021 - DNA, 65 bp, Candida albicans
ttagacaaattacttttattgtttctttcattacttgtcggcagcattctaatgttgtctagaga

SEQ ID NO: 2022 - DNA, 65 bp, Candida albicans
tttatacacttcatttggacttaacttttaaaatatatccatcaatcaacaacttatttacaaat

SEQ ID NO: 2023 - DNA, 65 bp, Candida albicans
ttgtaaattctttaattcagtttccgccatagctatatgtgtaacttgtttattaactaggcttg

SEQ ID NO: 2024 - DNA, 65 bp, Candida albicans
atcatcattatcattcattataaaagatgaggcgaaacgattacttgaatgtttgaaatagaact

SEQ ID NO: 2025 - DNA, 65 bp, Candida albicans
cgatccagaagatgaagatgaagatactggctttctaggatttaatgattccaatcgattagaca

SEQ ID NO: 2026 - DNA, 65 bp, Candida albicans
ggctctggtataccataatcattagcgcatcactctttgatcattcattatttggtcttttaatg

SEQ ID NO: 2027 - DNA, 65 bp, Candida albicans
aaattgaagcacaaatttcacaaatgtcattttcgttccttgccatttcatttcaaagcaatcaa

SEQ ID NO: 2028 - DNA, 65 bp, Candida albicans
tctcttctcatattcccattttgtataaaacttcttacaagtccacttagacaaccaaccagcct

SEQ ID NO: 2029 - DNA, 65 bp, Candida albicans
taacttggatttttcttatttcaacttttttttagcatttgaatctttatatatatatatatcgt

SEQ ID NO: 2030 - DNA, 50 bp, Candida albicans
aacttttttctctctcacactctcaaaatttcttccaacaacaaaccttt

SEQ ID NO: 2031 - DNA, 50 bp, Candida albicans
atatcgtacccgattatgtcgtatattcttttttcaatgtcaatttgaga

SEQ ID NO: 2032 - DNA, 50 bp, Candida albicans
ttaatccatcaataatatattgttagcattcccgtctatgtggtagcatc

SEQ ID NO: 2033 - DNA, 50 bp, Candida albicans
cttctaccaatatcttcaacaaaagttttattcaatactattttaaaaat

SEQ ID NO: 2034 - DNA, 50 bp, Candida albicans
cccaacactactactactatagacagagataaactgtattaaaatattaa

SEQ ID NO: 2035 - DNA, 50 bp, Candida albicans
cgagacctacaaatacaacttttgaacttgtcacaatcatcgcattcttt

SEQ ID NO: 2036 - DNA, 50 bp, Candida albicans
ttagtgattagtcacttaacgaccctaaatagttttgaaacctcccgtaa

SEQ ID NO: 2037 - DNA, 50 bp, Candida albicans
ttggatagtgtcatatagaaagaaacggcacgaatattttggaaccagct

SEQ ID NO: 2038 - DNA, 50 bp, Candida albicans
aattgtatatgattacacgaccatacaaaaattttgcgaattgagattct

SEQ ID NO: 2039 - DNA, 50 bp, Candida albicans
tcaccacgagtactcatcttgtatttctttaaatcggtcaataattactt

SEQ ID NO: 2040 - DNA, 55 bp, Candida albicans
ctacgtttcacatatactattatttcaatttcccatcattgcaacaacaaacgaa

SEQ ID NO: 2041 - DNA, 55 bp, Candida albicans
tttgacaaaaataataataaaaaaagagaataaagatcaagaatttaggtaaatg

SEQ ID NO: 2042 - DNA, 55 bp, Candida albicans
tatgcagtgaatgtgctttgatggtctattatgatgttggtcatatttattgatc

SEQ ID NO: 2043 - DNA, 55 bp, Candida albicans
atctacctgaaccactctcgccaattatcatgatggagaagttgattgatttctt

SEQ ID NO: 2044 - DNA, 55 bp, Candida albicans
gcgaggaatgtgttaaccacaaaaaaatatataatttcattcatacacgggggat

SEQ ID NO: 2045 - DNA, 55 bp, Candida albicans
taccaaatacggaagaaagtcagtttcagtgtttactttttcatgtacatagttg

SEQ ID NO: 2046 - DNA, 55 bp, Candida albicans
attttgtaatatatctggaggaagcatgtaatccagtaattcacttggaccgatt

SEQ ID NO: 2047 - DNA, 55 bp, Candida albicans
tcaagttatggtgttagcaattctatatacccgtatttagctcacatattctgga

SEQ ID NO: 2048 - DNA, 55 bp, Candida albicans
gctcccgagtacgtggtctacgtaaacttttcacccgatgagaaaaagctctaca

SEQ ID NO: 2049 - DNA, 55 bp, Candida albicans
cagtacatgatattgatgattgtgttgataatagtaaggttcttgttccagggta

SEQ ID NO: 2050 - DNA, 55 bp, Candida albicans
ggatgatgatgttagcaatgatattgatgaggattctgagtggttaagttgatag

SEQ ID NO: 2051 - DNA, 55 bp, Candida albicans
aaattaagagttgatgattgtcatatttgttttctttttctccccgtgtacacgt

SEQ ID NO: 2052 - DNA, 55 bp, Candida albicans
cagaagaggattaatacacttaaattataccgatataaaactctctacaattggg

SEQ ID NO: 2053 - DNA, 55 bp, Candida albicans
ggattaatattcacctaggagtcatattttgcagcacctagtatcaagggatgtt

SEQ ID NO: 2054 - DNA, 55 bp, Candida albicans
tctgaccaattcgattactaatctttcacactcactcactccctcactcatttcc

SEQ ID NO: 2055 - DNA, 55 bp, Candida albicans
caggttagggatttgggctggaatgtattttaatagttgttcaactggctaggat

SEQ ID NO: 2056 - DNA, 55 bp, Candida albicans
atacgtttccttaatgtcaaaatcagccattctagattagttatgagttgggagt

SEQ ID NO: 2057 - DNA, 55 bp, Candida albicans
agtctgattcttccttcaaaaaagaaagggaaaagcaagtgaatttgattgcata

SEQ ID NO: 2058 - DNA, 55 bp, Candida albicans
aagagaaaaattaagccaagaagaatgaaaaaagtacaaaaactgtttgactact

SEQ ID NO: 2059 - DNA, 55 bp, Candida albicans
tcgtcttgcccccctatcactaatggggatttccgatctccttgccatattttga

SEQ ID NO: 2060 - DNA, 55 bp, Candida albicans
agctgtggctataagaactgtaaccagtgttttgatttcagagtgatttctactg

SEQ ID NO: 2061 - DNA, 55 bp, Candida albicans
tcagctggatcaccttgagctatgtaaaatactacttcatccatgtttgtgaatt

SEQ ID NO: 2062 - DNA, 55 bp, Candida albicans
ctccccttttccttcttctactgctattattcacagtggattcaccaacattact

SEQ ID NO: 2063 - DNA, 55 bp, Candida albicans
atctcatgagtttctcacagtatacaatcattgtaaactagaatatgcaagtgat

SEQ ID NO: 2064 - DNA, 55 bp, Candida albicans
gatttttttaatagccgacgtgaataaaagagctaagtgattatagagtatcggt

SEQ ID NO: 2065 - DNA, 55 bp, Candida albicans
actgtgaacaaagaaacagattccattctattaggattggaatgttggtggttca

SEQ ID NO: 2066 - DNA, 55 bp, Candida albicans
gactaaaggtattttggtgcaaaaagtgggaaacaaagaaatgggtttggattaa

SEQ ID NO: 2067 - DNA, 55 bp, Candida albicans
cgtttagagatgatattccttatgcaaaggcaattgagatagagaagagacagaa

SEQ ID NO: 2068 - DNA, 55 bp, Candida albicans
agtaaagatctgaataatacagaaagtaaaaatatgtgtgtgtgtccatgtatca

SEQ ID NO: 2069 - DNA, 55 bp, Candida albicans
taagctatactactggctacaaaatgcattcagaggaaattttgacgaattaaac

SEQ ID NO: 2070 - DNA, 65 bp, Candida albicans
tgttttcattcatcgaacgcgtgggccaaaaaaaaaacaatcgattatttagactggtacaaata

SEQ ID NO: 2071 - DNA, 65 bp, Candida albicans
tagataagttgttaaattgttgtaaacttatgtaaagttgaaaaaaaatttttttttagaaccac

SEQ ID NO: 2072 - DNA, 65 bp, Candida albicans
cacggccaagacaagccacggtatggcaacgcttttagattactatttcttaagttttggatagt

SEQ ID NO: 2073 - DNA, 65 bp, Candida albicans
gttgaaattgaaacttctcccaaaaaagcaatgagaacaaaagtagtgcacaagttatcaatttg

SEQ ID NO: 2074 - DNA, 65 bp, Candida albicans
ccttagttataaatgagttagaatccattgaatgacaacaactaatccatataactatatatatt

SEQ ID NO: 2075 - DNA, 65 bp, Candida albicans
agggcctgcatcgcgcaacgcttatgtacaggattttatgaatcattgaatgaaaaattttcaat

SEQ ID NO: 2076 - DNA, 65 bp, Candida albicans
tagtatgttatttaacaactcatcctgtttatgacatcgatttgaagaaatatttattcttaagt

SEQ ID NO: 2077 - DNA, 65 bp, Candida albicans
acaggacttgccaaatcaacaatggttatcacaaattccttcatttaagaaaaacttgattgaac

SEQ ID NO: 2078 - DNA, 65 bp, Candida albicans
acaaattatttagttatgaacaaaatagtagtttttcttcaattttagctctaagtgggcggttt

SEQ ID NO: 2079 - DNA, 65 bp, Candida albicans
cacgtgaagcagcccagtttgctgataacttgtaaatagtagtagaaagtggttccatagattat

SEQ ID NO: 2080 - DNA, 65 bp, Candida albicans
gccccaaaaataaacgaaaatggaatcaaccattgcttaataaactttcaaattagggaacactt

SEQ ID NO: 2081 - DNA, 65 bp, Candida albicans
attttacgattttgatagaaatgtagaagctttgagaagaactggtggtagtgttcaaggtgcaa

SEQ ID NO: 2082 - DNA, 65 bp, Candida albicans
tcagcacagaaaagccagcctttaacactcagacaatgtgactgaaagaaaagagagagagaaaa

SEQ ID NO: 2083 - DNA, 65 bp, Candida albicans
agatgaaaagttgaagaaaaacagttattctgcacctggctatttggtggaaactactcctcaga

SEQ ID NO: 2084 - DNA, 65 bp, Candida albicans
cacagccgtaaaactggatactttggaatctgtaacggtttgagaatgaaaaaaattctacattg

SEQ ID NO: 2085 - DNA, 65 bp, Candida albicans
gttttttgaaatcaaattagcaattctcaatttcccactattaggagaacctagtatcaatatat

SEQ ID NO: 2086 - DNA, 65 bp, Candida albicans
caaaatagcatatcgaacatagattcaagtatgttgctatccccaacaatactttccattatctt

SEQ ID NO: 2087 - DNA, 65 bp, Candida albicans
atcctataaaacagacatacattcagtacatttaatatactgagtgagcttgtatctgtgacatt

SEQ ID NO: 2088 - DNA, 65 bp, Candida albicans
tattgtttaaaaagcaaatcaataccttccagataaatcggtattctctataactgattatatgg

SEQ ID NO: 2089 - DNA, 65 bp, Candida albicans
atccatatcactgaaaacttcaagcattgccataagctattccaatagtagatcacttattattc

SEQ ID NO: 2090 - DNA, 65 bp, Candida albicans
tgtattgtgggcgtgtctgtgcgtctgtgtgtgtgtaccactgtcattttctttctttcggttga

SEQ ID NO: 2091 - DNA, 65 bp, Candida albicans
acaactgattactttttatttatatcacctgtcaacaacaaatttccaaataaatacaactcaga

SEQ ID NO: 2092 - DNA, 65 bp, Candida albicans
cactttaattgaattcttttaaacattcacagaacctgttctcttgaaagtaatttggttcaagt

SEQ ID NO: 2093 - DNA, 65 bp, Candida albicans
agtagaccttttcaaagtatgtagtatcttttctattttttggcaagtttttttttttcttagac

SEQ ID NO: 2094 - DNA, 65 bp, Candida albicans
ttgtattttatgaacaaaagtggtagcacttggagaactttttaatagagtgagatctgcgctta

SEQ ID NO: 2095 - DNA, 65 bp, Candida albicans
acaagtcccagttcgactcatttttatttagaattacagtaatactgatgatgacaagtggcact

SEQ ID NO: 2096 - DNA, 65 bp, Candida albicans
gtaacaaacgtctctgtttcaattcctgtaatctctgccgtttttgttctaataattgttgacga

SEQ ID NO: 2097 - DNA, 65 bp, Candida albicans
cacaatttggatttaaaagattttaaaaagtattttatcagttttatcaacaaaatgaaaagtgg

SEQ ID NO: 2098 - DNA, 65 bp, Candida albicans
gtgctgctcgagatgtgactctaaacatttttcatggagttatatggttctgtagtagtcgtata

SEQ ID NO: 2099 - DNA, 65 bp, Candida albicans
tcatattcttttaatgttattgttggtggtgttgtatcgttgatatattttggaagaaatgattg

SEQ ID NO: 2100 - DNA, 65 bp, Candida albicans
catccaatcaaacgattgtatcaactgcagcttttagcacctatacaagtaacacatacacaaac

SEQ ID NO: 2101 - DNA, 65 bp, Candida albicans
ttattatagatttggtgtttaaaaattagtaatatagtactttaacttatatttggttttcttta

SEQ ID NO: 2102 - DNA, 65 bp, Candida albicans
tagtattttttttatttttttttggtttctttcacatcatgtttgagttttggattatgaaacac

SEQ ID NO: 2103 - DNA, 65 bp, Candida albicans
atcagattgaccagatgaccaaaaagaacgaattctccaaaggtgacgaggaaagggtagcaaga

SEQ ID NO: 2104 - DNA, 65 bp, Candida albicans
tcatcaaccacttttattattggcatcataggtcaaacgttaatactatgttgctctttcttttt

SEQ ID NO: 2105 - DNA, 65 bp, Candida albicans
tctcttccaccgttatcggatattttcacttaatatatgatggagagaagagaagagaagaaaag

SEQ ID NO: 2106 - DNA, 65 bp, Candida albicans
cccaagttatcaaaaagtttggaaaaattgcagtcaagcgaaaacgaaaattttctgagttcaga

SEQ ID NO: 2107 - DNA, 65 bp, Candida albicans
ttactatcattttcctggaaaacactttttggtttatatagtttacttctttgattgattgttgg

SEQ ID NO: 2108 - DNA, 65 bp, Candida albicans
atatttaagagcagacaaagatgagaaagctgggaaactatttatgcgacagcgccgccagtgcg

SEQ ID NO: 2109 - DNA, 65 bp, Candida albicans
attactataatgataaaacggttatactagatagcttgttttcgctgaatagataaaaagctgtg

SEQ ID NO: 2110 - DNA, 65 bp, Candida albicans
acataaatatataaatagaatcatacatgaagtaaacagttgcaagagagattcagaattgctga

SEQ ID NO: 2111 - DNA, 65 bp, Candida albicans
aggactcagtaaatagccaaataagggaaacggggaaaaaaaaaaagcatttgggcccgcgttac

SEQ ID NO: 2112 - DNA, 65 bp, Candida albicans
ttgatataacgcaaattttttgctaaacatttggagcccctggcggaaatctaatctaactactg

SEQ ID NO: 2113 - DNA, 65 bp, Candida albicans
tgtcgtgcaaagtagctcaaataccaatcattgggaagatttgttgctactatacgacacttcac

SEQ ID NO: 2114 - DNA, 65 bp, Candida albicans
attaattattgttggtgctcgtagtgatgataacacttataaaaaatcaacagttttacaaaatt

SEQ ID NO: 2115 - DNA, 65 bp, Candida albicans
acctccattctagaaaaagtgatgataaaatattttcttgagtgaaaatttttcactgtcgacaa

SEQ ID NO: 2116 - DNA, 65 bp, Candida albicans
cttctatatctaaactaaacatacgagaaaattgataatgcactatcgtaaccactcattttatt

SEQ ID NO: 2117 - DNA, 65 bp, Candida albicans
aacattaaacattaaacattaaacattaaacattaaacattaaacattaaacattaaacattatt

SEQ ID NO: 2118 - DNA, 65 bp, Candida albicans
atagtttgttatagttagtctagcactgctttagataaacaaaaatatactgaactcaaaacctc

SEQ ID NO: 2119 - DNA, 65 bp, Candida albicans
ggttttgccaattatatattattctgcaaaacttgaaaatgatacatatatataaaacccacaat

SEQ ID NO: 2120 - DNA, 65 bp, Candida albicans
tcttgtcacttgtaccattcaatctacaagcaccatattaaaactccataggttggttatagtgt

SEQ ID NO: 2121 - DNA, 65 bp, Candida albicans
ttgataagcactggaaaaatggaaagaggtattaacacagggaggattctagataaacggtttcg

SEQ ID NO: 2122 - DNA, 65 bp, Candida albicans
ccactcaccaggctttggcttgatttgggtactgctgtgtgtgtgtgtgtgtgtgcacttattga

SEQ ID NO: 2123 - DNA, 65 bp, Candida albicans
ccaaccagtaaattggtagttccatcgtcaaatccaaactactagtattgtaaaaccaactcatc

SEQ ID NO: 2124 - DNA, 65 bp, Candida albicans
gaaaatgatatcttttctatttgattgatgtgtaatgaatcttttagtgatggtttgagaaaaga

SEQ ID NO: 2125 - DNA, 65 bp, Candida albicans
attgtaatatgatttgatggggaaaatagaaattcaactttcgtagtagttggttggttggttag

SEQ ID NO: 2126 - DNA, 65 bp, Candida albicans
agcctgagatgcactgacggtagatatatactgtttacccatattggattattgatagttaattg

SEQ ID NO: 2127 - DNA, 65 bp, Candida albicans
tatttgttggttttaccacagaaacaaaccatattaaaacgaatttaaccagctcaatcaatata

SEQ ID NO: 2128 - DNA, 65 bp, Candida albicans
attctggttttaatttatcagctaataatcttgtaagaatcattttatattagtttctttttgct

SEQ ID NO: 2129 - DNA, 65 bp, Candida albicans
tgagactgaggacttcgaaaattctgcgacttgtattaataataacaaaaacttgtaccaaactc

SEQ ID NO: 2130 - DNA, 65 bp, Candida albicans
ttcaagaacataatagaaatcaagaatattcatagagctttctaaatgccataatctaacaccag

SEQ ID NO: 2131 - DNA, 65 bp, Candida albicans
gacggagtgagaccagaagcggaagaagaagaagaatctgtacaactaaaaaaaattataaaata

SEQ ID NO: 2132 - DNA, 65 bp, Candida albicans
ctggttttgggtgagagttttttttttcgttttcccacaatcttcaattctactagacaaaggaa

SEQ ID NO: 2133 - DNA, 65 bp, Candida albicans
aaagggttctttcaaaagtattcagagatatacctataaacaagagtattacaattattgtgaaa

SEQ ID NO: 2134 - DNA, 65 bp, Candida albicans
ttaaaaaagcctagcaagggccgtagtcaggagaacataagagaacagaaagtagtagtaccgac

SEQ ID NO: 2135 - DNA, 65 bp, Candida albicans
catacatacatacagtagtagttaagttacacgtccacacacaacaacaaacaacagtttccaac

SEQ ID NO: 2136 - DNA, 65 bp, Candida albicans
aagcctaacacaataatttgcatctatttctcatgaatataatcaggcagctttccatcttcatt

SEQ ID NO: 2137 - DNA, 65 bp, Candida albicans
ccatttctttcatatgacaaatcaattggtaaccagtttcccacccaccagccgccaacccaaga

SEQ ID NO: 2138 - DNA, 65 bp, Candida albicans
cggcggccatgatgcagcagcagcagcaacagcagtttgcgatgatgtttccgccacagatgccg

SEQ ID NO: 2139 - DNA, 65 bp, Candida albicans
aagaaacaagtctcattgatattaaatatattcttcagagttatatgtcatgatttgttgatata

SEQ ID NO: 2140 - DNA, 65 bp, Candida albicans
cacactgcagcagttattgccgtatttcgaagtgactagttggttcgaggtatatttatatttga

SEQ ID NO: 2141 - DNA, 65 bp, Candida albicans
tcaaatcaaatctcatctcattataagaaaaaaatttatagacacattcttttttttcttctgcc

SEQ ID NO: 2142 - DNA, 65 bp, Candida albicans
gttaacgaacaccaaagacagggagaaaaaaaaaattccaacaacaacaggaacaaacatcaaca

SEQ ID NO: 2143 - DNA, 65 bp, Candida albicans
gagggaatcaattggttatcaccaagcttggaatgtggtgcttttggtactgctatttgtttatt

SEQ ID NO: 2144 - DNA, 65 bp, Candida albicans
ttaaaaataagaaatctgtagatattggtacgttcatctataagtacacttcatgggaagctctg

SEQ ID NO: 2145 - DNA, 65 bp, Candida albicans
aatgggtgctttttttaattctacaatgcagacgacatttaagtaacgacatcatacatcgtgtt

SEQ ID NO: 2146 - DNA, 65 bp, Candida albicans
tgagaaatggcaagattttgaagcgggtgacaagatacaggtttatgaagaaatcctacataaga

SEQ ID NO: 2147 - DNA, 65 bp, Candida albicans
accgagttgaagaattaaataagtgaattccgagacgacgaattggaacatttgaacacggcact

SEQ ID NO: 2148 - DNA, 65 bp, Candida albicans
aacaccacattgattactacaatgattaacttacagtagtgaggatcacgaagttgctcaatgat

SEQ ID NO: 2149 - DNA, 65 bp, Candida albicans
aacgcgctggtgtcaaaatttcacaaacaccaattggcggctcattgcctacaccaaaaaaattt

SEQ ID NO: 2150 - DNA, 65 bp, Candida albicans
ttcgatgggatgtgtgatagtagagtgggatggattacttttcagtgaacttaaggctgcttttt

SEQ ID NO: 2151 - DNA, 65 bp, Candida albicans
agaaaaaagaagagtagaaagaagtaaagaaaaattttctgtgctttttttttctaatagcactg

SEQ ID NO: 2152 - DNA, 65 bp, Candida albicans
agtttaatacatgagtgagatgcttgtttgattatatatagtgttttgttaattgcaaatgtaaa

SEQ ID NO: 2153 - DNA, 65 bp, Candida albicans
aatcaatacttaacttgtttacgcgttgttgtaacagtatgcgtgtattttttcctgaaaataaa

SEQ ID NO: 2154 - DNA, 65 bp, Candida albicans
gtgtgtgtgtaaaagtaaacaagtcacgtttcattcatcctctattaatgttttgcgtcacgttt

SEQ ID NO: 2155 - DNA, 65 bp, Candida albicans
gatattactaattcattgattgattttttttttgctttgccttgattttaacgttatcaccttaa

SEQ ID NO: 2156 - DNA, 65 bp, Candida albicans
atgttgaagaaaaaaactgggcttattttattgcaatttgacgtttgattttattttttattttg

SEQ ID NO: 2157 - DNA, 65 bp, Candida albicans
gcagtttcaatgatgattattattcttattagaataaggtgtaacaacggtaactattgacgggt

SEQ ID NO: 2158 - DNA, 65 bp, Candida albicans
atactagctctccacttgtggatatattcccaataaaatttaaaacactgtatatctcgtctgtt

SEQ ID NO: 2159 - DNA, 65 bp, Candida albicans
tttgggtgtattttgaaattgatgtaaaaataaacagaagaattacaaagatatcaatactggta

SEQ ID NO: 2160 - DNA, 65 bp, Candida albicans
cattttttaacttcttttcaataaatcattactcttgtatagttcatcattcgttactttgtttt

SEQ ID NO: 2161 - DNA, 65 bp, Candida albicans
ttgttgtcataaattttattcacagtgttggacgcgctaaactagaagaattgaacaattggtag

SEQ ID NO: 2162 - DNA, 65 bp, Candida albicans
aaacaacaaacagaaatatttttctcttacttctaacgtctgataaatcaataataaattattaa

SEQ ID NO: 2163 - DNA, 65 bp, Candida albicans
tggaaacaaagaacttcttatcgtagaatttaacattgctaatgtatgtgaataaatatcaaagt

SEQ ID NO: 2164 - DNA, 65 bp, Candida albicans
gaaaatcgggttgatatctggtgctgtggtggttggtgctggctatcttattcttaagacattcc

SEQ ID NO: 2165 - DNA, 65 bp, Candida albicans
cttctcgtgcgaacaataaatatcaatctttttgttggcgttttatttccaatgatcacaacaca

SEQ ID NO: 2166 - DNA, 65 bp, Candida albicans
ttcccacgagcagcaataagacacgacctggggcgtaaattttatcaactggcgcgcaaaaaaaa

SEQ ID NO: 2167 - DNA, 65 bp, Candida albicans
tgctcatgtattagttcagcttatatctaaatctcttagcaatgtataaatctgatgattcttga

SEQ ID NO: 2168 - DNA, 65 bp, Candida albicans
cttgatgtgttggtcaaatcaattctcataacaactaccaacaatttttttttttccttcgactc

SEQ ID NO: 2169 - DNA, 65 bp, Candida albicans
ctatttagttagtgaatgtgatgatgccaaaaaaaaaatactatacggttcgtgtactaatgctc

SEQ ID NO: 2170 - DNA, 65 bp, Candida albicans
accacaatggttacaaataagaggaaaacttttatgaatttcatgaccttccaatatgatgtagt

SEQ ID NO: 2171 - DNA, 65 bp, Candida albicans
cattccttaagattgactcgtccccccgatataaagcagtttttggtttacaattaatatactca

SEQ ID NO: 2172 - DNA, 65 bp, Candida albicans
gcattatccttcctaatgcggaagtcaacatttgtatggcaatcaatggtttctctttttttttc

SEQ ID NO: 2173 - DNA, 65 bp, Candida albicans
gcgaagtggtattgatgatttacctggtggaattagaaagaaacgtgggtagatagatatagatg

SEQ ID NO: 2174 - DNA, 65 bp, Candida albicans
taatatcccacaatctccatttttgaaacaacaacaagaacaaaaatagacatagcgggattata

SEQ ID NO: 2175 - DNA, 65 bp, Candida albicans
gagattgaccacactcatactttctatgacaagttttctagtccatagatgcttctttcaatctt

SEQ ID NO: 2176 - DNA, 65 bp, Candida albicans
atgtaacaacatacagttatcttatgtaaatatacaattagatatagatttctagattgatgggt

SEQ ID NO: 2177 - DNA, 65 bp, Candida albicans
cttataatggatattccacttcaaataattggctaaatatattaggatactgaatgaaaagttcg

SEQ ID NO: 2178 - DNA, 65 bp, Candida albicans
ttgaaggcttttttatttttgggggactgtttgtttttgttggcgctgggctatgggcaactcta

SEQ ID NO: 2179 - DNA, 65 bp, Candida albicans
ttgtatgacccacataatggatgacttgtgcatagaagtcaaccaaaaacaaagaaataacaata

SEQ ID NO: 2180 - DNA, 65 bp, Candida albicans
ataaactccaccacacacttgtaacattattcaatcaatcaatgtagttggttggtcagttggtc

SEQ ID NO: 2181 - DNA, 65 bp, Candida albicans
tgtaatataattataaaatgctttgtttagtttcttttggggtgaagggggattgttttgaaaat

SEQ ID NO: 2182 - DNA, 65 bp, Candida albicans
ggtaacgcttttttcactgagtcgtgcaattcttgacatatatttctctcaactgaaaacaattt

SEQ ID NO: 2183 - DNA, 65 bp, Candida albicans
tacacatctcaaaattttccataaaggaaagaaaaaaatttggttctctgtttaaattgtattat

SEQ ID NO: 2184 - DNA, 65 bp, Candida albicans
tgctcaatgaattccattctgctgctgttaatagatcagttcgacagggatttcgaaatatggat

SEQ ID NO: 2185 - DNA, 65 bp, Candida albicans
atacctatatatatttataaatagtagccataatgtattaattacttttctattaccttttgata

SEQ ID NO: 2186 - DNA, 65 bp, Candida albicans
tcgtgaaatgaaaaatattctgaatctaattgactctggtactaagaaagacttgagctctgcca

SEQ ID NO: 2187 - DNA, 65 bp, Candida albicans
aagaaggcttttccatttataccaagggtttagagcagatcattccaaacacccggaatcactaa

SEQ ID NO: 2188 - DNA, 65 bp, Candida albicans
atatgatataacaatcaattgaagctgtagagaataactagtatgtgcgtgtccaacaatcaaaa

SEQ ID NO: 2189 - DNA, 65 bp, Candida albicans
ttgactgtattactaaacttgatggttgttcaagttgcgggaaattttgccttcgatataatcaa

SEQ ID NO: 2190 - DNA, 65 bp, Candida albicans
cttgtggggggccaccatgtggaaagtttttgggaaacaattcatagaaggaagcggtcaggtat

SEQ ID NO: 2191 - DNA, 65 bp, Candida albicans
cttcctttagtttacatatatattcttagtgcacatttattagacggttcgagaccattttgcct

SEQ ID NO: 2192 - DNA, 65 bp, Candida albicans
taatttaacccaattaagaaatccaattacttacaggtactcacttcattatttttttctccttt

SEQ ID NO: 2193 - DNA, 65 bp, Candida albicans
ttgattggaattactagattttatcatggcaaaagtgttcaacatgcagagattgtgcaaacaga

SEQ ID NO: 2194 - DNA, 65 bp, Candida albicans
agtgtaaattagtgaaaaattttccagagcgaaaaagaaaaaaaaaaaagcgacaaaaattgtcc

SEQ ID NO: 2195 - DNA, 65 bp, Candida albicans
taagccaaaagtggaaagcaaaatgttgaaagtattgttgatactgtagttgtcgtggatgctgt

SEQ ID NO: 2196 - DNA, 65 bp, Candida albicans
tacctgcatatagtgtgccttaacataacaagtttaagtattgtgacgtggtttgaattggaaat

SEQ ID NO: 2197 - DNA, 65 bp, Candida albicans
taatgataaaaaaattaaaagaaaaaccaaaccaaaacaaaacaaaacaaatagaaacaaaaaag

SEQ ID NO: 2198 - DNA, 65 bp, Candida albicans
caacagccacctttttcggtgcgtttccattgaacaacctgtcaagcgacttccgaaatagcaca

SEQ ID NO: 2199 - DNA, 65 bp, Candida albicans
atttctttgtttttggttgacttctatgcacaagtcatccattatgtgggtcatacaatagaaat

SEQ ID NO: 2200 - DNA, 65 bp, Candida albicans
caacaatgcgaaggggcaaaagttccaaaaaaagaaggggccacagagaaatagtagtttgttca

SEQ ID NO: 2201 - DNA, 65 bp, Candida albicans
tccaaaggcaaaatcaaaaaaacgtgagaccgaaaaattacacagcgggaaaagatctagaaaga

SEQ ID NO: 2202 - DNA, 65 bp, Candida albicans
aggtgatggtgatgggtgtgtgtgtggattagagttctgaagaaatgagcaaattttgttcaagc

SEQ ID NO: 2203 - DNA, 65 bp, Candida albicans
tcttttcttattaaatttaaagaaaccccgtttatgggaatataacttgtttacttatttgttta

SEQ ID NO: 2204 - DNA, 65 bp, Candida albicans
tgtcttaggtgctttaagtaaacctgatcgtgatttctttttagccatgtatgtagaatttggct

SEQ ID NO: 2205 - DNA, 65 bp, Candida albicans
aaaaaatatatccgatcgtccccttagtataagaacttttgtcctgttcagtcgtgttaagctaa

SEQ ID NO: 2206 - DNA, 65 bp, Candida albicans
aagcaattgatttctttaacttattgaacatagctactcctttttcttaaacaagattttgttgg

SEQ ID NO: 2207 - DNA, 65 bp, Candida albicans
ttcatactcaacaacaacaactgattttaaaaaagtcaaccttagtgaaatttaaaactgcgctt

SEQ ID NO: 2208 - DNA, 65 bp, Candida albicans
gggctcagttttatttagtatatattctggttagtgttaatagtgtagtaatgtttacaatctct

SEQ ID NO: 2209 - DNA, 65 bp, Candida albicans
ttaatattatattttcaatttactttctaccatttacatgtgtaagtttatttttagacaattct

SEQ ID NO: 2210 - DNA, 65 bp, Candida albicans
tagattctaagtaactaattgaataaacatgtattaaatattgtttaattagtagtttgtccgtt

SEQ ID NO: 2211 - DNA, 65 bp, Candida albicans
aaatacgcatcaacattttacaagtcggtccacatgtttccccatgagggagctcattatgttcc

SEQ ID NO: 2212 - DNA, 65 bp, Candida albicans
tttatttccaactatttatgtttgtgtatgtttatatagtacaacaatcataccatttttgaaga

SEQ ID NO: 2213 - DNA, 65 bp, Candida albicans
tattgtgaaattgatttttagaatactaaagtttatagtttggtagttgtgtgtgtgtgtgtatg

SEQ ID NO: 2214 - DNA, 65 bp, Candida albicans
ataaaaacaacctcagaccattcttacatctgtgtttcacacgaccagaattttttttgttagtg

SEQ ID NO: 2215 - DNA, 65 bp, Candida albicans
acggttaattcacgcgaattattgatgtaacatttttttattattactatcaaatttttctaatt

SEQ ID NO: 2216 - DNA, 65 bp, Candida albicans
cgaattaacgaagagatcaagattgtagaaacaaaaattagttccagttttataagttgtataga

SEQ ID NO: 2217 - DNA, 65 bp, Candida albicans
agttgatgtatatatatcatgaataaacatctaattgttgttgttgttgttgttgtacaaccttt

SEQ ID NO: 2218 - DNA, 65 bp, Candida albicans
tttcattatacgtatgttcaaatttgttttctctctcttccagttgtgcgtctactgactcctga

SEQ ID NO: 2219 - DNA, 65 bp, Candida albicans
ataaccctgtcgacattgttattagagatgacttattgttgttgttgttgattaatattgatcaa

SEQ ID NO: 2220 - DNA, 65 bp, Candida albicans
gacgaattacctataatcagtacaaatagtatgtcaacttagagtattcaaataatgtatagatc

SEQ ID NO: 2221 - DNA, 65 bp, Candida albicans
tgaataaatagagtggtatatcactttcgcttttagttgaaccttctatcattgtttgtaatggt

SEQ ID NO: 2222 - DNA, 65 bp, Candida albicans
atttttctgtattctgattttttttttttggctttttgtaataaacgcgttgttcacctgcacac

SEQ ID NO: 2223 - DNA, 65 bp, Candida albicans
ttccggaaaaaaagaacgtcgtccaccgtggcctggtggttgttacacaaaaagggttgcccacc

SEQ ID NO: 2224 - DNA, 65 bp, Candida albicans
tttgctattctcaaaatcattcacgtgataagggctccgtagccctaattgtttgcacgtgacca

SEQ ID NO: 2225 - DNA, 65 bp, Candida albicans
acatatttcggtacttgtaagaaaaaggtgaatggagaaacttctcagaattttcatgtaatata

SEQ ID NO: 2226 - DNA, 65 bp, Candida albicans
aacggccaaattcaagaaaaaacttctaacacattccttagtttcatcttggttagatgaatcct

SEQ ID NO: 2227 - DNA, 65 bp, Candida albicans
acttttttctttatcttctgctttgagaaggttctagtctttacaaaaaaaaaaatatttgacaa

SEQ ID NO: 2228 - DNA, 65 bp, Candida albicans
tttattgattcattcttatttaatcaattgatattatcaataataattacaatagtatatccatt

SEQ ID NO: 2229 - DNA, 65 bp, Candida albicans
tccggttcgaaatcgacatctggtttgggtacatcaggagaatggcatacattgataaacacttt

SEQ ID NO: 2230 - DNA, 65 bp, Candida albicans
ctttttccttattcaattccaatgttgttttgcttttatgattttggcaaaccatttgaaaattt

SEQ ID NO: 2231 - DNA, 65 bp, Candida albicans
tctgctactacttctttttgccatttgtacattatttgtttgcattatacagtttattattttag

SEQ ID NO: 2232 - DNA, 65 bp, Candida albicans
ttggaatagagagagacaaagaaaacccacgtaggcaagcaggcagaaagtgggagctcccccga

SEQ ID NO: 2233 - DNA, 65 bp, Candida albicans
tcaatatctaagttgttgtcatcattggtgatattgtctatattattaaatgtagatggtctagt

SEQ ID NO: 2234 - DNA, 65 bp, Candida albicans
tctgtgtttttctttttaagtaattgttggtgtacaatgaagtttatacagagtttatagacgtt

SEQ ID NO: 2235 - DNA, 65 bp, Candida albicans
ttccatgaaaaaacggagttgggtgacaatgaaaccatcaaacaaggacgaaaagagatggggag

SEQ ID NO: 2236 - DNA, 65 bp, Candida albicans
attctttaataaatgtgaagctattaattaatgtcaaatttgtagatttgtgtggggcaaataca

SEQ ID NO: 2237 - DNA, 65 bp, Candida albicans
ggcttttcaagtccatgtatttgtttttagaaaactgctcaagaagtgaagccattgaccctaat

SEQ ID NO: 2238 - DNA, 65 bp, Candida albicans
ccagcacaactgaaaaaattgtaaagttacacaaaaacatataagcatgtggacaaggaaaaaca

SEQ ID NO: 2239 - DNA, 65 bp, Candida albicans
aaggacaactgacggatgctccagatgagtttattgatatcggaaatcaactgctgctggtggta

SEQ ID NO: 2240 - DNA, 65 bp, Candida albicans
ttgaaatataattgtatttagaactgtatacacgaccactaaaaatgtggtgaatagtaatctct

SEQ ID NO: 2241 - DNA, 65 bp, Candida albicans
gggatattcatattgttgttaaacttcttccttctctccatacttttatgtcgtatgattatgcg

SEQ ID NO: 2242 - DNA, 65 bp, Candida albicans
aatctctttttaattagtaaactctgtttagatttgtttgcaacatagtagtagttgggagtaat

SEQ ID NO: 2243 - DNA, 65 bp, Candida albicans
aaaaggtgatgtttatggaagtaaaattaaatatgaatttcaatagtcaacaaaagtaaaaccta

SEQ ID NO: 2244 - DNA, 65 bp, Candida albicans
tgaaaccatggatgagtaaacttgttgtgttagatgagctcaaatatctggtggaacaattgtgt

SEQ ID NO: 2245 - DNA, 65 bp, Candida albicans
ctgaaatcccttatataattgtgtccatccttcattattccaactaaccaaatatgtcaatatcc

SEQ ID NO: 2246 - DNA, 65 bp, Candida albicans
ttttggatagtttttcaaggtttcttggtagctaacaccattattatgctctgtagcacacgata

SEQ ID NO: 2247 - DNA, 65 bp, Candida albicans
ttcgaatcctgtcaaatcatcctcaaagggaacattaacatttgatattcttcttctctgtataa

SEQ ID NO: 2248 - DNA, 65 bp, Candida albicans
ggttattgcttgtttggggtttaaatgttcttcagctttccgtttgttttttttgttgttgtttg

SEQ ID NO: 2249 - DNA, 65 bp, Candida albicans
tcaacatttgtttcccgaagttgagagtattgagtaatcaaactataccggtaatggtagcttag

SEQ ID NO: 2250 - DNA, 65 bp, Candida albicans
ttaattaataatatcttaatagcattaatatgttctaataatctactgtacttacttcgttgatg

SEQ ID NO: 2251 - DNA, 65 bp, Candida albicans
acacgacctttaattttttttttttgccattgtatccttagaatcatgaaaagatgagatggcct

SEQ ID NO: 2252 - DNA, 65 bp, Candida albicans
atctaattatactttgacacagagcttctagagtaatcttggtgtaaacgacaggtcgtgcccat

SEQ ID NO: 2253 - DNA, 65 bp, Candida albicans
tgacattatagggggaacgaacaaacaaaagccttcaatcagtattgaattgatcgatttcagca

SEQ ID NO: 2254 - DNA, 65 bp, Candida albicans
acgtatagttttgtttaagaattggttttattttgtacaatcaaggtttgtagattttccaatat

SEQ ID NO: 2255 - DNA, 65 bp, Candida albicans
tttggtaatttgttttggttttgatatttttttctttcgtaccatttccgcgtttgtttatttgt

SEQ ID NO: 2256 - DNA, 65 bp, Candida albicans
cttattgtattttctctctcacatacatttcttatgtttttttttcttttgtgtcgcctctcttt

SEQ ID NO: 2257 - DNA, 65 bp, Candida albicans
ttcaaaatgttttggtggtggaaattttttttacaagcccctgttttactaccaccactactatt

SEQ ID NO: 2258 - DNA, 65 bp, Candida albicans
ttatattcttctttagagccatggtagtaggtattatctgtgtaatttgaatgtaggcgttgaac

SEQ ID NO: 2259 - DNA, 65 bp, Candida albicans
ccataccaaccagaaagtggacgttgacaatggcagtgggaaacaaagaacatgtataatcaagg

SEQ ID NO: 2260 - DNA, 65 bp, Candida albicans
tttcaatgataatctataggtggatggatgaatgaatgaatgaaaaaaaaaaaagcttcgttaat

SEQ ID NO: 2261 - DNA, 65 bp, Candida albicans
ggacggtgaaacaatcgtattgattagtaatgaatagattgcaaaaaaatagaaagttctccaaa

SEQ ID NO: 2262 - DNA, 65 bp, Candida albicans
tccaaaacttcaaatataatctcataagattttccaatttcaatttcaattttaattttcattta

SEQ ID NO: 2263 - DNA, 65 bp, Candida albicans
tgtggattatattgcataatacatttcatattttttaatacagagtaagcttcttcttcacacat

SEQ ID NO: 2264 - DNA, 65 bp, Candida albicans
aaaaaattttctttcaactttgtttctgtctatctatctatatcttacatatcacattcaaaggt

SEQ ID NO: 2265 - DNA, 65 bp, Candida albicans
ccaacaaaccccttatcatctttttcccgctacctcacgacgacctaacgaacgaacctttgccg

SEQ ID NO: 2266 - DNA, 65 bp, Candida albicans
aagttaatttgagaatatacaagatagctgtttcctacatataaaccattcctaaggaaatggtt

SEQ ID NO: 2267 - DNA, 65 bp, Candida albicans
tcttcagtgtgcttttttttccaggcctaaattcgattcttctcaccttccaaaaaaatagtgcc

SEQ ID NO: 2268 - DNA, 65 bp, Candida albicans
cagctctcccatgaggaggtgtctttaccggcgaaaaggaaaaacgagacgcattgagtggtcct

SEQ ID NO: 2269 - DNA, 65 bp, Candida albicans
ccactatcagttagtatcacattttattgttttccaataacaacaacaaaagaaatcaagcaaaa

SEQ ID NO: 2270 - DNA, 65 bp, Candida albicans
atacttacaaccaagacttggagttggatgtgtggtaatgatggagttttacagtgcgtgtaaat

SEQ ID NO: 2271 - DNA, 65 bp, Candida albicans
gtgttggtttcattacctttaccaacctcctttatatacaggcgcgtttattttttccgctttaa

SEQ ID NO: 2272 - DNA, 65 bp, Candida albicans
tccttgttttgattaggaatccataatggtattctcgtatccaatcacacgtcagtatttactaa

SEQ ID NO: 2273 - DNA, 65 bp, Candida albicans
ttcgactcgtcatgacctagcgtgggttagtcaggttgtactgtagaattaaaaaaattttgcta

SEQ ID NO: 2274 - DNA, 65 bp, Candida albicans
gaacctttttaggtacacatttggtcacgtgctcacatcataattagttcatcaatacaaaattt

SEQ ID NO: 2275 - DNA, 65 bp, Candida albicans
aattgttaatattgacaaattgtagttatttgacatagtaattggtgtcgtgtgtaaaggtggat

SEQ ID NO: 2276 - DNA, 65 bp, Candida albicans
gctttaataatagaattggtttgattaaggttggaaatttttgtttcaagtcatgagctactagt

SEQ ID NO: 2277 - DNA, 65 bp, Candida albicans
taagtattttttggtgattttggtttaaattctagacattgtattcttgctttactttggtgaaa

SEQ ID NO: 2278 - DNA, 65 bp, Candida albicans
aagtccattgaatactatctagtgaaaagtcgtgtgtaaatcgatttgaaaaatataaaaccata

SEQ ID NO: 2279 - DNA, 65 bp, Candida albicans
gtgggtattacaatagcatatatgtagtatgtattattatataataatatatccttatgtgatgg

SEQ ID NO: 2280 - DNA, 65 bp, Candida albicans
gaatgaataggtaaataaatgtataatatagttttcggaaatagacataattagatcttaaaaaa

SEQ ID NO: 2281 - DNA, 65 bp, Candida albicans
tttgcttcctttgtttggtgtaggtggaagtgtaagtgtcgtgtccccggtagagacctttccaa

SEQ ID NO: 2282 - DNA, 65 bp, Candida albicans
aggctgattatacaacattgacaacaagtcaactgaaatagcgcagttgagtttctcttgtagtt

SEQ ID NO: 2283 - DNA, 65 bp, Candida albicans
gtagcaaagcaattgtatccaaatatataaatctgggtatatatatgtgtgtctgtggaagtatt

SEQ ID NO: 2284 - DNA, 65 bp, Candida albicans
taatctaaaccttttcagtaaaagataaccaaccgagaatgaaacagaatcagtaaagtttaatg

SEQ ID NO: 2285 - DNA, 65 bp, Candida albicans
tatcagacaatcactcgtttgaagaagaattgggaattgttttgacatttttgtggaggggacac

SEQ ID NO: 2286 - DNA, 65 bp, Candida albicans
tctcttagttggtaaatgtacaggtctatcctcattcctcctaaccttccttggtgatgtgtgac

SEQ ID NO: 2287 - DNA, 65 bp, Candida albicans
ttgtttggattagttcaacttaatcccattcatactcttctcattgtggtacaaaagaagaaacg

SEQ ID NO: 2288 - DNA, 65 bp, Candida albicans
ataatatagatacaactagggcaatagtaattgaatcgtgggggaaagtaaaatacattattttg

SEQ ID NO: 2289 - DNA, 65 bp, Candida albicans
attgagtgtttttttctctcctctcccttcaattagtgactttttctaacgtcttgaacaagaaa

SEQ ID NO: 2290 - DNA, 65 bp, Candida albicans
taaacatgtacaccatttaattttgaataaataagatcttgccgcgtgtgtttctattttttagt

SEQ ID NO: 2291 - DNA, 65 bp, Candida albicans
cattccttaaatattataaactatttgttcaatatattatgacagattgtgctactttgagtgag

SEQ ID NO: 2292 - DNA, 65 bp, Candida albicans
acaagttgagataaatttaactggtcaaattgaaaattccgacagcccattgaacaaattgatta

SEQ ID NO: 2293 - DNA, 65 bp, Candida albicans
tcttaaaattatatggtagcgatttgtgtaggttggttgtatgtatttctttccacgacgaccat

SEQ ID NO: 2294 - DNA, 65 bp, Candida albicans
tatgatgacatcaattatttgattcctactgcacataagttgtcctgtactaacagtagtagtcg

SEQ ID NO: 2295 - DNA, 65 bp, Candida albicans
attgtatgaaacacacgactttttctggtagagttcgtttgaattggtagtggaaatggtagaaa

SEQ ID NO: 2296 - DNA, 65 bp, Candida albicans
atttctatttccagtttataatggttttatatttttttcctgctgtcatattctcagttgagttg

SEQ ID NO: 2297 - DNA, 65 bp, Candida albicans
aaaagacaaaaactacaataaagcaaacaggtcattaagttcgaatttttgttgacatgtgttga

SEQ ID NO: 2298 - DNA, 65 bp, Candida albicans
tggcagtggtagtaagcagaagagaaaaaaatggacgatctataaatacggccaaaattttctca

SEQ ID NO: 2299 - DNA, 65 bp, Candida albicans
gtatttgcaactttactgaatgacctcttgagcattaattgtcctaagaaggaaacaccttttat

SEQ ID NO: 2300 - DNA, 65 bp, Candida albicans
gacaacaaacaagttaatataacgacattcagcagtaccaatacatttattcatattgtcctgga

SEQ ID NO: 2301 - DNA, 65 bp, Candida albicans
aacattcttgtttcgatttgatttgatttgatttgatttgatttgatttgatccaattcaaaaca

SEQ ID NO: 2302 - DNA, 65 bp, Candida albicans
ttgcttgagatattttaggataacagattccaatttttcagatttcccacctgtatgactatgca

SEQ ID NO: 2303 - DNA, 65 bp, Candida albicans
gcctcaattaactacttctacagtcgaacagagaagtatagatttcagttggtacatatttctat

SEQ ID NO: 2304 - DNA, 65 bp, Candida albicans
aaacaaatttggcacacactaaaaataaattaggagacaaaatttttttagtgttgttgtcttca

SEQ ID NO: 2305 - DNA, 65 bp, Candida albicans
tgtcaagtagaaaaagtatcggttttgtctgaatggtttggtttggtcgcagtacttgtagagca

SEQ ID NO: 2306 - DNA, 65 bp, Candida albicans
aaattacaaattgagacgcgttgcgacggtcgtgtacttatttcactttttgttgaaaagtcgtg

SEQ ID NO: 2307 - DNA, 65 bp, Candida albicans
tttatgactgtttgagtttatagcatttttacactacttttaaagtgaagtgtgaggtttgcaaa

SEQ ID NO: 2308 - DNA, 65 bp, Candida albicans
attctgtaacgatttcagtagacattgtattgttgaacgttaagactttgcaactgttcaagtct

SEQ ID NO: 2309 - DNA, 65 bp, Candida albicans
tagtgtatttaccaactcttgtaagtaaactgttattttttgttgatttctcaacttcgccttcc

SEQ ID NO: 2310 - DNA, 65 bp, Candida albicans
agaactttgcaattagcaccacattttcatcatcttgaggaagatccaaatgtttctggactatg

SEQ ID NO: 2311 - DNA, 65 bp, Candida albicans
agaaatatatacatattcatttataattcattatttcaaaaaagtgatctgtattggttgttgta

SEQ ID NO: 2312 - DNA, 65 bp, Candida albicans
caccacaactgcgcggagaactataacaaaggaaattttttccgaaaccttataattttttagac

SEQ ID NO: 2313 - DNA, 65 bp, Candida albicans
gatttgcattcatattcctttttctccattctgtttgtatatagacataccccccacattcgttt

SEQ ID NO: 2314 - DNA, 65 bp, Candida albicans
caacaacaactttatgagcaagcaccccaagaaggactgtcatatcaacaccaatatcaacaacc

SEQ ID NO: 2315 - DNA, 65 bp, Candida albicans
gtgtttcagtattaaatggtctctatttcgttctgctactattctttttttttggtatattagca

SEQ ID NO: 2316 - DNA, 65 bp, Candida albicans
ttggaaagatgttgatagcgtcatgaacgattttggttttcacacaagttgacgtcgtgtgaatt

SEQ ID NO: 2317 - DNA, 65 bp, Candida albicans
aaccccgaccaagccaagttcatcaacagggacgtattggacaagtactggtacgttggcggtgt

SEQ ID NO: 2318 - DNA, 65 bp, Candida albicans
ccattcaaagatgacgttacgggcgaggcattgaccaaacgccaagacgatactgcacaagtgtt

SEQ ID NO: 2319 - DNA, 65 bp, Candida albicans
tggtgacgtaaatattgcaaaatgtacgaaatttgatcttctttacacgagcacccatattgtct

SEQ ID NO: 2320 - DNA, 65 bp, Candida albicans
caatagtctggtgtattcattttgatagaccatgccaagattagtagaaaatttagtttgggctc

SEQ ID NO: 2321 - DNA, 65 bp, Candida albicans
ttattcaattagtttaatattatttttttaaaataacttattcttttcaactttagaggaaataa

SEQ ID NO: 2322 - DNA, 65 bp, Candida albicans
aaatatgaaagtgagtgcgacataatgtagaaaaatgtcgaatgtcttgaactttacccattgag

SEQ ID NO: 2323 - DNA, 65 bp, Candida albicans
agatcttgtgtactttttgctttttatttaatttcaatttaatattaattatcaaaatgtgttta

SEQ ID NO: 2324 - DNA, 65 bp, Candida albicans
tcaagatattcaacaactttaaaatggtggtgtcatctactgctttttcaagattagatacagta

SEQ ID NO: 2325 - DNA, 65 bp, Candida albicans
gattttttattaaccacccacacaacaacaacaacaacttgattcagattttaagaaagctcttt

SEQ ID NO: 2326 - DNA, 65 bp, Candida albicans
aatgctatttgtttagttggtttaaatctgagtaatacctgaccatcaaccattggtagtctttg

SEQ ID NO: 2327 - DNA, 65 bp, Candida albicans
ccattaaattagccctccctttaaaatgaagaccgtggtgatgttagagctaaataggtgtttag

SEQ ID NO: 2328 - DNA, 65 bp, Candida albicans
gtggagaatcaagtaatttaaatagtattttcaatagttccccaattaggtagtgtattatggat

SEQ ID NO: 2329 - DNA, 65 bp, Candida albicans
tttgttgattatttctaaatttgcagcaaattgtttcgggtgtgcctataataagtggtcgtgta

SEQ ID NO: 2330 - DNA, 65 bp, Candida albicans
ctcatcaagttatttatatataaacagcggtgtcaaaattggaaacaatattggatgagaaagtt

SEQ ID NO: 2331 - DNA, 65 bp, Candida albicans
ttatagaagaagtattcacatatttagatcagaagtttgtatatttttaagctatatggaaattc

SEQ ID NO: 2332 - DNA, 65 bp, Candida albicans
tatttttattattattattattatctagttcaataattattattgttatacgccatcagatcact

SEQ ID NO: 2333 - DNA, 65 bp, Candida albicans
gttgatatctttctttgtagatgaattgtggaggaggatgataatgagtaatctaattgactcat

SEQ ID NO: 2334 - DNA, 65 bp, Candida albicans
atgaataatattgcttctgggcatagctggatagacagttgattcctgatttatttggctagtga

SEQ ID NO: 2335 - DNA, 65 bp, Candida albicans
gatataattatcaatgtactagacaatattaatatgcagtcccgtactagtaatgatgatgaaat

SEQ ID NO: 2336 - DNA, 65 bp, Candida albicans
actaatggaaatctcataaaaattactatattataaattatcttaaattaactgctgaacgtacg

SEQ ID NO: 2337 - DNA, 65 bp, Candida albicans
catcattcatcatcatcaattggagaattttgacatttttcttctttcctgcaaattactgaacc

SEQ ID NO: 2338 - DNA, 65 bp, Candida albicans
gtcggcggtttatcacaaagtcctgattgtggtttttaattttttttttgccttgtttattagca

SEQ ID NO: 2339 - DNA, 65 bp, Candida albicans
taatatattatatgcgttgagttaaaactcagtattcattttatggtttgatactaaatttgagg

SEQ ID NO: 2340 - DNA, 65 bp, Candida albicans
aaggtcacgataacctttaggtgatgggggtgcgtgtgtgctgatttctgctaactaataatttt

SEQ ID NO: 2341 - DNA, 65 bp, Candida albicans
atcacatttcctgggttatgaatgaatgaatttgtagtgtttgttaattagtttaagtagtgaat

SEQ ID NO: 2342 - DNA, 65 bp, Candida albicans
gtcgtgttatctttttttctgcccaaatcttcttctgctcttgtaagagaattaggcgacaaaac

SEQ ID NO: 2343 - DNA, 65 bp, Candida albicans
ttttgtcgcctaattctcttacaagagcagaagaagatttgggcagaaaaaaagataacacgaca

SEQ ID NO: 2344 - DNA, 65 bp, Candida albicans
ctgtattcgcggtactgttggctgagtgtgtgacatatactatcaatttacactataattggttt

SEQ ID NO: 2345 - DNA, 65 bp, Candida albicans
tttttcagaagtgatgagaaggggcgttgtagtagttaatagtgaagctcatctcatctttaatt

SEQ ID NO: 2346 - DNA, 65 bp, Candida albicans
aaatgtatgaagatgagttgatttgtacacgactttccaaatactctctcgatcgaagcttataa

SEQ ID NO: 2347 - DNA, 65 bp, Candida albicans
gaggcatttaaacaggaagagaatatatagtaatacacgatatgaataggcatgcatgatagtgt

SEQ ID NO: 2348 - DNA, 65 bp, Candida albicans
acctgaataatgaatccttggtagttgtgtcttcaatattctcatcctcgattctttgtttaaat

SEQ ID NO: 2349 - DNA, 65 bp, Candida albicans
ggtggtaagtggttagtggttagttagttagtgtagctggtatagttgttgatttggttgtattg

SEQ ID NO: 2350 - DNA, 65 bp, Candida albicans
ggcaagtagttgttggttttgtggagtagccggccacgacgatggggatttatagtgggtctggt

SEQ ID NO: 2351 - DNA, 65 bp, Candida albicans
gtatttctttccatgaaaatggcctcaaaaggttttccatcttgaacttatttaaataaatgatt

SEQ ID NO: 2352 - DNA, 65 bp, Candida albicans
tagtgctgttattcattgttaggtgctgtgtgtggtgtgataggagaacaaccctcccacactta

SEQ ID NO: 2353 - DNA, 65 bp, Candida albicans
ttgaatggtctgatcatctgcatcaagcaattctcgagctgttataaatgtctctcgagtattct

SEQ ID NO: 2354 - DNA, 65 bp, Candida albicans
ataaatagactatttcaaacagtttgctttataatcttttcgactcttgaaggttcgtgtccatc

SEQ ID NO: 2355 - DNA, 65 bp, Candida albicans
tttcagcaacaccttctactaccatcaaaagatttctttaacagtcaacgacatctttcacaatt

SEQ ID NO: 2356 - DNA, 65 bp, Candida albicans
gcgtttgtagttttttaatgtgtgttgtgatcattggaaataaaacgccaacaaaaagattgata

SEQ ID NO: 2357 - DNA, 65 bp, Candida albicans
aattggtaaagacattgtgtgtgtgtgattgatatcgaatagtataataaatggagatgttttct

SEQ ID NO: 2358 - DNA, 65 bp, Candida albicans
ccaagcaagaaacttttctttcactcaccaaaattctcgttcatcaaatatggtggcaacaccaa

SEQ ID NO: 2359 - DNA, 65 bp, Candida albicans
ttggagtagcttgataagtttgtctttgacctcaagaaacgaaacctcttcctgtgacaactctt

SEQ ID NO: 2360 - DNA, 65 bp, Candida albicans
ttttcttttctattatagatgctgtttcggtaaatcatggttatggggtaaacaaggacatctat

SEQ ID NO: 2361 - DNA, 65 bp, Candida albicans
gacgctagaactggtgaagagttgtttgctggtgtgggacacaacatgggagtattggactttgc

SEQ ID NO: 2362 - DNA, 65 bp, Candida albicans
tagtaaattcattgatcaagggagttaagattgattcaaggtttttgcaacagaaagccaactat

SEQ ID NO: 2363 - DNA, 65 bp, Candida albicans
aattctttgctaaaattccaaattgttgcatttgatcacctcctctgcttcaaatcacgtgtaaa

SEQ ID NO: 2364 - DNA, 65 bp, Candida albicans
ttattgaattggacagcaaagatcaaaacaaaaaagaagagtgtaattcaaatgaattaaaaaac

SEQ ID NO: 2365 - DNA, 65 bp, Candida albicans
actacatatataaatattaaacaattatcataatattaaattgataccaaattaaaccagtcgtg

SEQ ID NO: 2366 - DNA, 65 bp, Candida albicans
aaaaacaagtgcttccatagaaatttggtaaagccttgtgtttctttggtacttctgtctgtgtg

SEQ ID NO: 2367 - DNA, 65 bp, Candida albicans
cttataaaataaatatcactataactactgggggacattagattcttaattactgcttatgtata

SEQ ID NO: 2368 - DNA, 65 bp, Candida albicans
ttttatatctctctatatgaacagaaagtgacaaacagtgatggttgtcctttttttgctttctt

SEQ ID NO: 2369 - DNA, 65 bp, Candida albicans
actactattatatgatgatgataagtataatcctttcagtgaactccttggaggcagattgaatg

SEQ ID NO: 2370 - DNA, 65 bp, Candida albicans
tttaaaaaggaaaatttctttttcgggcaaatcctacacacacgcaaccacacacgaccaaaaga

SEQ ID NO: 2371 - DNA, 65 bp, Candida albicans
cgtatcagccgctgtccaatttttgggtttatgtttatgtttatgcgcttaaaagaactttccag

SEQ ID NO: 2372 - DNA, 65 bp, Candida albicans
aaattttgaatctcatcagacgtgttttgtaaaatatattctattactataaaacacgatgattt

SEQ ID NO: 2373 - DNA, 65 bp, Candida albicans
cacaaaaaccaaaaagcaaaaaaggtcataagactcataagttttaataggtcatatctttatat

SEQ ID NO: 2374 - DNA, 65 bp, Candida albicans
accaatagatgttgttgctaaccaagtcaaagacgcgttgaagacaagaggtatttagacacaca

SEQ ID NO: 2375 - DNA, 65 bp, Candida albicans
cacaattcatccactccttcgggataaccaagaacatgtcacagttttggcaccctaacaatttt

SEQ ID NO: 2376 - DNA, 65 bp, Candida albicans
catgttgagaattcttggggctatacaggcaaagcagaaaaaaagagaggtctagtagtaggtgg

SEQ ID NO: 2377 - DNA, 65 bp, Candida albicans
caagaatcggtgtttaatggtattgtagatagatttttagaaagatatagtgcataaatttagtt

SEQ ID NO: 2378 - DNA, 65 bp, Candida albicans
taactaagtggatcttctaatacgcataaccctcacaaacttaacaacaataataacatagtgag

SEQ ID NO: 2379 - DNA, 65 bp, Candida albicans
cccatatattaaacaaattcaattgataagttgtagtctatagtaatggaacctttatataaaac

SEQ ID NO: 2380 - DNA, 65 bp, Candida albicans
aataaggtttttgtagtagcacacgatattttttcatagaaccgcacttttcaattgtcaattac

SEQ ID NO: 2381 - DNA, 65 bp, Candida albicans
gtaaatgtttacacagtaaccaacattgccgtcataaaaccacataatctcttatctcacttttg

SEQ ID NO: 2382 - DNA, 65 bp, Candida albicans
cgtgtgagtgacaatattggaaaatattgttaaggtgataacgttaaaatcaaggcaaagcaaaa

SEQ ID NO: 2383 - DNA, 65 bp, Candida albicans
acatttcaaaaaatatttttccaacaaaaaatttttccatttctttatattctttctttcttttt

SEQ ID NO: 2384 - DNA, 65 bp, Candida albicans
ttcattttcactagccaatcgaagaaataaaatagaattggtttcactataattcatcaaaaatg

SEQ ID NO: 2385 - DNA, 65 bp, Candida albicans
ataggcaagcaatatgagggttgtagacagtataaatgtcgtacacgacatttcttgatttcttg

SEQ ID NO: 2386 - DNA, 65 bp, Candida albicans
atatatatataaaatgaaattagcatttagatatttgactacttttttgcaatctagttggcttg

SEQ ID NO: 2387 - DNA, 65 bp, Candida albicans
tatagattagtaattagatttgatgtaatgtacacgactacactatttgctggtgtctttgtttt

SEQ ID NO: 2388 - DNA, 65 bp, Candida albicans
cgatgccataaaaaactgtttcgaccatcaacttcagttggacatggacctcttcaggcattgat

SEQ ID NO: 2389 - DNA, 65 bp, Candida albicans
atattgcatttatgaaaaatccatgatttgaattagaaatggtttgaaaattgtctaatggagcc

SEQ ID NO: 2390 - DNA, 65 bp, Candida albicans
atatacaccatgcatagaagtattcaatctttctgttagtcatattcttgatttcaaatccctat

SEQ ID NO: 2391 - DNA, 65 bp, Candida albicans
ataaaaaaccaataggcaaatataacagtaaaaagagacactttgcaaacgatgaagaatagttt

SEQ ID NO: 2392 - DNA, 65 bp, Candida albicans
actcgcactggcggcgctgtcgcataaatagtttcccagctttctcatctttgtctgctcttaaa

SEQ ID NO: 2393 - DNA, 65 bp, Candida albicans
ttacaatatacaattaaaaaaagatgttatagctttgggtccaacttgtagataaagatatcatt

SEQ ID NO: 2394 - DNA, 65 bp, Candida albicans
tcattaagtgaaacaaccaaattaatgtaatttttagtggcgcacttttaaacaacaacaacaac

SEQ ID NO: 2395 - DNA, 65 bp, Candida albicans
tttggtggtgctactattggtgcgttatctgttgtttgtgatttaatgggtactcttggttctgg

SEQ ID NO: 2396 - DNA, 65 bp, Candida albicans
gttaatatacctaagctatacatcctctcacaaaacatacaattgtattaaacgttatttatcat

SEQ ID NO: 2397 - DNA, 65 bp, Candida albicans
cctttatttatagttgataacaagtttttctatttattaatataaaagaatgatttatgacttgg

SEQ ID NO: 2398 - DNA, 65 bp, Candida albicans
ttcaaatgctgtaaaaaagaatatcggttggaatgatctttggatcgtttaagcattttgttgta

SEQ ID NO: 2399 - DNA, 65 bp, Candida albicans
aagtagtgataaatagaaaagctgggtgggaggtattgagcgtgttaaaatttactagaatatag

SEQ ID NO: 2400 - DNA, 65 bp, Candida albicans
taaaaatgtacctaggaaactacaaggtttatttatgtatatctgattgagttcttacagaatct

SEQ ID NO: 2401 - DNA, 65 bp, Candida albicans
ttaactattttgatttgctttttgtagttatgtgcaaaactctgtacaattcatagctgttgatt

SEQ ID NO: 2402 - DNA, 65 bp, Candida albicans
tattaaaataactaactaaataggttgagataatccgcaaatctgctaaaagctacatgtcatcg

SEQ ID NO: 2403 - DNA, 65 bp, Candida albicans
tagataaaaccaattgttttacttggtgaaaataaaagattatttttccactaattaaaagagat

SEQ ID NO: 2404 - DNA, 65 bp, Candida albicans
cattttttgtctctctctctattcactatagtttttccaacagtacaaactgagaaaggataaaa

SEQ ID NO: 2405 - DNA, 65 bp, Candida albicans
ttatttttttctcacattgcacacgacacgacatccatcatcagaatggaaagatgaagatgaaa

SEQ ID NO: 2406 - DNA, 65 bp, Candida albicans
aattgaaactgttatgattcatctaacttcttggtgtatcgcacagtactgaagaagttattttt

SEQ ID NO: 2407 - DNA, 65 bp, Candida albicans
tacaaataatctgaacttaagtgcactactagtagttgttcacgtgattagaaaacttatttatg

SEQ ID NO: 2408 - DNA, 65 bp, Candida albicans
agaactgattcgatgtttgtaaacactcgtatccatgtggaaaagtgtgtgtaaagcttaccaat

SEQ ID NO: 2409 - DNA, 65 bp, Candida albicans
gtatatgcaaaacactgcaaaatcattaggaatggaatggatttagaataggagtttatatacgc

SEQ ID NO: 2410 - DNA, 65 bp, Candida albicans
aaattcccttcctgtttttctctcgccccgtgtgtgggtgggtctctctcactgttgtgtaattc

SEQ ID NO: 2411 - DNA, 65 bp, Candida albicans
actctttagagtatagcaatagataaatttgtgcttcgtaattcgttacaacattttgttgtgct

SEQ ID NO: 2412 - DNA, 65 bp, Candida albicans
accagattctctcgaagacgcatacaaaataccgcgtcctgtccacagagaagagttcactcaat

SEQ ID NO: 2413 - DNA, 65 bp, Candida albicans
aatttgattttgtaacttgctgatggttgtcgtgttgatatttattcgtgtcagtgtctttaata

SEQ ID NO: 2414 - DNA, 65 bp, Candida albicans
tctctttgtctactactagtactgatgatgatgatgaagtgaggatgggatgatgatgaagaaga

SEQ ID NO: 2415 - DNA, 65 bp, Candida albicans
actataacgaaagaagctgaaagaggaactaagaactaagaactaagaagaagagaaggaagaaa

SEQ ID NO: 2416 - DNA, 65 bp, Candida albicans
cactcaatttagcagcccagtccgatgccatgattggtaaagactgttgttggagaatttgtttt

SEQ ID NO: 2417 - DNA, 65 bp, Candida albicans
aaggaacagtagattgtcttctatatagtataagtgggcctgtgctatgactcgagcaagataga

SEQ ID NO: 2418 - DNA, 65 bp, Candida albicans
attcacatcacatgactagggctacagccctattttgttgcgacattcagacgacaaactaccta

SEQ ID NO: 2419 - DNA, 65 bp, Candida albicans
acgccaagctggtattttacatgaactgtatgacacgcttaaatgaagttaatatgtaaatcact

SEQ ID NO: 2420 - DNA, 65 bp, Candida albicans
tttggttgattgattggttagtcagtcagttggaagagcattgattcaggtagtgtgaaagagct

SEQ ID NO: 2421 - DNA, 65 bp, Candida albicans
gacagtttagagaaagtgttttcattgttctaacgtataatactattacaattaccagttacatc

SEQ ID NO: 2422 - DNA, 65 bp, Candida albicans
tttgaaagtaattacaaaacatgatgcaaaatcgcttgttatttctaaagatggagatttcttcg

SEQ ID NO: 2423 - DNA, 65 bp, Candida albicans
agacaataatttgatactaaacttgtacaaatcaatttccaaaaatttttcaaaaagaaaaagga

SEQ ID NO: 2424 - DNA, 65 bp, Candida albicans
taatcatttaactaattacatctactactacaaatacatcaacaattattttcaaatagaatatt

SEQ ID NO: 2425 - DNA, 65 bp, Candida albicans
cctgcaacatatccttcaggtgcttcttgatctaaaaatgatttcctttccataagtgataaata

SEQ ID NO: 2426 - DNA, 65 bp, Candida albicans
aattgacacttgttcgtataagtaacgtgtaatcttcttcttcctattaatgtgtttttcagctg

SEQ ID NO: 2427 - DNA, 65 bp, Candida albicans
tttcgcaatgaagaatttgtttgagagagtgagagagaagaaagtaagtaaaaaattttcttcgt

SEQ ID NO: 2428 - DNA, 65 bp, Candida albicans
cataataataattaaggttcatgtgtgaaaattgaaaagtaacaaattgcgtccccaattaaatc

SEQ ID NO: 2429 - DNA, 65 bp, Candida albicans
ttatactacacaatataatttagttctgtcatcacctgatgtgtgatggaaaaattttccattct

SEQ ID NO: 2430 - DNA, 65 bp, Candida albicans
gtggcgacaagctacggagcatttgtagcaattggttagcagcatcgaacgaatccatggttgat

SEQ ID NO: 2431 - DNA, 65 bp, Candida albicans
caagaatcatattttggatctacttgacattaataactacttttacagtctaatttagtgattaa

SEQ ID NO: 2432 - DNA, 65 bp, Candida albicans
accatagaaaaactaagagaaatcatgtaagttagtagaaagtatagctacacagcgtatttaaa

SEQ ID NO: 2433 - DNA, 65 bp, Candida albicans
gagaacacaaagagtgctaattgcaattggctactaatacgaagagaacaccaaagtgaatttgg

SEQ ID NO: 2434 - DNA, 65 bp, Candida albicans
tagactgtgttactcaatagtaaatattatctccggtgattgaatgtatctgtaatgttagtttg

SEQ ID NO: 2435 - DNA, 65 bp, Candida albicans
taatgccttctggaaccaggaattgtcaaagcctggaatagggtattaaaattctattttcaaaa

SEQ ID NO: 2436 - DNA, 65 bp, Candida albicans
ggtagtggtggtggttgtaacgcgtccagcagaaaattaaaatgtacacaaaaataaatgctcta

SEQ ID NO: 2437 - DNA, 65 bp, Candida albicans
catatatatttactattggagaaattaaatcgacgttatgtttttgcaactttgaatattctgtg

SEQ ID NO: 2438 - DNA, 65 bp, Candida albicans
tgtaacgcattcacgtgatcataatttttttaaattcaaaaactgaaccaaattcctgcatattg

SEQ ID NO: 2439 - DNA, 65 bp, Candida albicans
aggagaccaagggttgttttcacttacgatttcatctgattcgactgaactgtcagatggagtaa

SEQ ID NO: 2440 - DNA, 65 bp, Candida albicans
cttaattcttccatttttttctttctttctttctttcttcaagtttattatacctaaatctattt

SEQ ID NO: 2441 - DNA, 65 bp, Candida albicans
ttctatttatgtagttagggatgcatcaccaagatcattgtatgaaccctaacgacgtgtcttgt

SEQ ID NO: 2442 - DNA, 65 bp, Candida albicans
ttggataacttttttgttcccatgtacacgcacatttattgagttaggttaagcgttgtattgaa

SEQ ID NO: 2443 - DNA, 65 bp, Candida albicans
cgtggtgtcattttctgggaccaagcttcaggtaacccattgttgatgttgcagggccaccgcaa

SEQ ID NO: 2444 - DNA, 65 bp, Candida albicans
aattttgggtaaaacaatttaatgggacataaataacaaattacccggatattatcactatcact

SEQ ID NO: 2445 - DNA, 65 bp, Candida albicans
caagaagcagctattaatttaccacaatcccccaaatatagcatatatttggcgttctttcacat

SEQ ID NO: 2446 - DNA, 65 bp, Candida albicans
tatttggtctaactaaagatactgaaggggcacaaccgttatttgatcttataaatgaaaatgtc

SEQ ID NO: 2447 - DNA, 65 bp, Candida albicans
cctgctcttgactatgttaatatagagagagagatagaaaaaagttattagcgttgttgtttccc

SEQ ID NO: 2448 - DNA, 65 bp, Candida albicans
gttctttacaccaccaagctcggaccaaattgttggtttccagaacgatccaataactgcataga

SEQ ID NO: 2449 - DNA, 65 bp, Candida albicans
ttatttaagccaaaacttatttcgtccattctatgtgtgcagctcaatatgctgtaaataatatg

SEQ ID NO: 2450 - DNA, 65 bp, Candida albicans
atgtaaatatcatatccgggtaaagtctaacatcctgtatattgaacacgggcaaccttgtcttt

SEQ ID NO: 2451 - DNA, 65 bp, Candida albicans
gcaatgggatgaagaacaattaatttaatatttgaggtctgtctgccctgggtgtggaaaatggc

SEQ ID NO: 2452 - DNA, 65 bp, Candida albicans
atatgcaagttatttgattatagaagacatatatagcagccaaacctctatattccgaggggtat

SEQ ID NO: 2453 - DNA, 65 bp, Candida albicans
atgatcagtatactttggaatcgacatagtgtataattaagaagaaagtggtggaaaaggtacaa

SEQ ID NO: 2454 - DNA, 65 bp, Candida albicans
atactgtataatggtcgtgtgcttttgttcgacaactcaccaagagagagaaagagagaaaaatt

SEQ ID NO: 2455 - DNA, 65 bp, Candida albicans
ttgttaataataataatagtgccaactcgagaaatcaaattgtataatcgcgtcaataactttag

SEQ ID NO: 2456 - DNA, 65 bp, Candida albicans
cttcaacccattgtatgagtagtggtttaaaatcgtcattcacgacagacattggtgtgtaactg

SEQ ID NO: 2457 - DNA, 65 bp, Candida albicans
tgttttaagcattttagacgattaaacaattccagacgcggtagtcttcttgcatttaatttgtc

SEQ ID NO: 2458 - DNA, 65 bp, Candida albicans
aattagaattgaacagaaattatcaatagttcaaagattctaatatatagttgaagggagtttta

SEQ ID NO: 2459 - DNA, 65 bp, Candida albicans
attaaatggaccaatattgatggagggttaaatagggcgatcaggtttgtagaatattcgaactg

SEQ ID NO: 2460 - DNA, 65 bp, Candida albicans
tttggatgatgagatggtttataagagatgagagagagagagtagtgtgatttggcacaaataaa

SEQ ID NO: 2461 - DNA, 65 bp, Candida albicans
aaaaatcaaatgtgtttaaaatctatatcctgtcttccactatattactaaaagttcatcttaat

SEQ ID NO: 2462 - DNA, 65 bp, Candida albicans
ataacacaccgttggttacataatagactgtttttggaaaagcaaaaatttgagagaagaagaag

SEQ ID NO: 2463 - DNA, 65 bp, Candida albicans
tctatcttttggtttgtagatcaagaagttcttagtatggatacttgaaatgtaaattttggtag

SEQ ID NO: 2464 - DNA, 65 bp, Candida albicans
gctgatttctctcagatggaaggtttggctaaattttgtaaagttaggataacccatcgtcgtgt

SEQ ID NO: 2465 - DNA, 65 bp, Candida albicans
ttattaaatcaatgggaatgatgatgatcatcatcatcatctttgttaattgtgctgttttacac

SEQ ID NO: 2466 - DNA, 65 bp, Candida albicans
ttcaggatcaatttttaggttttaaatagttaagaatgtcaaagaataaaaaattgatttatgat

SEQ ID NO: 2467 - DNA, 65 bp, Candida albicans
gtatcaatttgggtattaaatagtcttcgacggtaaataaatgaaagaatgaatgaatgcggcgt

SEQ ID NO: 2468 - DNA, 65 bp, Candida albicans
tcttaccactagtgtttagaaaagtgcttttttcaataacaaattctttgattctgaaccaccca

SEQ ID NO: 2469 - DNA, 65 bp, Candida albicans
gttgttatttcttatctatttgataaagtaaaacattaagacgaattctaaaagtgaatgaaaat

SEQ ID NO: 2470 - DNA, 65 bp, Candida albicans
tagtagatgtgcgttcgcaaaacaaaaccaaataactaatatactgtgagcgagagatgagccta

SEQ ID NO: 2471 - DNA, 65 bp, Candida albicans
tttgttctgttataattcttaagtataaattattactattgtaattgatttagagagtactttga

SEQ ID NO: 2472 - DNA, 65 bp, Candida albicans
aatgtcgagctggtacagccaatttcgtagaattattgctcctcactggctgtattgtatttctt

SEQ ID NO: 2473 - DNA, 65 bp, Candida albicans
ttaagaagtaacgtttttcggttttcgtttgtatgtgtgtgtgtttgtaaattaccttttctcgg

SEQ ID NO: 2474 - DNA, 65 bp, Candida albicans
attttgtaatctcattctttgatacaaagcatatcaacaaccatcctactagttagatcttattg

SEQ ID NO: 2475 - DNA, 65 bp, Candida albicans
atttttccattaatgattgaaaaagtggtggatgttacaggatctcatctaattcgattcctttt

SEQ ID NO: 2476 - DNA, 65 bp, Candida albicans
atagcttaaagttacccggagggcctgcacataatcaaaatatagtaaattcccaaaagaacagt

SEQ ID NO: 2477 - DNA, 65 bp, Candida albicans
acgatgggctgtctctctttgctttggttggttgggactgaaaatttatcacccatcaccgctac

SEQ ID NO: 2478 - DNA, 65 bp, Candida albicans
gagaacttcacattgagagtctttgttctttgaaaacatctttacctaatccatcggtcgtgcac

SEQ ID NO: 2479 - DNA, 65 bp, Candida albicans
ataatcatagtaatactagttgtttcaaagtatacatcgttgatgtattgttggattgtttagtt

SEQ ID NO: 2480 - DNA, 65 bp, Candida albicans
gtagtgtcacaatgctaaatatatgttaataataattaaccctaattaggaaatgtgattggaaa

SEQ ID NO: 2481 - DNA, 65 bp, Candida albicans
tatttgaagaaatcaattctatgttgttgacaaaatgtaatggagattatggttgtcaaagtggg

SEQ ID NO: 2482 - DNA, 65 bp, Candida albicans
aaatgattactaagaaatgtcagatctagctagattgggcctaagaacgacaaaggaagaagaaa

SEQ ID NO: 2483 - DNA, 65 bp, Candida albicans
caaatttcaagcgagcgagcgagtggaaagagtagttgaagcagttcgcgagcccgtgtgtgtgt

SEQ ID NO: 2484 - DNA, 65 bp, Candida albicans
tatatataaacatgtatattattcactaattaatattttatatcaataacgaatggaaagtaatc

SEQ ID NO: 2485 - DNA, 65 bp, Candida albicans
tgctgaattattcttattttattcaatctatgtctatgcatttatccatccattggcatatatta

SEQ ID NO: 2486 - DNA, 65 bp, Candida albicans
aaccgtcgtaaatttgtgtgccggagacactacctctccatacgcacagtaaaaaacaaatccac

SEQ ID NO: 2487 - DNA, 65 bp, Candida albicans
gctggcttcaatagaacgaaagagaaaaataaaattagaggcacgatttatattagaaaaatctt

SEQ ID NO: 2488 - DNA, 65 bp, Candida albicans
tccccacaaatttgattagttactaccggaaaatgctctattttccgtttgggaagcaccgagac

SEQ ID NO: 2489 - DNA, 65 bp, Candida albicans
tcagtaatatagtatttgcaataattaaaagggtgagtgatagtatatttttttctcccagtcta

SEQ ID NO: 2490 - DNA, 65 bp, Candida albicans
aaacgaacgaaacgaaacgaacgaacgaaggaagaaaaatttcaatttcgaacaaaatcaaaaag

SEQ ID NO: 2491 - DNA, 65 bp, Candida albicans
tgtattaagaagtaggtcattctagcagttatcgtgaataccgttgtgtattttgtttggtagca

SEQ ID NO: 2492 - DNA, 65 bp, Candida albicans
caatcatctgaatttggtagcgacgaaaatggttagaaaagacacgtcaatatttctcatctttt

SEQ ID NO: 2493 - DNA, 65 bp, Candida albicans
cctctgtaatatatcgtaaccacttgacttatttccttgttgtgggattcactttggatgatgat

SEQ ID NO: 2494 - DNA, 65 bp, Candida albicans
gtaatagattactgatttatttatttatctatctctgttttgtcttttttgattgcaaactggta

SEQ ID NO: 2495 - DNA, 65 bp, Candida albicans
caaaacattttattagggctgttgccctaaactatttttctgcatgcgcgagttacgaggtggaa

SEQ ID NO: 2496 - DNA, 65 bp, Candida albicans
aattaaaaacttaacaactacaacatcaattaatatttaataccatttcaaagaaaaggaagaaa

SEQ ID NO: 2497 - DNA, 65 bp, Candida albicans
agaaatctgaaacacgatatttatttatttgaatgtaatagctagtaatagcacccatgtatatg

SEQ ID NO: 2498 - DNA, 65 bp, Candida albicans
ttcaagcgagttttcacaaacctacagtaacttatacctgaacagaaatctattacagctggtac

SEQ ID NO: 2499 - DNA, 65 bp, Candida albicans
tttattacgtagtcttcttctgggtagttcatataggattattctttgtagagtttttggtcaaa

SEQ ID NO: 2500 - DNA, 65 bp, Candida albicans
tcatggctataaatatcaaattcaaatgcggacaccatgtgaatatcccattagggtcagccaac

SEQ ID NO: 2501 - DNA, 65 bp, Candida albicans
actgtattaaattattaacttaatttattaacttaatttatttatatagtcgtgtaatatggaca

SEQ ID NO: 2502 - DNA, 65 bp, Candida albicans
agtataagcataagtataagtataagtataagtagagtggttgttgttgatttattgatcatctc

SEQ ID NO: 2503 - DNA, 65 bp, Candida albicans
ttgttaaactagttaatgattcggataatttagatttgtagtatacaagaagtggtggtgttcat

SEQ ID NO: 2504 - DNA, 65 bp, Candida albicans
tatttgtataaaacatataatttataattgattaaataatgggataacactgtaatagtagaaag

SEQ ID NO: 2505 - DNA, 65 bp, Candida albicans
tccgtcattgctttgaatatgggggccagtttactatccaacaaagtaaatacataaattggcaa

SEQ ID NO: 2506 - DNA, 65 bp, Candida albicans
acagcatctctatatcacatcgacaaaaatttgtgtaatcaaattaagcatattgggatggtagt

SEQ ID NO: 2507 - DNA, 65 bp, Candida albicans
cgaacaagaaagtatttgggcaactatttatgtcagagaactatttcaatcaacataatgtacta

SEQ ID NO: 2508 - DNA, 65 bp, Candida albicans
ttttcctatcatacatctgtagaccatttatcttgaactcatagggacacgtagagcaataaaat

SEQ ID NO: 2509 - DNA, 65 bp, Candida albicans
aaaacatcaaaattgaacttctaaaccaacatcatcgacattatcatcgacacataacttaactt

SEQ ID NO: 2510 - DNA, 65 bp, Candida albicans
aattattttgaagcgcgtcggtactttgtttttcttttcctttttcacttttcccattttggtct

SEQ ID NO: 2511 - DNA, 65 bp, Candida albicans
aaaaattattagtccggtatatttgaaacaactcaaacatggtttggcaagtaatcgaacgactt

SEQ ID NO: 2512 - DNA, 65 bp, Candida albicans
aatattcagtataactaaaataatcaattgttataactgcttcttgttggacagaaaataccact

SEQ ID NO: 2513 - DNA, 65 bp, Candida albicans
tgattaatcgacttttataaataggagataatctaatttggcgaaatctcaacatagtttccctt

SEQ ID NO: 2514 - DNA, 65 bp, Candida albicans
agtgttgtttattctatatttgttttaaagtctaggtttaagtatttaagtagatttactttcca

SEQ ID NO: 2515 - DNA, 65 bp, Candida albicans
tggagtgtagtgcacaataattgacaagaaacacacacgtacattcaatttgtctcttttgggaa

SEQ ID NO: 2516 - DNA, 65 bp, Candida albicans
gcttgtagtcagagatcttttcaatcaatgggaattgttcatctaaagtagcagaaaagtctttt

SEQ ID NO: 2517 - DNA, 65 bp, Candida albicans
ttatatagtaatatatccatcttataatgtttagtgaattagctgtaggaatgactatggtgaag

SEQ ID NO: 2518 - DNA, 65 bp, Candida albicans
gtgagattcctgttttgagaggtagaatctccgacgatagttgggatttcaaaaacaagactttt

SEQ ID NO: 2519 - DNA, 65 bp, Candida albicans
aacagagggtagtgtaatttgtaacaatttatgaattgtctcaatcaacatcaaattttcttctt

SEQ ID NO: 2520 - DNA, 65 bp, Candida albicans
ataaggcagagtatgcttattaagatatccaagattccagatctatatataagcaagcatcttgc

SEQ ID NO: 2521 - DNA, 65 bp, Candida albicans
tattatttgctactatcctgtatacaacactaagttcatcttattttttgtttgtggcactgaca

SEQ ID NO: 2522 - DNA, 65 bp, Candida albicans
tcacggctttgttaaaagagataatattaatgattacttatcacaaaacaagtcgtgtaaatgtg

SEQ ID NO: 2523 - DNA, 65 bp, Candida albicans
tgtttgaaaaaaataatacatgcaaaatactgcatattagaattataagggaatgaaaatgaaaa

SEQ ID NO: 2524 - DNA, 65 bp, Candida albicans
aatccatttttgcttatttccattcaactataatacttattcaacccctaacattatgtcattgg

SEQ ID NO: 2525 - DNA, 65 bp, Candida albicans
agaatagcttctcattttgtttgcactataatttattttttcccttttagtattattaattagtc

SEQ ID NO: 2526 - DNA, 65 bp, Candida albicans
tgattgactctatttctcagtaggaaatgatttctatgattgacgattatcagcaaatgtactaa

SEQ ID NO: 2527 - DNA, 65 bp, Candida albicans
aatagctctggaatccacaccaatcaaaagaaaaccacaacaagcaagttttaccgaatacgtca

SEQ ID NO: 2528 - DNA, 65 bp, Candida albicans
ctcctatttgaactatttcagtaagagttcttactttgttctagaagtgtattacttgaaataaa

SEQ ID NO: 2529 - DNA, 65 bp, Candida albicans
agatgccagcaaagtcgttagataaggtgtggtagttgcagaagagtcctggcaatgcatcgaac

SEQ ID NO: 2530 - DNA, 65 bp, Candida albicans
ttatcacttgttctttcctttttatgtacttcccgcatcatttacttgttcaaaaagtgcaatgt

SEQ ID NO: 2531 - DNA, 65 bp, Candida albicans
aggataagtttgtctttatttagaacatgttttaaatttttatagagtgtacaatacaggatagg

SEQ ID NO: 2532 - DNA, 65 bp, Candida albicans
gatcctgctatcagccgctctttatctgacttgatctttactatcaagatacgggcaaaaaatta

SEQ ID NO: 2533 - DNA, 65 bp, Candida albicans
acataaattgattcagggtacacgctattagtattattgttgttgttgttgttagctacgaaaga

SEQ ID NO: 2534 - DNA, 65 bp, Candida albicans
tttattttgaaattaaatacaatcaagatatttctattcaataatacttgattttaatttcatct

SEQ ID NO: 2535 - DNA, 65 bp, Candida albicans
acttgttaaatctctttctatttttgatcaaagtcaatttgcagcctaaattttattttacctgc

SEQ ID NO: 2536 - DNA, 65 bp, Candida albicans
aagaatttatctagttatatagtttgatattcactataagtattataaaaatcaaaataaatacc

SEQ ID NO: 2537 - DNA, 65 bp, Candida albicans
acacactattaagcaaaaaaagatcacgaaacgaaacgaaagtatttcaaaaagaatataaatat

SEQ ID NO: 2538 - DNA, 65 bp, Candida albicans
aactcgctaccctcctaaattaatgaatagtttgactctttccctcttagatggggcaaatgttg

SEQ ID NO: 2539 - DNA, 65 bp, Candida albicans
aggaaaaaaaaaataataaatgaactgaggtaggcaaggaagaggagacggggagagcagaatag

SEQ ID NO: 2540 - DNA, 65 bp, Candida albicans
tcggaattgagagtggtcgtgtaaaatgcaccaggtctaatgaacttggcaccgatgctaatact

SEQ ID NO: 2541 - DNA, 65 bp, Candida albicans
aatgcgaagaaataaataatgtacaaagcaacaacaacccttttgctttgaagtaatactactac

SEQ ID NO: 2542 - DNA, 65 bp, Candida albicans
aaaggcacaatgtaatccgaatgcatttgacaaaaacgacgactggtgatattttttttttctct

SEQ ID NO: 2543 - DNA, 65 bp, Candida albicans
cttatatcttgaaatagtttggaagttctaataatttgtccataatccatagttgttaataaact

SEQ ID NO: 2544 - DNA, 65 bp, Candida albicans
acaaggaagagtaggtagttgaaaaccaaaaagatgtgtagatgatgtatagtattattatagag

SEQ ID NO: 2545 - DNA, 65 bp, Candida albicans
ttgtatatttattagttttatttaatatatttgttttatttaacaattagtttgtagtcttgtca

SEQ ID NO: 2546 - DNA, 65 bp, Candida albicans
ttattttacaaatcatttcattatagcaatttaaatcgatataataaacagagagagaaagaaag

SEQ ID NO: 2547 - DNA, 65 bp, Candida albicans
gcattttgttaacaacaataatttacctcaaaaaggaaagctaattgaagttatatacagtacct

SEQ ID NO: 2548 - DNA, 65 bp, Candida albicans
atgtgggtattatgggaaaaaggttaagattgggttttctcttgtgatttctgttcccaccaaca

SEQ ID NO: 2549 - DNA, 65 bp, Candida albicans
tattatttttactatgtagttttattaatgttattatgaagttttaatcttacaaataattcaat

SEQ ID NO: 2550 - DNA, 65 bp, Candida albicans
tatagctcaaatttgttcgaaatatatgttttaggaataaatatatcttctttcccattataatc

SEQ ID NO: 2551 - DNA, 65 bp, Candida albicans
gaaattgggaaaaccaaaagaattaaaaattaaaaacaacatggaattggtgttggatgtataac

SEQ ID NO: 2552 - DNA, 65 bp, Candida albicans
tgataagtcaattggcttcattgatcaaatcagtagagcttaagagtagattaataagcaggtgt

SEQ ID NO: 2553 - DNA, 65 bp, Candida albicans
cttggcatctacaacacccttctttcctgtccttcctccccccacctacaacgttccttccagat

SEQ ID NO: 2554 - DNA, 65 bp, Candida albicans
ttctttgagtgataataatcgagtcaataacacagttgcattttgtgaggtagatgacatattac

SEQ ID NO: 2555 - DNA, 65 bp, Candida albicans
ctgtctaatgaaaatactttgagggacaacatcaatattgtggatttccctcacctcccatatta

SEQ ID NO: 2556 - DNA, 65 bp, Candida albicans
tgtattcctgtggtatcattgctaccaccaccaacaacaacaccaccaccaccacagtacgcgtt

SEQ ID NO: 2557 - DNA, 65 bp, Candida albicans
ctttggaaactatcactggtatggatttaccaaataatttggcaggtcggtactattacagagac

SEQ ID NO: 2558 - DNA, 65 bp, Candida albicans
tattgatggtgattatttaaatgttgtaggattaccattacaagacatttgatttattacatagg

SEQ ID NO: 2559 - DNA, 65 bp, Candida albicans
gaaataaattaattgttctagactaaatgaaagtagaagaatcgtttgtagggctgactcaatag

SEQ ID NO: 2560 - DNA, 65 bp, Candida albicans
cagaataactgaacaatgactaggtattcaaattgtagactatcaatcaatgaccccaagattag

SEQ ID NO: 2561 - DNA, 65 bp, Candida albicans
gcaaaattgtcgttcaaaataaactaagttgagtgcgacattttcaattttctttttaacaaatg

SEQ ID NO: 2562 - DNA, 65 bp, Candida albicans
gggacagactttcctttatctttgcctttgcctttgcctttgcctttacctttagccatggtaat

SEQ ID NO: 2563 - DNA, 65 bp, Candida albicans
tttattcgtttttatttttcctgttcctagaattccgggtcccttcctccccacccacccacaca

SEQ ID NO: 2564 - DNA, 65 bp, Candida albicans
aagctaagaatttatgtggaaactctaatttttagtatgtaagttactatgagacgtgtactcgt

SEQ ID NO: 2565 - DNA, 65 bp, Candida albicans
gaatcttctgattttgaaatgcctgaaatcaatcttgatcaagattctgatgatgaatgaataga

SEQ ID NO: 2566 - DNA, 65 bp, Candida albicans
ccaaagagattatcgtttgataatatataagtacttgactggtcaagtattgatattatagagat

SEQ ID NO: 2567 - DNA, 65 bp, Candida albicans
gacctatttcaaatgacatggcgatagctgacctcagggtttcatatatgatactttcagatcaa

SEQ ID NO: 2568 - DNA, 65 bp, Candida albicans
accacattaggcgtttacaactttaaacttccccagacccgatactaaacaaaccaacatcactc

SEQ ID NO: 2569 - DNA, 65 bp, Candida albicans
gtatctggactatttggattattttctgtgagcggcaagatgatgtgatggcttcatataattct

SEQ ID NO: 2570 - DNA, 65 bp, Candida albicans
aaagcatatacatatatttttattagtatttgttgttttaatcaaagaaaaagagaatatatatt

SEQ ID NO: 2571 - DNA, 65 bp, Candida albicans
tgttcccattcaaactccttaattcacctggtcttgcacactttaccattatgtcaacaaaaaca

SEQ ID NO: 2572 - DNA, 65 bp, Candida albicans
tttgatcatttattatccttctttctttatattctaacttgctcttataatagttaaatacattt

SEQ ID NO: 2573 - DNA, 65 bp, Candida albicans
tcaccaatttgtttgttttggttttattttttctgttgaaaatttttcctttgtctagtagaatt

SEQ ID NO: 2574 - DNA, 65 bp, Candida albicans
tgacggaacagaaaagaaaaatttctgcaattccatcacattaatcatcaccggttatcaaaact

SEQ ID NO: 2575 - DNA, 65 bp, Candida albicans
ggtcgtgtaaaatgtgcaaaatagaaatagaaaaagattttgaattttgaaaacaccattggtaa

SEQ ID NO: 2576 - DNA, 65 bp, Candida albicans
aagcgcttgaaaaaaaaaaggaatcaccgtatattttcagtcgttgttttttttttggtttcaca

SEQ ID NO: 2577 - DNA, 65 bp, Candida albicans
cgtgtttggaattgacgcgtgaaattttattttctttattttttttattttaaacaacaaacaac

SEQ ID NO: 2578 - DNA, 65 bp, Candida albicans
tcatttagaggtaataatttatccgtacgaatccgacgagcagtgtgctagtattatggagttat

SEQ ID NO: 2579 - DNA, 65 bp, Candida albicans
aagttttaaaaatgaaaatcaaaaaaaaacgtgaaaacgcgtccttacaaaaaaaaaaaaaaact

SEQ ID NO: 2580 - DNA, 65 bp, Candida albicans
acaagaatatctctcagtgcaaggaaaaaaagagaatcaaaacctacacacaaaagaaattatac

SEQ ID NO: 2581 - DNA, 65 bp, Candida albicans
aagaaaaaaaaaaagaataatatatagaggttgctgaaataatacactgaatctgttaatttcaa

SEQ ID NO: 2582 - DNA, 65 bp, Candida albicans
cttttacatctagatattgaggtcgtgcaactgtttccaaatgctcgcattatattttcagtatt

SEQ ID NO: 2583 - DNA, 65 bp, Candida albicans
ctaatactaatactaatactaatgatactaacgataatagtattcaagatggtgaattcatttag

SEQ ID NO: 2584 - DNA, 65 bp, Candida albicans
ccacgctggttgggatttgtagatatagtccaagagttttgggatgctctgggagtggggtaagg

SEQ ID NO: 2585 - DNA, 65 bp, Candida albicans
ggtattttcatctctgaaacatatagacttgacctttgaataagctggatcaggaaccatttaat

SEQ ID NO: 2586 - DNA, 65 bp, Candida albicans
tcttttctttattgtaaaatagtatgattgctcttgcttttgcttagaatctcatttatattcct

SEQ ID NO: 2587 - DNA, 65 bp, Candida albicans
ataggtgaggtcctatatgcagtacacacaggtttttttcacagatgttgacacagtgttgaaaa

SEQ ID NO: 2588 - DNA, 65 bp, Candida albicans
aattggtaaatactatctaagcagaatcgctcgagttgggctgcttaatcatttttgggatagtt

SEQ ID NO: 2589 - DNA, 65 bp, Candida albicans
tagtacatttattcgaaattcaaatttgagtaaatcatacaaacataacgaaacaacagaagttg

SEQ ID NO: 2590 - DNA, 65 bp, Candida albicans
attgaaaagaatctgttgatttaatttactatgggacatcaaactcttgttgctcttcactggtg

SEQ ID NO: 2591 - DNA, 65 bp, Candida albicans
ataatcattttcccaattgggaacaattcaaaataaaaacaactttgatgcgaagaacttcaata

SEQ ID NO: 2592 - DNA, 65 bp, Candida albicans
tttgtaaatagtcggtgtagggtttgatttgttttgggtatattttattttatttagttttagtg

SEQ ID NO: 2593 - DNA, 65 bp, Candida albicans
gctatagcaattgagctcaatttatttctccatataataaatgaattgttcagtttcgaggttgt

SEQ ID NO: 2594 - DNA, 65 bp, Candida albicans
tctttaaattaataatcaattcatgaaacgtaaacaaaagcgagaaggcgacgtgaatagaaaga

SEQ ID NO: 2595 - DNA, 65 bp, Candida albicans
cacacggtgaaaaacaaccaatttgctacattcgaagattaggacatttgggtaaacaatttgct

SEQ ID NO: 2596 - DNA, 65 bp, Candida albicans
acaactcatacgcttttttctttctattttcctccacaacaattctattctattctcttcaactc

SEQ ID NO: 2597 - DNA, 65 bp, Candida albicans
cagtagatattgtaatacacttcgtagtttgtttaaaagtcgtggcgattagcccaaatatgaac

SEQ ID NO: 2598 - DNA, 65 bp, Candida albicans
aaaagatcggagaaatcagatgaaagaagaataagtaccagtagtagtacaaatagttccaataa

SEQ ID NO: 2599 - DNA, 65 bp, Candida albicans
aaaactcgtttgatcaaaatctgtatgtcctcacactaacaccagatcaacaataacaagttaaa

SEQ ID NO: 2600 - DNA, 65 bp, Candida albicans
acaattcccacctccataaaaagaaatagatttacaatgatgatgatgatgataatttatagatg

SEQ ID NO: 2601 - DNA, 65 bp, Candida albicans
ttgtttatgattgtagtacaaattgcacatagccttttgtttctgtatgtgtaaatttaccataa

SEQ ID NO: 2602 - DNA, 65 bp, Candida albicans
atcatagtgtaatgaacagagtgtaataatagtttaatgcatttatgaatgagtacacgacctga

SEQ ID NO: 2603 - DNA, 65 bp, Candida albicans
tggtaatatcagactgttccattttaaccaatgaggtcaacccttgcattccatatttacctaat

SEQ ID NO: 2604 - DNA, 65 bp, Candida albicans
tagaacgaattataaatttataggttctttagaaaagattatatacaataaaggtattatgtctc

SEQ ID NO: 2605 - DNA, 65 bp, Candida albicans
tgttgatttaaactgatctcattattttgttctctcacagctcacagcctacaaccataaaaaaa

SEQ ID NO: 2606 - DNA, 65 bp, Candida albicans
tgccagtagtctataaataatctctttaatagagtgctcttatcaattatatgtggtgattgttt

SEQ ID NO: 2607 - DNA, 65 bp, Candida albicans
tttaaccctttctttctttatataaactgaaaaattttctttcttttttctttttctgttattta

SEQ ID NO: 2608 - DNA, 65 bp, Candida albicans
ataagagtacttatacattggtccaccatccccagacaccattatttactgatttaaagagcata

SEQ ID NO: 2609 - DNA, 65 bp, Candida albicans
tgaaaaaaatttttcatcttctttttatatagcgaagagaggaagtcctctcgatgagagagaaa

SEQ ID NO: 2610 - DNA, 65 bp, Candida albicans
aattgtgtccctggaagtgtactgtgaaggtgttgtttaactaatggggacagaccagtatgtgt

SEQ ID NO: 2611 - DNA, 65 bp, Candida albicans
acccaacccaaacttattattaccaggaatacctgtttcaatttcggttcgtcaaagtattttga

SEQ ID NO: 2612 - DNA, 65 bp, Candida albicans
aagaacaaagattttgccactctctctctttctctctgtgtttcccaaactatcaatcaatcaaa

SEQ ID NO: 2613 - DNA, 65 bp, Candida albicans
acagcaacgcggcagtagactggccagtagttatatagtatccaataaacggtgtagtaataata

SEQ ID NO: 2614 - DNA, 65 bp, Candida albicans
ataagaaataaagattgtaagttgaccacatagatattatcattaaaggagaagacagtggttgt

SEQ ID NO: 2615 - DNA, 65 bp, Candida albicans
ccctttactgctactaaattctacattgatttgaaagtttttaggtcaagacagcgtgctctact

SEQ ID NO: 2616 - DNA, 65 bp, Candida albicans
ctataggctttctatatactacactagagcaaatacacgctattcagcattgcctaactatcaca

SEQ ID NO: 2617 - DNA, 65 bp, Candida albicans
caattgttttaatcggatttgcattttcgtttgcttgatcaaatatgctactattaaggcaaatt

SEQ ID NO: 2618 - DNA, 65 bp, Candida albicans
catagaatggatagtctttggagaaaacaaattattcttgagagagaggttgtgtgggcttggta

SEQ ID NO: 2619 - DNA, 65 bp, Candida albicans
gtacttgcaagaccccaaggacccgtcgttgtactttactctgattgcagcctctacacgttcta

SEQ ID NO: 2620 - DNA, 65 bp, Candida albicans
taaaaaacccttgatttagtagtgtgaatagtaacaaatttattctatttgttcttgtttagcag

SEQ ID NO: 2621 - DNA, 65 bp, Candida albicans
aaaaaccagtcaattatattcctgataactgactatctattagtcatctggtgttgttgtcataa

SEQ ID NO: 2622 - DNA, 65 bp, Candida albicans
aaataattgtcgtatatcctacagtcacgtgcagcaagcaaaaatagggtacttgccctaaatta

SEQ ID NO: 2623 - DNA, 65 bp, Candida albicans
tatgtctttgaccaggctttgacatgtatctactttccaaggtaagtcggaggattagggcttaa

SEQ ID NO: 2624 - DNA, 65 bp, Candida albicans
aatataccgtttattgcaagccttgaagttcccgatttgccaattttactgttaataatgacagc

SEQ ID NO: 2625 - DNA, 65 bp, Candida albicans
catcactttaatcttttttttttttgtctttggcgagcactaactaattcaaccaactgtttaag

SEQ ID NO: 2626 - DNA, 65 bp, Candida albicans
agtcatagctagtagatactgtgtggtgtctgggataataattataatgtaaacaaaacaaagtc

SEQ ID NO: 2627 - DNA, 65 bp, Candida albicans
acaatttttttatctttttttttggtaattgagacgcgactcgtttgaagcgctttcttttcttt

SEQ ID NO: 2628 - DNA, 65 bp, Candida albicans
gtattattttcctgttggtagaattgtcttcacatcatattcatcctccatcaccttattcagtt

SEQ ID NO: 2629 - DNA, 65 bp, Candida albicans
aattaggattaagcgtgtcttgagagacaaaaggaacactaacaattaaaattctcgcatttaca

SEQ ID NO: 2630 - DNA, 65 bp, Candida albicans
ggttgaagtaaatgtagtttcaattcagtttgacataatggacaagtcaagggcatagctagtaa

SEQ ID NO: 2631 - DNA, 65 bp, Candida albicans
gtgtttgaatctataggtgaagaatcgaaaatttttttcttcgttacacttttgactttgggtgt

SEQ ID NO: 2632 - DNA, 65 bp, Candida albicans
gtgttttatatctcacattactctactggtgttatgtagtttgacaaaggctgtccaatattaaa

SEQ ID NO: 2633 - DNA, 65 bp, Candida albicans
tgacaaaagcaataagtacaccaagaagagtggcaaaagggttatgcaaaaaattgaaagtatcg

SEQ ID NO: 2634 - DNA, 65 bp, Candida albicans
gttttttgttggtcccctcgtcgtatagaaaagtacatttcttattactccaccacccaaaacta

SEQ ID NO: 2635 - DNA, 65 bp, Candida albicans
atactttattaaacttctacactaaagttaatgttgtatgttgaagatttgatgttgaaaaaaga

SEQ ID NO: 2636 - DNA, 65 bp, Candida albicans
ccaaggagtaggtagtgaagggtttatacaaactgtatcattcaaaatttacctcttcaattttt

SEQ ID NO: 2637 - DNA, 65 bp, Candida albicans
tccatagcgggtagaaagaacaactaatagaccactcttaaaacaattggaatccattttgcaac

SEQ ID NO: 2638 - DNA, 65 bp, Candida albicans
gaataggaaaccagaatacaagttgagaagaacaattgttttaatttttgttgatgttgtaaact

SEQ ID NO: 2639 - DNA, 65 bp, Candida albicans
gcgagatttcatcatgtaagtataaaacttggaaggtcatacgaagaagagaaaagaaaaaggga

SEQ ID NO: 2640 - DNA, 65 bp, Candida albicans
gttttatactatcttagcaactttttccagtcattaccatgataatgttagttttacttgatagc

SEQ ID NO: 2641 - DNA, 65 bp, Candida albicans
tttttttattggtttagtaattacttattacattcaaattgtgttatagaagttcatttcatttt

SEQ ID NO: 2642 - DNA, 65 bp, Candida albicans
catcaattatctataagttttatttgttagttttaaaccgcttacaaagattttgttgatttgca

SEQ ID NO: 2643 - DNA, 65 bp, Candida albicans
taagatttgttattcataactttgcaactatatttggaaacaaaacgtgtcacgtgactctctat

SEQ ID NO: 2644 - DNA, 65 bp, Candida albicans
tatatgtgtgatacaaaggggagactgctaaactgatctcccattgagtttgggtgttcagttgt

SEQ ID NO: 2645 - DNA, 65 bp, Candida albicans
cactgcattatttcaattgattcaaaatggcaactacaggaaaaagacatgcaaaatcacaatca

SEQ ID NO: 2646 - DNA, 65 bp, Candida albicans
attagccaattcttcttcttcttcttcttcattatcatcaatatcattatcattctctgtatcta

SEQ ID NO: 2647 - DNA, 65 bp, Candida albicans
tccaaaatatataccaaatttctagaatcatcaaaagaatataaacatgaccaatatccatatat

SEQ ID NO: 2648 - DNA, 65 bp, Candida albicans
caattacttcatttaatcaaccctttaccctttacccccttttttaaaggactttttactattaa

SEQ ID NO: 2649 - DNA, 65 bp, Candida albicans
cagcgatttcaaagaagaaaaaagaaatcaaaacaaaacaaaaacaaaaacaaagtgaaacaaca

SEQ ID NO: 2650 - DNA, 65 bp, Candida albicans; identical to SEQ ID NO: 2176

SEQ ID NO: 2651 - DNA, 65 bp, Candida albicans
ctcaagaaccgaaagagcctcatgatgaagttgaattaccagatgaggtattttaaatagatctg

SEQ ID NO: 2652 - DNA, 65 bp, Candida albicans
tgaccgtagagtgaattttgtagacaacataatgtaatattcgatgtttaagagttaaacgcgtc

SEQ ID NO: 2653 - DNA, 65 bp, Candida albicans
tttttctctttcgcgcctcaaccaaaaaaaaattttttttagataagttcaaaagtccagagttc

SEQ ID NO: 2654 - DNA, 65 bp, Candida albicans
cccgaaactaaaaggaattaaagaggtgtatgaaaatgtgtcgtacaacgtttgtagtaaacgag

SEQ ID NO: 2655 - DNA, 65 bp, Candida albicans
caatatccatattgtctggttcttcttcctttccatttgtagtagttggaagagaatctttatta

SEQ ID NO: 2656 - DNA, 65 bp, Candida albicans
aagtgaggaagttgaattattgaaagctattgaagaaggagatttggatgactttatggattaaa

SEQ ID NO: 2657 - DNA, 65 bp, Candida albicans
tggtcgtgcaatccaacaaagattctagattacataatcatacataaatagttaatacacactac

SEQ ID NO: 2658 - DNA, 65 bp, Candida albicans
ttcttgttgtggattttctatttgaataacacattctacttggagttttgttatctactatatat

SEQ ID NO: 2659 - DNA, 65 bp, Candida albicans
cccaataaacgatcgtacaaatccaactaagaagaggaagaagaacgactcaatacatcgactga

SEQ ID NO: 2660 - DNA, 65 bp, Candida albicans
actgaaatttggatgtggattcaggttttcaactttcaattttttatatccgagattgaaatcat

SEQ ID NO: 2661 - DNA, 65 bp, Candida albicans
attttagaccaagaggagttttgttttcaattcttaataaatccccatattcacattagagaatc

SEQ ID NO: 2662 - DNA, 65 bp, Candida albicans
acacttccagcaataaaagccaactctggcaaaatcatagcctttccaactttgggagctatgtg

SEQ ID NO: 2663 - DNA, 65 bp, Candida albicans
attcttcctgatacgttcattgtgtgatttctatctttgaatgactttgataataaactctttat

SEQ ID NO: 2664 - DNA, 65 bp, Candida albicans
tttctagtctttgttttccaacttcttggaaaagattttttctgttgacaaagtattatccaaaa

SEQ ID NO: 2665 - DNA, 65 bp, Candida albicans
tacttagtgaacaccgcttactattcgatttttttttccagcatttgttgtccacaagtttttcc

SEQ ID NO: 2666 - DNA, 65 bp, Candida albicans
aattgggactgattgccggggcaatatggatccaattatggattccatgcataatgatcttgttc

SEQ ID NO: 2667 - DNA, 65 bp, Candida albicans
atcaattgtcatacttggtatcattaatttggggagttgggtggagagaaggggatggtaaatgt

SEQ ID NO: 2668 - DNA, 65 bp, Candida albicans
tgggtattctggtggtcagtatttactacgtaggatttgtgttaactttgtattgagagtagacc

SEQ ID NO: 2669 - DNA, 65 bp, Candida albicans
tctgtgactccaaatcttttggtaaatttgtaactgacatataatgttaatataaagtgtagttt

SEQ ID NO: 2670 - DNA, 65 bp, Candida albicans
tacaaattttgcaaatattttccgaaaatacaacaccaaaaagtttttaaaaaacaagagtgaaa

SEQ ID NO: 2671 - DNA, 65 bp, Candida albicans
cagatagccatgcatgaggttaattatattttggaggaagttttccgtgggaaatcgccgatttc

SEQ ID NO: 2672 - DNA, 65 bp, Candida albicans
attgatttaacttcagatacagaagacatagagccaacatcaccagaggtaatatgtatagatta

SEQ ID NO: 2673 - DNA, 65 bp, Candida albicans
ttttttttcttgtttttcttgtaatttctttcgactattctattctattctattctattaaggaa

SEQ ID NO: 2674 - DNA, 65 bp, Candida albicans
agatagtcaagtttatcaaacattctaaattaactatcttaataatttagggaatagtgtattat

SEQ ID NO: 2675 - DNA, 65 bp, Candida albicans
tagtccaatttattaagtcatatattgttgattaattaaacagtcactagtcctcagtcctcagt

SEQ ID NO: 2676 - DNA, 65 bp, Candida albicans
aatcccattcgtcttgtaatcaataaattctgcaatggtacacgtccttagtgtttttttttttt

SEQ ID NO: 2677 - DNA, 65 bp, Candida albicans
caattcattttttaaccaaaaacctgttctccttctcttattttctgaatgaaatataacatgta

SEQ ID NO: 2678 - DNA, 65 bp, Candida albicans
gatatttagaagaatattgtcaccatacaagagctagcatttaaacttattattctgtattgggc

SEQ ID NO: 2679 - DNA, 65 bp, Candida albicans
ctgcccagtacccctacacgcatccaactgccataccctactagtatctgacatgccccatgact

SEQ ID NO: 2680 - DNA, 65 bp, Candida albicans
attttttttgacccaccaattttcaagtacatatacataacactaaccagccaaaactcaactat

SEQ ID NO: 2681 - DNA, 65 bp, Candida albicans
acactcactcacacattgactttgaaactatacagcaaagagaaaaaaaaatcaaacttcaacga

SEQ ID NO: 2682 - DNA, 65 bp, Candida albicans
caccactaacttacctccgcacatcacttgatccaacaacacctcatacattttatacaacagaa

SEQ ID NO: 2683 - DNA, 65 bp, Candida albicans
tttgattgaaaatcttctcttcctttcttccttccttccttaacgttgagctttcgaaaaaaaaa

SEQ ID NO: 2684 - DNA, 65 bp, Candida albicans
aatttgtatgttaaaagatatagatttaatgttaagttaatccaaacgattagagagaagaagta

SEQ ID NO: 2685 - DNA, 65 bp, Candida albicans
tcacccaacatcttcttcttgttatatgattcatcaatattatctaatttaatttcatcaatcat

SEQ ID NO: 2686 - DNA, 65 bp, Candida albicans
acagttttataacagtctaatataatgtgcctatagtctaacagctgatacctttctaatcattg

SEQ ID NO: 2687 - DNA, 65 bp, Candida albicans
cataaatacctgcccggaatagtcaggaggaggcgagaaagtggtcgtgcactctgtgaaattcg

SEQ ID NO: 2688 - DNA, 65 bp, Candida albicans
aattgacattaatttcaagccaacgtcaaaaacaatcaacgagaaagaaaaaacttcaattttga

SEQ ID NO: 2689 - DNA, 65 bp, Candida albicans
ctctcaaccgtttattgttgtgcgaaattcatctatacacgagtttaatttttaatttattattt

SEQ ID NO: 2690 - DNA, 65 bp, Candida albicans
tttttttttgaccaaatgaggaataatctttaaattgtgtttttttttttcttcttcttctttac

SEQ ID NO: 2691 - DNA, 65 bp, Candida albicans
cattttataaatcattattattattattattattattggtatactactcaatacaattgaaaggg

SEQ ID NO: 2692 - DNA, 65 bp, Candida albicans
ccagttacatggattcaagcacaatgctgcaaagatcgagtctttgattgaattacgtagtcgta

SEQ ID NO: 2693 - DNA, 65 bp, Candida albicans
gaaaagaattaatatattgcaccagatcttgaataatttacctattctttctttctttttttacc

SEQ ID NO: 2694 - DNA, 65 bp, Candida albicans
aacttttactactaaaaagcttgatttcttctattcacacacactctctctcactcactctttat

SEQ ID NO: 2695 - DNA, 65 bp, Candida albicans
atctctgttgctaagtgtttttccatcatatacttgatctcatatcacttgtcctttacttcacc

SEQ ID NO: 2696 - DNA, 65 bp, Candida albicans
ttgtacttgatcttgatcttgaactcaatgtgattaaactaataagtaccccggtaactactatt

SEQ ID NO: 2697 - DNA, 65 bp, Candida albicans
tgcttccgtcattagacttcctaacttggatgcaaccggaattgcaattttaatagatcttagaa

SEQ ID NO: 2698 - DNA, 65 bp, Candida albicans
cacaccagatctacttttacacaaagaaaagttttcctaatcctctggtatacgttgcaaatact

SEQ ID NO: 2699 - DNA, 65 bp, Candida albicans
agttgaaatttatttatgtttgtttggataatcgtttgttataaaaatagaaatcgtcatttttt

SEQ ID NO: 2700 - DNA, 65 bp, Candida albicans
tcaataaatcatcgtcatcttctgcttcaatattcatgtttaattcatcgaatcacctaaaaatg

SEQ ID NO: 2701 - DNA, 65 bp, Candida albicans
ttgaaaaaacaagggttattatagatgaaggatgccagtttgataaataaggtctatagaaagta

SEQ ID NO: 2702 - DNA, 65 bp, Candida albicans
aacaaatgaagtaatacatacaagtggcaacaaatggttgacataagttggaagtgtcatctaag

SEQ ID NO: 2703 - DNA, 65 bp, Candida albicans
ttggttggttggtggtgcgatagaaatagaaatagaaatagagagagaaagagaaagagaaagag

SEQ ID NO: 2704 - DNA, 65 bp, Candida albicans
ttgactcattttctttcaaggcttttcaaatattatcgcttaagttacccgattagggaagtgat

SEQ ID NO: 2705 - DNA, 65 bp, Candida albicans
caaaaaattgaacaagaggtctaaagaaccacaacattatacaaaagaaaagaaattaaattaaa

SEQ ID NO: 2706 - DNA, 65 bp, Candida albicans
cttaatcataaacttcccttttccccctccaatcattatttgtttggaatttaatagatatatct

SEQ ID NO: 2707 - DNA, 65 bp, Candida albicans
ttttatggcacaggggacaacctggatccaaacaaaatttggattctaaacaaaatccaaaactt

SEQ ID NO: 2708 - DNA, 65 bp, Candida albicans
ctgttgtagctgtggcactctctccaactgtgcttgtggctgtggagacaggattcttattagtc

SEQ ID NO: 2709 - DNA, 65 bp, Candida albicans
ttcgtcagaaataattccaaactccaaatacaattatactttcccctaaccaatcaaggtttctt

SEQ ID NO: 2710 - DNA, 65 bp, Candida albicans
ggatgtattgattcgtgaagattgttaaatgttagtttgttgttgttgttcttttaattgttttt

SEQ ID NO: 2711 - DNA, 65 bp, Candida albicans
acaacttaaactaaataactaaacaactaaacacagacaactcttactaatggtgttgccaatta

SEQ ID NO: 2712 - DNA, 65 bp, Candida albicans
aagaaagaaagtacgtgtttcaaaagtgatagagaaacaaaagggcaaacagaaaaaagaagagc

SEQ ID NO: 2713 - DNA, 65 bp, Candida albicans
atttgaagaaatggccaagactgtagagtctctgttcacaaaggaaaccaaagagtcaacttcag

SEQ ID NO: 2714 - DNA, 65 bp, Candida albicans
ttgagctaagaaatacttttagatctttagcacctctgctgtcaattcattctagaagttccata

SEQ ID NO: 2715 - DNA, 65 bp, Candida albicans
attttcagcgaatttcgccgaaataatgcaatatttgtttacagttgaatttacacactatgtat

SEQ ID NO: 2716 - DNA, 65 bp, Candida albicans
gacaaggctggagtgacattattggtaataaaaagaattaacaagttaagcgtcaatctacttgt

SEQ ID NO: 2717 - DNA, 65 bp, Candida albicans
tcccacaaatcttcgtttgggtacttttggtttttctacctccacaggtttctctactggactca

SEQ ID NO: 2718 - DNA, 65 bp, Candida albicans
cattacaactattctttttggaaaaacatacttatacagatacttgttaataatctattcagtat

SEQ ID NO: 2719 - DNA, 65 bp, Candida albicans
gtcaggtatagagggcggacgaggtaggcaagaacccaattacaacacgttatagtagtaatata

SEQ ID NO: 2720 - DNA, 65 bp, Candida albicans
ttttgtttttccttgctttatttataatctcctagatttctctttactggaaaacttactaataa

SEQ ID NO: 2721 - DNA, 65 bp, Candida albicans
ggatcttgaatctagtttgaagttgagattcttccatcacagcaaaaagaagtaaataatgttta

SEQ ID NO: 2722 - DNA, 65 bp, Candida albicans
acttatttctatgagtaggtgtagtatcactattcattgtttatttggttgagatcattcagagt

SEQ ID NO: 2723 - DNA, 65 bp, Candida albicans
atttgaccaatcggtatagtgaaggatacagcacgacattctataaacgaaataaacatggatat

SEQ ID NO: 2724 - DNA, 65 bp, Candida albicans
tagcgattacataattaatgatcaacatattgaattattatttattcataaatagtaatagtatt

SEQ ID NO: 2725 - DNA, 65 bp, Candida albicans
aaaaacatccataccacaatacttttcattaacaattaatcaaggatgaaagggtgcttaacgtg

SEQ ID NO: 2726 - DNA, 65 bp, Candida albicans
aagaagaagaatcaagacagagtagagaaatcaacttactttatgtcaagataaaagtatagtag

SEQ ID NO: 2727 - DNA, 65 bp, Candida albicans
tttagtaggtcctgttctatgccaagacacaatttacaagcattctaattaatccaaaaatgtgc

SEQ ID NO: 2728 - DNA, 65 bp, Candida albicans
aaataaactgtggctcacttttcaaatcttttccctgtaattaccaattaacaatattaatattc

SEQ ID NO: 2729 - DNA, 65 bp, Candida albicans
tttagtcaataaattatctttttatatttaaattcttagtattgtcataccacgtagattcatac

SEQ ID NO: 2730 - DNA, 65 bp, Candida albicans
caaatgtcttccgattccgccacttcattaacctaaaaaggaaaattcttgtcatcaccttctca

SEQ ID NO: 2731 - DNA, 65 bp, Candida albicans
caaaatcaatcaatcaaacaatcaaatcaattattagaaaaacaagaaatggactaaaactaaag

SEQ ID NO: 2732 - DNA, 65 bp, Candida albicans
tatggcacgcatttttattgaatccaaaaaccttttacgattcatttaccagaactgattttatt

SEQ ID NO: 2733 - DNA, 65 bp, Candida albicans
ctaataaccttttacagtaataccataaccatacttaaaagatacatctccagctttaatgagta

SEQ ID NO: 2734 - DNA, 65 bp, Candida albicans
ggtggaaatccctcgatgtgtggaagaaagccacagtttgcaaaaccactgtaaatcacgatttt

SEQ ID NO: 2735 - DNA, 65 bp, Candida albicans
atcaacttataaccaagcacagaggtacatgttaaacggcaaccaaaactaacgtcatgttgaag

SEQ ID NO: 2736 - DNA, 65 bp, Candida albicans
acaccagatatcctgttgttcttgtgccccgtaaatgactattgttggttctatctattgcttta

SEQ ID NO: 2737 - DNA, 65 bp, Candida albicans
ttgaagaatcagctgatactgataagaaaaatgattaaatagtgttaatatatgtttgcggtcct

SEQ ID NO: 2738 - DNA, 65 bp, Candida albicans
ttatatcaaatggagggaatagttgggttgactcgcataatggaggggaatttaaaggaccttcc

SEQ ID NO: 2739 - DNA, 65 bp, Candida albicans
tagagcaatattatgtaatactcttcttttttagttcaattggtttgtaatatccaatcaatatg

SEQ ID NO: 2740 - DNA, 65 bp, Candida albicans
tttgatttggaacaacagaacttgtcctagtgccacagttttaaacaaacaccacccgaaataat

SEQ ID NO: 2741 - DNA, 65 bp, Candida albicans
aggtgactcggatggaaacgaaactgcataaaaaaaataggtgaacccgcaccaccatattcctc

SEQ ID NO: 2742 - DNA, 65 bp, Candida albicans
aaacgtttcatggattgtttagacgacatcaaagcccattatcagatacacattaacccaagaag

SEQ ID NO: 2743 - DNA, 65 bp, Candida albicans
atgaagatgataacccgaaaatggcgattatcaggatgttcaagaccaagagggttgggagcgag

SEQ ID NO: 2744 - DNA, 65 bp, Candida albicans
atagttatatgcaggaatcgtgaaattaatatttttaacctccgcctcccttccttccttcgttt

SEQ ID NO: 2745 - DNA, 65 bp, Candida albicans
ttatgttgttgtcaataacaaaaactttcaaatcaaaatcaaactgtaaatttgtttgaaaattt

SEQ ID NO: 2746 - DNA, 65 bp, Candida albicans
ttatttagtattatacaagacagcaaaaaagaaatttcttttattttgattgttttcttcaagct

SEQ ID NO: 2747 - DNA, 65 bp, Candida albicans
caagtctttcttagtaccagagtcaattagattcagaatatttttcatttcacgaggtgtcagtg

SEQ ID NO: 2748 - DNA, 65 bp, Candida albicans
aataaaacaaatttatttttctattactactaacaacttagacaaaagcgaagaaagaggaaaaa

SEQ ID NO: 2749 - DNA, 65 bp, Candida albicans
aactcctcctgaatgtccaaataaagcttgttgtagtaaatgaggctactgtggacttacttctg

SEQ ID NO: 2750 - DNA, 65 bp, Candida albicans
atttttgcttgaaaaaaattatttgccttctttatttttctttattttcatttatttatttcatt

SEQ ID NO: 2751 - DNA, 65 bp, Candida albicans
agaaaagtatattcaactttaattccactattcaaaagttacacaaaacactatctttgtttttt

SEQ ID NO: 2752 - DNA, 65 bp, Candida albicans
acaacaatcaataaatcaatcatcaataaattaatcaatttaaagtaatctagcaaaactatttt

SEQ ID NO: 2753 - DNA, 65 bp, Candida albicans
aaaaaaagaagacaaacaaacaaaggaatattgttacagtttttttttccccaaatcttgtatct

SEQ ID NO: 2754 - DNA, 65 bp, Candida albicans
aatatataacaatttatattgacaagttcttttcacatcattgtggttacggctagacttaatat

SEQ ID NO: 2755 - DNA, 65 bp, Candida albicans
ctggtatttaattgaaagaagaagaactgcaagacttacaatcacatctaccatccaattcatac

SEQ ID NO: 2756 - DNA, 65 bp, Candida albicans
tgtgatatactcaaagataaccgcacacgacatgatacgacattaatgtgtgcgacatattgatt

SEQ ID NO: 2757 - DNA, 65 bp, Candida albicans
gcaaattattcttctcataaaaaaaaccagaaaggaaaaattaataaaaaaaacttcaataatta

SEQ ID NO: 2758 - DNA, 65 bp, Candida albicans
aaaataaattgaaaaaaaaatgtagggagattatatatatatgtatatgtacactgcattcagct

SEQ ID NO: 2759 - DNA, 65 bp, Candida albicans
ggaccgatacaggagacacaaaatacttgaaaatttttttttttcttttttggttcccacaattg

SEQ ID NO: 2760 - DNA, 65 bp, Candida albicans
accagcattgctaccacatgctcggtactagttaactcaattccttcatataaggctatacgcta

SEQ ID NO: 2761 - DNA, 65 bp, Candida albicans
aatggtgccactgtaaagcttcgggaaacactcaggtttcttgcatttcccaacaagaccctaca

SEQ ID NO: 2762 - DNA, 65 bp, Candida albicans
agaaacgttaacgtctgagaaagaagagttgacgaaacatcaagtgtacatgtgcgtgtgagttc

SEQ ID NO: 2763 - DNA, 65 bp, Candida albicans
acaatttgtatgaaaaaaagtcaaagagaaaggaagggaagtaaaaaaaaatgttgtttttaacc

SEQ ID NO: 2764 - DNA, 65 bp, Candida albicans
gtgaactggaaattacatcattatggaaaaaaattggtaatagtgaacataataataatttaaag

SEQ ID NO: 2765 - DNA, 65 bp, Candida albicans
ccgtaaattgtctcttgcaggtatgaatatcgtgctagcaaaatctgacattctataatgttctt

SEQ ID NO: 2766 - DNA, 65 bp, Candida albicans
tgttgattttcatgtagaaaaggattaaatggtgttactgtaatatagtgttgactttgatctta

SEQ ID NO: 2767 - DNA, 65 bp, Candida albicans
aggactgaaaaggtgagtgagtaattgcgtattatcattttcaaatttcacacgcattaaagtca

SEQ ID NO: 2768 - DNA, 65 bp, Candida albicans
tctggcaatacgaacctcactttctttttcttttttttctccacctcctaagaaataaagagaga

SEQ ID NO: 2769 - DNA, 65 bp, Candida albicans
tttttggattacttgatcggtttaatttccgcgcgtctttttttttttcttctggtgcgaaaaaa

SEQ ID NO: 2770 - DNA, 65 bp, Candida albicans
ttttttggtggaaattttgaccaaattcttaagcaaaaagtcttcaatcgtttgatcagcttaaa

SEQ ID NO: 2771 - DNA, 65 bp, Candida albicans
agtatgttttgttatttccaattactatactaatcataaatacataatattggatgggaaacctt

SEQ ID NO: 2772 - DNA, 65 bp, Candida albicans
tgtcgaaaaagcttcataagagatggtggaagttttgggagtagtagaattgtactttgtagtgt

SEQ ID NO: 2773 - DNA, 65 bp, Candida albicans
aaaaaaaaaaggacacatttacacgtacacccttaacttgaaggaaaaaacaaaacaagagagac

SEQ ID NO: 2774 - DNA, 65 bp, Candida albicans
ttttttggtttgtattgtaaattacaatttttctattggttaaaatgataattgttaacaagtct

SEQ ID NO: 2775 - DNA, 65 bp, Candida albicans
atagtaagtttttgtgtatgcgcgccgtcaggttatttcatttctgaatttttcaaccaccttac

SEQ ID NO: 2776 - DNA, 65 bp, Candida albicans
tacatactacgtatacaacctagaaacgtaatactctccaaaaaaagaaatcaattgggcaagta

SEQ ID NO: 2777 - DNA, 65 bp, Candida albicans
tgagagagaaacaaccacaacggagaatgcctcttcagagattgagaatatcgaaccacaggttg

SEQ ID NO: 2778 - DNA, 65 bp, Candida albicans
gttgatatcgatctattccactgcttgctgtttatgtttgaattggaaaggaaaggctctgcgcc

SEQ ID NO: 2779 - DNA, 65 bp, Candida albicans
ttcctgtatataggccactattcctattgtttattatagtgttgcttggcagaagaaatctatga

SEQ ID NO: 2780 - DNA, 65 bp, Candida albicans
ccaacaatagtagttttgcttcttatcaaaaataaaaacaatttgtcattgcccacgattctcca

SEQ ID NO: 2781 - DNA, 65 bp, Candida albicans
cagtttcaaccgcttttttttttcggtcgccatcccatatatatacaggatttctttcctttgta

SEQ ID NO: 2782 - DNA, 65 bp, Candida albicans
ctgtgttatataatttaagaagagagaagaaattcaacggaaaatataagaaaaagttttaaatt

SEQ ID NO: 2783 - DNA, 65 bp, Candida albicans
aataaacaggacccaacacaataacaacaactataaccatcaccaccaccaccaacaacaaccaa

SEQ ID NO: 2784 - DNA, 65 bp, Candida albicans
ttttttcgtgagtgacaaaattttctcttctaacaaaaataacaacatatataataattcaataa

SEQ ID NO: 2785 - DNA, 65 bp, Candida albicans
ttcacccccgtccacctaccaccaccacgatccattactaaccaacaaaccaccactgccagcca

SEQ ID NO: 2786 - DNA, 65 bp, Candida albicans
tcagctgttacttgtttatctacttataataatcatagtcggctatatatgattgaatcaactct

SEQ ID NO: 2787 - DNA, 65 bp, Candida albicans
ggagccaactcgagctcgcttattacaactctttttgttgtatttattctctattttttcttgtg

SEQ ID NO: 2788 - DNA, 65 bp, Candida albicans
gaaggttatgagtagggcaaatatttgtagggaaagacaacaattgttaagaccactttgaaatc

SEQ ID NO: 2789 - DNA, 65 bp, Candida albicans
gggtttgtttacattttttcgaattaataaactcaagaagaagaagaagaagaagaaggtcataa

SEQ ID NO: 2790 - DNA, 65 bp, Candida albicans
tgagaatttataattttctgaattcttctctttttttttttttctgttgtctaatgtaaatatta

SEQ ID NO: 2791 - DNA, 65 bp, Candida albicans
aatcaaaggcatcagtttattgtttacttgaattgactgtaaatattatggatcaagagaagagc

SEQ ID NO: 2792 - DNA, 65 bp, Candida albicans
ctaaattcaaaaaaatgatggctgtgttaataaaaaaggttgagggggggtatggatagtcaatg

SEQ ID NO: 2793 - DNA, 65 bp, Candida albicans
ttcccattgaaatcgtagaattttctttttgatacccttcttttttttctatttcattcattctt

SEQ ID NO: 2794 - DNA, 65 bp, Candida albicans
aagaacaaaaaattttatcaatccttttgagttgttctttttttccacaccacaacaatatttta

SEQ ID NO: 2795 - DNA, 65 bp, Candida albicans
atgatagaagttttattaatgtattatttaatacgtcaatcatttaaatatatattattcctcca

SEQ ID NO: 2796 - DNA, 65 bp, Candida albicans
caacagtttttcaaaggtagtaactagattgaaacaaagtgtgaatgttcaatacattttacatg

SEQ ID NO: 2797 - DNA, 65 bp, Candida albicans
actaaaatgtctcttgttaaaaaactacttacatcttttctgcttggtctttttctgatttttga

SEQ ID NO: 2798 - DNA, 65 bp, Candida albicans
ggctagtgtatagttaatataaatgtctatgaagaagtcaaaaaagaaagaaaaaagaaaaagaa

SEQ ID NO: 2799 - DNA, 65 bp, Candida albicans
tttttcttttttcctcacaaatcggaagttccattgctcccacaattggtaagtatttaaacatt

SEQ ID NO: 2800 - DNA, 65 bp, Candida albicans
ttttttttttctctttctctttctctttaagtggacagacagagacaaacagagacaaagacaga

SEQ ID NO: 2801 - DNA, 65 bp, Candida albicans
atcgttggttggttggttggctgagttgattcttccaccacaagaaaaaagagaacaatcggatt

SEQ ID NO: 2802 - DNA, 65 bp, Candida albicans
acacacgcagacaaacaaacaaattccgtgataaacactaaaagaataaaacttaaattaataaa

SEQ ID NO: 2803 - DNA, 65 bp, Candida albicans
ttttaactatgccaacatcatcatacttttttgcactttcaaaattagaagctacaatgtttaca

SEQ ID NO: 2804 - DNA, 65 bp, Candida albicans
tgtattttatcttgtttatatctttttcttgtagtttctctctctctttcttacaccgcaacaaa

SEQ ID NO: 2805 - DNA, 65 bp, Candida albicans
cgacggaagtggagagaaataaaaggcaagaataattttaataataataatcactgatagagaat

SEQ ID NO: 2806 - DNA, 65 bp, Candida albicans
tacctacattaagtataaactaaaaatggaaaagttgtgtgtaattaagcccaaaaaaaaaaaaa

SEQ ID NO: 2807 - DNA, 65 bp, Candida albicans
tcttgttcctgttccaaacccagatcctggttttattggtttgggctttagaatcaaacctttat

SEQ ID NO: 2808 - DNA, 65 bp, Candida albicans
ccctccctccccgtccgcctttcaatccaatctttaccagaaaagaattccaacgagggaaaatg

SEQ ID NO: 2809 - DNA, 65 bp, Candida albicans
ttgcaaatgacatacattgtttaaatagtaagttatgagttatgcattagattaagtattgttct

SEQ ID NO: 2810 - DNA, 65 bp, Candida albicans
tcaaactgaaaagtccttcataaatatacatttgacaacctatagtgtgtagtttaatagataca

SEQ ID NO: 2811 - DNA, 65 bp, Candida albicans
attgttgttttaagtcccgtattagcatccggagaatcgcggctaaatctcgattaggaatcaaa

SEQ ID NO: 2812 - DNA, 65 bp, Candida albicans
caaacaagtattttaacctgctcctctttttattaagtctattctataccttatattgcgttctc

SEQ ID NO: 2813 - DNA, 65 bp, Candida albicans
ttcaccaaaaaaaaaaaagaaaattttttgaaaccaatccacacacacacacaacacacacacac

SEQ ID NO: 2814 - DNA, 65 bp, Candida albicans
cactagaaatgaatgtccggttccattacctcaataagtttcacggatttagtcccagttgattt

SEQ ID NO: 2815 - DNA, 65 bp, Candida albicans
tttaaacatctctacttatccttgtgggaagaaactttgctagataaattactacaatcagtttg

SEQ ID NO: 2816 - DNA, 65 bp, Candida albicans
ttattgattaaatgatgatgattatgatgataaattaaagataatattgtaagaaatgtgatact

SEQ ID NO: 2817 - DNA, 65 bp, Candida albicans
cttactaactcttcctcagtttatatgacaaatagtgtatccgcaaattgggtgattagtttctt

SEQ ID NO: 2818 - DNA, 65 bp, Candida albicans
tataaggttgaaacattagttgttatgtaactaattctgcaaagccaaacaaattggtttgaact

SEQ ID NO: 2819 - DNA, 65 bp, Candida albicans
tggttattattgtttaagatggttctaaaagctactcaacagtacaaataactttgttatggtca

SEQ ID NO: 2820 - DNA, 65 bp, Candida albicans
tttagaaaaaaatttggaactagacagcaactttaaatagcgttattggactatatagatgtata

SEQ ID NO: 2821 - DNA, 65 bp, Candida albicans
aactcatatctatttttagtatgttatttgctgtaacgaaatttttgtagacgacgacaaggttg

SEQ ID NO: 2822 - DNA, 65 bp, Candida albicans
atctctctctcccccacacacacatgttatcaaaaattagcggttcaacactaaaaaaattccat

SEQ ID NO: 2823 - DNA, 65 bp, Candida albicans
atttaaacataccacaattgtcgtagttatccttgtaaattgttcaatagtgaccatcaataatt

SEQ ID NO: 2824 - DNA, 65 bp, Candida albicans
gtgcgtgggtgcgaaagatttcatgcaaaattttaactgttcaccaaaattgttggacaaaatga

SEQ ID NO: 2825 - DNA, 65 bp, Candida albicans
ttttcgtagatcttacactacacattgctgggttggtgcacagcaagtgttttatattcttacat

SEQ ID NO: 2826 - DNA, 65 bp, Candida albicans
tgttcttttgtcattgttcacattcaaatctaatgaaaggaaaataaaaaacagttggctatggg

SEQ ID NO: 2827 - DNA, 65 bp, Candida albicans
aatgttgttgagtaataaactatttgttggtgacaatactacccacaacttggcgcattgttagg

SEQ ID NO: 2828 - DNA, 65 bp, Candida albicans
attttgacacgctattgatgctttataagtatgtattgttgtctgtagtactattagaaaatttt

SEQ ID NO: 2829 - DNA, 65 bp, Candida albicans
gaaagttttctttaatttttccactccacaggaaatgatgtaaaaaaatagaatttgcatttttg

SEQ ID NO: 2830 - DNA, 65 bp, Candida albicans
atcaaatagataaactttctttcatattgagatgattatttaaatgtcacacttggtctaatcag

SEQ ID NO: 2831 - DNA, 65 bp, Candida albicans
tttcatagaatgatttgctagccatgtatttacgagccgtaccaatttttgttttgggatggcta

SEQ ID NO: 2832 - DNA, 65 bp, Candida albicans
attgaacaaagtaacagtttcttaaagtttatgcctgtttaccaatcccaatacaatagccacca

SEQ ID NO: 2833 - DNA, 65 bp, Candida albicans
ttctttatacacaaattataaacgataagaaagatgtttcaacagagaacattcatttgtagaaa

SEQ ID NO: 2834 - DNA, 65 bp, Candida albicans
gcatagtgccaaatcacgacaaaatagtaataaacttttatctaactgttaatatattataaatt

SEQ ID NO: 2835 - DNA, 65 bp, Candida albicans
caatactgcagagcggagaaacttgacacctaccgaatcgagtaattaagtcggtgtttcggagt

SEQ ID NO: 2836 - DNA, 65 bp, Candida albicans
caaccataaccacaaccacaaccaacagccacaacttgtgcaacacagcttaccggataagtcgg

SEQ ID NO: 2837 - DNA, 65 bp, Candida albicans
taacaagtgtatgacagatgttataatgtgtgagtattgttgttagtcgtgtgaaaggaaagtac

SEQ ID NO: 2838 - DNA, 65 bp, Candida albicans
attatattcttctgggaaatttgttgacagtaataatgaattgttattgttagtaacagttactt

SEQ ID NO: 2839 - DNA, 65 bp, Candida albicans
ctagacaccgtcaacaatactcttctgatccatcactgggtgtacatctatatatacctacaaac

SEQ ID NO: 2840 - DNA, 65 bp, Candida albicans
gcacgacttccaattatcaaggaagcgttatcggtagcaacagcgaaactgcgtttcgtggagtc

SEQ ID NO: 2841 - DNA, 65 bp, Candida albicans
cttaagggagtcaatcgtatctgaatttggattcaatatttcttcaatcccttaacgatttcata

SEQ ID NO: 2842 - DNA, 65 bp, Candida albicans
ttgatttagagttaactagattttgttgttgcctttaactgctattcccatgcatcaccggaata

SEQ ID NO: 2843 - DNA, 65 bp, Candida albicans
gagcgttttgaaattgcacaatgtcaggccattaattgcatatcctttgtgcatgttctacactg

SEQ ID NO: 2844 - DNA, 65 bp, Candida albicans
caaatatacttaatttaatatgacttctttgataagagattctatagcaactatgacaggtccaa

SEQ ID NO: 2845 - DNA, 65 bp, Candida albicans
ctataattgattctatagccattattagtctgtatcattgccactgattgcacagcattgttctt

SEQ ID NO: 2846 - DNA, 65 bp, Candida albicans
acacatatacatatacatacaaatatatgatacatatagaatagaaatatactataaccaattgt

SEQ ID NO: 2847 - DNA, 65 bp, Candida albicans
caattattatatggagacatctccctataacatgagaatcacatattccaaagtctatatactag

SEQ ID NO: 2848 - DNA, 65 bp, Candida albicans
ttttatataaatctactgacagatttccttccttctttccccatcttgaattaccacggagaaag

SEQ ID NO: 2849 - DNA, 65 bp, Candida albicans
ttcccttcctccttaattaattcaatcttcattatttatctcacattcatttgaattccttatcc

SEQ ID NO: 2850 - DNA, 65 bp, Candida albicans
accccaatatctaggtataacagtttatgaacagcataagaaagacttcctccagtatgtcttag

SEQ ID NO: 2851 - DNA, 65 bp, Candida albicans
ttgtgcaggtatacacgactccaaggaattgcagccacaatcttgaattcaattctaatcttatc

SEQ ID NO: 2852 - DNA, 65 bp, Candida albicans
ggctcattaactatgtgtgtttggatgcgaatactcaaatactcaattatcaatgagtctctcct

SEQ ID NO: 2853 - DNA, 65 bp, Candida albicans
tccatagagatggttaataacttaaatgctaatcaataattgtttaatcctaccgatggaccaaa

SEQ ID NO: 2854 - DNA, 65 bp, Candida albicans
tatgagtaatcattatattgattagttgactaatgtaatgaattggattggttgaaagatcaaat

SEQ ID NO: 2855 - DNA, 65 bp, Candida albicans
cttgcactttaattgctgtcactttatcagacatgatctcttattgttgctaactttcccaaata

SEQ ID NO: 2856 - DNA, 65 bp, Candida albicans
cgagatcattccaccacctcaaattcacctagtgttatatttgctgcctaagtggaaattaatgt

SEQ ID NO: 2857 - DNA, 65 bp, Candida albicans
ccaaaaataattactctttttgatcaaatttatattcaatttaattattgcgataataaatgaaa

SEQ ID NO: 2858 - DNA, 65 bp, Candida albicans
ggtcgaaggatatattattgatcacttctatggtgactggtattggaattgtgctcttatcattg

SEQ ID NO: 2859 - DNA, 65 bp, Candida albicans
cattaccagctagaaatgtagtgtgtggtttgaggtgcgtttagaaccttgttggttattgcaaa

SEQ ID NO: 2860 - DNA, 65 bp, Candida albicans
aagaaagttgattgagtatatctatggcgaagccgatagattaaagtgtaagaaatgttactgga

SEQ ID NO: 2861 - DNA, 65 bp, Candida albicans
atacctttgtcgatttaggattataaggttaattctgtagaagaagaaagcaagatcttgatggt

SEQ ID NO: 2862 - DNA, 65 bp, Candida albicans
aagggaaatccggttccttgtatagaccacccagatcatgtacccatccacatactaaatatgga

SEQ ID NO: 2863 - DNA, 65 bp, Candida albicans
gtaaacgtcccttcccagaaacaaatgatgcctttgataagtatcttgatggtaaacctgccttc

SEQ ID NO: 2864 - DNA, 65 bp, Candida albicans
agtcgatattcaattgcttattaactgctacgtcctcggatttaaatctcatcttgcggtgttcc

SEQ ID NO: 2865 - DNA, 65 bp, Candida albicans
gttacatagattgcattagataataataacaaggccaggttgttaagttgactaacctgtaatca

SEQ ID NO: 2866 - DNA, 65 bp, Candida albicans
gttttaaactatagtaataatatttacttgtttattttctattactaccactggttactactact

SEQ ID NO: 2867 - DNA, 65 bp, Candida albicans
taacgcacaacacccaagtaccaattatttgttgggtaggagaacatgttcaaacttggactttg

SEQ ID NO: 2868 - DNA, 65 bp, Candida albicans
acatggtcgaaaacaatgtgggcaagcacagacgagagggaaaattaacgtgcattagcgtacta

SEQ ID NO: 2869 - DNA, 65 bp, Candida albicans
tagccaattctaaatcgggtaaacaattgatcacatactagtgggcctcgcatcccgatgagtgt

SEQ ID NO: 2870 - DNA, 65 bp, Candida albicans
cctaatgatagacatcatagagtactggcgactccttacatgatggtaacgacaacaactacaac

SEQ ID NO: 2871 - DNA, 65 bp, Candida albicans
ccataattataacaaatgacgaaatggtgaaacttattgttcttagtggtggtaatggtgttaac

SEQ ID NO: 2872 - DNA, 65 bp, Candida albicans
gtcatgattttctcaattttgcattgttaccagatttgtttttttttttcttcttctgttaaact

SEQ ID NO: 2873 - DNA, 65 bp, Candida albicans
gggacttgctaaattgattgaaagatcaaagaggtggaattactgtgcgtacgtgtatactcaac

SEQ ID NO: 2874 - DNA, 65 bp, Candida albicans
caattcaacacttcataaatcatttaaacaccgcatcagaatcatacatatacacagagaagacc

SEQ ID NO: 2875 - DNA, 65 bp, Candida albicans
atagagttatcagacgtgttgatgtttgtttatttggcatttgatatgatttaattctttacact

SEQ ID NO: 2876 - DNA, 65 bp, Candida albicans
aatcaaacaggtaaatatcaatctccatatgttaaatcgccatcatcaaccacgtcaaccttccc

SEQ ID NO: 2877 - DNA, 65 bp, Candida albicans
tggtggtacattcagtcactacacaatacacactcaaatccagcatcaacaagttctcttgtagt

SEQ ID NO: 2878 - DNA, 65 bp, Candida albicans
ataacaaactatgggtaggacagaagttatatagcctgctgataattcaagatagagtataaagc

SEQ ID NO: 2879 - DNA, 65 bp, Candida albicans
ggcctttctctttatttctctaacttcttggtttctttacgatttattttgaaaatcaatcaatc

SEQ ID NO: 2880 - DNA, 65 bp, Candida albicans
agttcttatgaaaggatgttgttgtagatatttcctatttaggaagtctttgtagatatacacac

SEQ ID NO: 2881 - DNA, 65 bp, Candida albicans
aatttaagaagaaattattaaggtttaaatcattcacgttttcattacccctacttgtcaacggt

SEQ ID NO: 2882 - DNA, 65 bp, Candida albicans
actctgaaactcaatcgctttagctatgatatatacggtaaatagaattgcatgaatttgttttt

SEQ ID NO: 2883 - DNA, 65 bp, Candida albicans
tggtagacactttgctgcgtttccttccatttgcagctacctttttacgtttcttattgatttcg

SEQ ID NO: 2884 - DNA, 65 bp, Candida albicans
tctttaaatcctaattcatattgttcttcttctaaatttaatacattatctatatctatatctga

SEQ ID NO: 2885 - DNA, 65 bp, Candida albicans
atacatacaatttaaacctgtagaaacatatatggctatggattaggttggtcctgaatgtaaat

SEQ ID NO: 2886 - DNA, 65 bp, Candida albicans
ggaagtggaattatgtcagtaactaatattaattactcattcggtttacttgcaatccctaactt

SEQ ID NO: 2887 - DNA, 65 bp, Candida albicans
ccaccaacccaataaacaaattcttattagcaagtatatcactactactgtttatgcaattactc

SEQ ID NO: 2888 - DNA, 65 bp, Candida albicans
cgtgataagggcaacaagctatgacgtcgaatgatactaatggttgtagtggtggaatctctcgt

SEQ ID NO: 2889 - DNA, 65 bp, Candida albicans
acttactttgcagcttaattgattgttgattgatttaaatcatacgattcaattcaattcgattc

SEQ ID NO: 2890 - DNA, 65 bp, Candida albicans
ttaaagagcccaccttcccacacccatagttgtaagtagggcaaataataaatagtacgtctacc

SEQ ID NO: 2891 - DNA, 65 bp, Candida albicans
ggaagtctacctgttattcctgttacggagagctgactcattcttgtgtcataacaccaccgcca

SEQ ID NO: 2892 - DNA, 65 bp, Candida albicans
tgttcaatagagtcaattaatcatatcctatacgttgcttattgtgatgtgaaatgggacgcact

SEQ ID NO: 2893 - DNA, 65 bp, Candida albicans
gattcagccacgtccttacctattactactactactgttgttgttgcgtctggggcgcctttacc

SEQ ID NO: 2894 - DNA, 65 bp, Candida albicans
tggttcattgagttccgggtttattatctatctctacaaggtgcattatcatgtactaagatgca

SEQ ID NO: 2895 - DNA, 65 bp, Candida albicans
aagagatgtgagtaataaggcaagtccagcgtcgatagaggtgatagtgatatataaaccctttt

SEQ ID NO: 2896 - DNA, 65 bp, Candida albicans
gggcgactggtcttgaatattatggtgtatttttgtttcttcattacattaaaaaaatctacgac

SEQ ID NO: 2897 - DNA, 65 bp, Candida albicans
taaaagcttgtacggcatcacgcgacagattgcaccgccaacaagacccgcccattcgaaaaaca

SEQ ID NO: 2898 - DNA, 65 bp, Candida albicans
cagttttaataacaccattttcagggagttctgtaactagttcaggaatttcatccattatcaaa

SEQ ID NO: 2899 - DNA, 65 bp, Candida albicans
gggaaaagagtaaagtattatcttgacaaatagtttcacattgtccgattacaatatttggccca

SEQ ID NO: 2900 - DNA, 65 bp, Candida albicans
acatttgtattatacaaaactgtgtatcgaacgattgtattcaacttgtagaaaacacgttatta

SEQ ID NO: 2901 - DNA, 65 bp, Candida albicans
acattgtttgacaatcatctctatgtacagatagtagtgacttgtcattcacatgttactgactc

SEQ ID NO: 2902 - DNA, 65 bp, Candida albicans
agaatactgcattggaaggaaaagtgttctacaagtttctatagttatcctttatcaataattac

SEQ ID NO: 2903 - DNA, 65 bp, Candida albicans
tataagtagtaaatggatttcccaaatttcaatttctaaatacatttacaattcgatattctaac

SEQ ID NO: 2904 - DNA, 65 bp, Candida albicans
atcatgtagaaagctatcagcgattcttacttcttggtggtaatgagcaattcaattagacactc

SEQ ID NO: 2905 - DNA, 65 bp, Candida albicans
tgtttagtaactttatatcttggtgttgggatggtgccacaaatggagattgttgagtgtacatg

SEQ ID NO: 2906 - DNA, 65 bp, Candida albicans
tcgtttccctcgttgtttgtgtttggtcacaatcaaccaatctccttatgtacataaaagtacgt

SEQ ID NO: 2907 - DNA, 65 bp, Candida albicans
cctcctccttcttcatcatcatcatagaatattgagaaatttatttcataacaacaatgaaaatc

SEQ ID NO: 2908 - DNA, 65 bp, Candida albicans
gttaatggtgagcatgttggaagacccttgtcattggtttcacagctgaatgaatccatctatcg

SEQ ID NO: 2909 - DNA, 65 bp, Candida albicans
ttgcctgcacaagaagacgacaatgacgatggatgggaggatatggacgacattggagttcctaa

SEQ ID NO: 2910 - DNA, 65 bp, Candida albicans
ccctctttctacaactgaacatttcttgaacactatttgtcttactttcaacgctccatatagtt

SEQ ID NO: 2911 - DNA, 65 bp, Candida albicans
aaagaccaaatatgattatccgccaagaagtttataaatagtaaacaacagccacgtttggatct

SEQ ID NO: 2912 - DNA, 65 bp, Candida albicans
aataattcctatacaccaattctaccccagattttttggaggttgcgcgtaacctattcatatgc

SEQ ID NO: 2913 - DNA, 65 bp, Candida albicans
gggaggacgaaaatatttagcaatagaaagaccaatttatttcttttttattttatttgttttca

SEQ ID NO: 2914 - DNA, 65 bp, Candida albicans
gtagttattccagtagctactctccaaagcagcaagttaatatacaatcaaattactgtttctca

SEQ ID NO: 2915 - DNA, 65 bp, Candida albicans
tagcaatgattaattgagataatggaggaaaaatttattgatcaatcacaaagtacacaacagaa

SEQ ID NO: 2916 - DNA, 65 bp, Candida albicans
cattgatagatgggcacataaattaaatgctgaaactaaaggtattgaattagtcactgatgaag

SEQ ID NO: 2917 - DNA, 65 bp, Candida albicans
cattcaaattgccttgatttatgggtcatacatgagacatgataacaaaataatgccgtttaatt

SEQ ID NO: 2918 - DNA, 65 bp, Candida albicans
aataataataagaagctagtattatttgatttacattctgaagattctggtaattgtacgaaaac

SEQ ID NO: 2919 - DNA, 65 bp, Candida albicans
ttataatataaatagactagccaattcccttcttcaatcgacctattcagatttcctattcctta

SEQ ID NO: 2920 - DNA, 65 bp, Candida albicans
tttattattattattcggttcgatattgccgcaaaaccaaattccatcatcatttcacaatataa

SEQ ID NO: 2921 - DNA, 65 bp, Candida albicans
cctaacttcttactttgtttatcattatccacaaagataaataaatccattaatctataatttac

SEQ ID NO: 2922 - DNA, 65 bp, Candida albicans
attccatttgtttggtttacgattatcaatcgtcatagttcaatttgtaaaattttatcttttca

SEQ ID NO: 2923 - DNA, 65 bp, Candida albicans
gttttgatttacttcttgttcttcttcaaagttactgtttcattaataacaattttcatttcaaa

SEQ ID NO: 2924 - DNA, 65 bp, Candida albicans
gcagaattgtacaggacaaaataaatgatgaaattatttacatttacttttgcgtatcacctttg

SEQ ID NO: 2925 - DNA, 65 bp, Candida albicans
ctctcatcacaaccactacagttctatttgccaagagataccagatgcaagtaattaatttatta

SEQ ID NO: 2926 - DNA, 65 bp, Candida albicans
tttgatctgtgattcatatctagacgctgataaagaaatggaattcgttatagatgtagtatagg

SEQ ID NO: 2927 - DNA, 65 bp, Candida albicans
ctggacaatttcaattactcgcgcactgaaagatacccagaatctcaatctattgttgattttct

SEQ ID NO: 2928 - DNA, 65 bp, Candida albicans
aagatacaaaatgaactaacggagttgagtaagattcagaaaggaacaacaataattaaaacaac

SEQ ID NO: 2929 - DNA, 65 bp, Candida albicans
tactctaaattcccagctgagagtccaccttaacacagattgatcataaattagttaaagaagag

SEQ ID NO: 2930 - DNA, 65 bp, Candida albicans
tccaatctctttcaacaatcaatcaatcaattaacaattaacaattaacaatcaactaaagaaca

SEQ ID NO: 2931 - DNA, 65 bp, Candida albicans
agaatactttggaaaaagtttttagacattgtttatcatttgaggtcttttcatttataaataac

SEQ ID NO: 2932 - DNA, 65 bp, Candida albicans
gtagatacaagaagtatagttatgaatcaacatatcaacattggctgtatgttgcatagtatcaa

SEQ ID NO: 2933-3000 - skipped (68 entries)

SEQ ID NO: 3001 - DNA, 65 bp, Candida albicans
tcataatcttcaatttgctcttgagtagacactttacgtattttccttggttgtgtatccgtcat

SEQ ID NO: 3002 - DNA, 65 bp, Candida albicans
cgtcgtgtggttgattccaacccagtgcaacagaataataaccccgtaaatggtttcaatgacat

SEQ ID NO: 3003 - DNA, 65 bp, Candida albicans
gtcaagttggggaacggtataattgatgatattaaatcagcattgatttctgcctgtgtatccat

SEQ ID NO: 3004 - DNA, 65 bp, Candida albicans
ccaaatggaagaatagttctttgagttgatctaccaccactaccaccaccacctctaaatgacat

SEQ ID NO: 3005 - DNA, 65 bp, Candida albicans
tcaatattacggttacgattttgttttccctttgaagtctttgactctagctgttcatctgtcat

SEQ ID NO: 3006 - DNA, 65 bp, Candida albicans
gacaaagacagtagaagcattccatcatcaatatcgttatatacattggtaacatgactaggcat

SEQ ID NO: 3007 - DNA, 65 bp, Candida albicans
gcatctttaccagttatcgccgtacaagaaatatctttagtgaaaacggtatcgtttttcaacat

SEQ ID NO: 3008 - DNA, 65 bp, Candida albicans
agagcttcatcccttgttatctgttcttgtttaatatctgatgcgttccttacctttgaccccat

SEQ ID NO: 3009 - DNA, 65 bp, Candida albicans
tctgaatcgggtgaactaacatcaatatctgaatcagattcttcatctactcttcttttacccat

SEQ ID NO: 3010 - DNA, 65 bp, Candida albicans
tcatttattggaaccaacaacactcgaacttttgctggagtgataaaattatatttgtcccacat

SEQ ID NO: 3011 - DNA, 65 bp, Candida albicans
aatactatgaggatcggtgtggctataaatgctattgaaaagcaagcggcagtttcgatatccat

SEQ ID NO: 3012 - DNA, 65 bp, Candida albicans
ttattcactataagtttctttagttttggattctttttctttaaactgatttttatacctgacat

SEQ ID NO: 3013 - DNA, 65 bp, Candida albicans
atggaggtgtccttcgatcttaatagtttagtcaccgcttctgcagtcaacaaatccttccccat

SEQ ID NO: 3014 - DNA, 65 bp, Candida albicans
aaggacttgaattcatcatcttcaatggtagaaatatcattttcctctaacttccgttttgccat

SEQ ID NO: 3015 - DNA, 65 bp, Candida albicans
agatcaatagctgccacatgggggatatccatagaatgtttatctggctgttgtagttcaggcat

SEQ ID NO: 3016 - DNA, 65 bp, Candida albicans
gtaaattcacctaaataattgggaattacatcttgaagagcttttcgtgcttgagaagaggacat

SEQ ID NO: 3017 - DNA, 65 bp, Candida albicans
cattttttcaattgttgcaagtcatcaatgcctttatatgccgtgacaagtggatgttgtttcat

SEQ ID NO: 3018 - DNA, 65 bp, Candida albicans
aatttgaatgcgtggacatacacactcatttgtttcttataggccttggcacgcttttgtctcat

SEQ ID NO: 3019 - DNA, 65 bp, Candida albicans
gtcgtggcagcagcacttgaaattggtgacttggtagctagactacgtatggattgtttgaacat

SEQ ID NO: 3020 - DNA, 65 bp, Candida albicans
gataataatctctcattttgaatcagttcgttggaagaagcagataattgtgaacttgatgtcat

SEQ ID NO: 3021 - DNA, 65 bp, Candida albicans
gagctgaacaagtcgtaaatctggaattgtaatttatctagttttttataatatactgttgacat

SEQ ID NO: 3022 - DNA, 65 bp, Candida albicans
tcaacagatacttctgtattatcattcttattggttcctggccattgaaaatttgtggacatcat

SEQ ID NO: 3023 - DNA, 65 bp, Candida albicans
ggctcaagaaccaaatatccaccagcaagaaatgcttttccaggtgcactaaatgcttttgacat

SEQ ID NO: 3024 - DNA, 65 bp, Candida albicans
tctgcctcatttaatcctttgaatgaatgaaaaccagaagcaccgcttccattactttgtttcat

SEQ ID NO: 3025 - DNA, 65 bp, Candida albicans
gagtcaacttcatcaagttcaatctcttcttcattcacagttttatttctatttcttctagccat

SEQ ID NO: 3026 - DNA, 65 bp, Candida albicans
tgattttgctgataatcaaggttagctatcgattcctctatatctttttctaattgatcggacat

SEQ ID NO: 3027 - DNA, 65 bp, Candida albicans
tctgaatctgatacaattgctgattcttggtgcttggagaacccggtagctgatgagtctgtcat

SEQ ID NO: 3028 - DNA, 65 bp, Candida albicans
aaatagtagtggaataattggtacggtttttgtattattttggaacgcaaaatagaagacgccat

SEQ ID NO: 3029 - DNA, 65 bp, Candida albicans
tcggatgatgcgattgtcaaagcaatgtataaaaggcttggtataaggatggtgtacattagcat

SEQ ID NO: 3030 - DNA, 50 bp, Candida albicans
tcaccgacaatgactaattttctacgaagttcagctggaccgttaaccat

SEQ ID NO: 3031 - DNA, 50 bp, Candida albicans
agggacaaaaaataattaatgccatcaatgacagtttcaacaatagccat

SEQ ID NO: 3032 - DNA, 50 bp, Candida albicans
tcatttaatttattgcaaagctcaattatatcagattgtgaatctttcat

SEQ ID NO: 3033 - DNA, 50 bp, Candida albicans
gttttaccaacggcaccatcaccgacaacaacacattttatagtttgcat

SEQ ID NO: 3034 - DNA, 50 bp, Candida albicans
gtagaaatggcaaatggatcactagtaaaatttgaaagtgaaaatcccat

SEQ ID NO: 3035 - DNA, 50 bp, Candida albicans
gcattcccacttgatggtgggtcgtcatttaaaatagatccaacattcat

SEQ ID NO: 3036 - DNA, 50 bp, Candida albicans
attaaggcatctctacgaaatgtcttttcaaaagtaacaggaccactcat

SEQ ID NO: 3037 - DNA, 50 bp, Candida albicans
ataagtaaatatgcatctgaagaacattcagttattagcttcttaagcat

SEQ ID NO: 3038 - DNA, 50 bp, Candida albicans
acggtaaacaatcactaagacataccattaatactgatgacttctctcat

SEQ ID NO: 3039 - DNA, 50 bp, Candida albicans
gccgctattgctgcaactactattgcaagtttcaaaagccttgctagcat

SEQ ID NO: 3040 - DNA, 55 bp, Candida albicans
taccgccctgttgattagggtcgtaataatgattattattatcgttatacgacat

SEQ ID NO: 3041 - DNA, 55 bp, Candida albicans
taagcaatgaattcgaagagtttaatgtgctgggatttatatattcttgggacat

SEQ ID NO: 3042 - DNA, 55 bp, Candida albicans
tgataagatagggatgggatgttgaattactggagagttgacagtaatgaatcat

SEQ ID NO: 3043 - DNA, 55 bp, Candida albicans
cagccaacgccaacgggagcttgccattataaagtgtggtcaccattggtttcat

SEQ ID NO: 3044 - DNA, 55 bp, Candida albicans
agttttgattcaaaactgcaacgtcagcttcatcaacatctaaattgtacgacat

SEQ ID NO: 3045 - DNA, 55 bp, Candida albicans
aggggaatttcctctttaggttattcacactctcatgctcttccactttcgacat

SEQ ID NO: 3046 - DNA, 55 bp, Candida albicans
gattcgactcatctcgttgaatgtttaacacatcaagaatatcatttgctgacat

SEQ ID NO: 3047 - DNA, 55 bp, Candida albicans
aatctgatgagttactaaggtcatcttcaggagatgatctttttctctgtgtcat

SEQ ID NO: 3048 - DNA, 55 bp, Candida albicans
actcttgctgaacgatgtcaacacactgacggaataatggtgttaagtcggtcat

SEQ ID NO: 3049 - DNA, 55 bp, Candida albicans
gtctctttaaattagaggattcttgaggtgtacttgtcatggatttatgtgacat

SEQ ID NO: 3050 - DNA, 55 bp, Candida albicans
atgtggagtcattatactctcgtatcacgtttggtggggatgaaaacgtattcat

SEQ ID NO: 3051 - DNA, 55 bp, Candida albicans
gaatcaagttttgctgtaactctttgcctatttggttatctggagcaaattgcat

SEQ ID NO: 3052 - DNA, 55 bp, Candida albicans
gtgaagattcctcttcatcgtaatacgacggtcttattgttttacctcttgacat

SEQ ID NO: 3053 - DNA, 55 bp, Candida albicans
acgcaagagcgcaaacaagtaaattgaagattgctataaatactgacgttttcat

SEQ ID NO: 3054 - DNA, 55 bp, Candida albicans
catcagtgactactgttggatgaagtaataataaaatattgatcagtgaagtcat

SEQ ID NO: 3055 - DNA, 55 bp, Candida albicans
ggatatatttcttacctccagttaaaatttctctattctttttaaatcctgccat

SEQ ID NO: 3056 - DNA, 55 bp, Candida albicans
gtttatatggttcgggagtcatatcatcctcctcattaatgaataacaggctcat

SEQ ID NO: 3057 - DNA, 55 bp, Candida albicans
tggcaacaagcctcaaccgctcaaatctcactttgttattttcatcggcggacat

SEQ ID NO: 3058 - DNA, 55 bp, Candida albicans
tgacaaccggaaatggagcggacgaaggaagtttaattggagttaggtccgacat

SEQ ID NO: 3059 - DNA, 55 bp, Candida albicans
agtttgctcttttttcagcaatcttttggtatatagcagtatttgttttcagcat

SEQ ID NO: 3060 - DNA, 55 bp, Candida albicans
ggttcttaactaatgctggattccaagacttttttagatttagatcacctgccat

SEQ ID NO: 3061 - DNA, 55 bp, Candida albicans
atggaatcacctctggcccatcaaacacaacactagttaaaaaattcactggcat

SEQ ID NO: 3062 - DNA, 55 bp, Candida albicans
attcatattgttcttcttctaaatttaatacattatctatatctatatctgacat

SEQ ID NO: 3063 - DNA, 55 bp, Candida albicans
taattggttttcgtggattactactatccttattattgttattattcttagccat

SEQ ID NO: 3064 - DNA, 55 bp, Candida albicans
attggaaaaaagtatctctatcgacataatcaaatatttcatcaaatgcagccat

SEQ ID NO: 3065 - DNA, 55 bp, Candida albicans
gatctatatatttcttgggtatttcttcgtattgtaggtttgaacttgagctcat

SEQ ID NO: 3066 - DNA, 55 bp, Candida albicans
agtctttcgatttaagggcatcgtcacccttcgtgataaattgttctattgccat

SEQ ID NO: 3067 - DNA, 55 bp, Candida albicans
acggtcttataatagccgtggcaggctgggcctttattatacctgatcttagcat

SEQ ID NO: 3068 - DNA, 55 bp, Candida albicans
tgctcaacttggctatgtcagtagagcctaatggtggattaatctgttgagacat

SEQ ID NO: 3069 - DNA, 55 bp, Candida albicans
tatgtttcaaatgcttattttgaaacttctttgtttgtttcgatgctttagccat

SEQ ID NO: 3070 - DNA, 65 bp, Candida albicans
atatgtcgtttcccttggattctcttgtttgacttattagtgacagttttgttgttggttcccat

SEQ ID NO: 3071 - DNA, 65 bp, Candida albicans
attagtaaatctcgttgttttatgaaatattcatttttagatggattagatgaagaatttgacat

SEQ ID NO: 3072 - DNA, 65 bp, Candida albicans
ggaattgagtacgccgaagatatggcagactttcccaaaaccaacttgcttatacccgaaaacat

SEQ ID NO: 3073 - DNA, 65 bp, Candida albicans
gtggcagttgtctttgttgtgggggcttcattattcttacatgaacaatcctcttgacatgtcat

SEQ ID NO: 3074 - DNA, 65 bp, Candida albicans
acattataaccatactgacttgtatacttcagtctaaaagttttgtctttctgtggcttccacat

SEQ ID NO: 3075 - DNA, 65 bp, Candida albicans
ttggacaaagtagctttggcagtggctaatctagccattctcatggaagtagttctgaaagacat

SEQ ID NO: 3076 - DNA, 65 bp, Candida albicans
gttaacgttattggtaatggttgactatatattttatttaaaaatttgttgttttttttacccat

SEQ ID NO: 3077 - DNA, 65 bp, Candida albicans
ataatcaacaagtgagaaatacatttcaaaatattgataaataaatttctatccgtggtaatcat

SEQ ID NO: 3078 - DNA, 65 bp, Candida albicans
ccattagccttcaaaatctgagcaatagatatccttagtagagcaaaataaaacgactcatccat

SEQ ID NO: 3079 - DNA, 65 bp, Candida albicans
ttatgttgtttacggaacgcatactcccattcctttattttcagttttatttcaacgatatccat

SEQ ID NO: 3080 - DNA, 65 bp, Candida albicans
gatacatcaggtgcaattcttgccaatacttctggtgaaaatgtaacttgtttcaattcagccat

SEQ ID NO: 3081 - DNA, 65 bp, Candida albicans
tccgtaaaagtatagtttcttgtctcaagcaaggttcccactatcctttcaagtaccgtatccat

SEQ ID NO: 3082 - DNA, 65 bp, Candida albicans
aacaaatcttccaacacccgatctagagtttgattagctaaaccattgcgtaattggatcgacat

SEQ ID NO: 3083 - DNA, 65 bp, Candida albicans
ggttttggggttggttctttaggtgcctctgtctcatgctctataatctctcctatgaaatccat

SEQ ID NO: 3084 - DNA, 65 bp, Candida albicans
gaggaatcatcgtgctttgagtagtctaaaacagtaccaatggtttcaacaagaccagtaaacat

SEQ ID NO: 3085 - DNA, 65 bp, Candida albicans
tgcttggaatactttccattcaaggatgtccttgttttactgttccttatctgtgttgatggcat

SEQ ID NO: 3086 - DNA, 65 bp, Candida albicans
tgagataatgatgagcgttttatatcttggaacgtctttgcatattggttcggggttatatacat

SEQ ID NO: 3087 - DNA, 65 bp, Candida albicans
gttgcccttcttttcgacgccagactgaagttatctgctggtctttttctaacttccactgacat

SEQ ID NO: 3088 - DNA, 65 bp, Candida albicans
attcgaaatgctatgggtctaatgtttgatggctgaagtttaattggcaaagaagtgacttccat

SEQ ID NO: 3089 - DNA, 65 bp, Candida albicans
tcttcaacttcttgctcttcatctgaataaagaaaagcatcatcatcatcatctgaattggccat

SEQ ID NO: 3090 - DNA, 65 bp, Candida albicans
attgatttggtacctgttaacttgagaggcaacacataaaacccttttatttctgtaggtgccat

SEQ ID NO: 3091 - DNA, 65 bp, Candida albicans
actgcaacagtggtatttatgataaattgtacgattagtagtgaaaataatctgaaaattttcat

SEQ ID NO: 3092 - DNA, 65 bp, Candida albicans
cttgtgtctgcagttggtggatacaaaatttcaaacaaaatgtatctgtgcttgattcgaaccat

SEQ ID NO: 3093 - DNA, 65 bp, Candida albicans
ggtagacggatcaaaacatgttgaccagattggatggtagtttcactttttttgaaatcggacat

SEQ ID NO: 3094 - DNA, 65 bp, Candida albicans
tgcttttcttgaacgccattacgtatcaaggcaggaatacgtgcatcaattgcttttttacccat

SEQ ID NO: 3095 - DNA, 65 bp, Candida albicans
aattgagtatttccattgttacgtaatcgaacattttcagatatcttgggtgaagttacattcat

SEQ ID NO: 3096 - DNA, 65 bp, Candida albicans
ttactgctaatcttttcatcttttgaagactcttcaaattcttttaaaatatcgtcaatatccat

SEQ ID NO: 3097 - DNA, 65 bp, Candida albicans
aacaatatttcctcttcatctttaggaggtattatcacttcttctccttgtatgtttgtgggcat

SEQ ID NO: 3098 - DNA, 65 bp, Candida albicans
cttggcaatacacaatgattagccaaaatagatctcaccaaatatctggattgagttctgaacat

SEQ ID NO: 3099 - DNA, 65 bp, Candida albicans
tattgtcctggaacaacaatactagaaacattaccatcagtagtagtgtttgacatatctgtcat

SEQ ID NO: 3100 - DNA, 65 bp, Candida albicans
ttgtcctgaaagttgctttcatcctcagattcaaaatcactttccctatctgatgttgcactcat

SEQ ID NO: 3101 - DNA, 65 bp, Candida albicans
cgcacaacattctgtaaaagaataatgttggtaggcaatatagcagctcttctttttttagccat

SEQ ID NO: 3102 - DNA, 65 bp, Candida albicans
ggcaaatacttaattggtttaaattcgccttcaaaatcatccttgaaatggtcctgtgaattcat

SEQ ID NO: 3103 - DNA, 65 bp, Candida albicans
gtattaagccctctctcttgtatgaactctggagatttccactgtatttcgtctaatgattccat

SEQ ID NO: 3104 - DNA, 65 bp, Candida albicans
ttagcttcctttttagctaatgctcttttagaacgagcattctttggtttgatcgtcctaatcat

SEQ ID NO: 3105 - DNA, 65 bp, Candida albicans
tttatacaagctacaccaggtgatataaaatcatttaaatcatctgctgatagtagagcactcat

SEQ ID NO: 3106 - DNA, 65 bp, Candida albicans
acattatctgcagatttgatcaagggttcatttgctggtgtagatggtaaagctcctgtagtcat

SEQ ID NO: 3107 - DNA, 65 bp, Candida albicans
ctactctgcgtctgtgatctttctcgatgctgctttttctgtacattatgaaccaattttgccat

SEQ ID NO: 3108 - DNA, 65 bp, Candida albicans
tgttgctgttggtgagtgttattttctccaggtatagctaatattggtgcttctaatggtgccat

SEQ ID NO: 3109 - DNA, 65 bp, Candida albicans
ttcacagtaaaaatatcttcatctatagggagtttgtctccaggtaatattattgtatccgacat

SEQ ID NO: 3110 - DNA, 65 bp, Candida albicans
ggatatgcatcggaggaaatagctttaatggatctggaacgtgatttgacttcaatgtcagtcat

SEQ ID NO: 3111 - DNA, 65 bp, Candida albicans
acatcatttatagttagtttcgataaggatgaaactgatgggagtattatatcgtcatttgacat

SEQ ID NO: 3112 - DNA, 65 bp, Candida albicans
gaatctaatgatgattgacaacttttcacggcacatttgacaaaattagtagttaggaatttcat

SEQ ID NO: 3113 - DNA, 65 bp, Candida albicans
ttatcttggtgaagctttgcttttttaacaccaggcttagagttatcaccaaaagctctcttcat

SEQ ID NO: 3114 - DNA, 65 bp, Candida albicans
tcaataaatttcccatcatatttatcttttaaaattttcccatatttagaatctaattttgtcat

SEQ ID NO: 3115 - DNA, 65 bp, Candida albicans
aaaactttctgtcttcgctgtttgtttttgatgttcttcaatgcttcacttgtactagtacccat

SEQ ID NO: 3116 - DNA, 65 bp, Candida albicans
cggttggggacagactttcctttatctttgcctttgcctttgcctttgcctttacctttagccat

SEQ ID NO: 3117 - DNA, 65 bp, Candida albicans
gataataaagggataattgaagaaagagtacctttaatctcttccaaaacaatatttattgacat

SEQ ID NO: 3118 - DNA, 65 bp, Candida albicans
tcatctttaatcaatggatatatgccaaatggatcatagtatccaatcttaactggattggccat

SEQ ID NO: 3119 - DNA, 65 bp, Candida albicans
tttggtaccaataaggtatgttcaattgaaccatgagttaattggaaaggtctatgagttgacat

SEQ ID NO: 3120 - DNA, 65 bp, Candida albicans
tttatttcatccaaagttctaaatttcttaattgccttaagagttggttttggtggtatatccat

SEQ ID NO: 3121 - DNA, 65 bp, Candida albicans
ggtttgaactctttgagtgagtggaactcctttattattttatgtagtagatcttggtaatccat

SEQ ID NO: 3122 - DNA, 65 bp, Candida albicans
ttgaggaatttgattcccatgatgggatatccaacatcaatactagcagagtctttgggtgccat

SEQ ID NO: 3123 - DNA, 65 bp, Candida albicans
ggtgctggtaaagttgaaatctctttaagaacagtttcaaattcttccattcctgataacgacat

SEQ ID NO: 3124 - DNA, 65 bp, Candida albicans
ggtaaatataatggtttacctcctgtggccatggataatgaccattctgatatagcactcggcat

SEQ ID NO: 3125 - DNA, 65 bp, Candida albicans
tcttgactttgtttaagtttcttctttttttctaaatcttgttgtttactttttcgtttagccat

SEQ ID NO: 3126 - DNA, 65 bp, Candida albicans
cgttgaaacacaaattgctgtgtaatttggtgaatgaattgatcagatgatcctatgggtggcat

SEQ ID NO: 3127 - DNA, 65 bp, Candida albicans
agttccgtcacctcatgctgttgtttgccattaggcattgatgattgatcctgatgttgattcat

SEQ ID NO: 3128 - DNA, 65 bp, Candida albicans
aaaactttgttgaaaagtgcttggtaatcatacacctttgtgaactccctactaaacgttgtcat

SEQ ID NO: 3129 - DNA, 65 bp, Candida albicans
aacaacgatgcaaaacaaacaattatgattaattggggtcgaatcccaatctttaatctcctcat

SEQ ID NO: 3130 - DNA, 65 bp, Candida albicans
taaagtcgtgatcgacaattatcagtcccgcatactggaccattgaaccaatcttgtcgtgacat

SEQ ID NO: 3131 - DNA, 65 bp, Candida albicans
gatttcttctgtttaatggtatcaagttgctccttcaataacgcaactatttgagatctactcat

SEQ ID NO: 3132 - DNA, 65 bp, Candida albicans
tcagtggattttttcactggcgaggactcagctgaagattgacttaactttctctttggtggcat

SEQ ID NO: 3133 - DNA, 65 bp, Candida albicans
aaaaataatgtatgtttggatccaggatatattattaaaaaattgtcttctttatacaacggcat

SEQ ID NO: 3134 - DNA, 65 bp, Candida albicans
acttcaaaagtccctggaggaactagtaataatagttgcgataaatatttcttcaaacaatccat

SEQ ID NO: 3135 - DNA, 65 bp, Candida albicans
gtagtgtatttctttctgattaaatataataattgtcctattaaataaaacagtataactcccat

SEQ ID NO: 3136 - DNA, 65 bp, Candida albicans
gcagtagcagcagcagcagcagcagcttctcttgcctttttggcagcagacttctttctagccat

SEQ ID NO: 3137 - DNA, 65 bp, Candida albicans
aagtaaatagcagcagtgtgggcagctggaccggatccaataatagtgactttgtggtgtaccat

SEQ ID NO: 3138 - DNA, 65 bp, Candida albicans
atcttggccaaatcatcttccaatttgatcaattcactgatcttagataacgttgaatcgctcat

SEQ ID NO: 3139 - DNA, 65 bp, Candida albicans
aaagtagtgtataaatatgatttgggagattgtattctcgccgtttccatttgtacttcatccat

SEQ ID NO: 3140 - DNA, 65 bp, Candida albicans
gaagatccaactcgtgataccgggtttgatttaaatggactatcggctttcttaaaaggtagcat

SEQ ID NO: 3141 - DNA, 65 bp, Candida albicans
gatccagaagatgaagatgaagatactggctttctaggatttaatgattccaatcgattagacat

SEQ ID NO: 3142 - DNA, 65 bp, Candida albicans
actgaattcaaagatgaagttgattgggttgaaaatgttctgagagctgctggtggatgttccat

SEQ ID NO: 3143 - DNA, 65 bp, Candida albicans
ggtggtggctggggagagtttgatgcactagatgatggcatcttcaattttaatttgagagccat

SEQ ID NO: 3144 - DNA, 65 bp, Candida albicans
gattcttgtttcaaatctactgattccaccatcacattgcttttattaacgtcttcttctgacat

SEQ ID NO: 3145 - DNA, 65 bp, Candida albicans
gaaaatgctaatgatgtgattgtatgtggggtataatcaacaaatctacaacgatgaatatccat

SEQ ID NO: 3146 - DNA, 65 bp, Candida albicans
accttggatttggtagattcatcaaatgattcttcatcagaagaatactcatcattggcagacat

SEQ ID NO: 3147 - DNA, 65 bp, Candida albicans
ttctgggggtcgtgcacagtagtaaaaaaatcacatactacaaaataactacaagttttatacat

SEQ ID NO: 3148 - DNA, 65 bp, Candida albicans
ctctcgtcccaatcataaggtatattgcccacgtagaggatattagagtttaaaggagggggcat

SEQ ID NO: 3149 - DNA, 65 bp, Candida albicans
tagtttgccgctaaccagacgtgtcccaaaggtccttgttttgatataattgagtctggaatcat

SEQ ID NO: 3150 - DNA, 65 bp, Candida albicans
attggacgtgaattaaatgttaactcagacaagctttgtttgtatgcttccaaaatgtctgtcat

SEQ ID NO: 3151 - DNA, 65 bp, Candida albicans
atcaccgatggtccacttttgatcttattcttaaaagctgaaagttgagctgataagtcggacat

SEQ ID NO: 3152 - DNA, 65 bp, Candida albicans
accataccggttgccaaatagttccccgactgatcaaactttgaacaaattattggtcctgacat

SEQ ID NO: 3153 - DNA, 65 bp, Candida albicans
ggaaccaatgatttcactaatcgattggaatataattttattagttgtaccttgtttaacgccat

SEQ ID NO: 3154 - DNA, 65 bp, Candida albicans
ttcaaatttgttttaggtctgatacccgtctttctagattgtccaccaaggttggataaatacat

SEQ ID NO: 3155 - DNA, 65 bp, Candida albicans
ttttgtaaattgtcatattgttgtatagctaatttgtatctttctgctactgtcaattgttccat

SEQ ID NO: 3156 - DNA, 65 bp, Candida albicans
tttgccatatttgaaatgttcaatgtcaatgaattaagttgaaagtgtaagccgaagaagctcat

SEQ ID NO: 3157 - DNA, 65 bp, Candida albicans
ctaaactttgatggttctaaaaccttccttcttttggaagccgatccgttgctttcagatgacat

SEQ ID NO: 3158 - DNA, 65 bp, Candida albicans
gcagtattagaagatccaaataatccaccaccacctgatgatgtattgttagtgcttccaaacat

SEQ ID NO: 3159 - DNA, 65 bp, Candida albicans
taggtgtatacggtggggggtaggaggagatgtctataagtaagtttgatgtaattgaatcccat

SEQ ID NO: 3160 - DNA, 65 bp, Candida albicans
gttggagaagccttaggagaagttgcagcagcagtagcagcagatttagatcttgttttagccat

SEQ ID NO: 3161 - DNA, 65 bp, Candida albicans
attgttgttgtggaatcacttccttttaatgcagatttaataactttggattcttctttagacat

SEQ ID NO: 3162 - DNA, 65 bp, Candida albicans
cgtgaatcttttgatgccattggaggtgacgatcgattggttaaagaatcatcgtcttgttgcat

SEQ ID NO: 3163 - DNA, 65 bp, Candida albicans
catgtatatttagacttgttttcgtgacatattgtgcaaacggtagtctcttcttcaaaatccat

SEQ ID NO: 3164 - DNA, 65 bp, Candida albicans
gcaacaacaagcttccagaaatcatccaagctagtttctacagtattataaagattatatatcat

SEQ ID NO: 3165 - DNA, 65 bp, Candida albicans
ctaaataattgtgttcttaaatctcgttgatgggcgccgcctgcagctgaatatctaaaactcat

SEQ ID NO: 3166 - DNA, 65 bp, Candida albicans
ttgttatttgatacatccttactgaaggataccgtctttttcataggtctaattgcagccggcat

SEQ ID NO: 3167 - DNA, 65 bp, Candida albicans
tttgctgatgaaggatcaatctcgtcatgagacaaattggtataatctgctaaggggtcactcat

SEQ ID NO: 3168 - DNA, 65 bp, Candida albicans
aagggtaaatttttcagactccaagcaaatgttgaagtacgtgctatttcactaatcttcaccat

SEQ ID NO: 3169 - DNA, 65 bp, Candida albicans
ggtcgtgctttgatgcccagagcaggatgatgtggtactagttgtagtggtatccgatgcatcat

SEQ ID NO: 3170 - DNA, 65 bp, Candida albicans
gcagcaacagtattataaaagaatgcaagtttttcgttaaattttaatggatataatgatgccat

SEQ ID NO: 3171 - DNA, 65 bp, Candida albicans
tcgttcgtggtggtagtagtgttattgtcgttgtttgttgatgattttccaaatatccaagacat

SEQ ID NO: 3172 - DNA, 65 bp, Candida albicans
aacgccaacacaaagaatggccatgtttctcccagctcatcataattatattctgaagaacccat

SEQ ID NO: 3173 - DNA, 65 bp, Candida albicans
tatatatcagaaatggcactattgtaaattaattccttgtctatataataatctgacaacttcat

SEQ ID NO: 3174 - DNA, 65 bp, Candida albicans
tgggatgcacccacaattaatgctgttttcccttcaacgggaaagttagttttagaaaaccacat

SEQ ID NO: 3175 - DNA, 65 bp, Candida albicans
aaaccaccttgggatatattgccgaatgctccagtattgttattatcgtattcaaaatctgacat

SEQ ID NO: 3176 - DNA, 65 bp, Candida albicans
cttcttctatcccattcggaaacgtattcttcttctttttcagtgactggctctattttggacat

SEQ ID NO: 3177 - DNA, 65 bp, Candida albicans
gaccagtttgtatttctaggatcatttccaaatctctgctttatctttgtacctgctaaccccat

SEQ ID NO: 3178 - DNA, 65 bp, Candida albicans
gttttatcaattgtttgtttgacatcagatggcggtagttttatatcagacggtatagaagtcat

SEQ ID NO: 3179 - DNA, 65 bp, Candida albicans
acttcattaacattgatatattcttcttgagtatcgtctacgacgtcttcttgttggtgtgacat

SEQ ID NO: 3180 - DNA, 65 bp, Candida albicans
ggtgttgttttggatggtaaagttggagccctagcttgtggaagatcctgtttagtagatgacat

SEQ ID NO: 3181 - DNA, 65 bp, Candida albicans
ctagtcaatttattcagacgttttcttttcttagaagggtcagataaaaatggatctcctgccat

SEQ ID NO: 3182 - DNA, 65 bp, Candida albicans
ttcctcacactcattgtatcatgagtcaaatatgacttgcaataatcacagtaatatttcggcat

SEQ ID NO: 3183 - DNA, 65 bp, Candida albicans
aatggataagcagtttcggcatctctttccaatacttgtagacgtttcttttcctcttctgtcat

SEQ ID NO: 3184 - DNA, 65 bp, Candida albicans
aaaaattctctaagtttttcttcagtataatacttgggaagtcccttaacaattaatcttgacat

SEQ ID NO: 3185 - DNA, 65 bp, Candida albicans
gattcttgagtgtttttcacaggtatatatgtgtcggaagacctgcttatagttttaactttcat

SEQ ID NO: 3186 - DNA, 65 bp, Candida albicans
cctgctctttcatattgagcggtgccagctctctcatgtgatcccattttacctgtaagagccat

SEQ ID NO: 3187 - DNA, 65 bp, Candida albicans
tgtgtcatttcttgtaacggttttttagggggttgtggccccgtatatacaccccataaactcat

SEQ ID NO: 3188 - DNA, 65 bp, Candida albicans
tctaaatccttcttgttcttcttggaccctctcccaagtccacgtatagtatttaaaaaagacat

SEQ ID NO: 3189 - DNA, 65 bp, Candida albicans
tacattccatggcaataagtagacttcccagacccaggaggtcctattactatctgtccatacat

SEQ ID NO: 3190 - DNA, 65 bp, Candida albicans
tcatttatatcacctatctttcgcttagatacccgtgaatcctttatgaccctcttcttaaacat

SEQ ID NO: 3191 - DNA, 65 bp, Candida albicans
ctatcatgaccttcctttgaaaacacttgtttcaaggcgcccttggataattgtaaactagacat

SEQ ID NO: 3192 - DNA, 65 bp, Candida albicans
taaggtgatcttttccttcttcgattattgtcacgagatgaggaagcagctggtggacttgacat

SEQ ID NO: 3193 - DNA, 65 bp, Candida albicans
tcattctttaactccacagtcacttcttgatcgactaatgtcttgaaaaaactaaaaaataacat

SEQ ID NO: 3194 - DNA, 65 bp, Candida albicans
gttttagaaacggcagcggaaacaccacccatcatgaaatcaacgaagaagtttgagtcgaccat

SEQ ID NO: 3195 - DNA, 65 bp, Candida albicans
gataaatctgtcttgggaccaaatgttttggatacttgttttttgaattcatctgtcacagtcat

SEQ ID NO: 3196 - DNA, 65 bp, Candida albicans
gcatataataaaataaatatactagccaaatgagaaagatctccaaagaaacggaatatattcat

SEQ ID NO: 3197 - DNA, 65 bp, Candida albicans
aaaaatcccagctgtggtttaagaagcttttcagcttcagctatcaatgaacgaggatctggcat

SEQ ID NO: 3198 - DNA, 65 bp, Candida albicans
tcttcttccttaggaaaactaaaagcaccttgagggatattgttgttgctttcttgtaacgacat

SEQ ID NO: 3199 - DNA, 65 bp, Candida albicans
agcattttcttgcaagttaataacacctgtttataacctggaaacgtagacacccaatcagacat

SEQ ID NO: 3200 - DNA, 65 bp, Candida albicans
gttgatttggtgctaacctcagcctcaacttgttttagactagtgtcttttccatttgaaatcat

SEQ ID NO: 3201 - DNA, 65 bp, Candida albicans
ttaggttgacttggtgatgatggactattcgatactttatgaaatccgagcttttccatgatcat

SEQ ID NO: 3202 - DNA, 65 bp, Candida albicans
tttatcttttctggatctatggtagcttgagaaaattgggctgagcttcctaaaaataccgacat

SEQ ID NO: 3203 - DNA, 65 bp, Candida albicans
atcatatcttgaaattccaacacttttgctctttctatatctgttaaaaatcttggtttagtcat

SEQ ID NO: 3204 - DNA, 65 bp, Candida albicans
agtttttgcttcaaagtaggtggttttcttggttttgaaaccttattctttccttgttttgccat

SEQ ID NO: 3205 - DNA, 65 bp, Candida albicans
aaagacttgatcaacttcttgaccttccatatttcaatattcttttcagcttctgtttcagacat

SEQ ID NO: 3206 - DNA, 65 bp, Candida albicans
taaacaaccccataagtaccttctccgactttttcttgacgttgataatcagataactctaccat

SEQ ID NO: 3207 - DNA, 65 bp, Candida albicans
gatttgtaagtttcttccaattttttccattctggtaaatcggtagctaatttaaaggaggccat

SEQ ID NO: 3208 - DNA, 65 bp, Candida albicans
agttcctgtgtttggtgtttgtcaccatctttattaccttgcaattgcttactttcatccaccat

SEQ ID NO: 3209 - DNA, 65 bp, Candida albicans
gattgtaaaaaaaataaaaataaaatgttaagaagagtaaaaatcaatttccttttttttttcat

SEQ ID NO: 3210 - DNA, 65 bp, Candida albicans
ggagaaaatacatgatctttaattggtaaatgacccaattgataaatagcaggaactttggacat

SEQ ID NO: 3211 - DNA, 65 bp, Candida albicans
gattcgcccgtctttaaacgctttgaaccaggctcttgtgagggagtgtacgaatcggtagacat

SEQ ID NO: 3212 - DNA, 65 bp, Candida albicans
gtattatttttaacttcttgaccactatttttcaaagcagtcagtgcttgattatcaatactcat

SEQ ID NO: 3213 - DNA, 65 bp, Candida albicans
tttactattattgtctcaattatagaatcaattttttgcaacaatgatattgacttgggttgcat

SEQ ID NO: 3214 - DNA, 65 bp, Candida albicans
aattctaattcatacaaaggattatctttagttccaataatggagaaataataagatgaagacat

SEQ ID NO: 3215 - DNA, 65 bp, Candida albicans
agcaaaagaaatcgtggtgccaaactgtttaaatagtttgtcacagttcgtatactgtatgtcat

SEQ ID NO: 3216 - DNA, 65 bp, Candida albicans
acaaagttacgactagaaactgttttccccaacctgccagtcgttttgaaaattgatttatacat

SEQ ID NO: 3217 - DNA, 65 bp, Candida albicans
tctttggcaagataataatatctatctaaacgacctttactatgtaacttgtgatgtatatccat

SEQ ID NO: 3218 - DNA, 65 bp, Candida albicans
ctgataaagactctctttccagcaacgtctaagtctttgactgataatttgttagataatgacat

SEQ ID NO: 3219 - DNA, 65 bp, Candida albicans
aacactaaatttccctttctataaactgtccctaataaattagaaaatttaaaatctgacttcat

SEQ ID NO: 3220 - DNA, 65 bp, Candida albicans
aactcacggactttttgtgcttccctcttttgtttcttagaaggtggtggtataactgtagccat

SEQ ID NO: 3221 - DNA, 65 bp, Candida albicans
aatgaatcttctataataccaatctcttcaatgttagacctctggacttcaatgaaattactcat

SEQ ID NO: 3222 - DNA, 65 bp, Candida albicans
atatcttcattacttgctattccaccagcaccctttttagagttaactcgtcctgagtaatccat

SEQ ID NO: 3223 - DNA, 65 bp, Candida albicans
ggtaatgttaaagttaatggtctcaatctggtaccgtatcctccgactaaaattaatcctttcat

SEQ ID NO: 3224 - DNA, 65 bp, Candida albicans
gtggcatgctttgatttgaatggcttatggtcatgctttaatgtgtttctatgagaattggccat

SEQ ID NO: 3225 - DNA, 65 bp, Candida albicans
gttgaaacagcaatttcttcagaatctgaataatctaataattcttcttgaccttcgtgagacat

SEQ ID NO: 3226 - DNA, 65 bp, Candida albicans
cgtatcagcgatccgttttcttttcccatcaactgttctatttgtcttctttgttcctctgccat

SEQ ID NO: 3227 - DNA, 65 bp, Candida albicans
ttatcatctacagcagaagcaccagaagcatcaaaatgttgttttttatcttcttcaccagtcat

SEQ ID NO: 3228 - DNA, 65 bp, Candida albicans
agtcctggttggatgaatgtccaagtggcatttaaatcactgaatggtggaagagtagatgacat

SEQ ID NO: 3229 - DNA, 65 bp, Candida albicans
gtctccaaacagtgttttacgccctcagttgtagtgccggggccagaatatactaaaacattcat

SEQ ID NO: 3230 - DNA, 65 bp, Candida albicans
ccatcaaaatgtataacacttttattcttctgatgcaaaaatttataatatactacagaggacat

SEQ ID NO: 3231 - DNA, 65 bp, Candida albicans
agaacttgtttagttgctggttttgaagtaacagatggtttcgttgcaactgctgcagtagacat

SEQ ID NO: 3232 - DNA, 65 bp, Candida albicans
aacaagtctttgacgtctttaccgtagataacaccggatttacttaaaactgctggaggagccat

SEQ ID NO: 3233 - DNA, 65 bp, Candida albicans
aatttagacattattattgatcttgttattgatttaggtaaatgtctaaatagttttatattcat

SEQ ID NO: 3234 - DNA, 65 bp, Candida albicans
aatctacgcaattcgttccatcttcttccgtctattctaagtccctcaggtgaatataattccat

SEQ ID NO: 3235 - DNA, 65 bp, Candida albicans
ctgagcaaatatgataatgcctttgaaatgagaacgtctcttcttgctttatctggtggtggcat

SEQ ID NO: 3236 - DNA, 65 bp, Candida albicans
tcatctataatccttttacataaatcaagatatgcttgctctgcagtgttaggtgatacagtcat

SEQ ID NO: 3237 - DNA, 65 bp, Candida albicans
gatggaagtccaattaaacatctattgaaaaatttctcatgtttattgattaataattgattcat

SEQ ID NO: 3238 - DNA, 65 bp, Candida albicans
aattcggccaatttcttaagggcttcagcacgaattgagccacgggtaatcccagaataatccat

SEQ ID NO: 3239 - DNA, 65 bp, Candida albicans
gatctattgttattcgatgcacatactgtacatatttttagactatcttctatatgttttgacat

SEQ ID NO: 3240 - DNA, 65 bp, Candida albicans
ccggcaataatagttgcttgttgttgaataggataagtgacagaagtgttgttagaaactgtcat

SEQ ID NO: 3241 - DNA, 65 bp, Candida albicans
cctttaactgacagattcgcatcattggcatcatttccaggctgtttactacttgataccgacat

SEQ ID NO: 3242 - DNA, 65 bp, Candida albicans
atttcttcatctctttcttttacttgttttttcaattgagttaattcatcaagtgttaaactcat

SEQ ID NO: 3243 - DNA, 65 bp, Candida albicans
acaagttcattttgataaataagaccacctgctttatttagaattaatatagagtaaactttcat

SEQ ID NO: 3244 - DNA, 65 bp, Candida albicans
tcctgaagctgtaaagcctttctataaagatactctcttctttctctagcctgttttcttatcat

SEQ ID NO: 3245 - DNA, 65 bp, Candida albicans
tcttgtatttgctcgtttataccactcttttcagtggatttccttatagctgtaggggcggccat

SEQ ID NO: 3246 - DNA, 65 bp, Candida albicans
tgtttggttttttccgatgtttccttagatgatttggattgtaatgccttatagatagctgacat

SEQ ID NO: 3247 - DNA, 65 bp, Candida albicans
gattgtgagtcatagcatcttgagagtagatgcttttctagttctgtatcttgttgtaatgacat

SEQ ID NO: 3248 - DNA, 65 bp, Candida albicans
aatactgttgccacttgagcaccaccaggctggttagcggggtccatttgagtataatttgacat

SEQ ID NO: 3249 - DNA, 65 bp, Candida albicans
tgttggtactgctgttgctgttgttgttgataggcatcagcggcattaccatatggattatacat

SEQ ID NO: 3250 - DNA, 65 bp, Candida albicans
tatatacatacaattttttcaacattgtttttccatatatcgtctcctgttgttttctttgacat

SEQ ID NO: 3251 - DNA, 65 bp, Candida albicans
gagttggttaaattggaaaagacaccaacttcgttagagttttcaaattgagttctagtagccat

SEQ ID NO: 3252 - DNA, 65 bp, Candida albicans
gaataatttgattggtaaaactgcatgttttggggattacccatttgttgttgataataagccat

SEQ ID NO: 3253 - DNA, 65 bp, Candida albicans
ccgtattgaacgggaccggatctacctccgcgtccacctctgaatccacctctgcctctattcat

SEQ ID NO: 3254 - DNA, 65 bp, Candida albicans
ttagtttgcgcttcttgtatcgcaaattgaaattccgattcataagtattgaatgattctgacat

SEQ ID NO: 3255 - DNA, 65 bp, Candida albicans
ggtttaatttcatctgcacacgcgagtgatagaaataatgacaccaatagtattgatatattcat

SEQ ID NO: 3256 - DNA, 65 bp, Candida albicans
gctgcaactttattagcagtagggttagatgcagttgaaaatttcttctttggtgctttagccat

SEQ ID NO: 3257 - DNA, 65 bp, Candida albicans
tcaatgtagactttgtagtctaaagtgttggcagcaccaacttgacgagtagagtatgaagacat

SEQ ID NO: 3258 - DNA, 65 bp, Candida albicans
tcaagagcccatttatctatatctggggtatcccatggtttatcacgattatgagtagatggcat

SEQ ID NO: 3259 - DNA, 65 bp, Candida albicans
tctgatgatgcaaggtcccagtgccacgtgcaataactcttccattcaactatttccaccttcat

SEQ ID NO: 3260 - DNA, 65 bp, Candida albicans
gcttcatcatattgtttattagttacagcttttctagcttcttctaataattgttgtccagacat

SEQ ID NO: 3261 - DNA, 65 bp, Candida albicans
ggtttttctttatctttaaaagtagcattggaaggtgctactgctggtcttgcaactgatgccat

SEQ ID NO: 3262 - DNA, 65 bp, Candida albicans
tttgattttctaccaccgatttgaacatgattagaatcattaattgacataatatgatgaggcat

SEQ ID NO: 3263 - DNA, 65 bp, Candida albicans
tagttatcttcggttgaaacatcatcactagatgatttggatttactttcttttttactacccat

SEQ ID NO: 3264 - DNA, 65 bp, Candida albicans
gaagttggtggttttggaatagaagttgattcttcagtctttggtttagtatcttcggctgacat

SEQ ID NO: 3265 - DNA, 65 bp, Candida albicans
atagcagataagttgcttgatcgtttagcatccaatattagtttattagctgtatctccaaacat

SEQ ID NO: 3266 - DNA, 65 bp, Candida albicans
tgggatgctttaataatttctgggtcacctcccttttcaacgagaaatgcattaatgtctaacat

SEQ ID NO: 3267 - DNA, 65 bp, Candida albicans
ccggtgacatcgtccaaataggttttttgaacttgttcggcaactttatcaacttcttcagacat

SEQ ID NO: 3268 - DNA, 65 bp, Candida albicans
ttaagaccatcatctccagcggatataagtagcatatttgagcagttcgggcagaatgtaagcat

SEQ ID NO: 3269 - DNA, 65 bp, Candida albicans
tttttcggatcagtcaagtctttaaattgccgttgtaagatagctgctgctgatttggatgacat

SEQ ID NO: 3270 - DNA, 65 bp, Candida albicans
gcacttccatctttgaagaattcaacaggaacttcagttaatttttctaatccttcagcagccat

SEQ ID NO: 3271 - DNA, 65 bp, Candida albicans
gccgaatctcttgttggtttgtcattggatgctagtttcttgacaaaacttgaggtttgtgacat

SEQ ID NO: 3272 - DNA, 65 bp, Candida albicans
ctttcgttttttgcatgggtatcacctctcccgttcttggtctttccttttccttttgtactcat

SEQ ID NO: 3273 - DNA, 65 bp, Candida albicans
tcatcaacgtcattaaactcaacgtccatctcttcgtcttctggcttatttatgggttcactcat

SEQ ID NO: 3274 - DNA, 65 bp, Candida albicans
ccattcaaagatgcattggccatagcaccagacaattggtcctgagtattctgttggtcagacat

SEQ ID NO: 3275 - DNA, 65 bp, Candida albicans
ttcaaatgaagcattctttgcaaaatagaaatttgcctatctcgtaaacttacatcaagtgacat

SEQ ID NO: 3276 - DNA, 65 bp, Candida albicans
tttaattctttggaaacagtggatttcccacaagctatacctccagtcaagccaacaataagcat

SEQ ID NO: 3277 - DNA, 65 bp, Candida albicans
acatcgtctccacttatcttttgtgctcctaaaaataatgtatctgaacgtgcagttgaaaacat

SEQ ID NO: 3278 - DNA, 65 bp, Candida albicans
tcattgacagatactttcgtagccgtattaggctcatagattaatgtataaccactgtcactcat

SEQ ID NO: 3279 - DNA, 65 bp, Candida albicans
cgaatattcgattttaatgcttgtattaaataatttttttgatttaatgataattctttcgacat

SEQ ID NO: 3280 - DNA, 65 bp, Candida albicans
tcagatgataacactgtgctgaaaataagaaaaataggtagtatgaaactaagtaacctattcat

SEQ ID NO: 3281 - DNA, 65 bp, Candida albicans
aaatacgtggcctgtcgaagctgcctcaaatcatcttttgataatttagaaaccgttttccccat

SEQ ID NO: 3282 - DNA, 65 bp, Candida albicans
acaattgcaactttgaatggtttcgtgagaagtctagtggtgtatgataggaaccttggcttcat

SEQ ID NO: 3283 - DNA, 65 bp, Candida albicans
gagtttcggatccgagaaacacactcttcaccaagtatcttcttcaaataaatatctttcgacat

SEQ ID NO: 3284 - DNA, 65 bp, Candida albicans
gctgaaacgttattcaattttgataacacactgtttacgttgtctaacagaactgggtcttccat

SEQ ID NO: 3285 - DNA, 65 bp, Candida albicans
atttgaggtccaaaaaaggatggatgtaaagttaaatttaatgacaaatcttttaaaaagaacat

SEQ ID NO: 3286 - DNA, 65 bp, Candida albicans
acttctggtggagctgaaaactcatctccggcatctgcccatgagtcgagtaatcctgtggacat

SEQ ID NO: 3287 - DNA, 65 bp, Candida albicans
aaggttgatttaccagtacctgatggaccggaaataacgattggtctattggcagatgatgacat

SEQ ID NO: 3288 - DNA, 65 bp, Candida albicans
ttcatttgtttttgttcaacaatttgttgaaattcttgttgttctttaacgtttaattgatccat

SEQ ID NO: 3289 - DNA, 65 bp, Candida albicans
tctaagatttgttgagtcaaagcagaatcagccaatgggaaagcttttggatttggggcagacat

SEQ ID NO: 3290 - DNA, 65 bp, Candida albicans
ccaattttaccccaatcgtagttttggtatccacattggattctaaataatttttctgaagacat

SEQ ID NO: 3291 - DNA, 65 bp, Candida albicans
tttttcttgataccttctctcatacgagtggtagttcttttggatgttggcttcttcactctcat

SEQ ID NO: 3292 - DNA, 65 bp, Candida albicans
gtggcagctttagatgttgcaataagggtgccgtcagatactttaattcctaaaataatatccat

SEQ ID NO: 3293 - DNA, 65 bp, Candida albicans
tctatttcagaggatacatcatcttgctgaacatccttcattttaatatccttagattctggcat

SEQ ID NO: 3294 - DNA, 65 bp, Candida albicans
gcctttttggcttctctttctaaacgcttttgctctcttttagcttttgatgcagaaatcgacat

SEQ ID NO: 3295 - DNA, 65 bp, Candida albicans
gctatacagtctttaccaatcatagctactgctgcacctccgttaattgaaaatggatccgacat

SEQ ID NO: 3296 - DNA, 65 bp, Candida albicans
acaactttaacgttgatggtggtagtattgttgttgctccttgatgtagatatattaggagccat

SEQ ID NO: 3297 - DNA, 65 bp, Candida albicans
gacttcataaaagtctttgcttgttgtgggttggttggattagttgggggtaattttaaatccat

SEQ ID NO: 3298 - DNA, 65 bp, Candida albicans
ggtggagatggggatggtaggtattcatcatcatcatggtttattaaatcctgtaaatttgacat

SEQ ID NO: 3299 - DNA, 65 bp, Candida albicans
ttgatccatgaatgcaagtcataacgtaaattctcccatgcaagagattcagtatttgatttcat

SEQ ID NO: 3300 - DNA, 65 bp, Candida albicans
tctccaaccaacaataacttcataatcatgtcatatgctcttgatgatgttcctttaccgctcat

SEQ ID NO: 3301 - DNA, 65 bp, Candida albicans
aaatattgattatcataatcagtaagttttagttttctgaatgtataaccttgtggtaacagcat

SEQ ID NO: 3302 - DNA, 65 bp, Candida albicans
gtgttttcaataactccattgttatcatccacaagttttaatatttgtaggtgcaagtcagacat

SEQ ID NO: 3303 - DNA, 65 bp, Candida albicans
gatttaccgacacctgaatcaccaatcaataataatttaaataaatagtcgtattcgttattcat

SEQ ID NO: 3304 - DNA, 65 bp, Candida albicans
gttaaagtaccgtcaacatcgaataaaactaaagtttttggatcttgtttgtttgcaaaagacat

SEQ ID NO: 3305 - DNA, 65 bp, Candida albicans
ctctgtgtgggtgctgctcctcctaatccggcaccttggcctaataatctttgtaatctttccat

SEQ ID NO: 3306 - DNA, 65 bp, Candida albicans
tcttcagtaacagattcttctaacttgggaacttcaacttttggtatttcgggttcagctgacat

SEQ ID NO: 3307 - DNA, 65 bp, Candida albicans
ttgtaattgtatggaccataagtgtcattggatggtctaccccaactgtatggatcgtgattcat

SEQ ID NO: 3308 - DNA, 65 bp, Candida albicans
caaccttgataatctccttttccaaatagtgagtatatttctgcagtgagtttttgtaaagacat

SEQ ID NO: 3309 - DNA, 65 bp, Candida albicans
caatcttgacaaaaccagtaccttgatcaagcactacaaattgatgctgttagtaaccatgccat

SEQ ID NO: 3310 - DNA, 65 bp, Candida albicans
gggaattgttcatctaaagtagcagaaaagtctttttcagccttaattggatcttctcttgacat

SEQ ID NO: 3311 - DNA, 65 bp, Candida albicans
gtttgaccaattaatcctttgtctttaagagcagccttaagttgttttaactgggaccctgccat

SEQ ID NO: 3312 - DNA, 65 bp, Candida albicans
ttctgtaaatttaatttactgaatattttatccttcaatgaggacaaatttaaaccagaactcat

SEQ ID NO: 3313 - DNA, 65 bp, Candida albicans
ggtctattatcttctggagcgtttggaatatttctcaggtaaagcttcccatttttttctaccat

SEQ ID NO: 3314 - DNA, 65 bp, Candida albicans
tcagttttggagccatgttggttgttcgtcttgcttaaaagaactttcaagatgtgatttttcat

SEQ ID NO: 3315 - DNA, 65 bp, Candida albicans
atctttggttcaactgggaacttttcattatctgaagaaacaataataaccttaggagatgacat

SEQ ID NO: 3316 - DNA, 65 bp, Candida albicans
ggttcctctatagtactcccaataacaatatcaggagtggcattttctatatcgtcgtatgacat

SEQ ID NO: 3317 - DNA, 65 bp, Candida albicans
ataccggacaagacacattcggtcaagccagtacctaaaacaataacgtcgtagttttcgtccat

SEQ ID NO: 3318 - DNA, 65 bp, Candida albicans
tattgctctgggtatattctggggtatgggaatagtacaggtaagtcgtcaataaagaacttcat

SEQ ID NO: 3319 - DNA, 65 bp, Candida albicans
ccaataatggatttgcccttataagacttgaaattgaatagttctaatcctattaatctacccat

SEQ ID NO: 3320 - DNA, 65 bp, Candida albicans
attaaatgaagtcccaaaaatcctgatcctccaatgattaatactgactgtaaagattcactcat

SEQ ID NO: 3321 - DNA, 65 bp, Candida albicans
tcttcgtcttcatcatcggagacgattttatcaaccttttcgttggttggttcagtagcactcat

SEQ ID NO: 3322 - DNA, 65 bp, Candida albicans
tggtataatctaccttcaggagaaaaaatagtgatatgtctatcaaaacctgctgaattggacat

SEQ ID NO: 3323 - DNA, 65 bp, Candida albicans
ctaatcagttcaacatctatccccaatactttcaattgaggtttagatgatatggtagaagccat

SEQ ID NO: 3324 - DNA, 65 bp, Candida albicans
aaactataattatttaacaaattatcgatagaatctcttccaaagtacaaccaatttcgatacat

SEQ ID NO: 3325 - DNA, 65 bp, Candida albicans
tgttgttcaaaatatggtcttataccaccttcatgaacataagatttatcaattgaagtagtcat

SEQ ID NO: 3326 - DNA, 65 bp, Candida albicans
gcaattctcttggaagacactgatctcaaagctggtcttatggcttgacgaattatggcagacat

SEQ ID NO: 3327 - DNA, 65 bp, Candida albicans
gatgtttttgctttcttggatttcccattttcacgaggctctgcctctcttttcaatgccaccat

SEQ ID NO: 3328 - DNA, 65 bp, Candida albicans
gctgcgtctcgaacagtatcatacggtgaccacaatgaatgtgaggttggtggtttagcatccat

SEQ ID NO: 3329 - DNA, 65 bp, Candida albicans
ttttcagcctcatagttgtcaattaacttctgtctcttgtttgatcttttctcctcgttagccat

SEQ ID NO: 3330 - DNA, 65 bp, Candida albicans
gtttcttcctcatctagtttattacctggtattacaggaatttctctttcttctaattgaatcat

SEQ ID NO: 3331 - DNA, 65 bp, Candida albicans
ccagtgaaaccaacttctggtttactattagactcggttttttctgtcgtttctgtagttgacat

SEQ ID NO: 3332 - DNA, 65 bp, Candida albicans
tgattatttatcaaattagataaacttgaagtatgattagtagttaattgatgcaaaacttccat

SEQ ID NO: 3333 - DNA, 65 bp, Candida albicans
aaatcaattctttttctaaataatattgatgatgttgataagagtagatttctgctataaagcat

SEQ ID NO: 3334 - DNA, 65 bp, Candida albicans
gcttgggttctcgtaataaagtttttggcattcccggtggtacccctcttctttattctggccat

SEQ ID NO: 3335 - DNA, 65 bp, Candida albicans
agagtttcttgtaaacccttggtaattaaattatattgttcaactggatccgttatgactgtcat

SEQ ID NO: 3336 - DNA, 65 bp, Candida albicans
ttatcgacttcttgagcttgttctcccacagtggaaaacacttgttggttactttcttcagacat

SEQ ID NO: 3337 - DNA, 65 bp, Candida albicans
gtgtcaactgtttgatcaaataaattgatatccaaatcagttgaaaaatctaatatggcatccat

SEQ ID NO: 3338 - DNA, 65 bp, Candida albicans
cgattgacatcaaactgtgtgtgaccacacgttttacatttttgttgttttctaggcttgctcat

SEQ ID NO: 3339 - DNA, 65 bp, Candida albicans
aataatctaccttctggtgaaaaagtggatacaccacgatcatattcacttcttgttaaaaacat

SEQ ID NO: 3340 - DNA, 65 bp, Candida albicans
ctgattttgtgaatttgttgttcagcttcttgttcgactttttccttgttgattggggcagacat

SEQ ID NO: 3341 - DNA, 65 bp, Candida albicans
gcttcagcagcttgaagtttttgttgagatgaaatttgaggagtagtaccacctaagccaaacat

SEQ ID NO: 3342 - DNA, 65 bp, Candida albicans
tgtgtacccttagcttcagtggtgtctacaccagacttttcgttaacatatatagattgtgacat

SEQ ID NO: 3343 - DNA, 65 bp, Candida albicans
tttccattttctggtgatgcgacagtagccaaggataattgggccaatgattgttctaatgccat

SEQ ID NO: 3344 - DNA, 65 bp, Candida albicans
aatgatagtaaagattttgaaacacctttatttagtttcctagttattgttcttctacttagcat

SEQ ID NO: 3345 - DNA, 65 bp, Candida albicans
tgttgtaatgttggcgatttatcataattattgactggccatggtatattcaaatcataggacat

SEQ ID NO: 3346 - DNA, 65 bp, Candida albicans
tcacttcgtaacctccatcttgaaatatcagttttgggaagaccaatttcctctgaataatacat

SEQ ID NO: 3347 - DNA, 65 bp, Candida albicans
tctgatatctttttcaaagtgtagattcttttgccttcggcatctaaggtgtacatcaaatgcat

SEQ ID NO: 3348 - DNA, 65 bp, Candida albicans
ctcacttcaagtggtagattagataaatcctgtgtgtatttctcaagtacagttgatgtatccat

SEQ ID NO: 3349 - DNA, 65 bp, Candida albicans
tttaatcttgtgggtaaatccgccacatcgataattgttggattagcattaataggatcactcat

SEQ ID NO: 3350 - DNA, 65 bp, Candida albicans
tgacctaaagcagcatgtgagatagatgatgggatgctgaatccttctctttgaggagatgccat

SEQ ID NO: 3351 - DNA, 65 bp, Candida albicans
ttccaatcgaggaaatctacttttttcaataattttttctcatgatgttttaatgccctaaccat

SEQ ID NO: 3352 - DNA, 65 bp, Candida albicans
tttcttcgtttgttcttattcagtattcctggaggaggtggaggtgggggtaatttacgtcccat

SEQ ID NO: 3353 - DNA, 65 bp, Candida albicans
ttacatgccgaatgatagagatgagttctcaactcagtgatatcaatggattcattggttgtcat

SEQ ID NO: 3354 - DNA, 65 bp, Candida albicans
tatatcttcatagcatcaagagattcactaagccacttggctacccctaaatcgttaaaagacat

SEQ ID NO: 3355 - DNA, 65 bp, Candida albicans
ccaaaaagttgtataactgctttaagttcagtaggatgtgataataattgtaaaaatttgcccat

SEQ ID NO: 3356 - DNA, 65 bp, Candida albicans
attaaaataatatgtttgacatgttctatggatttggggacttcctgtaacaattccgacgacat

SEQ ID NO: 3357 - DNA, 65 bp, Candida albicans
ttgacatggtctttttccgcttccctaatagtgaccgatggcccttcatgactatctatttccat

SEQ ID NO: 3358 - DNA, 65 bp, Candida albicans
gattttaaagttgaatcgggttctcccaataatgccaaatatggtgctgcagataccaatgccat

SEQ ID NO: 3359 - DNA, 65 bp, Candida albicans
ttggtgggtttctttttcttgtctttcaacgacaagtccttgactttatctgcaacttcagacat

SEQ ID NO: 3360 - DNA, 65 bp, Candida albicans
gcagacatacgggcattttcagccctttcctcagtagcttgatcgttaaatatttgaacagacat

SEQ ID NO: 3361 - DNA, 65 bp, Candida albicans
ctagattcagcattcactgagtctttgaatgactccatatttacattttccatcacaggactcat

SEQ ID NO: 3362 - DNA, 65 bp, Candida albicans
ataaatgctgatgaaaaaacatatgcaagtgataaaaattgagtgatttgttgacgaatattcat

SEQ ID NO: 3363 - DNA, 65 bp, Candida albicans
attgaagtacctaaattcacttccccctttttcaaatgattgatgtctactgaaataccgttcat

SEQ ID NO: 3364 - DNA, 65 bp, Candida albicans
gcttgtcttccctgctgtctttgcgtagaagtgtttaaatatacaacaggagcttgaattgacat

SEQ ID NO: 3365 - DNA, 65 bp, Candida albicans
atttcttctattttaggtggagctgcttgaggagcttcatcaaagacatcaaacaagtcatccat

SEQ ID NO: 3366 - DNA, 65 bp, Candida albicans
aaatcaatagtagttgtgtttttataagtcttgaacccttgaataataatcttcttgatatgcat

SEQ ID NO: 3367 - DNA, 65 bp, Candida albicans
ggatcaagaactatagcattgatttcatcacctccatatactgttgttgttgatgctgttgccat

SEQ ID NO: 3368 - DNA, 65 bp, Candida albicans
gtgaaagcacgaccaaagacggaagcaccagtgaatatcacgttaactaataatctgtgagccat

SEQ ID NO: 3369 - DNA, 65 bp, Candida albicans
ccttgagatgaatctgtcccctcttttaaaacaacaattgttggtgtttgattagaaaatgccat

SEQ ID NO: 3370 - DNA, 65 bp, Candida albicans
aatgcaccaccaaaatcatttaaaatcactattggacatggatctctagtatgatcagctgacat

SEQ ID NO: 3371 - DNA, 65 bp, Candida albicans
aattcttcaactaaatcttcaaaaacatcaagaaatctttctctagcagcaagtttatcagacat

SEQ ID NO: 3372 - DNA, 65 bp, Candida albicans
gtaagtggtaattgagtattagaaatatctctaattgttctttttcttgatggagtagtattcat

SEQ ID NO: 3373 - DNA, 65 bp, Candida albicans
tcaatctcttgtctagatactacggattcatcaactcctttattgtaaaactgtgaagatgacat

SEQ ID NO: 3374 - DNA, 65 bp, Candida albicans
ttgttatgggatctggatactctaatcgtccaattaggtggtaagcctgttgatgtcgatgccat

SEQ ID NO: 3375 - DNA, 65 bp, Candida albicans
cccatttcatcttgagcaacaatcgcattacttaaatcgggcattccctgtggtgcacgagccat

SEQ ID NO: 3376 - DNA, 65 bp, Candida albicans
gcaaatcctaattttgtcaatccagtaccgttgtccatgacaactgcgggtgtgttcatactcat

SEQ ID NO: 3377 - DNA, 65 bp, Candida albicans
acaaaagtggttttaccacttccggccattccaatacatataatcgtaggtggtggtgttggcat

SEQ ID NO: 3378 - DNA, 65 bp, Candida albicans
acttgtaattcttcttgaacgactggttgttgttcttcttggtattgttcttcaacgtcagacat

SEQ ID NO: 3379 - DNA, 65 bp, Candida albicans
gttttataattataataataaacctctcctgtttcagttcgtagttcttcccaatctgatgacat

SEQ ID NO: 3380 - DNA, 65 bp, Candida albicans
tgaggctcttcagtgtttatatcgacaggagtaatgtcagaatagtcatatttggagtctgtcat

SEQ ID NO: 3381 - DNA, 65 bp, Candida albicans
acataaggagtactgtaaaatcctctgctaacaaaccgaataagtgatctgactgaatcgtccat

SEQ ID NO: 3382 - DNA, 65 bp, Candida albicans
gcatccattaatgttactccaatggttgatcttctatataattcataatatgctggtgctgacat

SEQ ID NO: 3383 - DNA, 65 bp, Candida albicans
ttatcaatgatttcacctctactcttgtcgaccaagaaattgacgtaaccaaaaataccacacat

SEQ ID NO: 3384 - DNA, 65 bp, Candida albicans
ataggaacattgaatgcactaggtggtatacgtattaaatctgatatttctgataatataaacat

SEQ ID NO: 3385 - DNA, 65 bp, Candida albicans
atcttttcagaggtctcttcttctgaaggtggtatatatttatcccaatcttcctttggtggcat

SEQ ID NO: 3386 - DNA, 65 bp, Candida albicans
gccttatcaatggcatctattaattgatgacttttcaattgttgtttcaatatacctctagccat

SEQ ID NO: 3387 - DNA, 65 bp, Candida albicans
cgggaatacaagccttcatcaatttcttgtggggatggggaatctatttgcatattatcagacat

SEQ ID NO: 3388 - DNA, 65 bp, Candida albicans
gttaaacatattagaggtctcgttgtatcatctgtcaaatgtgtaattgtagtaactttaaacat

SEQ ID NO: 3389 - DNA, 65 bp, Candida albicans
tctaagaaagaaattgttatggttgtaaaaattgaaacatcaccaacaaaaaaaaaaatacgcat

SEQ ID NO: 3390 - DNA, 65 bp, Candida albicans
ttggcaatggaagcagctggattttcaccaatggataattcctctactttcttttcaacggacat

SEQ ID NO: 3391 - DNA, 65 bp, Candida albicans
gcagtcgaaggaagtttagaggacggcgatttagagcccatgtattcctcatctgagtcatccat

SEQ ID NO: 3392 - DNA, 65 bp, Candida albicans
acaaatgtgatcccatgtaatggatataccggtgatgaacaaaaatgacattgataaatcctcat

SEQ ID NO: 3393 - DNA, 65 bp, Candida albicans
ttcattcggactaaggaaacatttgtaagtctgatctgactatttggttgattaatcaccgccat

SEQ ID NO: 3394 - DNA, 65 bp, Candida albicans
atcttatcatatgtagaaacacattgctggaactctattgttctgttctgaatagacgtagacat

SEQ ID NO: 3395 - DNA, 65 bp, Candida albicans
acatgcgctctttctgagaacgattcagtttcagaggtttctataattgttggtatttctgtcat

SEQ ID NO: 3396 - DNA, 65 bp, Candida albicans
tctgtagtatatgatctacccaataacttgaaaaggtcttctttgtctacaggaatagttggcat

SEQ ID NO: 3397 - DNA, 65 bp, Candida albicans
aattgagttaaatctttagttatagtttgggtttgttttaaaccatgattatatattgaattcat

SEQ ID NO: 3398 - DNA, 65 bp, Candida albicans
ttgaatcctaaatttgaagatgtcccggtaatgactgcaactgtagaatcctttaaaagtgacat

SEQ ID NO: 3399 - DNA, 65 bp, Candida albicans
gaccattttgtttcacgtttacgactaggtggaggtccagacggttgtcttcctcgatttgacat

SEQ ID NO: 3400 - DNA, 65 bp, Candida albicans
tcaaacgccacatcaagaatctctttgcttgtgacctggtggtctcgatttgatgtctcgttcat

SEQ ID NO: 3401 - DNA, 65 bp, Candida albicans
tttgcttgggatgtaattacaccaaaacatttttcttgatcataacgattataagatttgaccat

SEQ ID NO: 3402 - DNA, 65 bp, Candida albicans
aattctattgatattatatgaccttgtgcttcatttagaagtcttactggaatacctgctgacat

SEQ ID NO: 3403 - DNA, 65 bp, Candida albicans
ggggtttctcttaatttgacgccattggcttcatggacgacattatgagtttgttctgttggcat

SEQ ID NO: 3404 - DNA, 65 bp, Candida albicans
gtgttgaaaccacgatactttataccaccgttgtatttcttcaatgcactaagtcgtttaaacat

SEQ ID NO: 3405 - DNA, 65 bp, Candida albicans
tgagatgtatcattggatggtgataccgattctggcttaatgatataatcttcttttgatgacat

SEQ ID NO: 3406 - DNA, 65 bp, Candida albicans
ttagaatccagctgagtggtttcattttttttaggttcacttgtaccgttttttaattcagacat

SEQ ID NO: 3407 - DNA, 65 bp, Candida albicans
attaatactttgaatataccatatccagtagcttcttcaaaaagaagataatctaatccaggcat

SEQ ID NO: 3408 - DNA, 65 bp, Candida albicans
tttccataataatctaatactgcatcatgaatcaaatcgtcatgtgcattcccaattgtcaccat

SEQ ID NO: 3409 - DNA, 65 bp, Candida albicans
cttgtcccaccaacataaattggttcaatgtcagtatgtgcatatgttgtttttagaacatccat

SEQ ID NO: 3410 - DNA, 65 bp, Candida albicans
agttctttatgagacaaatgacgaacaaatgttttaattgatgatttagaattaactctcaacat

SEQ ID NO: 3411 - DNA, 65 bp, Candida albicans
tctaaattaaacgagtcccaagttgtttcatcatctaaatatgaagatgatgctgatgttgacat

SEQ ID NO: 3412 - DNA, 65 bp, Candida albicans
ttacaacccccaagaccaaagaacttgaaattttcttcatccgaaaactcgttttgttcattcat

SEQ ID NO: 3413 - DNA, 65 bp, Candida albicans
cgtttcaaactagacaccactgggtctatgagcgctagaatttcaggagtaagcaatttcgacat

SEQ ID NO: 3414 - DNA, 65 bp, Candida albicans
gtggttttaccggtaccaccgtcaccaactaaaactaatttgaatgtaggaacttcttgagccat

SEQ ID NO: 3415 - DNA, 65 bp, Candida albicans
gcttgagttcgttgatttggatctgctgtacccaaagcagcttctaatatttgaagaatatccat

SEQ ID NO: 3416 - DNA, 65 bp, Candida albicans
gcaatgacttctggtaagaagggactgaaaggtttcaccaaatctaaaacacgaaatccgctcat

SEQ ID NO: 3417 - DNA, 65 bp, Candida albicans
gcggtagacagttctggagtagataccccattgtttttcttcttagacgatgatttcgatgacat

SEQ ID NO: 3418 - DNA, 65 bp, Candida albicans
tccagaatgaaggggtgataaattacatactggttattctgatcctgttgattatcttcttccat

SEQ ID NO: 3419 - DNA, 65 bp, Candida albicans
atacgcatacgtccacctgctctcgattgattcaaatatattttctcaaaatctgtgttgaccat

SEQ ID NO: 3420 - DNA, 65 bp, Candida albicans
tattctggagtatcaacataccttggtgaaaatgtggtcaatgaaaaagaatatctatcagccat

SEQ ID NO: 3421 - DNA, 65 bp, Candida albicans
tgattctgttgtttcttcttgttgttcttggatttagatttctgttgtttattattacgagccat

SEQ ID NO: 3422 - DNA, 65 bp, Candida albicans
attaaccctattggaatatatataccatgaattggttgtttgagtaattctcttttatcctccat

SEQ ID NO: 3423 - DNA, 65 bp, Candida albicans
tgaccaggaatgtatacttcaatacctttgataccaatgttttgtggtgagttagtcatgaccat

SEQ ID NO: 3424 - DNA, 65 bp, Candida albicans
ttttgaggattatttaaatgtcctaatagtttagctattctttgtaatcctaaattaattggcat

SEQ ID NO: 3425 - DNA, 65 bp, Candida albicans
ttaacggcagtatgactggtggatccattgccacttaaatcatcttcagctgatctttttgacat

SEQ ID NO: 3426 - DNA, 65 bp, Candida albicans
ccctctctgttatatttaacttgagtcaaagaacgctcatgtcccatcaactttattggtctcat

SEQ ID NO: 3427 - DNA, 65 bp, Candida albicans
gccgcatgctcaccaaaaataatcactttacctggagcaccaacaataaatggcaattgtgacat

SEQ ID NO: 3428 - DNA, 65 bp, Candida albicans
gctttcaatatctcatcttcaacatttgtccaaacaccccctttgacatatagtggtggtgccat

SEQ ID NO: 3429 - DNA, 65 bp, Candida albicans
ttttccaatttcctctgctttagtttctctcttcgtagttgattctttgaccgttttggtgccat

SEQ ID NO: 3430 - DNA, 65 bp, Candida albicans
ctgttgacattctttcctcttcttctatttttacctccttttcctttaccggatgatttacccat

SEQ ID NO: 3431 - DNA, 65 bp, Candida albicans
gtagaaagcaaattctctaaaagctgtgtgagtgcagaatgatattcgtccggtaacactgtcat

SEQ ID NO: 3432 - DNA, 65 bp, Candida albicans
acttggaataatctacctgtaggtgaatatgtgactgaatcgttatcgtaattatttctaaacat

SEQ ID NO: 3433 - DNA, 65 bp, Candida albicans
cttttcctatcggcattttttcttttacgtaaaagaacttcagggtttgagttcaatatagccat

SEQ ID NO: 3434 - DNA, 65 bp, Candida albicans
ccagtcaaggcatcccaaaatcgtatggtatggtcataccctgcagaagctaatatgactgacat

SEQ ID NO: 3435 - DNA, 65 bp, Candida albicans
tttgaggcctgaaactcatcaaaagttggtggcacaccttgcttattctttgctcttctacccat

SEQ ID NO: 3436 - DNA, 65 bp, Candida albicans
ctacctgtctttctggcttctttcaattgttgtagagtcttacgtctggctgatctggacagcat

SEQ ID NO: 3437 - DNA, 65 bp, Candida albicans
tcttgaatttgttcttgttcactattattactggcatcttccatttgtatatcttctgctgacat

SEQ ID NO: 3438 - DNA, 65 bp, Candida albicans
aattcagcgtagaagacaccgtcagctactaatttctttttcttagataagatagcgttaaccat

SEQ ID NO: 3439 - DNA, 65 bp, Candida albicans
cccttgtttttgaaattagtacgacgatattcaggaacaaatctgttagtggcgtctgaatccat

SEQ ID NO: 3440 - DNA, 65 bp, Candida albicans
tgagcttctgaatcaccagtgtcggcgaatggatcaaatgcgtttaagttttggatagttgacat

SEQ ID NO: 3441 - DNA, 65 bp, Candida albicans
gcactggttgttgttgttgatgacattctgattatcctttttggcaagaaaaacctcaagttcat

SEQ ID NO: 3442 - DNA, 65 bp, Candida albicans
attttatcaggaattccaacattgcttgaataagcatcctgttttttatacgacagagtggacat

SEQ ID NO: 3443 - DNA, 65 bp, Candida albicans
tgatggttggtcttgtttttacttacggcgatgttgacgggtgctgtgacagaagcagagtacat

SEQ ID NO: 3444 - DNA, 65 bp, Candida albicans
atatatacttacttatccacgccatctggcaatatgaaaagttcgaatctatctggagcattcat

SEQ ID NO: 3445 - DNA, 65 bp, Candida albicans
aatcttaatctgaaattcctgtgcccttcaaatgttattatctttttggaagcaacactggacat

SEQ ID NO: 3446 - DNA, 65 bp, Candida albicans
tcctcaagtttcttgggtctatatttttctacccatggtagttctaacgtaactggtttagacat

SEQ ID NO: 3447 - DNA, 65 bp, Candida albicans
gaatcaaaaacagtcttggaatctaatgacaattcttcagttttttgagctaattcttcagacat

SEQ ID NO: 3448 - DNA, 65 bp, Candida albicans
actactggggaaataatttttggatattttcgagataaccatctaaataaagctgggacacccat

SEQ ID NO: 3449 - DNA, 65 bp, Candida albicans
gctggctgtgtaatcaatggaccagcatccaaaatcaaagactcaatattttttgtttcagacat

SEQ ID NO: 3450 - DNA, 65 bp, Candida albicans
gctctctttcttggtaagaaacctaaggaaccgtgacgtggtgcttcgtactttctgtgggacat

SEQ ID NO: 3451 - DNA, 65 bp, Candida albicans
gaagttgttgtggaggaagaagaagtggtagggattgatttcttattagatgctgatttcgccat

SEQ ID NO: 3452 - DNA, 65 bp, Candida albicans
gataaagccccaaactccaaacctttaatacatttaggagctatatcaacaactacttctttcat

SEQ ID NO: 3453 - DNA, 65 bp, Candida albicans
atttcttgatctataacattttcttcttgttgctgattgttttctaaatcttctaaggtaaccat

SEQ ID NO: 3454 - DNA, 65 bp, Candida albicans
tgagtaataggttcatatatactatcatattgatatggatcagccatagattcatcagcagacat

SEQ ID NO: 3455 - DNA, 65 bp, Candida albicans
gtagcaaaccccttggaggtcaagaatgcatttctttgataattgtcaaaatttaatccaggcat

SEQ ID NO: 3456 - DNA, 65 bp, Candida albicans
tgtaaaaacttaaatataagattgataggaggaagattagtttgcttagtttgttttgatgacat

SEQ ID NO: 3457 - DNA, 65 bp, Candida albicans
tcaaatccagctttactgaataaggaaaccaattcttcagtagaaatatcagtttttggtgacat

SEQ ID NO: 3458 - DNA, 65 bp, Candida albicans
cttgaatcatttatgacatcttcaatgacactttcatataatttacttgtttcagtattggacat

SEQ ID NO: 3459 - DNA, 65 bp, Candida albicans
aataactcgttaaaggcagcatcatgagcccctgtcagtaatgtacgtcttcttttaggaggcat

SEQ ID NO: 3460 - DNA, 65 bp, Candida albicans
aaataagtttgccacttatcacctaccactttaccacatgagaaacaacgtattggaataatcat

SEQ ID NO: 3461 - DNA, 65 bp, Candida albicans
tattataatatacatacagaacccgattgagaattatttttgaaaaaatcactgatgtttaccat

SEQ ID NO: 3462 - DNA, 65 bp, Candida albicans
ttattgtatcttcctggatctgttgaatccacaataaacatatcttcaaataatattcctgacat

SEQ ID NO: 3463 - DNA, 65 bp, Candida albicans
acagaacgagacacacaacaagcatttgccgtttttgtcaatgaattatataaagctctatgcat

SEQ ID NO: 3464 - DNA, 65 bp, Candida albicans
tcttggttgttattggtatcagcatttaatgcctgtaacaatggatcattttcatcggcactcat

SEQ ID NO: 3465 - DNA, 65 bp, Candida albicans
ggagaaactactactgacttatccaaaagggccaattcatttgtgctagttgcagttgttgacat

SEQ ID NO: 3466 - DNA, 65 bp, Candida albicans
tcgtcttcttcatttgtgaagaactttatctttatttggtttttattctcccctgttgatgacat

SEQ ID NO: 3467 - DNA, 65 bp, Candida albicans
agatcataagtgtttggtattggtttatcaactgtcactggtttatattctttttctgatgacat

SEQ ID NO: 3468 - DNA, 65 bp, Candida albicans
atttttttatcagctgccttcaataaggcatatcctgctgctgtttcagttaaaacgtaagccat

SEQ ID NO: 3469 - DNA, 65 bp, Candida albicans
ttggagccatttggagttggtatagtggtattacttgacattcttcggagcaatgtctttatcat

SEQ ID NO: 3470 - DNA, 65 bp, Candida albicans
tcgtcagataacactccaaaatcaacagaagtaatttctgaacctactggtttagaaatatccat

SEQ ID NO: 3471 - DNA, 65 bp, Candida albicans
ctattaccttcattgtctaatattagaacagcagatatagtgtataaagatatatttaatgacat

SEQ ID NO: 3472 - DNA, 65 bp, Candida albicans
aaatggtttgggggagctgaatcactatcttgcaaaatggaagagcttatatgtatttcttccat

SEQ ID NO: 3473 - DNA, 65 bp, Candida albicans
ggtgatctttgagctgaagtagcaacttgaaattggccagtttgtggaggggtgggtgccgacat

SEQ ID NO: 3474 - DNA, 65 bp, Candida albicans
ggccatttggttaaaatatcttgattagaaagactagcaactaacttggcgtattctgatgacat

SEQ ID NO: 3475 - DNA, 65 bp, Candida albicans
tggactgttttcgggagtccttcgagatattcatttaccgtcgccttgaacaagtgagacgacat

SEQ ID NO: 3476 - DNA, 65 bp, Candida albicans
ctacggaaaggagtttggaaacgggagtggtaagcagaggttctgaattctttttgcataggcat

SEQ ID NO: 3477 - DNA, 65 bp, Candida albicans
ctacctatataattggctagtttttcaaatacgactttggtttcttcttctgtaagtggtctcat

SEQ ID NO: 3478 - DNA, 65 bp, Candida albicans
gataagcctgtgacatctgtggtggttgttgtcactttagtggtagtgatagtatttgttgccat

SEQ ID NO: 3479 - DNA, 65 bp, Candida albicans
actgttttcagttttggtgatgacaaagagattgggaactgaaattggcttgatttttcagtcat

SEQ ID NO: 3480 - DNA, 65 bp, Candida albicans
ctttcaagtgaatcttgagctggattggaattattttgattagtactttgtggaggtgaagacat

SEQ ID NO: 3481 - DNA, 65 bp, Candida albicans
agtctttgcttcttagctggtgctggagtcgtctctgtctccaattcattctttacttcactcat

SEQ ID NO: 3482 - DNA, 65 bp, Candida albicans
gaaaatccagctttggtagtatatgaaccattatctatcacaacggctggggcagtgtatgtcat

SEQ ID NO: 3483 - DNA, 65 bp, Candida albicans
tcaactgtgcgcagatcataatcattgatcctaggagaattaccagaatatcttcttatcgacat

SEQ ID NO: 3484 - DNA, 65 bp, Candida albicans
tcatcattccctgattctatcgtgtttgcattctcattaaatagtctatcggatatggcttccat

SEQ ID NO: 3485 - DNA, 65 bp, Candida albicans
tcagaaagaatagcttgatcaacgtgccatgctgtctttaaatgtgggagaaataccgaacccat

SEQ ID NO: 3486 - DNA, 65 bp, Candida albicans
gaatttatttctttaacaatatcattttgactggcatgactatatctttgagcaatactattcat

SEQ ID NO: 3487 - DNA, 65 bp, Candida albicans
aatggttcaaacttaaaatgtctgtttgatgtatttggatgtattactggattcagctgtagcat

SEQ ID NO: 3488 - DNA, 65 bp, Candida albicans
aataaaaattgcttctctgataattgaaaatcggggatctttgggatatctgattcaatttccat

SEQ ID NO: 3489 - DNA, 65 bp, Candida albicans
aaatcagttgaagtagtgtttgtcactctattatattctatcccaacaatgttattatctgacat

SEQ ID NO: 3490 - DNA, 65 bp, Candida albicans
tgtttagtagtcgattcaaaattagttttcgtaggagaaagatctgacgatttggcggatggcat

SEQ ID NO: 3491 - DNA, 65 bp, Candida albicans
atatattgcacatgtttggatttatcaaatagaataactttttcatctggcggtaaattggacat

SEQ ID NO: 3492 - DNA, 65 bp, Candida albicans
aaaattggtaaatttctcttttcgttatatgttggcaatataactgaatacttgttttgggtcat

SEQ ID NO: 3493 - DNA, 65 bp, Candida albicans
ggacgtgatgaagaagaagaagatattaaagatgatatcgatttggtttcgtcactttcactcat

SEQ ID NO: 3494 - DNA, 65 bp, Candida albicans
ggagcatcaaaatcttcaaaattttcagctacttcattaaaagcattatcttcgtaatcagacat

SEQ ID NO: 3495 - DNA, 65 bp, Candida albicans
ctaccacctcttctaccacctcttcttctatcaccaaattgtctttttggggcttcagctgacat

SEQ ID NO: 3496 - DNA, 65 bp, Candida albicans
aagtatgctgctactgcaaccaccaatgtcacgataacgtataaatctaatttgtctaatgccat

SEQ ID NO: 3497 - DNA, 65 bp, Candida albicans
tttgttaaatgggcgtctggttctaatgcatcaatatctatgcttctccaatcttcagataccat

SEQ ID NO: 3498 - DNA, 65 bp, Candida albicans
tcctcaggtatttcaagcatgtcaatgtcatcaaacttgctctcaaagttggtatattctggcat

SEQ ID NO: 3499 - DNA, 65 bp, Candida albicans
gagctatgagaatctagtaaattaccacaatagttacaaaatattaaagatccaactaccgacat

SEQ ID NO: 3500 - DNA, 65 bp, Candida albicans
gatttcttcaatgtttttctctttctcaaagcggcagatgatacattttcagtagaataattcat

SEQ ID NO: 3501 - DNA, 65 bp, Candida albicans
aggaaagtgttagtaagaaaagtgcccaactcttcaaaaagtgtgctagtgaaattacgtaccat

SEQ ID NO: 3502 - DNA, 65 bp, Candida albicans
aattcatatttctctgggaattctgcagcaaaaccccttggaacccaagcacttgaagaaatcat

SEQ ID NO: 3503 - DNA, 65 bp, Candida albicans
aactctatttgataatccttatcaacatcaaacgcgttaaaatatgatgagaggctaaaatccat

SEQ ID NO: 3504 - DNA, 65 bp, Candida albicans
ttaggaaataatctttccgttaaagttttctcaattaataaattattttgttcaatatgtaacat

SEQ ID NO: 3505 - DNA, 65 bp, Candida albicans
tcagaaccagattccacagatgacaaagcacccctcaatcttgatcctaaatctgctaaaaccat

SEQ ID NO: 3506 - DNA, 65 bp, Candida albicans
atcttttgcactgttgccttaggtaaggataagtcttctgagttggagcccgagtattccgacat

SEQ ID NO: 3507 - DNA, 65 bp, Candida albicans
gatagtagtgaactaaacataattatggatgtggtttgtatgactagaagattacaagatgccat

SEQ ID NO: 3508 - DNA, 65 bp, Candida albicans
acctccatacgttgttttttaggtgaccggaatggactatttggtagagcatttgagtgtgacat

SEQ ID NO: 3509 - DNA, 65 bp, Candida albicans
accatttctttaacggttttaaaacttctgaataaacgagaaacagctctatcggtatcatccat

SEQ ID NO: 3510 - DNA, 65 bp, Candida albicans
cttgatggtgacgaccgatgcagggaaaaactcgtcgccacatgtgataataaatcatgtggcat

SEQ ID NO: 3511 - DNA, 65 bp, Candida albicans
gtttctaatatatatcgaggaatatatgggtttaactcgccgttttttggttgatactttggcat

SEQ ID NO: 3512 - DNA, 65 bp, Candida albicans
aaattttgcgggtcctggactagttctgtcgatatactcgaccattgcttatttattagtgacat

SEQ ID NO: 3513 - DNA, 65 bp, Candida albicans
ggatggacagaaacactccaaaccttatcattgtgtgccttgatagagtgtagtaattgaaccat

SEQ ID NO: 3514 - DNA, 65 bp, Candida albicans
gtcagactgttataacttgctaggagtgggtaaactgttgacataccttcagctgtttgtaacat

SEQ ID NO: 3515 - DNA, 65 bp, Candida albicans
tcaagtggctgattagtatcatcttgatcagctgtaggtggtggattcaaaaatcgttcatccat

SEQ ID NO: 3516 - DNA, 65 bp, Candida albicans
tcatcttgaggaagatccaaatgtttctggactatggataggagttgggtagtaggttgtgccat

SEQ ID NO: 3517 - DNA, 65 bp, Candida albicans
tcaaacttgtatgctttttctaataattgtttgtataacagtaaaatttgttttgaattcgccat

SEQ ID NO: 3518 - DNA, 65 bp, Candida albicans
gagctggcgggaatctcttcttcatggttacgatctctctgttgtcgtataacattgttagacat

SEQ ID NO: 3519 - DNA, 65 bp, Candida albicans
ttggatatcacggtacgaacagcataagatttaaatccatctattatcaattcatcgactttcat

SEQ ID NO: 3520 - DNA, 65 bp, Candida albicans
gctcctccaattccaagatcaggatgaataaatgcaatcttcttgttttcttgtcgctttgacat

SEQ ID NO: 3521 - DNA, 65 bp, Candida albicans
ttagactctgtaccaaacaaatcgagtaatggatctctataatcagtagtcatattcataatcat

SEQ ID NO: 3522 - DNA, 65 bp, Candida albicans
ggacaatgttctggttctggtgcagctagttgtgatttttctatttgtgtttgacttggtgacat

SEQ ID NO: 3523 - DNA, 65 bp, Candida albicans
gtgaaattgtacataccagaaacattacctctgtgttttctggttttagttaatctagtaggcat

SEQ ID NO: 3524 - DNA, 65 bp, Candida albicans
gattgctgtttcaatggagtatcatttggtaaatggactgttctgttagatatattcggactcat

SEQ ID NO: 3525 - DNA, 65 bp, Candida albicans
tgtgaattcaacaactgggcagcatctgatgggattctccctggtgatgatacaaaattggacat

SEQ ID NO: 3526 - DNA, 65 bp, Candida albicans
actgcaattaatacaggataagggacattttgagcctttccggcaacagacaatttgaatgacat

SEQ ID NO: 3527 - DNA, 65 bp, Candida albicans
tgtaggggcttattcagtggggttagtattatttcagggttttgttgcttttggggtgtgaacat

SEQ ID NO: 3528 - DNA, 65 bp, Candida albicans
tgttgctgtttaagctgttgtctggttgatcgcctaatatggctgccagtattgtcttcttccat

SEQ ID NO: 3529 - DNA, 65 bp, Candida albicans
aactcaaccgttatcggctggttagtagaattggggatattcataagaaagcgtaccaacttcat

SEQ ID NO: 3530 - DNA, 65 bp, Candida albicans
tttgaaagtttcttttctgctggatcagaggagaccgcctccggtttcttttccacgtcagccat

SEQ ID NO: 3531 - DNA, 65 bp, Candida albicans
tccaagtcaggagtacgaggaagagttgtaatcatatattggtcatatagctctggttttgacat

SEQ ID NO: 3532 - DNA, 65 bp, Candida albicans
ttaccttcaaagtctaaagcccattggtttaagttacaagtggcaacagtgatatagttacccat

SEQ ID NO: 3533 - DNA, 65 bp, Candida albicans
ttccatcaaaaactataaacatacctttgattaggcaaatttgcaataccaactggttcaggcat

SEQ ID NO: 3534 - DNA, 65 bp, Candida albicans
acttgtgataatgcaggagttaccccaacagatccattaccattggcaatagctgacccattcat

SEQ ID NO: 3535 - DNA, 65 bp, Candida albicans
aatcctggctcattctttttattcttcttctcagctcttctccctctagatttagttttacccat

SEQ ID NO: 3536 - DNA, 65 bp, Candida albicans
ttttgtaaatgttgtaatacttcatagtttgataaaaatgaatctctttccgttagtactttcat

SEQ ID NO: 3537 - DNA, 65 bp, Candida albicans
tttgacatgtctaagtcggaaattttaccagttaaacctttagttggagtttcttgtacggacat

SEQ ID NO: 3538 - DNA, 65 bp, Candida albicans
tcaaacttgagggtgttataaatatcggcaaacacatccagcgaccaattaaatatgccactcat

SEQ ID NO: 3539 - DNA, 65 bp, Candida albicans
ttgttatttgcggtaaacccactaaaggcattggtgccactattattctgttgacctccaaacat

SEQ ID NO: 3540 - DNA, 65 bp, Candida albicans
gcacgagtgagtgctttaggaaattgacgactaatattcttcaatgaatttctagcagataacat

SEQ ID NO: 3541 - DNA, 65 bp, Candida albicans
atagcctctgcacttgttccttggccagtctgtctgccactactttgtcctgaaagtcttgccat

SEQ ID NO: 3542 - DNA, 65 bp, Candida albicans
ccggtgaacaagttcttttcattccattcggattgaccgtgtctaactaaaactaactttggcat

SEQ ID NO: 3543 - DNA, 65 bp, Candida albicans
ctatcacagaccaattgacccaactcgggatgggatgaaccaacaaaaattttgcatttacgcat

SEQ ID NO: 3544 - DNA, 65 bp, Candida albicans
tcgctgttattgacaaaactggcatcatcgtcactttcgggaatcgtgtttctctttcttttcat

SEQ ID NO: 3545 - DNA, 65 bp, Candida albicans
tctaataaggcagctttaaaagaatgatcattatctcctggagtcaaaagagaaaacccaaacat

SEQ ID NO: 3546 - DNA, 65 bp, Candida albicans
agggaaggtgacattgattttctggaaaatttgttattagtgttatcactatttttataacccat

SEQ ID NO: 3547 - DNA, 65 bp, Candida albicans
ttttcagctggttcttcaccaggtaacacatgtgcagaaaacacttccggacgttcaaaagacat

SEQ ID NO: 3548 - DNA, 65 bp, Candida albicans
tgttgtaataattgactcggtaatcctactgagttcaaaatttcttcattgttaaatctggccat

SEQ ID NO: 3549 - DNA, 65 bp, Candida albicans
gagttggtcagatcggcattgtcgtccactatggtaaaattccatcctttgggaagtttattcat

SEQ ID NO: 3550 - DNA, 65 bp, Candida albicans
tgacgctttctctttcttttctgattggtgactgagggtaatggtggatgtttggtagaagacat

SEQ ID NO: 3551 - DNA, 65 bp, Candida albicans
ttggttgaatgggaattcccctcattaccttgactaaattcatttgtttcttctttaatagccat

SEQ ID NO: 3552 - DNA, 65 bp, Candida albicans
tcatgtaatgaatctaatctttcttgaatgaaattttcagttttgtcgttatctaatgatgacat

SEQ ID NO: 3553 - DNA, 65 bp, Candida albicans
aaaatccaaattataaatgatgtgatatacaatctcaaaaggattaacggtagtttgaaaatcat

SEQ ID NO: 3554 - DNA, 65 bp, Candida albicans
tcaggtatggagtaattgccagccaagtttcttttctgttcaatgggtgccataatccgtttcat

SEQ ID NO: 3555 - DNA, 65 bp, Candida albicans
tttgatacaacttttgatgtatcagatttcttcttgttaccttttactttggttgtctttgccat

SEQ ID NO: 3556 - DNA, 65 bp, Candida albicans
ctcaataaatcctcctcttcagaagaagagtcagaagtgtatcctgaaacaaaaaaacgagacat

SEQ ID NO: 3557 - DNA, 65 bp, Candida albicans
tttctgaccaccttttttagctttggagtaaacagagttcctccctttttaactaaactactcat

SEQ ID NO: 3558 - DNA, 65 bp, Candida albicans
gttgttatgttttgtttcttttcaaccttttcagcaaccttcgatttaacttgtttccttgccat

SEQ ID NO: 3559 - DNA, 65 bp, Candida albicans
ttaatcgttcgactattatacaatcgagtctttttcttattcaattgtttagaattggtactcat

SEQ ID NO: 3560 - DNA, 65 bp, Candida albicans
attcgtccattggagccatcattacgagagtgataattgttattattattatgagatctatacat

SEQ ID NO: 3561 - DNA, 65 bp, Candida albicans
agattaccgtctctagtatcattctcccttacccttctttgcttttccttcttttgagttcccat

SEQ ID NO: 3562 - DNA, 65 bp, Candida albicans
ctaacacttctatatctaaactaaacatacgagaaaattgataatgcactatcgtaaccactcat

SEQ ID NO: 3563 - DNA, 65 bp, Candida albicans
cgtataatgagatttgtaattgttttagtgttgctaattcgatgatataaacttcttatgaacat

SEQ ID NO: 3564 - DNA, 65 bp, Candida albicans
ttgtttactgtgttagcaccatcgttaacactcaaattattcatttgtttactaatatcagacat

SEQ ID NO: 3565 - DNA, 65 bp, Candida albicans
aatagggttaatttataaggtgataaatcttctgataaaagtaatttgatatcatcctttgtcat

SEQ ID NO: 3566 - DNA, 65 bp, Candida albicans
gtcaatgtaacacttgatgctgtatggtttactttttcagcactcccaaaccctggtatagacat

SEQ ID NO: 3567 - DNA, 65 bp, Candida albicans
ggtgagacgccattgttagtgctattaatattgctgttattgttcaacctgctaaatcctgacat

SEQ ID NO: 3568 - DNA, 65 bp, Candida albicans
gtatagacagtacttggtctacgttcagccattgatttacgtctttcagttctagcaaaattcat

SEQ ID NO: 3569 - DNA, 65 bp, Candida albicans
tctggaggtaatatagagtcatcaatggactttaagatgtcatgggaggtagcagttacagacat

SEQ ID NO: 3570 - DNA, 65 bp, Candida albicans
tcaccaaatgaacctgatccaattttacgaccaatacggtatttcttaccaactcttaaatccat

SEQ ID NO: 3571 - DNA, 65 bp, Candida albicans
ctgttgttgttgttatacgctaatgttgattctgtacgatgtggtgagttacgtggaagcatcat

SEQ ID NO: 3572 - DNA, 65 bp, Candida albicans
gttgcggtggtatctgtctcttcgagtgagcttagatatctagctgctatattaccaatcgccat

SEQ ID NO: 3573 - DNA, 65 bp, Candida albicans
tacttggcatattcttctgcattaccagtttcagatccgtataatatagttatttcacctgtcat

SEQ ID NO: 3574 - DNA, 65 bp, Candida albicans
gttaatgtaacattcaagtttggtccaatatactcctgtactgccgtagatgttgatggcgacat

SEQ ID NO: 3575 - DNA, 65 bp, Candida albicans
tcctcctcttcttcttcttcttgttccttcactcttatttcatgatctagtttggcaacttccat

SEQ ID NO: 3576 - DNA, 65 bp, Candida albicans
gtagccatttcagctggtcctgttgcatactgaggttgtggatatgctcttcttctaccagacat

SEQ ID NO: 3577 - DNA, 65 bp, Candida albicans
gctgtgctagtactatcttcaaaatttcttctaccagctgtacgtcttttcacttgtctaaacat

SEQ ID NO: 3578 - DNA, 65 bp, Candida albicans
aagttaaatgtagagtcctgtgatacggctgcatcagccaaagagtccaaaagcgtatttatcat

SEQ ID NO: 3579 - DNA, 65 bp, Candida albicans
atagaatcatgatatgtcaattggtccaaggttcttggacgatatttatctacccagagtgacat

SEQ ID NO: 3580 - DNA, 65 bp, Candida albicans
ttacttggaaatcctgatgatccaaatccggacccatatattgatgaaccaaaacccgaaaacat

SEQ ID NO: 3581 - DNA, 65 bp, Candida albicans
tgtggacccgaggaaaattgacctctgttgttattgtaacctcctcctcttcctctataactcat

SEQ ID NO: 3582 - DNA, 65 bp, Candida albicans
ggagtagaaccatcttcctttttcactgtgacttcctttttaatcggaacatctgattgactcat

SEQ ID NO: 3583 - DNA, 65 bp, Candida albicans
ttagcaactgattgattttcaaattgttgttgagtttcgtcgtcaatttgtgttaatttaaccat

SEQ ID NO: 3584 - DNA, 65 bp, Candida albicans
gcaattgcctttggcacaaggccaagtttcttgacttttctaataacagtttctgcaagagccat

SEQ ID NO: 3585 - DNA, 65 bp, Candida albicans
tcctcttcttgtagaatcccgaccggtttctcaactaattctttattggtttcttgtattggcat

SEQ ID NO: 3586 - DNA, 65 bp, Candida albicans
accataacaacttcatccacttctggatacttgttttcataaaatctgcaatttgttgtactcat

SEQ ID NO: 3587 - DNA, 65 bp, Candida albicans
agtataactaacgccacatataataaaccaatacgtggtaaccaagaagattgtgatgatctcat

SEQ ID NO: 3588 - DNA, 65 bp, Candida albicans
tgatttgctggtttcgatgacacatctacgacgacttcaaaattgtctggcaaaccaaatttcat

SEQ ID NO: 3589 - DNA, 65 bp, Candida albicans
ccaattttatcaatcaatctatagtcagtagccaatatggggaaattggtttccaatttttgcat

SEQ ID NO: 3590 - DNA, 65 bp, Candida albicans
gccatatcctcatcatcccaaaaatctcctccagcctgggctgctttctttcctttttttgccat

SEQ ID NO: 3591 - DNA, 65 bp, Candida albicans
gcagattgtggattactaagaaatggatcttcatcgtcactgccactgtcaaatggattcttcat

SEQ ID NO: 3592 - DNA, 65 bp, Candida albicans
aaaataatagcatattgaatagccaaattatctgaatatttatccaagaattgagtgaaaggcat

SEQ ID NO: 3593 - DNA, 65 bp, Candida albicans
attgctgatgttgaagatggaggaattgacattttagataacaatttcaccaatcttttaatcat

SEQ ID NO: 3594 - DNA, 65 bp, Candida albicans
actctggcagtgattttgtcgaaacgtactggctctttacggccatctctcttataaacatacat

SEQ ID NO: 3595 - DNA, 65 bp, Candida albicans
aacagaacaaaaggattacggatagcattgtccttagaaggtctattagaatctcttttgtccat

SEQ ID NO: 3596 - DNA, 65 bp, Candida albicans
tgtggaattcccaattcgatcaactgggttaattcagtaaagtcaataggaatatcgttcgacat

SEQ ID NO: 3597 - DNA, 65 bp, Candida albicans
aactttctagcttccttaagagtaagcaatacattatcagtagtaggcgtttgatttgatgacat

SEQ ID NO: 3598 - DNA, 65 bp, Candida albicans
caagaattcttgaccgtgattttattatctgttgccattttaatccattcttcaaaattagacat

SEQ ID NO: 3599 - DNA, 65 bp, Candida albicans
ttttgcctaatatcattgacaacttgttctgggttttgttgttgtgacggctgtgacgtcgacat

SEQ ID NO: 3600 - DNA, 65 bp, Candida albicans
aaatcttcagcacgttttaaaacgttttctggacggaaattatgattcttatgaggtggagccat

SEQ ID NO: 3601 - DNA, 65 bp, Candida albicans
caatctttaatggcttcaacaactttttttaataaagcagcttcttcaaatttaccttctaacat

SEQ ID NO: 3602 - DNA, 65 bp, Candida albicans
tttggatgaaaggcaacacctttagccctagaagacttggattcaaatttagttaacatcttcat

SEQ ID NO: 3603 - DNA, 65 bp, Candida albicans
ttcccacacccaggtgtacctgttataattatgtttggtgtatatcttcttgacatggttgtcat

SEQ ID NO: 3604 - DNA, 65 bp, Candida albicans
agctctgcttctggtgtagatgtcccgactcttttctcctgtgatgaagctgctgatgaatccat

SEQ ID NO: 3605 - DNA, 65 bp, Candida albicans
attgactcagacggagtctcaatttcctgtgacttcagggctgtttcttcttcttgttcagacat

SEQ ID NO: 3606 - DNA, 65 bp, Candida albicans
atgaaattgcatcccacacagttgttcacttttgatggatcaataaattctcgatatgcatccat

SEQ ID NO: 3607 - DNA, 65 bp, Candida albicans
ttagtggatggtctaggggatggaacattggtatgtacagtatcttttttttcaaacaccggcat

SEQ ID NO: 3608 - DNA, 65 bp, Candida albicans
gcacctgtaacatgctgttttgccttaccctggtttttcgctggtggtggtggtgctgctgccat

SEQ ID NO: 3609 - DNA, 65 bp, Candida albicans
gcagtttggttggtctgaccaaaagaaaaccctgttccagatgtagctggtttatttccaaacat

SEQ ID NO: 3610 - DNA, 65 bp, Candida albicans
aactttaagttattagttaacgctaataatgtgttgcctttagctccatatacctccaaggacat

SEQ ID NO: 3611 - DNA, 65 bp, Candida albicans
acccaatttttagaaattatgggatcttcattattattatcattggctgttgaagaggtaaccat

SEQ ID NO: 3612 - DNA, 65 bp, Candida albicans
ggttgttgatctttagaagtctgagattggatttgctcttttgattgttcttgagatggtgccat

SEQ ID NO: 3613 - DNA, 65 bp, Candida albicans
gagaaggaggagtatccttgtttgaataagcctgagtttggtgcttgtggtaacttcaacgacat

SEQ ID NO: 3614 - DNA, 65 bp, Candida albicans
aaacgattgatttttctggtagatttattgaacactttctttccttttttaagattcttggccat

SEQ ID NO: 3615 - DNA, 65 bp, Candida albicans
cccatcattcgtaaagcaggattagaccagccctttttaggcttgacctcatttgcatctggcat

SEQ ID NO: 3616 - DNA, 65 bp, Candida albicans
ctatccaaagcaacagaagcagtcttctcattgattgactgtaattgtgaagctaaactagacat

SEQ ID NO: 3617 - DNA, 65 bp, Candida albicans
ctactgatatatgcaagcactagatcaccctcttctatgtaattcttgtactgaaaaaatgacat

SEQ ID NO: 3618 - DNA, 65 bp, Candida albicans
gtgtcatcaccctgacctgcagttgttttattcgatgaccttgacaaaaatcgtttcatagacat

SEQ ID NO: 3619 - DNA, 65 bp, Candida albicans
gtagcttgtgtcatgattggtaaaagagtaacacaacaaaatttttttttttttgcgatgcacat

SEQ ID NO: 3620 - DNA, 65 bp, Candida albicans
attggtttgacaaatgaagctctagcaactggtgcacgaatggaacggaaagctaatttaaacat

SEQ ID NO: 3621 - DNA, 65 bp, Candida albicans
aaatcatggattaaattgtagattttttgatccaaggatccagtaacagttctactctttgacat

SEQ ID NO: 3622 - DNA, 65 bp, Candida albicans
aagaatctcataacatcagattgcttctttctttgcaattcttctaaatatttgtaggcacccat

SEQ ID NO: 3623 - DNA, 65 bp, Candida albicans
gtgtcagaagattcaacttccaaggtaatggttttaccagttaaggttttgacgaaaatttgcat

SEQ ID NO: 3624 - DNA, 65 bp, Candida albicans
gaattacagaatgtagatttacctacacctgcaggtcccaatactaatactccggttcttgacat

SEQ ID NO: 3625 - DNA, 65 bp, Candida albicans
tgtaatttgctcaataattcggaaagcacttcagtagaatatttggattcactagcagcagacat

SEQ ID NO: 3626 - DNA, 65 bp, Candida albicans
aatcgcttggggaaactagttgcaagagcttgtatgtctgctgtcaattcttgagaagttgccat

SEQ ID NO: 3627 - DNA, 65 bp, Candida albicans
tcaccaccatttctggcatcgaataaagaatccgcgtcatgtttccttttatacggtacagtcat

SEQ ID NO: 3628 - DNA, 65 bp, Candida albicans
ggtactggagcgggactcgatcttttcgatgagtgatggtttttcgaactgttattactcagcat

SEQ ID NO: 3629 - DNA, 65 bp, Candida albicans
ttagaagttggaacaaaatcatcttctgacccatcagtaaaataatcagattctgattcagacat

SEQ ID NO: 3630 - DNA, 65 bp, Candida albicans
cagatgtttcttatacacgatgcatccagttgtagtttatttactgtctctggtgaaatcttcat

SEQ ID NO: 3631 - DNA, 65 bp, Candida albicans
ccagaatcggctggtcgactgccgttattctcttctgctaaaggatcatatctctgactaaacat

SEQ ID NO: 3632 - DNA, 65 bp, Candida albicans
ggagtgattttttgttctgactcctcagtaactttgagctgtgatactttttcttcaactgacat

SEQ ID NO: 3633 - DNA, 65 bp, Candida albicans
cgagcttgggaaaagggtgtcaaagctttccccttaccacagacaataactgctgtgaactccat

SEQ ID NO: 3634 - DNA, 65 bp, Candida albicans
aatgtaccttgaaatgaaccaattggagttctagcagtagaaacaatataaacaggtgggaccat

SEQ ID NO: 3635 - DNA, 65 bp, Candida albicans
gtctgagttgtcggtgactgttgtgttggttgtgtctgactctgcgtccgttgtgttacttccat

SEQ ID NO: 3636 - DNA, 65 bp, Candida albicans
tctgaagttgagctttctggagacacattcaatttcttgaatgcatcggcgatagaagtactcat

SEQ ID NO: 3637 - DNA, 65 bp, Candida albicans
tttttagctcctggtttcttagtgccacctctatgggctttattagattgttgttgttgttccat

SEQ ID NO: 3638 - DNA, 65 bp, Candida albicans
atatcctttggtggattttgaaatctcttttctctttccaaagttctaaatttcgccaatgtcat

SEQ ID NO: 3639 - DNA, 65 bp, Candida albicans
gcagtcttcacttttttattcttaggttcaacaccaccttttactgattttcttttaggagccat

SEQ ID NO: 3640 - DNA, 65 bp, Candida albicans
attggcgatacagacgattccaatatttgtgcagcattagaagagttggatttctttttacccat

SEQ ID NO: 3641 - DNA, 65 bp, Candida albicans
aaaccaaactgcacttccttgacggaacggagcggcgcactcgagtatggaaattgacgactcat

SEQ ID NO: 3642 - DNA, 65 bp, Candida albicans
gaataatcatcttcatctttcaatgcaagtgatcctgcaatatcaaaggcttcgtcgtctgacat

SEQ ID NO: 3643 - DNA, 65 bp, Candida albicans
tcatttagaggttgttgcggaggtcgccttgaaagagatgtgtataattcttgtgatgatgacat

SEQ ID NO: 3644 - DNA, 65 bp, Candida albicans
aacactatatctaacatatcgttagatgtaggtaccggtggtatatccttccatgaaagttgcat

SEQ ID NO: 3645 - DNA, 65 bp, Candida albicans
tcgaatctggttgtttgttctgggttttcaacagtatcagccaagttgttcaatgcattacgcat

SEQ ID NO: 3646 - DNA, 65 bp, Candida albicans
ggaattgcttcctccaccagctgtacttgattcagcagccccaaaatattatttatatactccat

SEQ ID NO: 3647 - DNA, 65 bp, Candida albicans
attgaatggtatcttctttgactataaaatattgtagaggaaaataacttcttcaatattttcat

SEQ ID NO: 3648 - DNA, 65 bp, Candida albicans
gaaaattgaggatgtaaagattgttccaaaattttaggaattgtttctaaattattttgagacat

SEQ ID NO: 3649 - DNA, 65 bp, Candida albicans
gtagattttcccaacatacttttaagaaactctataagaggcacatgaaccagtgaactatgcat

SEQ ID NO: 3650 - DNA, 65 bp, Candida albicans; identical to SEQ ID NO: 3176

SEQ ID NO: 3651 - DNA, 65 bp, Candida albicans
gtatgagcagcagttctgctttctctggatgattggttttcttttacttctgttatttgcaccat

SEQ ID NO: 3652 - DNA, 65 bp, Candida albicans
gcattcaaacgttctttgggtaattcagaacccaatttaaaataatgatctctcaggactgccat

SEQ ID NO: 3653 - DNA, 65 bp, Candida albicans
agtggaggcattttataacggtagaaaggatccgtgttatcacgacaaatgttaataaatgacat

SEQ ID NO: 3654 - DNA, 65 bp, Candida albicans
ccaatgatcacaacatcctgaaacttggccgacgttgctaaagttctgacaaatctcgaaatcat

SEQ ID NO: 3655 - DNA, 65 bp, Candida albicans
cctcttgccagacctgcaacatatccttcaggtgcttcttgatctaaaaatgatttcctttccat

SEQ ID NO: 3656 - DNA, 65 bp, Candida albicans
aagaatggatctatatgaccagtatcatttaactctaggtctatgttaaactgtttttccaccat

SEQ ID NO: 3657 - DNA, 65 bp, Candida albicans
attaatccataatcaacattaactgatgaagaagaatagattttcctctttttcacttcactcat

SEQ ID NO: 3658 - DNA, 65 bp, Candida albicans
ttaaagttgttggtggtctttgacgaagaggatgaaacctcatcacaattattcaataaattcat

SEQ ID NO: 3659 - DNA, 65 bp, Candida albicans
gccaattcaacaaacgaagtgagttgttgttgaaaaggtaagttatcgacctctgttgaattcat

SEQ ID NO: 3660 - DNA, 65 bp, Candida albicans
agcgccccagaaataccattgaactccttatgggttgtgactggattcaattttgacgatttcat

SEQ ID NO: 3661 - DNA, 65 bp, Candida albicans
tgaattggtcgacgagcagaagtttgtgctatagcaccagtcacttctgttagaaaactaagcat

SEQ ID NO: 3662 - DNA, 65 bp, Candida albicans
ttttgcattaatttgtctcgcacgtggagtatttattagtccaccaaccattcttggcgttccat

SEQ ID NO: 3663 - DNA, 65 bp, Candida albicans
tgttttcctgaaattgaataagtggtttctggagtaactcctaattcaacttctactgatgccat

SEQ ID NO: 3664 - DNA, 65 bp, Candida albicans
gaatcactggactccctataggacacagggttagcagcttgtcttcttgtcagtcttctagccat

SEQ ID NO: 3665 - DNA, 65 bp, Candida albicans
tccctggttaccggcagtgatagttcctggctttcgacgatattatcattgcttaattctgacat

SEQ ID NO: 3666 - DNA, 65 bp, Candida albicans
ggggtatcttgtttggtagtggattcagatgtctttttggttggacttgttttaatcgaactcat

SEQ ID NO: 3667 - DNA, 65 bp, Candida albicans
atatttccaatatatactcgaaagtcttttgtcggtgactccttattgttttctattgttgccat

SEQ ID NO: 3668 - DNA, 65 bp, Candida albicans
cgtttatcttgaagaaatagatcaatttcatcatcatcaactggaacactagcgccacaacccat

SEQ ID NO: 3669 - DNA, 65 bp, Candida albicans
gagtttattgtttgagaaagactataaggattgacatattctatactgttatcaccagcagtcat

SEQ ID NO: 3670 - DNA, 65 bp, Candida albicans
atgccattatccttgatgtcgagtttgaaccccaagtcttctgatatttcttcttcaattgacat

SEQ ID NO: 3671 - DNA, 65 bp, Candida albicans
gcgagcaaataaaaaattgctttttctatacaccttttatctaaactgagaaaagtacttttcat

SEQ ID NO: 3672 - DNA, 65 bp, Candida albicans
gctttgacaaaatttaataaaacagcaaccgcaatggtgtagtagatataccttgcaaatgacat

SEQ ID NO: 3673 - DNA, 65 bp, Candida albicans
ttgttacgagaactcgatatatggaaatgaggattatttgaagttaaatctctttgagacgccat

SEQ ID NO: 3674 - DNA, 65 bp, Candida albicans
tctgcaacaacacatcttattatggaaacaacaagggaaattaatatgatttgaaattgtctcat

SEQ ID NO: 3675 - DNA, 65 bp, Candida albicans
tcatcagatctaggaataggttgattagtagttgaattttgataataactttcactatcggacat

SEQ ID NO: 3676 - DNA, 65 bp, Candida albicans
aatacagttgttatgagtttatatgtgacatatacggccaataccaccaatagtattaaatacat

SEQ ID NO: 3677 - DNA, 65 bp, Candida albicans
ctaatggtgcccaaatagttgtcaattgtggagactctatcattgagagaatacttattgatcat

SEQ ID NO: 3678 - DNA, 65 bp, Candida albicans
caattactgagttagtatatagattcgttgccaattcaatgtcagggactatgtgtacataccat

SEQ ID NO: 3679 - DNA, 65 bp, Candida albicans
tttgggagtttcaactttttaagtgctggaggtggcagtgatgttattggtatagagtgggacat

SEQ ID NO: 3680 - DNA, 65 bp, Candida albicans
ttcttatcatctttctttttgttgagattatcgccacctggtattcctgaaggaccttgacccat

SEQ ID NO: 3681 - DNA, 65 bp, Candida albicans
ccaatcaacactattttatataaatattcgtaatcgtaggagtaatcgtcgctgttatcggccat

SEQ ID NO: 3682 - DNA, 65 bp, Candida albicans
ttttccaattcttggattctttcttgtaatttggtaacggtgttttttaaatcttcaattgacat

SEQ ID NO: 3683 - DNA, 65 bp, Candida albicans
tcaatatcattatgaagttgtacacttttcttagtaagtatttgttcgttttcaaaatcatccat

SEQ ID NO: 3684 - DNA, 65 bp, Candida albicans
tgaggtgatattcttctttctgatgaagttaaattagaagttataaatatatttaaatcactcat

SEQ ID NO: 3685 - DNA, 65 bp, Candida albicans
tgctgtacttttgatctagtaagtctaaactcattttcattattagttttagtgacttgtggcat

SEQ ID NO: 3686 - DNA, 65 bp, Candida albicans
gagccactaataaactgctcaatagagtctttctttctgcctttgaggagtaattcttgctccat

SEQ ID NO: 3687 - DNA, 65 bp, Candida albicans
gatgcatatctaacaaactgggccaattttccattggctggaatagatttgaatgatcttaacat

SEQ ID NO: 3688 - DNA, 65 bp, Candida albicans
tattgttgtaaagttggtgataataaatatcccaatataaatattagtaattttattggcaacat

SEQ ID NO: 3689 - DNA, 65 bp, Candida albicans
aattgatatgccaacaattcagttaacaaagtgtgggataattcttgttcaatttctggtttcat

SEQ ID NO: 3690 - DNA, 65 bp, Candida albicans
aataatgaaaatcgagttaattgccattgattacgttgtgatgaattccaataatcagctgacat

SEQ ID NO: 3691 - DNA, 65 bp, Candida albicans
atagaattgtgtcgattaaaattataattataattagaactgttgttattgctattatatgccat

SEQ ID NO: 3692 - DNA, 65 bp, Candida albicans
tgagatttggcaagtctttcggcctcctcttgttttttcttctgcaactggcgtatctttaacat

SEQ ID NO: 3693 - DNA, 65 bp, Candida albicans
agggctttaacaaattcaagcaataatataaataccgatgatgttaagataaatgataactgcat

SEQ ID NO: 3694 - DNA, 65 bp, Candida albicans
tcaagccaaattgcatgcgaaaatgatgaaaataaagatattattaaatatattgagaacttcat

SEQ ID NO: 3695 - DNA, 65 bp, Candida albicans
tcagttccatctgcatttgtattaggtggaccagatgttagtttgaatacaatttttagtatcat

SEQ ID NO: 3696 - DNA, 65 bp, Candida albicans
ttaatcttgagatcctctaattctggaactgattgttccaaataatatctaatcttttcagccat

SEQ ID NO: 3697 - DNA, 65 bp, Candida albicans
atagctgatgttacagctgtgcccataacaccgcatcctaatactgtaatcgtgtagtctttcat

SEQ ID NO: 3698 - DNA, 65 bp, Candida albicans
ccaccttgtaagacagatgatatagaattacctgtagaaggtaaaaattcagcttgatggaccat

SEQ ID NO: 3699 - DNA, 65 bp, Candida albicans
cttaattcttcacgaatttcttgttcggttggttctttcttttgaaacattttcttgatacccat

SEQ ID NO: 3700 - DNA, 65 bp, Candida albicans
gttggatactccctcatctttgtataaagatgacgtgctttatctgatactaacatctcactcat

SEQ ID NO: 3701 - DNA, 65 bp, Candida albicans
aatgtcaaagataatgtttctaaagctttcaaaggggaaacccagccactcttgtatattgacat

SEQ ID NO: 3702 - DNA, 65 bp, Candida albicans
tctgagtcagaagaagtattgagatgtatatcttctactccttgcaaaatttcttctgaagacat

SEQ ID NO: 3703 - DNA, 65 bp, Candida albicans
tttctaactattggagtatcctttttcttcaccacaggagattttttaatactattcctagccat

SEQ ID NO: 3704 - DNA, 65 bp, Candida albicans
gataaaatatcaacggttggtttagcaacaaaaccagatcctaacaaaagaactttcttaaccat

SEQ ID NO: 3705 - DNA, 65 bp, Candida albicans
agttcttgtaagttgatgtcgtttaatgacctgatgcttgtgtctgctggttccatggatgtcat

SEQ ID NO: 3706 - DNA, 65 bp, Candida albicans
tcaaatgctagaatcgatgttatgaataaatagaaaatatatatccaagatatcagattcaacat

SEQ ID NO: 3707 - DNA, 65 bp, Candida albicans
gattgagtgtatccatggagaaatagtatcttccccttgtatgtgacgttcttctttggtggcat

SEQ ID NO: 3708 - DNA, 65 bp, Candida albicans
ccatttgcagctacctttttacgtttcttattgatttcgttagatagcaagtttgaaaagtccat

SEQ ID NO: 3709 - DNA, 65 bp, Candida albicans
gatttagcatgactctgagcatggagtttgatttttggtttatttatagcgtttctacctgccat

SEQ ID NO: 3710 - DNA, 65 bp, Candida albicans
tcacgtaatttatctcggaaattaatattcattgatttgaattgattgatttgtttatcggacat

SEQ ID NO: 3711 - DNA, 65 bp, Candida albicans
gatctaactttgctggctaatatataagtttgagcaaaagacatttgaggttgcagcagcgacat

SEQ ID NO: 3712 - DNA, 65 bp, Candida albicans
aaagcagtaatattacgtgggaacgaattagtgaaattttccagaatactaaccatattatccat

SEQ ID NO: 3713 - DNA, 65 bp, Candida albicans
ggattgatagtggtcttcgtcaaataagaaagaagacgtatttgttttggaaatagtctgatcat

SEQ ID NO: 3714 - DNA, 65 bp, Candida albicans
gttgtcacaggaatagattgattgattaattcattatcattctcaggatcattatggattggcat

SEQ ID NO: 3715 - DNA, 65 bp, Candida albicans
ttggtatataaatgatcgtccttagtgacagaattggacgatttgaattcaattggtgtggacat

SEQ ID NO: 3716 - DNA, 65 bp, Candida albicans
cccggcacaagcttgacatatggattagtttgtaactgttcttctgtcacgtctttgtatgtcat

SEQ ID NO: 3717 - DNA, 65 bp, Candida albicans
gatattttcacatcaatataaataaattcatcatcttgtgatattgtgaaaaatggggtaatcat

SEQ ID NO: 3718 - DNA, 65 bp, Candida albicans
ttgtagaatatttgtttggaattgcatgtctgaccaataatagtgtttctaattagaaagttcat

SEQ ID NO: 3719 - DNA, 65 bp, Candida albicans
ccattcccctgtttgtttctggatttcaaattagttgctgctgcaaactgaactccttcttgcat

SEQ ID NO: 3720 - DNA, 65 bp, Candida albicans
ccctgaggtttatcagatacgtttggcgcctgttgatcttgctgcggcggattctcttcactcat

SEQ ID NO: 3721 - DNA, 65 bp, Candida albicans
ttcatcctttcaatgtttttattaacattgtcatgatatactttaaaggggtctttattaaacat

SEQ ID NO: 3722 - DNA, 65 bp, Candida albicans
ctacgagattgccatttatgtaataagcgtttccaaaatggatatttcttcttaattatatccat

SEQ ID NO: 3723 - DNA, 65 bp, Candida albicans
agtcttgcaaaatgttctcctattaacattaaatgtaaaccgttccgagatcctttaaatctcat

SEQ ID NO: 3724 - DNA, 65 bp, Candida albicans
tgaacaattaaggctacaaaccatatggaccacaaaccagaaacaacaacaacaacaacaaccat

SEQ ID NO: 3725 - DNA, 65 bp, Candida albicans
aatttgatcgtttcctctttatcttccaatttggaaattgtactttctgtgtatgtagattccat

SEQ ID NO: 3726 - DNA, 65 bp, Candida albicans
atagaagttgttgcaaatgcacgtgtacaaagcggcaatgatcttatggatactctggataacat

SEQ ID NO: 3727 - DNA, 65 bp, Candida albicans
aaaaagctattggtagatattgctcggcgggatttgttgtacttgcgtctctttggttctgtcat

SEQ ID NO: 3728 - DNA, 65 bp, Candida albicans
cctaaatcatcagcaacaatgattaaaaaattgggttgtttagatgaggaagaggttactgtcat

SEQ ID NO: 3729 - DNA, 65 bp, Candida albicans
agcgatgtgttggatttgggtgaagataatggtgacgggttatagcttttccgtttatatgacat

SEQ ID NO: 3730 - DNA, 65 bp, Candida albicans
tttacagtcaagggggaggcaaatattaatgatattaaagcaaggaaaacagcaatacctctcat

SEQ ID NO: 3731 - DNA, 65 bp, Candida albicans
atagcagtatcagaccatttcaattcgataaagtctttgattggagtagctaatgcaacagacat

SEQ ID NO: 3732 - DNA, 65 bp, Candida albicans
agtggcaccagttgaaacgttaatagtttttgacacccgttgactataaatgtggacttactcat

SEQ ID NO: 3733 - DNA, 65 bp, Candida albicans
tttaccaatggttgaggttggggttgttgtctatttttcaataatggatcagtttctctagtcat

SEQ ID NO: 3734 - DNA, 65 bp, Candida albicans
tctcttttagtgaaattggaggaataatgtgtgttggctttttcaaattcttgagcaattgacat

SEQ ID NO: 3735 - DNA, 65 bp, Candida albicans
attaatggtgattctgcatgattggatatttgacgaaattgccaattaattagctccacagccat

SEQ ID NO: 3736 - DNA, 65 bp, Candida albicans
atgttgtgggttgatgatggtattgaacattgtctggtgctttcttcaaagacgtagaaattcat

SEQ ID NO: 3737 - DNA, 65 bp, Candida albicans
tttttgacctttaaaaatttgacattacctttaccgtaggttgaggagtataattcggattgcat

SEQ ID NO: 3738 - DNA, 65 bp, Candida albicans
tttgatgaggtttttgtgttgggattttctgttgttgcaagtgtagaagttggagctggagtcat

SEQ ID NO: 3739 - DNA, 65 bp, Candida albicans
ctagcaccaacaccttcagcttgttgtctagcagtaacgattttagctattgatcttgcggacat

SEQ ID NO: 3740 - DNA, 65 bp, Candida albicans
aatgaattccaaattaatggagctctattttgcttgtcattggtggaattggtagaagcagtcat

SEQ ID NO: 3741 - DNA, 65 bp, Candida albicans
tcttcggttctaacatcataaggggcatagaagacaattgccttcattgaagctggaattggcat

SEQ ID NO: 3742 - DNA, 65 bp, Candida albicans
gtaatgtgtactaaagaagcatagattgttggtaataaaccaagtaagaaaaccaaacctttcat

SEQ ID NO: 3743 - DNA, 65 bp, Candida albicans
atcttaccgtcactgaccttgacgtcagcaaacgatttgctcatttcatcaaaaaacgtagacat

SEQ ID NO: 3744 - DNA, 65 bp, Candida albicans
ggtgatcctgactcgccttcagaatatggtggtgctgattgtggcaattcagtatatgatgacat

SEQ ID NO: 3745 - DNA, 65 bp, Candida albicans
aatccaattttttcttctaatgtcaattgagataatatattatcaatatcaaatgaatcagtcat

SEQ ID NO: 3746 - DNA, 65 bp, Candida albicans
aatggcttggttggaacgatgatatttgggtctgattctggtttgataaaggaggtgaaagtcat

SEQ ID NO: 3747 - DNA, 65 bp, Candida albicans
gattttaatcttcttgctattatggacaaagtcagctgtttgaatttgatacttggacgaaacat

SEQ ID NO: 3748 - DNA, 65 bp, Candida albicans
ttgatttgagacgacaaagattgatataacctatgtctagatattctactggcagatcttaacat

SEQ ID NO: 3749 - DNA, 65 bp, Candida albicans
gcaattattttctttgcattaatatttaaaaactttctaaaattagaaccaaccgaaatagtcat

SEQ ID NO: 3750 - DNA, 65 bp, Candida albicans
tgttgatatgtttctggagtcaactctacaatggatggtgctttatctgtggacggagaaaccat

SEQ ID NO: 3751 - DNA, 65 bp, Candida albicans
ttgaaggaagcatatttgaatatttgatctttgagagcctgtgttaattcccaagctgtacccat

SEQ ID NO: 3752 - DNA, 65 bp, Candida albicans
gcttgggactttttataagtatcaggatcaaaagaatcagtggaatgatttgattgagcttgcat

SEQ ID NO: 3753 - DNA, 65 bp, Candida albicans
ggatgagaaatcgatgtaggagtagtgcatctctcagcactgaaagtatattggttcaaaagcat

SEQ ID NO: 3754 - DNA, 65 bp, Candida albicans
tcttcatcatgagccacagatgatgcaggtgaaatttttgtttgttttttttcaatatctgacat

SEQ ID NO: 3755 - DNA, 65 bp, Candida albicans
gtggtagtggatgaaattcttttgtttaattgttgaaacaatgttcttttggataatgaatacat

SEQ ID NO: 3756 - DNA, 65 bp, Candida albicans
tagaccgatcttctggagaagactcctattgatctacttattggtcttgctgataatttcaacat

SEQ ID NO: 3757 - DNA, 65 bp, Candida albicans
cttttgctcgatgccgatatgtaacgttttgatgatcttaatatatgtgattttatagaattcat

SEQ ID NO: 3758 - DNA, 65 bp, Candida albicans
gaagatgtacctggagtggttattgttgggatacttggaggcgcagacatatgtgagataaacat

SEQ ID NO: 3759 - DNA, 65 bp, Candida albicans
tcagttaaattttgtccacgcaataggtgagtcgtagtagaaaatgacctaaatcgtaacatcat

SEQ ID NO: 3760 - DNA, 65 bp, Candida albicans
ttaactaaggcattacgtccttcctttttgcatctggcgaatgtttctttaagtaaagcagacat

SEQ ID NO: 3761 - DNA, 65 bp, Candida albicans
ctggtaacctcatctacaagggatgaggtcccaagtttaatgactatggtgaattgctttgtcat

SEQ ID NO: 3762 - DNA, 65 bp, Candida albicans
cgtgttggcgcatcgtgaattttcaaattattaatattcaagtctatatctttatcttcaaccat

SEQ ID NO: 3763 - DNA, 65 bp, Candida albicans
tcaatgggtacagtttgtatttctgatgaatattctgatgctactgttgtttgtactgaagacat

SEQ ID NO: 3764 - DNA, 65 bp, Candida albicans
agttgaacttgaacttgaacttgatgtgttcgtttttttttttctacctgttctttttttgccat

SEQ ID NO: 3765 - DNA, 65 bp, Candida albicans
tgtagtgcttgggcacgtcttattgattctgctttaggattaagtaattggattgacgatgacat

SEQ ID NO: 3766 - DNA, 65 bp, Candida albicans
aacggtttggatgatgactgtgatgatatgaacgccaatagtttttgatccaacgagttatccat

SEQ ID NO: 3767 - DNA, 65 bp, Candida albicans
tcttgagttccattggaatcttcttcacgaagatgatgttttggattatgtgatgggtttgacat

SEQ ID NO: 3768 - DNA, 65 bp, Candida albicans
ttgtatgctttgtcttcatcttcttctatattgtttgatttatgtgtgacttctggcattatcat

SEQ ID NO: 3769 - DNA, 65 bp, Candida albicans
gtgtctaataattgagcactacatatggagaatataactcctaatgtaatgaaaaatttccacat

SEQ ID NO: 3770 - DNA, 65 bp, Candida albicans
gtattttgtttcttattaggtgaatcagatggggagatgacacgtttgcgggttagtactgacat

SEQ ID NO: 3771 - DNA, 65 bp, Candida albicans
ttgctggtattattaaatattgattcaccaaatggattatttttaagagctgcaaatgcactcat

SEQ ID NO: 3772 - DNA, 65 bp, Candida albicans
gaattcaaaaaatcgtcattgctgttgctatctgcaaatgcattttcattcaaccaatcagacat

SEQ ID NO: 3773 - DNA, 65 bp, Candida albicans
actcataaataaagtattgattcggtaaagataaatcattacatacaccagtcaaaaatccacat

SEQ ID NO: 3774 - DNA, 65 bp, Candida albicans
aatttgacatagttgtttaaagtggacacagtaggtcttttcaataatccaatacgagaaatcat

SEQ ID NO: 3775 - DNA, 65 bp, Candida albicans
tcaacggttgggttacctctggagtcgtagacgtatctggcgtggattttagtggcgtaagacat

SEQ ID NO: 3776 - DNA, 65 bp, Candida albicans
cgcggcgcttcagcttgcgatctaccttgtggggagcctagtaatgatccaaaacctaaaaccat

SEQ ID NO: 3777 - DNA, 65 bp, Candida albicans
tcaatcggatctgaaatttccctctgtatgtcatcaaatttttcaatttctgtttcagtggccat

SEQ ID NO: 3778 - DNA, 65 bp, Candida albicans
tgttccaatttgattctcttactcgagccagatgtatcagaaattgctctctttgtcactttcat

SEQ ID NO: 3779 - DNA, 65 bp, Candida albicans
gcaacatcaaatgggtcatcatcacttgatgtagatgacattcttctatgattcttcgtaaacat

SEQ ID NO: 3780 - DNA, 65 bp, Candida albicans
ttaacttgagatgaaaccattgttgatgtattgaatagtcttttggttaataatgtacgaaacat

SEQ ID NO: 3781 - DNA, 65 bp, Candida albicans
gatttccttttggtattcttatcggagatagcattcaactggtccagtgtatttgttctccccat

SEQ ID NO: 3782 - DNA, 65 bp, Candida albicans
gaggataactcgggtgtctcatgtatatggggccgattgtttgttggtggcacaagttcaggcat

SEQ ID NO: 3783 - DNA, 65 bp, Candida albicans
tatgcagctgactcatcttgactatcttttacactcaaattatgtaagaattcactatatgtcat

SEQ ID NO: 3784 - DNA, 65 bp, Candida albicans
ccattattaggattgttcctcagttggtaagaatcgttgttagaccaagaactattactcgacat

SEQ ID NO: 3785 - DNA, 65 bp, Candida albicans
ataactaagttgttttcctttaaaagggtttggaattcgttaacttcagtgacaacgtgaaccat

SEQ ID NO: 3786 - DNA, 65 bp, Candida albicans
attggagtcaagaaacttgctttacttattgcaagcttttgtgttaatgaaggtagactgaacat

SEQ ID NO: 3787 - DNA, 65 bp, Candida albicans
attgattctttggaaagagttttgttcaaaaactcagtcactgcctgatcagatatcaccttcat

SEQ ID NO: 3788 - DNA, 65 bp, Candida albicans
tctaaagtttcacgtaatataatgaaaaatatttgaatggaaaaataatcttcaaatttaatcat

SEQ ID NO: 3789 - DNA, 65 bp, Candida albicans
tttttgatattcaaattgaaaaagttggtagaattgttgttatggatatcgatatcactattcat

SEQ ID NO: 3790 - DNA, 65 bp, Candida albicans
ttggctgcaattttgactgagtttggtatagagctgtaagcacgaattgatgcacgagataacat

SEQ ID NO: 3791 - DNA, 65 bp, Candida albicans
tgacccttgaagttattcaaaggtatgttatagttaggaaatgtttttcttggaacgaatgtcat

SEQ ID NO: 3792 - DNA, 65 bp, Candida albicans
gatattattttcaatggaatgttaggtacatgttcttgtactttagcaattaggtgatctgtcat

SEQ ID NO: 3793 - DNA, 65 bp, Candida albicans
ttaattggagcagcttcagttatactggcaatgacaagggaagctaaaatataatccaacttcat

SEQ ID NO: 3794 - DNA, 65 bp, Candida albicans
aatacaagataaagggtcgcaagtattgctctaattgatcgagttatagttttaattatgggcat

SEQ ID NO: 3795 - DNA, 65 bp, Candida albicans
gaggagccagaagcagcattggtggctaataattcctgtgtatcatctgtgtctacttccagcat

SEQ ID NO: 3796 - DNA, 65 bp, Candida albicans
tgatacactctaactgaacctgttcctatatctacccctattgctactattgtggaggtgtccat

SEQ ID NO: 3797 - DNA, 65 bp, Candida albicans
tttggaagttctattaatttcgagtttgtcattcttttaagtgtcctgatactggttttaagcat

SEQ ID NO: 3798 - DNA, 65 bp, Candida albicans
aatctacatgccacgttgtttcgtctaatcaaatacgaagcagtctgtactaatctcctctgcat

SEQ ID NO: 3799 - DNA, 65 bp, Candida albicans
gtggcatgatttgaaatgtatcttttcgttaattgtaaactttgtcttcttgttgctatcatcat

SEQ ID NO: 3800 - DNA, 65 bp, Candida albicans
tccttaacaggaactgattcctgttgttgttgctgtgtttcttcaatcttttcttcactagacat

SEQ ID NO: 3801 - DNA, 65 bp, Candida albicans
tcattgttggtactggctaatactagtagtgaccacaacagtaatattatgtaatgcactatcat

SEQ ID NO: 3802 - DNA, 65 bp, Candida albicans
tatacaggtttgttaccaaatgaagatccacagaaaacacaaactttaatggatttttgagtcat

SEQ ID NO: 3803 - DNA, 65 bp, Candida albicans
ctccatgaacgtcttaaagtagtatacccagatagatttgagaaggtggctaatagaactttcat

SEQ ID NO: 3804 - DNA, 65 bp, Candida albicans
ggtgaagtgggtggggtttgcaattgagaattgttaaagttagtgataatagtagctggattcat

SEQ ID NO: 3805 - DNA, 65 bp, Candida albicans
aatagtatcaaattattgacccctaaagatctaagaataccggattcttcaatagtaacattcat

SEQ ID NO: 3806 - DNA, 65 bp, Candida albicans
gacgccatactcactactcttcgtgatctcggcagatccacagaaggtgaattcctcgatttcat

SEQ ID NO: 3807 - DNA, 65 bp, Candida albicans
tgaatatgttgtagctttcgatagtttggtcgtattgtatgatattgacgtgttagtatcttcat

SEQ ID NO: 3808 - DNA, 65 bp, Candida albicans
ttgttgatgctgatggtactattatttgatttatgatcaacaaatggagatgaacctgttgacat

SEQ ID NO: 3809 - DNA, 65 bp, Candida albicans
attttaggaatcgtgggagcaggtgaattattaaccaccgtggcttccagagtttgttctgtcat

SEQ ID NO: 3810 - DNA, 65 bp, Candida albicans
agttgttcagatagctttccataatcaaccagggaagaagaaggtgacttgattggcggtgtcat

SEQ ID NO: 3811 - DNA, 65 bp, Candida albicans
atggcaattccatttatcgttatcgaacatggttcaaactcggtatttacacttgttgatgtcat

SEQ ID NO: 3812 - DNA, 65 bp, Candida albicans
tgtttataagataataataggaaagatacaccaagaaataataatacgaagccggcttcaatcat

SEQ ID NO: 3813 - DNA, 65 bp, Candida albicans
gcgcctctacctcttgaaccacctcttcctcttgatgaatttcccagatttccacgtccagtcat

SEQ ID NO: 3814 - DNA, 65 bp, Candida albicans
aaagatgcaaatgctgaagattttgagtttttgcttgaaccatttaaaggtgcatggaagcccat

SEQ ID NO: 3815 - DNA, 65 bp, Candida albicans
gaatctaatgtctcagtttcaaatttactatcattgtgtgatattgctgttagtacgtaggtcat

SEQ ID NO: 3816 - DNA, 65 bp, Candida albicans
aaaaaaaaatagaagtgggggcggggggcgggggcgggacagaaccgatttttttttactaccat

SEQ ID NO: 3817 - DNA, 65 bp, Candida albicans
tctggtgtcaaagtctcggcctttattggagatatcccatcaactttgaatgttttcaataccat

SEQ ID NO: 3818 - DNA, 65 bp, Candida albicans
gtgtctagtagttcattacgcaaagtagtcgatattgaaaaactccgatatagccttggaatcat

SEQ ID NO: 3819 - DNA, 65 bp, Candida albicans
atagcatatttgttcaagtacacttgagttaagatttcaggaagattcaaataatttctaaacat

SEQ ID NO: 3820 - DNA, 65 bp, Candida albicans
gcagtacttgaatagtatctgattattgaggtccgtgggaaacccaatcttatcaaattaaacat

SEQ ID NO: 3821 - DNA, 65 bp, Candida albicans
tcacatgcaacctcagcaacaaacatacaacataaagccatcaaatgaatgagaaacaacatcat

SEQ ID NO: 3822 - DNA, 65 bp, Candida albicans
tgggggatactattttccgtgataacataagtcaagtctttcttttctgtaatttgataagacat

SEQ ID NO: 3823 - DNA, 65 bp, Candida albicans
aataactgctctatattttcatccacttttgtagactttccaaataaattagcaaaacttgacat

SEQ ID NO: 3824 - DNA, 65 bp, Candida albicans
actgtcacagtttctgtataaaccttagtcaataaaccgatgaaaaataaatgggtaaacttcat

SEQ ID NO: 3825 - DNA, 65 bp, Candida albicans
agagttttcaagtgctcgttaagaaacgaaatatgctctggtgttaattgaactatgtttcccat

SEQ ID NO: 3826 - DNA, 65 bp, Candida albicans
tcagcaaggtttgatgtatgcttttgcactctgaacttggaaactatggagtctattggtctcat

SEQ ID NO: 3827 - DNA, 65 bp, Candida albicans
agatgagtgttgtttttcaaataaccttcaaaatctttagatgacttaacaaatttaattgacat

SEQ ID NO: 3828 - DNA, 65 bp, Candida albicans
acaccacatgtattacatgtgaatgatgctgtttccggattagatccgctgggcataaaactcat

SEQ ID NO: 3829 - DNA, 65 bp, Candida albicans
tcaccttcgtaatcatcatcaccacctgcagcaggtgtgtctatttctggaaatttgtcagccat

SEQ ID NO: 3830 - DNA, 65 bp, Candida albicans
tccttcatgctaaattcggtacttgaaggcattggctgttgattatgatcctctgattgtatcat

SEQ ID NO: 3831 - DNA, 65 bp, Candida albicans
cccacctcacatattttacgtccaagaaacccgtttccaccaaatactgcaattgattttaccat

SEQ ID NO: 3832 - DNA, 65 bp, Candida albicans
tcatcatagtttaattcattagaattagtaattgaaatatgatcagctcttgctttttcctccat

SEQ ID NO: 3833 - DNA, 65 bp, Candida albicans
ttgagcaatattgcaataacagttgctagatcaacaagggcttttattttgggcgaaattgccat

SEQ ID NO: 3834 - DNA, 65 bp, Candida albicans
cttgcaaatgatgagcccgccataaagtaaatcgagatccatatggatagaagtaacttcaccat

SEQ ID NO: 3835 - DNA, 65 bp, Candida albicans
tgctttttctccatatcatgtagactggtattggattcatgttccggcaaagtattagacaccat

SEQ ID NO: 3836 - DNA, 65 bp, Candida albicans
taactcaattctggcaactcatcaagcattgcaagacacaattcttctaattcaaaagatgacat

SEQ ID NO: 3837 - DNA, 65 bp, Candida albicans
ggaatcaccaaactgactgctgtagaagccactgtagcaaatgatataacgttagtaactttcat

SEQ ID NO: 3838 - DNA, 65 bp, Candida albicans
acacatggtgctattgaaatattaaattttatagaacttgccttgatatagttatcgacaagcat

SEQ ID NO: 3839 - DNA, 65 bp, Candida albicans
ggggtattgtttattatgtaagcaataattggtataattgtggttgtaattaatgtccttatcat

SEQ ID NO: 3840 - DNA, 65 bp, Candida albicans
aaaaaatcatggggtaacacagataatgtaggattatccaaataattcaaccaaaagtcagtcat

SEQ ID NO: 3841 - DNA, 65 bp, Candida albicans
acattagtcgattccaaagatgacgatgatccattgttggaatttaaatagccagaagatctcat

SEQ ID NO: 3842 - DNA, 65 bp, Candida albicans
gaactattggcatcaatagtcttcttcaatgtttcgattgttggttgcacaagttgtgactgcat

SEQ ID NO: 3843 - DNA, 65 bp, Candida albicans
atatagaacggctttgtagatttatatctaagctgaattaaaggtcccctgattttgaatctcat

SEQ ID NO: 3844 - DNA, 65 bp, Candida albicans
atttgtcgatttcttaatcgatcttgttttatttgatctgattcttcatcattagattcatacat

SEQ ID NO: 3845 - DNA, 65 bp, Candida albicans
tgttcaagccttttttcaactataagcttttgaatatctaattcttctaaatctcccttcagcat

SEQ ID NO: 3846 - DNA, 65 bp, Candida albicans
tcgaatcctggtcctatattagcagatgatgctggaacctttattttaaatgaagtaacgctcat

SEQ ID NO: 3847 - DNA, 65 bp, Candida albicans
gaaggaagggagatagtatatgaaaaggaaggggcggagggaattaattgtaggaagagtggcat

SEQ ID NO: 3848 - DNA, 65 bp, Candida albicans
tcctttggtggcatttttttggtgtcgaggggagtgggcgtgggcataggtgtggacatggacat

SEQ ID NO: 3849 - DNA, 65 bp, Candida albicans
aaatataatagataaacaattagaccaacatgggcccaaataatgcatttcaattcttttctcat

SEQ ID NO: 3850 - DNA, 65 bp, Candida albicans
tcggcaataccataaccaacatggatagtttccttacccaaaattggcaccttttcaatagacat

SEQ ID NO: 3851 - DNA, 65 bp, Candida albicans
tggaaagaagatgcatcaacttcaacctcaatagtttttttaatatcaggagaaaatgaagacat

SEQ ID NO: 3852 - DNA, 65 bp, Candida albicans
tgatattcttcaatttcaagagatttgtggcctcttgattcagcttctgaaacggagtttgacat

SEQ ID NO: 3853 - DNA, 65 bp, Candida albicans
ttaccaaattttaatgcttgagaatcaagagccaattgtaaaaatgatgatttataagatgccat

SEQ ID NO: 3854 - DNA, 65 bp, Candida albicans
tttatggtagatatgacagatggggttcttaaagttgatcgacataatgaaattggtgaaaacat

SEQ ID NO: 3855 - DNA, 65 bp, Candida albicans
ggccaaattgcttgtgcttggcttatcaaaatggaccctattattagtttcaaattaaccttcat

SEQ ID NO: 3856 - DNA, 65 bp, Candida albicans
acggtgtcaactttcaattgatgtaatctttcaaagaagaatctccctaaagtaatttcggacat

SEQ ID NO: 3857 - DNA, 65 bp, Candida albicans
ctactgagcgataatcttttgaaaagaccgtttgaaatagcctttttattcacttgtctgatcat

SEQ ID NO: 3858 - DNA, 65 bp, Candida albicans
accaaacgattgtcagcttttactctagtcaaatcatctctgatgttacggttgaatcttctcat

SEQ ID NO: 3859 - DNA, 65 bp, Candida albicans
tctgtgggacattcatcccttttgttcaaatattcaaatacttgggaaatggaatcactattcat

SEQ ID NO: 3860 - DNA, 65 bp, Candida albicans
cctgacggaatcagcgcaacctcatcggtagtagtcgtcccaataaacttcttgataaaattcat

SEQ ID NO: 3861 - DNA, 65 bp, Candida albicans
aatgatcttggtgcagtaaattttgctgatctaagaatagatcctctaacagtattttgaatcat

SEQ ID NO: 3862 - DNA, 65 bp, Candida albicans
tcatgcttgattgtggatgtagcaaatgtcctaagacaccctctgcaagatttgacaaaactcat

SEQ ID NO: 3863 - DNA, 65 bp, Candida albicans
ctctcgtgttttggttcttctattaactgttcctccttttctacttgatttttgattcttggcat

SEQ ID NO: 3864 - DNA, 65 bp, Candida albicans
tcctgttgttgctggtattgaggatggtttggaggtgggtaattgggtggtggataatcactcat

SEQ ID NO: 3865 - DNA, 65 bp, Candida albicans
caagtaaatgaatcataattatcaatcattaatacatgtcgtttcgatgatctgtcagtagtcat

SEQ ID NO: 3866 - DNA, 65 bp, Candida albicans
agtattgaaccattagacatggtagatagcggtgagtttactgaaactgatggttgcatattcat

SEQ ID NO: 3867 - DNA, 65 bp, Candida albicans
aacaatttgtataaatcggtatccaagaaggatttgatgactggtttatcttcagttccattcat

SEQ ID NO: 3868 - DNA, 65 bp, Candida albicans
aaagtcaagtatctagcgacttcagtctttcctgagcttaaggtaccagatataccaatcaacat

SEQ ID NO: 3869 - DNA, 65 bp, Candida albicans
atgatggtggctggtaaaagtgtgtcattaaccaacactctagtcgatgataatgctcgtgacat

SEQ ID NO: 3870 - DNA, 65 bp, Candida albicans
gatgtaaaattatcatcattttgctgtagtatgatttgcaaattattgattatattgtctatcat

SEQ ID NO: 3871 - DNA, 65 bp, Candida albicans
tgtttaataatatgttgagcaatatatccagttgcaccagtgacaaaaactgtttctccagacat

SEQ ID NO: 3872 - DNA, 65 bp, Candida albicans
ccaatggggcctctatttggtgcgggacttccacctattatttcacctctttttctaaatgacat

SEQ ID NO: 3873 - DNA, 65 bp, Candida albicans
gggaatgaatcacgaggaattgttcgacgatatgataaaaataaattagttctatctctaaacat

SEQ ID NO: 3874 - DNA, 65 bp, Candida albicans
ttcggtagaattggttgttctttagtagaagagttgggtattgattctgtaggtgaggtaggcat

SEQ ID NO: 3875 - DNA, 65 bp, Candida albicans
aatccacctactttgattttattattatttttcaaatcccatcctttaacttcaaataacaccat

SEQ ID NO: 3876 - DNA, 65 bp, Candida albicans
atcctccaagtcaagttctccattcttttttgataaggcaatgagtgacgagcacggtagtacat

SEQ ID NO: 3877 - DNA, 65 bp, Candida albicans
aagatatccatatatgattttgtcaatgtttgataatcatattgttcaacagtgattgacagcat

SEQ ID NO: 3878 - DNA, 65 bp, Candida albicans
tcaatggactcgttgccttgaacttgaggttcaattgacggttcttctgatatttccttgttcat

SEQ ID NO: 3879 - DNA, 65 bp, Candida albicans
tccatattcatatcagcgagtgataaacttgtgaaaaggactagtagtaaggcaattggtttcat

SEQ ID NO: 3880 - DNA, 65 bp, Candida albicans
gaaaatgtatgatgtaataaatgttgtcttgatgtaaatggatctgatcctgaagggtaatccat

SEQ ID NO: 3881 - DNA, 65 bp, Candida albicans
gaagaaaagtccgcagcctgaacagtagcaataaggagagcagcgatagacaaaatagaaagcat

SEQ ID NO: 3882 - DNA, 65 bp, Candida albicans
gaaatgacaggttctgcaaatgggttattgttttcaaaatcttctggataatctagagacgacat

SEQ ID NO: 3883 - DNA, 65 bp, Candida albicans
actgtgcttgtggctgtggagacaggattcttattagtccccagactagcttccactttcgacat

SEQ ID NO: 3884 - DNA, 65 bp, Candida albicans
cttctactgctattattcacagtggattcaccaacattactaaacaaatcagtttggttattcat

SEQ ID NO: 3885 - DNA, 65 bp, Candida albicans
tgttctgtttgcttttccaaacttaatgcctgtgaccttgtttgtgaaaatgtggatgatgacat

SEQ ID NO: 3886 - DNA, 65 bp, Candida albicans
tcatccatattagtgaaatatttagccctaaattgtttcccaaaaggaacaatgggattactcat

SEQ ID NO: 3887 - DNA, 65 bp, Candida albicans
aatgtagtggatgtaggtgtggaagttggagtccacgaagataaataattcaagatttcactcat

SEQ ID NO: 3888 - DNA, 65 bp, Candida albicans
tctcggggaagacttgatgaggaactatctctatcctcttctgttttcttcctaaaaaagttcat

SEQ ID NO: 3889 - DNA, 65 bp, Candida albicans
ggttttttaattggtatggaattgtgtttgattgtacgtgataataacaacaacagcagcagcat

SEQ ID NO: 3890 - DNA, 65 bp, Candida albicans
tggaaatgggcggagtcgttaaatagtttgggggtgggtagtatttttgatactgctcgtctcat

SEQ ID NO: 3891 - DNA, 65 bp, Candida albicans
atattcttatattggagcttaactgggggtattctagatacccatctttggaaaaccttttgcat

SEQ ID NO: 3892 - DNA, 65 bp, Candida albicans
gaattataagaataatcttcgagcaaaggcgacgaaggtgggaattgataattcatattagacat

SEQ ID NO: 3893 - DNA, 65 bp, Candida albicans
tgactaagatatgatgaaccaacaacaccggatccaataattgcaacattaactgactttgacat

SEQ ID NO: 3894 - DNA, 65 bp, Candida albicans
tttgacctggtggctggatcgaaagcctcttgcaaatcaatgataggaatttcttggaatgacat

SEQ ID NO: 3895 - DNA, 65 bp, Candida albicans
gatgttgtgtagcactcggggctagatgcctctttaggcatatcaatagaagacttcctactcat

SEQ ID NO: 3896 - DNA, 65 bp, Candida albicans
atatcatttaaagtgtccactgcatgagatacatagtcaccactgtgtgaatgatgtgtgtgcat

SEQ ID NO: 3897 - DNA, 65 bp, Candida albicans
acaggacattttaaagctgattcggtttctttaccacaatgtggtgctgcacagatagatgccat

SEQ ID NO: 3898 - DNA, 65 bp, Candida albicans
ataactaaatgaaaggagactaatgcaatgagtgttgcatctagaactttgttgtagcgatacat

SEQ ID NO: 3899 - DNA, 65 bp, Candida albicans
atttcagcaacttctttttggaagtcagcttcttctttttgaatgtcaataggagtgtaaggcat

SEQ ID NO: 3900 - DNA, 65 bp, Candida albicans
catgttctgatgttataatatacattttgtagcttcagccaattaaaacttggattagatggcat

SEQ ID NO: 3901 - DNA, 65 bp, Candida albicans
tcttttatcgattgattgatcgtgtcatcaattgttaattgattccaattaatatcaaatgacat

SEQ ID NO: 3902 - DNA, 65 bp, Candida albicans
catcttggtgtaattgaaacaatattcaacggtttcaatgttcttaaaacagttctagacaacat

SEQ ID NO: 3903 - DNA, 65 bp, Candida albicans
aaaggtgccttagcagcaagtgctgttgctactagcgataataacgcaacagaattgagtctcat

SEQ ID NO: 3904 - DNA, 65 bp, Candida albicans
ttccccttactgatagcagtggggccaccgatggtactaccctggatagtattatcgagaggcat

SEQ ID NO: 3905 - DNA, 65 bp, Candida albicans
tcctggaaaacagattgtccacttagaataaacccagcattaagtactcgtgataaaccaaccat

SEQ ID NO: 3906 - DNA, 65 bp, Candida albicans
ttgcgaacagtcggatacgcaaatgagcttttatcatcgttgtaatatggttctggtaatgacat

SEQ ID NO: 3907 - DNA, 65 bp, Candida albicans
agatgatcagcatctggtttggtatcagactcaacatgtgacgttgttggttttgtagtagacat

SEQ ID NO: 3908 - DNA, 65 bp, Candida albicans
cacgcaatccactggtacttggtgtttcttgaaatttctaaatgcttctgaagttcttcgtccat

SEQ ID NO: 3909 - DNA, 65 bp, Candida albicans
tcgggtctgacttttaatattctggttgtaaatgacatggctcttcgtagagtaaacagaagcat

SEQ ID NO: 3910 - DNA, 65 bp, Candida albicans
ggagccaataatgctaatggttttcttcgtatataatttaggtatcgattcctatagtgaaccat

SEQ ID NO: 3911 - DNA, 65 bp, Candida albicans
ttaacatctccaatagagattggtttgaaaagattggtttcagtcaaaggaatagtaaccgtcat

SEQ ID NO: 3912 - DNA, 65 bp, Candida albicans
gtggatttgatagttgggtgacctccgaaattgattgaagattcaacagcagtaggaggagccat

SEQ ID NO: 3913 - DNA, 65 bp, Candida albicans
ttccgcactagtattctgttgacattcaacaaagacgatgatgatggtactaatgatttattcat

SEQ ID NO: 3914 - DNA, 65 bp, Candida albicans
tcaaaaggttcacaatatgatgagttcattattagaaatagtagtagaataaaaggtggtatcat

SEQ ID NO: 3915 - DNA, 65 bp, Candida albicans
ggaggggattgtaattgtgaagcagttggtgctttcgaagatcttaatgaataagttctatgcat

SEQ ID NO: 3916 - DNA, 65 bp, Candida albicans
acaacattaatagcagcaaaaagtcttgtagtaagatcaccaataagaaatttcgataataacat

SEQ ID NO: 3917 - DNA, 65 bp, Candida albicans
aaatgacttccaattgattgcacattaggcaaattcaattgggtcgctgcatttttatcctccat

SEQ ID NO: 3918 - DNA, 65 bp, Candida albicans
ttgaatcttctgaaagacccaaatatgctattgaacactgaggttgatttgaattggttgaacat

SEQ ID NO: 3919 - DNA, 65 bp, Candida albicans
cgtattcttttcacccagccataactcaactcggaaaaactatgaggtaaatctctagtagacat

SEQ ID NO: 3920 - DNA, 65 bp, Candida albicans
cgagattctatgtcatttgaactactgctgctttcaacaggatatttttcacctacttcaaacat

SEQ ID NO: 3921 - DNA, 65 bp, Candida albicans
tcatcaacatggacttgggagacaactggatgaatctcatgtggtgtatgaattcccgaattcat

SEQ ID NO: 3922 - DNA, 65 bp, Candida albicans
tgatcgttgtcagtgtcaacgggaggtttctcacctccactaattactgcccttattttgtccat

SEQ ID NO: 3923 - DNA, 65 bp, Candida albicans
attaaagtggataagaattgtgagaccgaagaattggaactttgaggaatactactaccggccat

SEQ ID NO: 3924 - DNA, 65 bp, Candida albicans
gcagccacggaagaaacgaatgaagtagcagccaagattgatgggaataaagatttcaacaacat

SEQ ID NO: 3925 - DNA, 65 bp, Candida albicans
ctggtaaccgtaactggtgcagcaacggaaaaagcaaaaaataaacaaaacaataaataattcat

SEQ ID NO: 3926 - DNA, 65 bp, Candida albicans
gtaggcggctctactaccaattttttcaaatatggtgttaatgcattcttggacgaagttgtcat

SEQ ID NO: 3927 - DNA, 65 bp, Candida albicans
aaggttaaatttgtattggcaccgcgtatcctcgtactgtttcttgtaattaaacttttaatcat

SEQ ID NO: 3928 - DNA, 65 bp, Candida albicans
tacacaattctttgatttacaatatctttcaatctaaaatagtcaataattttacttgtagccat

SEQ ID NO: 3929 - DNA, 65 bp, Candida albicans
ataccatcactaccattgtctggggttgacttggtttcattatgacgtctaggctttctactcat

SEQ ID NO: 3930 - DNA, 65 bp, Candida albicans
gaccctggtggagtattgatgtctgaattattattattattaggacgtgaaaatattttaaacat

SEQ ID NO: 3931 - DNA, 65 bp, Candida albicans
tgagaaatgtctgatgctgttgtggttgttgtagtggcagtactagttcttgttatactcatcat

SEQ ID NO: 3932 - DNA, 65 bp, Candida albicans
ctagcagtacattccgggttaaaatggcaatggctatcgcttaggtttagaaatgtgtcattcat

SEQ ID NO: 3933-4000 - skipped (68 entries)

SEQ ID NO: 4001 - DNA, 22 bp, Candida albicans
atttcctttaacgcgtttgctg

SEQ ID NO: 4002 - DNA, 22 bp, Candida albicans
tacagagacattcaaacgcgtc

SEQ ID NO: 4003 - DNA, 22 bp, Candida albicans
acgtgcatctcgaactaaattc

SEQ ID NO: 4004 - DNA, 22 bp, Candida albicans
cctttctaaagaatcccatcgc

SEQ ID NO: 4005 - DNA, 22 bp, Candida albicans
tgttgtcggttagagcatagag

SEQ ID NO: 4006 - DNA, 22 bp, Candida albicans
ggagccattccattcaatagtg

SEQ ID NO: 4007 - DNA, 22 bp, Candida albicans
ccaggaagaatttgatgctacc

SEQ ID NO: 4008 - DNA, 22 bp, Candida albicans
tttgcttgtgtaagagggtgtg

SEQ ID NO: 4009 - DNA, 22 bp, Candida albicans
gttgccgtttcaattgtttagc

SEQ ID NO: 4010 - DNA, 22 bp, Candida albicans
caatttgatttctcgagttggc

SEQ ID NO: 4011 - DNA, 22 bp, Candida albicans
cctgtttgatcatcttgattcg

SEQ ID NO: 4012 - DNA, 22 bp, Candida albicans
ggtagtgctcaaaagtcattgc

SEQ ID NO: 4013 - DNA, 22 bp, Candida albicans
ttgcactgtctggtgtgagttg

SEQ ID NO: 4014 - DNA, 22 bp, Candida albicans
cgagagagtatttggaaagtcg

SEQ ID NO: 4015 - DNA, 22 bp, Candida albicans
gccttgctggatcttgtttagc

SEQ ID NO: 4016 - DNA, 22 bp, Candida albicans
tatgagacaactgggaagaagt

SEQ ID NO: 4017 - DNA, 22 bp, Candida albicans
ggtggtggtggcagaaatagga

SEQ ID NO: 4018 - DNA, 22 bp, Candida albicans
gatgaaacacaaaacgcaaggc

SEQ ID NO: 4019 - DNA, 22 bp, Candida albicans
gatgagtttataattggcagcg

SEQ ID NO: 4020 - DNA, 22 bp, Candida albicans
gttacttacaacttcatggggc

SEQ ID NO: 4021 - DNA, 22 bp, Candida albicans
tatatcaccagccccgttagac

SEQ ID NO: 4022 - DNA, 22 bp, Candida albicans
caagtggtagcaaaaaccaagc

SEQ ID NO: 4023 - DNA, 22 bp, Candida albicans
ttaattcagtttccgccatagc

SEQ ID NO: 4024 - DNA, 22 bp, Candida albicans
tttggttcggttggtgtaggtg

SEQ ID NO: 4025 - DNA, 22 bp, Candida albicans
gtgttaagtaggagtgggatgg

SEQ ID NO: 4026 - DNA, 22 bp, Candida albicans
atatattctgctgagcgcattc

SEQ ID NO: 4027 - DNA, 22 bp, Candida albicans
ccttgccatttcatttcaaagc

SEQ ID NO: 4028 - DNA, 22 bp, Candida albicans
atcaggcgactacaccagaacc

SEQ ID NO: 4029 - DNA, 22 bp, Candida albicans
ttatccaaacaccttttcctgg

SEQ ID NO: 4030 - DNA, 20 bp, Candida albicans
ttcccagccaaacaccaaaa

SEQ ID NO: 4031 - DNA, 22 bp, Candida albicans
tttgagaacagccacacgacaa

SEQ ID NO: 4032 - DNA, 22 bp, Candida albicans
aaggcaccaccatgacaattca

SEQ ID NO: 4033 - DNA, 25 bp, Candida albicans
tcaacaaccaaaccaactttcatcc

SEQ ID NO: 4034 - DNA, 26 bp, Candida albicans
cacacattcagtgtatcgatctccaa

SEQ ID NO: 4035 - DNA, 21 bp, Candida albicans
tcgtcagatgcagcacacgtt

SEQ ID NO: 4036 - DNA, 24 bp, Candida albicans
tgattcccaccacagttagacgaa

SEQ ID NO: 4037 - DNA, 22 bp, Candida albicans
gaaacggcacgaatattttgga

SEQ ID NO: 4038 - DNA, 25 bp, Candida albicans
tcgagtgaatgttaggggagagaga

SEQ ID NO: 4039 - DNA, 25 bp, Candida albicans
ccagtgaaaatccacgtgtagatgg

SEQ ID NO: 4040 - DNA, 26 bp, Candida albicans
ggtcagattcacatttccagatctca

SEQ ID NO: 4041 - DNA, 20 bp, Candida albicans
ccgttggtttgttgggtgct

SEQ ID NO: 4042 - DNA, 20 bp, Candida albicans
ggcgtatcgggatttggtga

SEQ ID NO: 4043 - DNA, 21 bp, Candida albicans
acctgaaccactctcgccaat

SEQ ID NO: 4044 - DNA, 21 bp, Candida albicans
tgcaacacagaaatgcgagga

SEQ ID NO: 4045 - DNA, 27 bp, Candida albicans
tgggtattataggccttgtttgtcaga

SEQ ID NO: 4046 - DNA, 26 bp, Candida albicans
tgttggatttgtctggaagtaaatgg

SEQ ID NO: 4047 - DNA, 22 bp, Candida albicans
catttttggcagtggcatgagt

SEQ ID NO: 4048 - DNA, 20 bp, Candida albicans
tgccccaggaacattgattg

SEQ ID NO: 4049 - DNA, 24 bp, Candida albicans
caaaagtgtttccaaaaaggatgc

SEQ ID NO: 4050 - DNA, 22 bp, Candida albicans
tgctcgaagatttgtcgttgga

SEQ ID NO: 4051 - DNA, 22 bp, Candida albicans
ggaaacgtggaaatggcttttg

SEQ ID NO: 4052 - DNA, 23 bp, Candida albicans
tccgggtaaaccaagaagtcaga

SEQ ID NO: 4053 - DNA, 22 bp, Candida albicans
gtggaggacaatgctcttgagg

SEQ ID NO: 4054 - DNA, 20 bp, Candida albicans
cggaggaggaggaggaggag

SEQ ID NO: 4055 - DNA, 24 bp, Candida albicans
tgttctccatttttggtggtgatt

SEQ ID NO: 4056 - DNA, 20 bp, Candida albicans
tgccgcgataggcatagtca

SEQ ID NO: 4057 - DNA, 21 bp, Candida albicans
tcatggaagcggaagaacctg

SEQ ID NO: 4058 - DNA, 21 bp, Candida albicans
tggaacattgccgaaactgaa

SEQ ID NO: 4059 - DNA, 25 bp, Candida albicans
tgatgaagaagaacttgggggtaga

SEQ ID NO: 4060 - DNA, 27 bp, Candida albicans
tttgaaaggaactatcggattattggt

SEQ ID NO: 4061 - DNA, 21 bp, Candida albicans
ccggaccaataccagttaccg

SEQ ID NO: 4062 - DNA, 23 bp, Candida albicans
tcctcctccagttgttgttgttg

SEQ ID NO: 4063 - DNA, 25 bp, Candida albicans
cagcctgagatcactatttgaacca

SEQ ID NO: 4064 - DNA, 23 bp, Candida albicans
tccatttgctgatgatgatgatg

SEQ ID NO: 4065 - DNA, 20 bp, Candida albicans
tggcacgtgattggcatgta

SEQ ID NO: 4066 - DNA, 23 bp, Candida albicans
cccaattgaatttttgggaaagg

SEQ ID NO: 4067 - DNA, 20 bp, Candida albicans
tgccgccagaaagaacgatt

SEQ ID NO: 4068 - DNA, 26 bp, Candida albicans
tcgtgtatatgtgaacatggatttgc

SEQ ID NO: 4069 - DNA, 24 bp, Candida albicans
catggcactggtgatgacaatgta

SEQ ID NO: 4070 - DNA, 26 bp, Candida albicans
tgaattgaaaaatgaaaacagcttcg

SEQ ID NO: 4071 - DNA, 20 bp, Candida albicans
cggctttggcagcacttttt

SEQ ID NO: 4072 - DNA, 24 bp, Candida albicans
tggcttcaattgattgcctttaca

SEQ ID NO: 4073 - DNA, 27 bp, Candida albicans
tggaaagaaacagagttatggaattgg

SEQ ID NO: 4074 - DNA, 21 bp, Candida albicans
cggcagtggttgatctccttc

SEQ ID NO: 4075 - DNA, 20 bp, Candida albicans
tcccttttccgctgatccat

SEQ ID NO: 4076 - DNA, 20 bp, Candida albicans
ctctggttgcgcgaaagatg

SEQ ID NO: 4077 - DNA, 22 bp, Candida albicans
tcagagattgcatgggctttga

SEQ ID NO: 4078 - DNA, 21 bp, Candida albicans
ttctctcccccggttcttttg

SEQ ID NO: 4079 - DNA, 23 bp, Candida albicans
ccctcaaaaatgttttggtgcag

SEQ ID NO: 4080 - DNA, 20 bp, Candida albicans
tggccaaccattgaaagcaa

SEQ ID NO: 4081 - DNA, 20 bp, Candida albicans
ctgctgctgctccagctgac

SEQ ID NO: 4082 - DNA, 21 bp, Candida albicans
tcgtgcgtttaccagtccaca

SEQ ID NO: 4083 - DNA, 23 bp, Candida albicans
tgatgtggaacaggaacttcacg

SEQ ID NO: 4084 - DNA, 20 bp, Candida albicans
gtggcccgactaagcaaagg

SEQ ID NO: 4085 - DNA, 21 bp, Candida albicans
cagtggccccttttgactctg

SEQ ID NO: 4086 - DNA, 21 bp, Candida albicans
ttgatgggtccgagatcaagc

SEQ ID NO: 4087 - DNA, 23 bp, Candida albicans
gcgacttatgaggaccgaactga

SEQ ID NO: 4088 - DNA, 24 bp, Candida albicans
aagcaccaccaaatctacaccaaa

SEQ ID NO: 4089 - DNA, 25 bp, Candida albicans
ccccaaagtatttcttggaggcata

SEQ ID NO: 4090 - DNA, 26 bp, Candida albicans
ttgtccttttcccacttctatcaatg

SEQ ID NO: 4091 - DNA, 22 bp, Candida albicans
gagcatagattttgccgccact

SEQ ID NO: 4092 - DNA, 24 bp, Candida albicans
cggtaatccaaaattggctaagga

SEQ ID NO: 4093 - DNA, 20 bp, Candida albicans
gttggtggcacaccttgctt

SEQ ID NO: 4094 - DNA, 30 bp, Candida albicans
aggtatgatatttgacgttgtttattttgc

SEQ ID NO: 4095 - DNA, 22 bp, Candida albicans
tggttagttgttttccgcctca

SEQ ID NO: 4096 - DNA, 20 bp, Candida albicans
acaacgcatgcggttcttca

SEQ ID NO: 4097 - DNA, 27 bp, Candida albicans
cgattaattgctcaagaaattgccata

SEQ ID NO: 4098 - DNA, 25 bp, Candida albicans
tttcatttgctctcttcacagcact

SEQ ID NO: 4099 - DNA, 23 bp, Candida albicans
caagtagttgaagcccacgatgc

SEQ ID NO: 4100 - DNA, 20 bp, Candida albicans
aacctgacaaaggcggtgga

SEQ ID NO: 4101 - DNA, 21 bp, Candida albicans
cagctgccgatagtgcaaaga

SEQ ID NO: 4102 - DNA, 20 bp, Candida albicans
ggggttgcgaatgggagagt

SEQ ID NO: 4103 - DNA, 22 bp, Candida albicans
cgcgaataccaggagttcttcc

SEQ ID NO: 4104 - DNA, 21 bp, Candida albicans
cctccttgtaactccggttcg

SEQ ID NO: 4105 - DNA, 24 bp, Candida albicans
cggaaataaccaaaaatccatcca

SEQ ID NO: 4106 - DNA, 20 bp, Candida albicans
ttggcagttggtggttggtg

SEQ ID NO: 4107 - DNA, 21 bp, Candida albicans
ttgaaaccagtcgacccaagc

SEQ ID NO: 4108 - DNA, 25 bp, Candida albicans
gggggtggatgataatgttagttgg

SEQ ID NO: 4109 - DNA, 23 bp, Candida albicans
cgattgtgaatcgatgttgttgc

SEQ ID NO: 4110 - DNA, 22 bp, Candida albicans
tccacagttggttagcacacga

SEQ ID NO: 4111 - DNA, 23 bp, Candida albicans
ggttttcaattgggtgttgttgc

SEQ ID NO: 4112 - DNA, 35 bp, Candida albicans
caattcttcgtcaatatatcgatttaaaaataaaa

SEQ ID NO: 4113 - DNA, 21 bp, Candida albicans
tccttccggcatatgtttcca

SEQ ID NO: 4114 - DNA, 26 bp, Candida albicans
aactgccaacaatatacctcaagcat

SEQ ID NO: 4115 - DNA, 23 bp, Candida albicans
tgggaatatcaggtgttcgctgt

SEQ ID NO: 4116 - DNA, 20 bp, Candida albicans
tcaaggcccaatcgcagtct

SEQ ID NO: 4117 - DNA, 23 bp, Candida albicans
tggtggttctgcttttgaaccat

SEQ ID NO: 4118 - DNA, 20 bp, Candida albicans
cggttctttcgaggccaatg

SEQ ID NO: 4119 - DNA, 20 bp, Candida albicans
cacgcacccacctacccaat

SEQ ID NO: 4120 - DNA, 22 bp, Candida albicans
aacgagtcacagcagcaaagga

SEQ ID NO: 4121 - DNA, 21 bp, Candida albicans
cgttatcgatgccttccttcg

SEQ ID NO: 4122 - DNA, 21 bp, Candida albicans
cgttctcacggctcacctttg

SEQ ID NO: 4123 - DNA, 20 bp, Candida albicans
ttttcccatcccccaaaaga

SEQ ID NO: 4124 - DNA, 25 bp, Candida albicans
ccacatgagaaacaacgtattggaa

SEQ ID NO: 4125 - DNA, 24 bp, Candida albicans
gggttccagaggttatcatgtgtg

SEQ ID NO: 4126 - DNA, 22 bp, Candida albicans
tcgtcttgcttgttgtcccaaa

SEQ ID NO: 4127 - DNA, 23 bp, Candida albicans
caatcaatcgaaaccagtccaca

SEQ ID NO: 4128 - DNA, 25 bp, Candida albicans
tcacatgtgtttttcttcagcggta

SEQ ID NO: 4129 - DNA, 23 bp, Candida albicans
aatttgttagtgcgcgagaaacc

SEQ ID NO: 4130 - DNA, 26 bp, Candida albicans
tgaccttagcattaacagtcctcgaa

SEQ ID NO: 4131 - DNA, 23 bp, Candida albicans
ttggttctggatcacctctgttg

SEQ ID NO: 4132 - DNA, 20 bp, Candida albicans
tcttttccctcctgcccttg

SEQ ID NO: 4133 - DNA, 20 bp, Candida albicans
atgggggaggggaagaaggt

SEQ ID NO: 4134 - DNA, 24 bp, Candida albicans
tgcttcagatgatgaaaaccctga

SEQ ID NO: 4135 - DNA, 22 bp, Candida albicans
cacacacacgcacacacgtaca

SEQ ID NO: 4136 - DNA, 20 bp, Candida albicans
aacgtggctggctcagaagc

SEQ ID NO: 4137 - DNA, 20 bp, Candida albicans
ggccgcgacttagaacgaca

SEQ ID NO: 4138 - DNA, 20 bp, Candida albicans
tgcgaacaagttcccgatgt

SEQ ID NO: 4139 - DNA, 22 bp, Candida albicans
tggacaaccacatggtagcgta

SEQ ID NO: 4140 - DNA, 21 bp, Candida albicans
tggtggttggggatattctgg

SEQ ID NO: 4141 - DNA, 21 bp, Candida albicans
tccgattgatcatcacgtcca

SEQ ID NO: 4142 - DNA, 21 bp, Candida albicans
ttgctggcctctttcttttgc

SEQ ID NO: 4143 - DNA, 20 bp, Candida albicans
tgaaggcgcacaaatcgaga

SEQ ID NO: 4144 - DNA, 20 bp, Candida albicans
ggactgatcgtgacgccaaa

SEQ ID NO: 4145 - DNA, 26 bp, Candida albicans
tcaaacaaagcaaacaaaacaaaaca

SEQ ID NO: 4146 - DNA, 25 bp, Candida albicans
tcacggaagctacaaagggtaaaga

SEQ ID NO: 4147 - DNA, 22 bp, Candida albicans
tgacaaaaagacgggggcttta

SEQ ID NO: 4148 - DNA, 22 bp, Candida albicans
cgaggaattggcatgatgtagc

SEQ ID NO: 4149 - DNA, 21 bp, Candida albicans
cggaaggaggatttggaagga

SEQ ID NO: 4150 - DNA, 23 bp, Candida albicans
caccaaatttgacactcgggtta

SEQ ID NO: 4151 - DNA, 20 bp, Candida albicans
ggcgacctccaatagcgatg

SEQ ID NO: 4152 - DNA, 23 bp, Candida albicans
gacatggaagtgcatgaacctga

SEQ ID NO: 4153 - DNA, 30 bp, Candida albicans
ggtggtagtgaatctgataacaagtgtttg

SEQ ID NO: 4154 - DNA, 20 bp, Candida albicans
atatgcgggtgtgtgcctca

SEQ ID NO: 4155 - DNA, 20 bp, Candida albicans
ggggaggagagggggatagg

SEQ ID NO: 4156 - DNA, 27 bp, Candida albicans
tgaacccttatatggaaaaaggttgct

SEQ ID NO: 4157 - DNA, 24 bp, Candida albicans
gcaaattcaattgacaggagacca

SEQ ID NO: 4158 - DNA, 22 bp, Candida albicans
ccagcaattgaactccaaatcg

SEQ ID NO: 4159 - DNA, 21 bp, Candida albicans
tggacaaattacccggccata

SEQ ID NO: 4160 - DNA, 23 bp, Candida albicans
tcgattaggctgtgaaattgtgg

SEQ ID NO: 4161 - DNA, 26 bp, Candida albicans
tgttgttgttgttgttgttgttgttg

SEQ ID NO: 4162 - DNA, 23 bp, Candida albicans
gcagaagaaaggaaaaggcacga

SEQ ID NO: 4163 - DNA, 23 bp, Candida albicans
cggttttctttggtcttcctggt

SEQ ID NO: 4164 - DNA, 23 bp, Candida albicans
tcctgaaccaattaggagggaaa

SEQ ID NO: 4165 - DNA, 20 bp, Candida albicans
ctccggcggttcctctcttt

SEQ ID NO: 4166 - DNA, 20 bp, Candida albicans
cgtcgagcgcttcgtatggt

SEQ ID NO: 4167 - DNA, 25 bp, Candida albicans
tgagagacaaaagtgtgggtcagtg

SEQ ID NO: 4168 - DNA, 20 bp, Candida albicans
gggcaagggttgtgtgtgtg

SEQ ID NO: 4169 - DNA, 23 bp, Candida albicans
tgcctgtcaaaacacagtggcta

SEQ ID NO: 4170 - DNA, 28 bp, Candida albicans
tcgtaatcttctttactccaatgagctg

SEQ ID NO: 4171 - DNA, 20 bp, Candida albicans
gcagtgcaagggcgaagagt

SEQ ID NO: 4172 - DNA, 21 bp, Candida albicans
cccaatccgtttgttccatca

SEQ ID NO: 4173 - DNA, 24 bp, Candida albicans
tctgcaacaattacaactgcatgg

SEQ ID NO: 4174 - DNA, 20 bp, Candida albicans
gaagaaacgggcgaggttcc

SEQ ID NO: 4175 - DNA, 20 bp, Candida albicans
gtggaatgaacagcggagca

SEQ ID NO: 4176 - DNA, 23 bp, Candida albicans
tgagggaagcaaggaaattgtca

SEQ ID NO: 4177 - DNA, 21 bp, Candida albicans
tggttgaaaaagagcgggtgt

SEQ ID NO: 4178 - DNA, 23 bp, Candida albicans
ttcttgttgttgtggttgccatt

SEQ ID NO: 4179 - DNA, 20 bp, Candida albicans
gggttttgctgcaccactca

SEQ ID NO: 4180 - DNA, 33 bp, Candida albicans
ttccaatcaatcttatcaattctttaatctaca

SEQ ID NO: 4181 - DNA, 21 bp, Candida albicans
caaatggcaactgcctaccaa

SEQ ID NO: 4182 - DNA, 25 bp, Candida albicans
tttcttctgtctttcccttgtctcc

SEQ ID NO: 4183 - DNA, 23 bp, Candida albicans
tcagttgtgtttcagttgcgtga

SEQ ID NO: 4184 - DNA, 24 bp, Candida albicans
tcacttcttggtcatcttcctcca

SEQ ID NO: 4185 - DNA, 25 bp, Candida albicans
cgacacactcacagagaaacacaca

SEQ ID NO: 4186 - DNA, 20 bp, Candida albicans
gggggatgcaacactccttc

SEQ ID NO: 4187 - DNA, 22 bp, Candida albicans
cgctaccagctgtggttttgtg

SEQ ID NO: 4188 - DNA, 20 bp, Candida albicans
atgacgtaatggggccaaca

SEQ ID NO: 4189 - DNA, 22 bp, Candida albicans
ccaaaagggccaattcatttgt

SEQ ID NO: 4190 - DNA, 22 bp, Candida albicans
cgaaatgtctggatggctttca

SEQ ID NO: 4191 - DNA, 21 bp, Candida albicans
catccatcgatgcaaaaacca

SEQ ID NO: 4192 - DNA, 22 bp, Candida albicans
tgcagcagtttgaagttgtgga

SEQ ID NO: 4193 - DNA, 23 bp, Candida albicans
tgaagatggtgttgaggatgacg

SEQ ID NO: 4194 - DNA, 21 bp, Candida albicans
ggcgtgtaaaaagtgcgtgaa

SEQ ID NO: 4195 - DNA, 24 bp, Candida albicans
tgaagccactgaagctgctaaaga

SEQ ID NO: 4196 - DNA, 27 bp, Candida albicans
tgaagacgatgatgatttagcatttga

SEQ ID NO: 4197 - DNA, 21 bp, Candida albicans
ttttcatcggcggacatgatt

SEQ ID NO: 4198 - DNA, 22 bp, Candida albicans
tgggtagtcgagcgacttgatg

SEQ ID NO: 4199 - DNA, 20 bp, Candida albicans
gcggctcaggtagtgtcagc

SEQ ID NO: 4200 - DNA, 20 bp, Candida albicans
cacggaagtggggagaggaa

SEQ ID NO: 4201 - DNA, 23 bp, Candida albicans
ccaaatacacgaccacaacaagc

SEQ ID NO: 4202 - DNA, 24 bp, Candida albicans
ttatcgttcaatggaccatcatca

SEQ ID NO: 4203 - DNA, 27 bp, Candida albicans
gaacaaatcagttgagaatgagaagca

SEQ ID NO: 4204 - DNA, 20 bp, Candida albicans
ctctcgccctttgtggcttt

SEQ ID NO: 4205 - DNA, 23 bp, Candida albicans
tgtcaacaaacagctcgtcatcg

SEQ ID NO: 4206 - DNA, 26 bp, Candida albicans
ggctgttgttgttgttgttgtaaaga

SEQ ID NO: 4207 - DNA, 20 bp, Candida albicans
agccccgctgtgattttgaa

SEQ ID NO: 4208 - DNA, 25 bp, Candida albicans
gggacttggggagtctatgaaagaa

SEQ ID NO: 4209 - DNA, 21 bp, Candida albicans
tgggtggttttcggtttatgg

SEQ ID NO: 4210 - DNA, 25 bp, Candida albicans
gaaaagtggtgcacagagagaaaaa

SEQ ID NO: 4211 - DNA, 25 bp, Candida albicans
acaaatctcccctgatatggctaaa

SEQ ID NO: 4212 - DNA, 23 bp, Candida albicans
cctgctccatcaaacggtactca

SEQ ID NO: 4213 - DNA, 27 bp, Candida albicans
tgcttctttgtctcttgatttgagaaa

SEQ ID NO: 4214 - DNA, 20 bp, Candida albicans
gcgagggagccagttccatt

SEQ ID NO: 4215 - DNA, 20 bp, Candida albicans
cccgaaagaatgtggatgga

SEQ ID NO: 4216 - DNA, 20 bp, Candida albicans
aaggccctgcagcattgttc

SEQ ID NO: 4217 - DNA, 24 bp, Candida albicans
atgcaagattctgccaatgaattt

SEQ ID NO: 4218 - DNA, 22 bp, Candida albicans
cgagacgctttgacattgacca

SEQ ID NO: 4219 - DNA, 20 bp, Candida albicans
gagctttgccaggtcgggta

SEQ ID NO: 4220 - DNA, 21 bp, Candida albicans
gctttttgacaaccccagcaa

SEQ ID NO: 4221 - DNA, 23 bp, Candida albicans
gggaaggattgtcttttggtggt

SEQ ID NO: 4222 - DNA, 24 bp, Candida albicans
gcaactgctgttgtgaaagacaaa

SEQ ID NO: 4223 - DNA, 27 bp, Candida albicans
gagggtaatgcaaagtgatatgaaacg

SEQ ID NO: 4224 - DNA, 20 bp, Candida albicans
gcacgcggaaaaaccaacat

SEQ ID NO: 4225 - DNA, 20 bp, Candida albicans
cctaggggctctggcaacaa

SEQ ID NO: 4226 - DNA, 26 bp, Candida albicans
tgctgaaattgtggtagctaggatga

SEQ ID NO: 4227 - DNA, 20 bp, Candida albicans
ttggacggtggcaaaatgaa

SEQ ID NO: 4228 - DNA, 21 bp, Candida albicans
tcgcccttcaaatttttgctc

SEQ ID NO: 4229 - DNA, 21 bp, Candida albicans
caaatgacgggaacccctttt

SEQ ID NO: 4230 - DNA, 22 bp, Candida albicans
ggttgtgattgtcgatggttgg

SEQ ID NO: 4231 - DNA, 20 bp, Candida albicans
ttttcgctcagtgggagtgc

SEQ ID NO: 4232 - DNA, 20 bp, Candida albicans
tgttggtggtggtggtttga

SEQ ID NO: 4233 - DNA, 20 bp, Candida albicans
gctgttgctgatgccgattg

SEQ ID NO: 4234 - DNA, 23 bp, Candida albicans
tgtggatcatttcacaagccact

SEQ ID NO: 4235 - DNA, 25 bp, Candida albicans
tccaaggagagaaacaacaagatgg

SEQ ID NO: 4236 - DNA, 24 bp, Candida albicans
tgtttcgcttagatgagccattga

SEQ ID NO: 4237 - DNA, 28 bp, Candida albicans
tcgaaattgttttctttgtcaatatggt

SEQ ID NO: 4238 - DNA, 22 bp, Candida albicans
tccatcgacatgtgcgacatta

SEQ ID NO: 4239 - DNA, 22 bp, Candida albicans
tcgtgtaaatttgccacctcca

SEQ ID NO: 4240 - DNA, 24 bp, Candida albicans
cacgaccactaaaaatgtggtgaa

SEQ ID NO: 4241 - DNA, 22 bp, Candida albicans
ttggcgtttgtttgtttctcca

SEQ ID NO: 4242 - DNA, 22 bp, Candida albicans
cgtgtaaatgcgtgcaaaatca

SEQ ID NO: 4243 - DNA, 26 bp, Candida albicans
gaacagccattgatagcttgttgttg

SEQ ID NO: 4244 - DNA, 24 bp, Candida albicans
tccaagaacagtcgtgcaagtttc

SEQ ID NO: 4245 - DNA, 20 bp, Candida albicans
tgcacgacctttggcatctt

SEQ ID NO: 4246 - DNA, 25 bp, Candida albicans
aaaatctgagcattggatgagatga

SEQ ID NO: 4247 - DNA, 27 bp, Candida albicans
gctcttcgtagaaacatagttggcgta

SEQ ID NO: 4248 - DNA, 25 bp, Candida albicans
cgtgaccttaatagaggagggcaat

SEQ ID NO: 4249 - DNA, 23 bp, Candida albicans
caacatttgtttcccgaagttga

SEQ ID NO: 4250 - DNA, 21 bp, Candida albicans
tgaatgagtgcgtgtcgtggt

SEQ ID NO: 4251 - DNA, 26 bp, Candida albicans
tgtttacacaacaaaaggattgtcca

SEQ ID NO: 4252 - DNA, 20 bp, Candida albicans
aggtcgtgcccatgcaaact

SEQ ID NO: 4253 - DNA, 20 bp, Candida albicans
ccagtgcacgacccccatta

SEQ ID NO: 4254 - DNA, 20 bp, Candida albicans
cggggatgatagaggcgaga

SEQ ID NO: 4255 - DNA, 21 bp, Candida albicans
tttggtgtgattggggaggaa

SEQ ID NO: 4256 - DNA, 24 bp, Candida albicans
tccgatgagaaggacaaatcaaaa

SEQ ID NO: 4257 - DNA, 24 bp, Candida albicans
caaaatcgagcaaaagttcccaaa

SEQ ID NO: 4258 - DNA, 23 bp, Candida albicans
tcctcctcatccctctcaaaagc

SEQ ID NO: 4259 - DNA, 21 bp, Candida albicans
tgacaatggcagtgggaaaca

SEQ ID NO: 4260 - DNA, 24 bp, Candida albicans
tggagagagtcgtgtaatgatgga

SEQ ID NO: 4261 - DNA, 22 bp, Candida albicans
cacgcagacacgaaaatttgga

SEQ ID NO: 4262 - DNA, 23 bp, Candida albicans
tccttttgctttttgctttctgc

SEQ ID NO: 4263 - DNA, 25 bp, Candida albicans
ttctccattatggtgtaatccatcg

SEQ ID NO: 4264 - DNA, 27 bp, Candida albicans
tctctctcaccaaaatcaaaacagaaa

SEQ ID NO: 4265 - DNA, 20 bp, Candida albicans
ccgctacctcacgacgacct

SEQ ID NO: 4266 - DNA, 20 bp, Candida albicans
tcgcactttgtcgcactttg

SEQ ID NO: 4267 - DNA, 20 bp, Candida albicans
gccctcaaaaccaccaccac

SEQ ID NO: 4268 - DNA, 21 bp, Candida albicans
cgagacgcattgagtggtcct

SEQ ID NO: 4269 - DNA, 22 bp, Candida albicans
ggaaaccaccaagtgagggaga

SEQ ID NO: 4270 - DNA, 25 bp, Candida albicans
ccacaacagaaaaatgagagaccac

SEQ ID NO: 4271 - DNA, 25 bp, Candida albicans
tgtgttctaggtggttagcgagaca

SEQ ID NO: 4272 - DNA, 24 bp, Candida albicans
ttctcgtatccaatcacacgtcag

SEQ ID NO: 4273 - DNA, 23 bp, Candida albicans
tggaaaatatcgaaacccacaca

SEQ ID NO: 4274 - DNA, 25 bp, Candida albicans
tcttttcattgcttggaatgaggtc

SEQ ID NO: 4275 - DNA, 23 bp, Candida albicans
ccaaaagttgacaacaccaagca

SEQ ID NO: 4276 - DNA, 25 bp, Candida albicans
tgacatgttaggttttccaatggtg

SEQ ID NO: 4277 - DNA, 21 bp, Candida albicans
tctggctctcaatcgcgaact

SEQ ID NO: 4278 - DNA, 26 bp, Candida albicans
tgtgtgtgaaagtacaaccaacaacg

SEQ ID NO: 4279 - DNA, 24 bp, Candida albicans
cgcaaatttcaaaaatgagtcgtg

SEQ ID NO: 4280 - DNA, 23 bp, Candida albicans
ccagcttctagcacaagcagtga

SEQ ID NO: 4281 - DNA, 20 bp, Candida albicans
tgtcgtgtccccggtagaga

SEQ ID NO: 4282 - DNA, 20 bp, Candida albicans
ttcgattccccgcaagagag

SEQ ID NO: 4283 - DNA, 20 bp, Candida albicans
agcaactacgcgccaaacac

SEQ ID NO: 4284 - DNA, 24 bp, Candida albicans
ccaaccgagaatgaaacagaatca

SEQ ID NO: 4285 - DNA, 22 bp, Candida albicans
tgacatttttgtggaggggaca

SEQ ID NO: 4286 - DNA, 21 bp, Candida albicans
tttgtgaccctcgcactaccc

SEQ ID NO: 4287 - DNA, 26 bp, Candida albicans
tcccattcatactcttctcattgtgg

SEQ ID NO: 4288 - DNA, 23 bp, Candida albicans
ttgaatcgtgggggaaagtaaaa

SEQ ID NO: 4289 - DNA, 22 bp, Candida albicans
tgcaaagtctcatcgcattacg

SEQ ID NO: 4290 - DNA, 20 bp, Candida albicans
gatcttgccgcgtgtgtttc

SEQ ID NO: 4291 - DNA, 23 bp, Candida albicans
tgagtgagacattgttcgccaaa

SEQ ID NO: 4292 - DNA, 20 bp, Candida albicans
ttccgacagcccattgaaca

SEQ ID NO: 4293 - DNA, 21 bp, Candida albicans
ccacgacgaccatcgtgtaaa

SEQ ID NO: 4294 - DNA, 24 bp, Candida albicans
tgtgcgtctcttctcatcatcaaa

SEQ ID NO: 4295 - DNA, 20 bp, Candida albicans
tggtggaaggcgagaaaagg

SEQ ID NO: 4296 - DNA, 23 bp, Candida albicans
cactcactccccttcttcccttt

SEQ ID NO: 4297 - DNA, 23 bp, Candida albicans
tttttctgttgagtggcgtttga

SEQ ID NO: 4298 - DNA, 25 bp, Candida albicans
tgtacgtgtacaaaaggccaaaaca

SEQ ID NO: 4299 - DNA, 25 bp, Candida albicans
tcattttcgttgtggtgacaagtct

SEQ ID NO: 4300 - DNA, 28 bp, Candida albicans
tcctggattcatagatcttggaacataa

SEQ ID NO: 4301 - DNA, 20 bp, Candida albicans
cccatgtttttcgggccttt

SEQ ID NO: 4302 - DNA, 21 bp, Candida albicans
cctttgtcgtttggcattgga

SEQ ID NO: 4303 - DNA, 25 bp, Candida albicans
tcttcctttttcttcttgtgcctca

SEQ ID NO: 4304 - DNA, 21 bp, Candida albicans
tccggacaacacacacacaca

SEQ ID NO: 4305 - DNA, 20 bp, Candida albicans
ggggatgttgcatcctgtca

SEQ ID NO: 4306 - DNA, 21 bp, Candida albicans
ttggttgtcctgcctttggaa

SEQ ID NO: 4307 - DNA, 25 bp, Candida albicans
cccaatatgcgaaatacaagtcgaa

SEQ ID NO: 4308 - DNA, 23 bp, Candida albicans
cgacttggtgatttctcgctctc

SEQ ID NO: 4309 - DNA, 26 bp, Candida albicans
cacacttcatacttgacgtttgcttg

SEQ ID NO: 4310 - DNA, 23 bp, Candida albicans
cctcaagtgtcgagtttccatgc

SEQ ID NO: 4311 - DNA, 23 bp, Candida albicans
tggttggctagagttccaaaagg

SEQ ID NO: 4312 - DNA, 20 bp, Candida albicans
cgtgctttgggggaagaaca

SEQ ID NO: 4313 - DNA, 24 bp, Candida albicans
tccaaactcccaacaacaacaaga

SEQ ID NO: 4314 - DNA, 20 bp, Candida albicans
tgctcaggcacgacaacaag

SEQ ID NO: 4315 - DNA, 24 bp, Candida albicans
tctgtctagaagcgtcctccctac

SEQ ID NO: 4316 - DNA, 21 bp, Candida albicans
gcctttgcgttcaatgagtcg

SEQ ID NO: 4317 - DNA, 20 bp, Candida albicans
tcaccaacgagccagggtgt

SEQ ID NO: 4318 - DNA, 20 bp, Candida albicans
gcgaattgaggccagatgga

SEQ ID NO: 4319 - DNA, 20 bp, Candida albicans
gccttggccatttcacaggt

SEQ ID NO: 4320 - DNA, 22 bp, Candida albicans
ccgtatgattggcctgtcaaga

SEQ ID NO: 4321 - DNA, 21 bp, Candida albicans
gctcgctcgcattttctcaaa

SEQ ID NO: 4322 - DNA, 22 bp, Candida albicans
tggggtgttttctcgagtcttg

SEQ ID NO: 4323 - DNA, 20 bp, Candida albicans
cctgccaattggacgtggag

SEQ ID NO: 4324 - DNA, 21 bp, Candida albicans
cggcactgtcgtgacttctga

SEQ ID NO: 4325 - DNA, 23 bp, Candida albicans
ggacgctagtggcagtaccaatg

SEQ ID NO: 4326 - DNA, 20 bp, Candida albicans
ttggtgtgttcggcaacctc

SEQ ID NO: 4327 - DNA, 22 bp, Candida albicans
cgaggatatactgcgccgagtc

SEQ ID NO: 4328 - DNA, 20 bp, Candida albicans
caacggcaacaactcccaca

SEQ ID NO: 4329 - DNA, 22 bp, Candida albicans
ccgactgagagctggatcacat

SEQ ID NO: 4330 - DNA, 23 bp, Candida albicans
gcttcatttatcacctgggctgt

SEQ ID NO: 4331 - DNA, 20 bp, Candida albicans
gcttgcgtgtgtgggtccta

SEQ ID NO: 4332 - DNA, 22 bp, Candida albicans
cgacgcagcattttcttcttca

SEQ ID NO: 4333 - DNA, 29 bp, Candida albicans
aaatggttgaatggatttaccaataaaaa

SEQ ID NO: 4334 - DNA, 21 bp, Candida albicans
gcagcaagaacccaagtgacc

SEQ ID NO: 4335 - DNA, 23 bp, Candida albicans
cagcttgtgctaaattcgggaaa

SEQ ID NO: 4336 - DNA, 25 bp, Candida albicans
ggttcaacctgagtcagaggaattg

SEQ ID NO: 4337 - DNA, 29 bp, Candida albicans
ggaagcaattctatttttattggttgaaa

SEQ ID NO: 4338 - DNA, 20 bp, Candida albicans
ttgtgatgtgggtcgtctgg

SEQ ID NO: 4339 - DNA, 20 bp, Candida albicans
ttggacccagctgctgaaaa

SEQ ID NO: 4340 - DNA, 26 bp, Candida albicans
cgtcttgcatagctttgtaggtctcc

SEQ ID NO: 4341 - DNA, 20 bp, Candida albicans
tgcgccggaacataaaaagg

SEQ ID NO: 4342 - DNA, 25 bp, Candida albicans
ccctacaaatatgtcgtgtgtcgtg

SEQ ID NO: 4343 - DNA, 24 bp, Candida albicans
ttgaatggttgatttagggtttgg

SEQ ID NO: 4344 - DNA, 22 bp, Candida albicans
ttgcagtcgttgtgcatcattt

SEQ ID NO: 4345 - DNA, 21 bp, Candida albicans
ggcaggaactggttgaaatgg

SEQ ID NO: 4346 - DNA, 28 bp, Candida albicans
cggacaatacgtttaatcttcacaaatg

SEQ ID NO: 4347 - DNA, 20 bp, Candida albicans
gcatcccaaaccaaggacaa

SEQ ID NO: 4348 - DNA, 20 bp, Candida albicans
caatgagctcgtgaccgtga

SEQ ID NO: 4349 - DNA, 24 bp, Candida albicans
gggtagtggttattggtgtgttgg

SEQ ID NO: 4350 - DNA, 20 bp, Candida albicans
ttgatgcctgggcactatcg

SEQ ID NO: 4351 - DNA, 22 bp, Candida albicans
gtgccttctaagcgctgtcaac

SEQ ID NO: 4352 - DNA, 20 bp, Candida albicans
ttgcggtgccaaaactacca

SEQ ID NO: 4353 - DNA, 26 bp, Candida albicans
cagggtttctggtgttgattctaaag

SEQ ID NO: 4354 - DNA, 22 bp, Candida albicans
gctgccaccgagagaaatatcc

SEQ ID NO: 4355 - DNA, 20 bp, Candida albicans
cccatttcccatccatctcg

SEQ ID NO: 4356 - DNA, 26 bp, Candida albicans
gagagaaatgtgttgtgctgttcaaa

SEQ ID NO: 4357 - DNA, 20 bp, Candida albicans
ggttgtttgttgcccgcata

SEQ ID NO: 4358 - DNA, 28 bp, Candida albicans
ccaatgttttctaaccacaaaacaaaca

SEQ ID NO: 4359 - DNA, 20 bp, Candida albicans
ggcatcggcgatttcttgta

SEQ ID NO: 4360 - DNA, 20 bp, Candida albicans
cttgtggttgaggccactgc

SEQ ID NO: 4361 - DNA, 20 bp, Candida albicans
ttggcagtgggtttggtttc

SEQ ID NO: 4362 - DNA, 22 bp, Candida albicans
ggagggcacctgataattccaa

SEQ ID NO: 4363 - DNA, 25 bp, Candida albicans
tgttgttgttgttgttgaatggaaa

SEQ ID NO: 4364 - DNA, 26 bp, Candida albicans
tcccgggtatattgtttaaatcatcc

SEQ ID NO: 4365 - DNA, 20 bp, Candida albicans
tcatccgcacaacccaaaga

SEQ ID NO: 4366 - DNA, 22 bp, Candida albicans
ggaatgaaatccattggccgta

SEQ ID NO: 4367 - DNA, 29 bp, Candida albicans
ccatgatgattatgacgactatgattacg

SEQ ID NO: 4368 - DNA, 23 bp, Candida albicans
ccagatgaaagcatggtgctaca

SEQ ID NO: 4369 - DNA, 20 bp, Candida albicans
ggatgtgggagaagcagacg

SEQ ID NO: 4370 - DNA, 25 bp, Candida albicans
tggataaaaatcaaatcgacattgg

SEQ ID NO: 4371 - DNA, 28 bp, Candida albicans
aagagggtaatagtttcttccaatggtg

SEQ ID NO: 4372 - DNA, 20 bp, Candida albicans
gaaagggaacgaacgccaaa

SEQ ID NO: 4373 - DNA, 25 bp, Candida albicans
gcatatgcttcacatggattgaaaa

SEQ ID NO: 4374 - DNA, 21 bp, Candida albicans
tcgatacctccatgccagttg

SEQ ID NO: 4375 - DNA, 22 bp, Candida albicans
cgctgaatttggtacgactcca

SEQ ID NO: 4376 - DNA, 23 bp, Candida albicans
ggatgtttaaagctggtcgtgct

SEQ ID NO: 4377 - DNA, 19 bp, Candida albicans
ggaccaggggcaccaaaag

SEQ ID NO: 4378 - DNA, 28 bp, Candida albicans
catccaaacatcaatagttaatgcaacc

SEQ ID NO: 4379 - DNA, 21 bp, Candida albicans
tggcgtgggcaaagtttattt

SEQ ID NO: 4380 - DNA, 26 bp, Candida albicans
tcatagaaccgcacttttcaattgtc

SEQ ID NO: 4381 - DNA, 25 bp, Candida albicans
tttgcaacaaagaatttgattgtcc

SEQ ID NO: 4382 - DNA, 22 bp, Candida albicans
ggcgtaaacagatggaggcaaa

SEQ ID NO: 4383 - DNA, 20 bp, Candida albicans
ggcgttgcccgttaaccaac

SEQ ID NO: 4384 - DNA, 25 bp, Candida albicans
ttcagcttgttgactttggaagatg

SEQ ID NO: 4385 - DNA, 22 bp, Candida albicans
tggataccacagactgccaacc

SEQ ID NO: 4386 - DNA, 23 bp, Candida albicans
cgatggtggaaatatggttctgg

SEQ ID NO: 4387 - DNA, 19 bp, Candida albicans
gcgggagttcctgctaggg

SEQ ID NO: 4388 - DNA, 22 bp, Candida albicans
catggacctcttcaggcattga

SEQ ID NO: 4389 - DNA, 24 bp, Candida albicans
ccaagattcatcacgacagggact

SEQ ID NO: 4390 - DNA, 24 bp, Candida albicans
caacagcaagagcaaaatgagaca

SEQ ID NO: 4391 - DNA, 25 bp, Candida albicans
ttgggacaaattacagatgagcaaa

SEQ ID NO: 4392 - DNA, 20 bp, Candida albicans
tcgctctcgccctagcactg

SEQ ID NO: 4393 - DNA, 25 bp, Candida albicans
ttggggaaatacaaggaataggttg

SEQ ID NO: 4394 - DNA, 22 bp, Candida albicans
tggtcaattgtgtgtcgattgg

SEQ ID NO: 4395 - DNA, 20 bp, Candida albicans
ttggtcattgccggtcacag

SEQ ID NO: 4396 - DNA, 20 bp, Candida albicans
aggccaccgatccagaggtt

SEQ ID NO: 4397 - DNA, 24 bp, Candida albicans
aaaaaccaataaccaaccccttca

SEQ ID NO: 4398 - DNA, 24 bp, Candida albicans
ggatcatctgatggagacaaggag

SEQ ID NO: 4399 - DNA, 21 bp, Candida albicans
aatgcagctgaaaggctggaa

SEQ ID NO: 4400 - DNA, 24 bp, Candida albicans
cggtcaaaaagtgaccatgaaatg

SEQ ID NO: 4401 - DNA, 25 bp, Candida albicans
tcaaacattctgttttccaacacca

SEQ ID NO: 4402 - DNA, 20 bp, Candida albicans
cgaccggaaggtgtttctcc

SEQ ID NO: 4403 - DNA, 22 bp, Candida albicans
cttcgcctcacccggaaaaaac

SEQ ID NO: 4404 - DNA, 20 bp, Candida albicans
acggctggggcagtgtatgt

SEQ ID NO: 4405 - DNA, 21 bp, Candida albicans
tggcagggaagacattctgga

SEQ ID NO: 4406 - DNA, 33 bp, Candida albicans
cctctcctaaatatcttcaaatactacctgtgc

SEQ ID NO: 4407 - DNA, 26 bp, Candida albicans
gaattgggttgggatataaattttgc

SEQ ID NO: 4408 - DNA, 24 bp, Candida albicans
tgagattgccagcaagtcatcata

SEQ ID NO: 4409 - DNA, 27 bp, Candida albicans
tggtggtaaaggtaagggattagaaga

SEQ ID NO: 4410 - DNA, 22 bp, Candida albicans
tgggtttttgcaaccaacagaa

SEQ ID NO: 4411 - DNA, 20 bp, Candida albicans
cgaccaatcaggggaagcag

SEQ ID NO: 4412 - DNA, 27 bp, Candida albicans
aaactctccacttgttgtttgttaggg

SEQ ID NO: 4413 - DNA, 22 bp, Candida albicans
gctgacttggttcctggcattt

SEQ ID NO: 4414 - DNA, 22 bp, Candida albicans
tgtcgtttgtcgttgtcgatga

SEQ ID NO: 4415 - DNA, 26 bp, Candida albicans
cgaaagaagctgaaagaggaactaag

SEQ ID NO: 4416 - DNA, 20 bp, Candida albicans
gtttcctctccggcgatgct

SEQ ID NO: 4417 - DNA, 21 bp, Candida albicans
cgctttgatgtgatggctctg

SEQ ID NO: 4418 - DNA, 20 bp, Candida albicans
ttgcgcaccagcagttcttc

SEQ ID NO: 4419 - DNA, 20 bp, Candida albicans
gacctggtgatcggagcaaa

SEQ ID NO: 4420 - DNA, 26 bp, Candida albicans
tggagatgcatgtatgtatgtttggt

SEQ ID NO: 4421 - DNA, 22 bp, Candida albicans
tggaaaccaattcctctgttgg

SEQ ID NO: 4422 - DNA, 20 bp, Candida albicans
cgaactcccaagcccgattt

SEQ ID NO: 4423 - DNA, 23 bp, Candida albicans
ggattctttattccacgccttgc

SEQ ID NO: 4424 - DNA, 31 bp, Candida albicans
caaaactttgaataacatttcctcattttca

SEQ ID NO: 4425 - DNA, 24 bp, Candida albicans
tctaaatccaacagcacctcttgc

SEQ ID NO: 4426 - DNA, 25 bp, Candida albicans
tgagtggatcatgagacagtgaagc

SEQ ID NO: 4427 - DNA, 29 bp, Candida albicans
ttccacgtcttaattggtaaaatttgatt

SEQ ID NO: 4428 - DNA, 20 bp, Candida albicans
tgggagtggggcaaaaagtg

SEQ ID NO: 4429 - DNA, 26 bp, Candida albicans
tgggatgttggtatttcatacccttt

SEQ ID NO: 4430 - DNA, 23 bp, Candida albicans
tgcttgtaggcaattgtttgtcg

SEQ ID NO: 4431 - DNA, 22 bp, Candida albicans
ccacgtagatccccatcacctt

SEQ ID NO: 4432 - DNA, 22 bp, Candida albicans
agacagcagttgggtgataccg

SEQ ID NO: 4433 - DNA, 24 bp, Candida albicans
ggatttcaaccatgatcatccaga

SEQ ID NO: 4434 - DNA, 21 bp, Candida albicans
gctcaaaagaaggccatccaa

SEQ ID NO: 4435 - DNA, 25 bp, Candida albicans
tgaaatcggacattctttccctatg

SEQ ID NO: 4436 - DNA, 22 bp, Candida albicans
tcatggtttttgcaactgcgta

SEQ ID NO: 4437 - DNA, 29 bp, Candida albicans
tgtttgctcatattttgaatgagtttctt

SEQ ID NO: 4438 - DNA, 23 bp, Candida albicans
caaagccgcacaagttttcctaa

SEQ ID NO: 4439 - DNA, 20 bp, Candida albicans
cgatgctggtgcctcgtaga

SEQ ID NO: 4440 - DNA, 23 bp, Candida albicans
tttccattccatttgctctctca

SEQ ID NO: 4441 - DNA, 23 bp, Candida albicans
ggagaagacgtagtgcaggtcca

SEQ ID NO: 4442 - DNA, 26 bp, Candida albicans
agaaatcatgttgatatggtgtgtgg

SEQ ID NO: 4443 - DNA, 20 bp, Candida albicans
gctgtacccccgacaacgag

SEQ ID NO: 4444 - DNA, 25 bp, Candida albicans
ttcaatccaaagatgttgtcaagga

SEQ ID NO: 4445 - DNA, 25 bp, Candida albicans
tgcatcctttttggaaacacttttg

SEQ ID NO: 4446 - DNA, 20 bp, Candida albicans
cacggcgtcaaaaagtgctg

SEQ ID NO: 4447 - DNA, 25 bp, Candida albicans
tcattattgtggtgagtggagtgga

SEQ ID NO: 4448 - DNA, 27 bp, Candida albicans
tcgtactttgctgtctggttaagcaat

SEQ ID NO: 4449 - DNA, 25 bp, Candida albicans
ttttcctttccaccatatctcttcg

SEQ ID NO: 4450 - DNA, 23 bp, Candida albicans
gaacccacatagaaggcacagga

SEQ ID NO: 4451 - DNA, 25 bp, Candida albicans
cacgtcttatcctttgattggggta

SEQ ID NO: 4452 - DNA, 24 bp, Candida albicans
caaagctaaatggttttgcagtcg

SEQ ID NO: 4453 - DNA, 20 bp, Candida albicans
acaataagcggcggatttgg

SEQ ID NO: 4454 - DNA, 24 bp, Candida albicans
tccatccattctttgtgtggagaa

SEQ ID NO: 4455 - DNA, 20 bp, Candida albicans
tggtgtcggtgtggctttgt

SEQ ID NO: 4456 - DNA, 21 bp, Candida albicans
ttcgtggcatttatggcctct

SEQ ID NO: 4457 - DNA, 22 bp, Candida albicans
caacgacgattcttggtggaaa

SEQ ID NO: 4458 - DNA, 21 bp, Candida albicans
tccattgccattggggaatta

SEQ ID NO: 4459 - DNA, 21 bp, Candida albicans
cgccttgaacaagtgagacga

SEQ ID NO: 4460 - DNA, 20 bp, Candida albicans
cctcctgtggccatggataa

SEQ ID NO: 4461 - DNA, 21 bp, Candida albicans
tgagctcagctgcttggcaat

SEQ ID NO: 4462 - DNA, 24 bp, Candida albicans
gcgctaccaaagagtgagtgagtg

SEQ ID NO: 4463 - DNA, 25 bp, Candida albicans
tcaagcgattacgtttctccttgat

SEQ ID NO: 4464 - DNA, 20 bp, Candida albicans
aacccatcgtcgtgtgagca

SEQ ID NO: 4465 - DNA, 22 bp, Candida albicans
cccagacccaggaggtcctatt

SEQ ID NO: 4466 - DNA, 23 bp, Candida albicans
cgttcaccaaaatcaagaatgga

SEQ ID NO: 4467 - DNA, 20 bp, Candida albicans
ccccggggattgaattagaa

SEQ ID NO: 4468 - DNA, 20 bp, Candida albicans
cgccccaattcgtttctcac

SEQ ID NO: 4469 - DNA, 27 bp, Candida albicans
caatgtccacacgtatagatgtttcaa

SEQ ID NO: 4470 - DNA, 22 bp, Candida albicans
tcttggtgggggaattaaagga

SEQ ID NO: 4471 - DNA, 21 bp, Candida albicans
cccaacccaaaagaaagtcca

SEQ ID NO: 4472 - DNA, 20 bp, Candida albicans
cgtgtgggtttcggttggtt

SEQ ID NO: 4473 - DNA, 21 bp, Candida albicans
cggctcatggatttcaacaaa

SEQ ID NO: 4474 - DNA, 20 bp, Candida albicans
tcaaccgaccaaccaaccaa

SEQ ID NO: 4475 - DNA, 20 bp, Candida albicans
agcatcatgagcccctgtca

SEQ ID NO: 4476 - DNA, 22 bp, Candida albicans
tgctgcaactgtttccgatttc

SEQ ID NO: 4477 - DNA, 21 bp, Candida albicans
cagttgattcggttgggatcg

SEQ ID NO: 4478 - DNA, 26 bp, Candida albicans
ccttcaattcaatctatacggcttcg

SEQ ID NO: 4479 - DNA, 22 bp, Candida albicans
tgggtcgtagattgacggctaa

SEQ ID NO: 4480 - DNA, 21 bp, Candida albicans
gctcatgcctcggcaactaga

SEQ ID NO: 4481 - DNA, 26 bp, Candida albicans
tgatttttattggcattttgttttcg

SEQ ID NO: 4482 - DNA, 20 bp, Candida albicans
tggcacagcagcagtgttga

SEQ ID NO: 4483 - DNA, 23 bp, Candida albicans
tgtgtttgcaaaggtggttgtca

SEQ ID NO: 4484 - DNA, 23 bp, Candida albicans
tgctgtcttaccaccaaactgga

SEQ ID NO: 4485 - DNA, 24 bp, Candida albicans
ccgctttccactagaatcacaagc

SEQ ID NO: 4486 - DNA, 26 bp, Candida albicans
gatgatgaagaagaaggtgaacaagc

SEQ ID NO: 4487 - DNA, 20 bp, Candida albicans
cgtggccgcaaataaaaagc

SEQ ID NO: 4488 - DNA, 20 bp, Candida albicans
ggcttcgagaccacgaggag

SEQ ID NO: 4489 - DNA, 24 bp, Candida albicans
tgtggatgtggatatggatgtctc

SEQ ID NO: 4490 - DNA, 26 bp, Candida albicans
tccggatagcaattagagaggttacg

SEQ ID NO: 4491 - DNA, 22 bp, Candida albicans
gaattgaaccattgcccagtgt

SEQ ID NO: 4492 - DNA, 20 bp, Candida albicans
ttccgggggttttgttcact

SEQ ID NO: 4493 - DNA, 20 bp, Candida albicans
tccccttgtgaagggtcgtc

SEQ ID NO: 4494 - DNA, 21 bp, Candida albicans
cgctgaagaagccccaatttc

SEQ ID NO: 4495 - DNA, 27 bp, Candida albicans
tgtatgtgaagaaactacgcactcacg

SEQ ID NO: 4496 - DNA, 20 bp, Candida albicans
gcactcgctcgcattcacac

SEQ ID NO: 4497 - DNA, 20 bp, Candida albicans
aagggtccagcaacccacct

SEQ ID NO: 4498 - DNA, 22 bp, Candida albicans
tgtgatggagagctggtgaaca

SEQ ID NO: 4499 - DNA, 24 bp, Candida albicans
tcagcgagttttgagagcaatcag

SEQ ID NO: 4500 - DNA, 20 bp, Candida albicans
attcgctcgccattcattcg

SEQ ID NO: 4501 - DNA, 25 bp, Candida albicans
ctggtgacaagagattgaaaactgg

SEQ ID NO: 4502 - DNA, 25 bp, Candida albicans
gcattccatgttttggttatgattg

SEQ ID NO: 4503 - DNA, 24 bp, Candida albicans
tttgttaggcgcaattgaagatga

SEQ ID NO: 4504 - DNA, 21 bp, Candida albicans
caactgcaacaatcacgcaaa

SEQ ID NO: 4505 - DNA, 21 bp, Candida albicans
ttgtgggttgctgttttgtgg

SEQ ID NO: 4506 - DNA, 22 bp, Candida albicans
tgggggcataatttgaaacagc

SEQ ID NO: 4507 - DNA, 24 bp, Candida albicans
gaaatgcgcttcttctaccaatgc

SEQ ID NO: 4508 - DNA, 21 bp, Candida albicans
ccttctccaccaagcacatca

SEQ ID NO: 4509 - DNA, 24 bp, Candida albicans
ccaacatcatcgacattatcatcg

SEQ ID NO: 4510 - DNA, 20 bp, Candida albicans
tgaagcgcgtcggtactttg

SEQ ID NO: 4511 - DNA, 25 bp, Candida albicans
tgaacacatcctttcaggatattgg

SEQ ID NO: 4512 - DNA, 20 bp, Candida albicans
tgggtgctgaatgggaacaa

SEQ ID NO: 4513 - DNA, 20 bp, Candida albicans
ttctgccttgggctttttcg

SEQ ID NO: 4514 - DNA, 27 bp, Candida albicans
tgaatttgttcgtcaataagtgctcct

SEQ ID NO: 4515 - DNA, 27 bp, Candida albicans
ccgtaagaaatcaagagagatgattgg

SEQ ID NO: 4516 - DNA, 20 bp, Candida albicans
gccaaatcggaagactgacg

SEQ ID NO: 4517 - DNA, 20 bp, Candida albicans
tggctgctgagaatgctgaa

SEQ ID NO: 4518 - DNA, 20 bp, Candida albicans
tgctgctgctgaagctgatg

SEQ ID NO: 4519 - DNA, 20 bp, Candida albicans
tggaggtgggggagtaggtc

SEQ ID NO: 4520 - DNA, 24 bp, Candida albicans
tgaaaaatccagcaaaacttgtcc

SEQ ID NO: 4521 - DNA, 24 bp, Candida albicans
gctttgttttggttcttccacaaa

SEQ ID NO: 4522 - DNA, 32 bp, Candida albicans
tcattttcatatcataacatcctttaatcaga

SEQ ID NO: 4523 - DNA, 23 bp, Candida albicans
gcattcgtaccaggaagtctgga

SEQ ID NO: 4524 - DNA, 26 bp, Candida albicans
tgtcccataattgcattgttacttca

SEQ ID NO: 4525 - DNA, 23 bp, Candida albicans
ttgagatacgatggggcatcttt

SEQ ID NO: 4526 - DNA, 24 bp, Candida albicans
cctgtgttacgggaatttccactc

SEQ ID NO: 4527 - DNA, 20 bp, Candida albicans
agaatgagacgcgcgatgtg

SEQ ID NO: 4528 - DNA, 28 bp, Candida albicans
tgaaataaataagtatggcaccaggaga

SEQ ID NO: 4529 - DNA, 21 bp, Candida albicans
ttggcggtgttgaacgagttt

SEQ ID NO: 4530 - DNA, 20 bp, Candida albicans
gcagcagcaaaacaggagga

SEQ ID NO: 4531 - DNA, 24 bp, Candida albicans
tgacgaattcaaggttgttgttga

SEQ ID NO: 4532 - DNA, 20 bp, Candida albicans
tatcgggacgccggtaggta

SEQ ID NO: 4533 - DNA, 20 bp, Candida albicans
tgttacgcgcgggtgaatag

SEQ ID NO: 4534 - DNA, 27 bp, Candida albicans
tgaaagaaaacagaaacaacttccaaa

SEQ ID NO: 4535 - DNA, 26 bp, Candida albicans
aactcattcacgtaccataagctggt

SEQ ID NO: 4536 - DNA, 26 bp, Candida albicans
tgtggagaaactcgtcaactttagca

SEQ ID NO: 4537 - DNA, 20 bp, Candida albicans
agctgccgacgttcgaaaaa

SEQ ID NO: 4538 - DNA, 20 bp, Candida albicans
ccaattcaacggtggtccaa

SEQ ID NO: 4539 - DNA, 22 bp, Candida albicans
gcgaaagactgtgtgggagcta

SEQ ID NO: 4540 - DNA, 20 bp, Candida albicans
ccggaatttgatggcatggt

SEQ ID NO: 4541 - DNA, 20 bp, Candida albicans
tggctggcttgttgcttgaa

SEQ ID NO: 4542 - DNA, 21 bp, Candida albicans
tcgtggtgcaaggctagacaa

SEQ ID NO: 4543 - DNA, 20 bp, Candida albicans
acccaaagccaagcacctga

SEQ ID NO: 4544 - DNA, 23 bp, Candida albicans
cgaaaaggcagaacacaaaaagg

SEQ ID NO: 4545 - DNA, 26 bp, Candida albicans
cgcattgttttgatttctttacgttg

SEQ ID NO: 4546 - DNA, 25 bp, Candida albicans
ccatcgacaaatccactacagttca

SEQ ID NO: 4547 - DNA, 25 bp, Candida albicans
tcgctattgatgatgatttgctgaa

SEQ ID NO: 4548 - DNA, 23 bp, Candida albicans
aatcctgccccagctaatacaaa

SEQ ID NO: 4549 - DNA, 35 bp, Candida albicans
caaattaagttccattctttatacaattcaatagc

SEQ ID NO: 4550 - DNA, 23 bp, Candida albicans
tgctggtcaagctcttcctcttt

SEQ ID NO: 4551 - DNA, 28 bp, Candida albicans
aacctttgtttcatatttccaccttttt

SEQ ID NO: 4552 - DNA, 26 bp, Candida albicans
gcgctctttttagcaattgatattcc

SEQ ID NO: 4553 - DNA, 20 bp, Candida albicans
gttggccctcgtgttcttcg

SEQ ID NO: 4554 - DNA, 26 bp, Candida albicans
tgaatccaaaatcaaatggaaagagg

SEQ ID NO: 4555 - DNA, 23 bp, Candida albicans
tcagtagctgacaaaaccgctga

SEQ ID NO: 4556 - DNA, 27 bp, Candida albicans
caattgtattcctgtggtatcattgct

SEQ ID NO: 4557 - DNA, 21 bp, Candida albicans
tgtgtaagggggcacagttcg

SEQ ID NO: 4558 - DNA, 24 bp, Candida albicans
ggtttagaagttgctggtgggttt

SEQ ID NO: 4559 - DNA, 24 bp, Candida albicans
gaatcgtttgtagggctgactcaa

SEQ ID NO: 4560 - DNA, 24 bp, Candida albicans
tttcttcttgcccacattgtttca

SEQ ID NO: 4561 - DNA, 21 bp, Candida albicans
cacgttcgagagatgggatgg

SEQ ID NO: 4562 - DNA, 23 bp, Candida albicans
ggcttggtactctggatgggcta

SEQ ID NO: 4563 - DNA, 21 bp, Candida albicans
gggctgaaagaattccgatgc

SEQ ID NO: 4564 - DNA, 27 bp, Candida albicans
tcaacacacctgcatacaatatgaaaa

SEQ ID NO: 4565 - DNA, 28 bp, Candida albicans
catcaaatactgctaatgcaaatgatga

SEQ ID NO: 4566 - DNA, 21 bp, Candida albicans
ccaacgagtccggttacacct

SEQ ID NO: 4567 - DNA, 21 bp, Candida albicans
ccataccacacacctggagca

SEQ ID NO: 4568 - DNA, 20 bp, Candida albicans
tcagtttggccaccccactt

SEQ ID NO: 4569 - DNA, 26 bp, Candida albicans
gctttgtcatcgtaagtggcaattct

SEQ ID NO: 4570 - DNA, 28 bp, Candida albicans
cattcatctgtcaatatcaatcaatcca

SEQ ID NO: 4571 - DNA, 20 bp, Candida albicans
ttaaaactccgcggggcaag

SEQ ID NO: 4572 - DNA, 23 bp, Candida albicans
tcgctttgtttcagatggggtta

SEQ ID NO: 4573 - DNA, 22 bp, Candida albicans
tggattgacagttggtgggttg

SEQ ID NO: 4574 - DNA, 20 bp, Candida albicans
cggcaaaaagtgtggtctgc

SEQ ID NO: 4575 - DNA, 20 bp, Candida albicans
cccgcctcattatccccatt

SEQ ID NO: 4576 - DNA, 27 bp, Candida albicans
ggaatcaccgtatattttcagtcgttg

SEQ ID NO: 4577 - DNA, 25 bp, Candida albicans
tggaattgacgcgtgaaattttatt

SEQ ID NO: 4578 - DNA, 29 bp, Candida albicans
ccatctaaaacgaataaggaaagttgatg

SEQ ID NO: 4579 - DNA, 22 bp, Candida albicans
cgtgaaaacgcgtccttacaaa

SEQ ID NO: 4580 - DNA, 27 bp, Candida albicans
gcacaacaagaatatctctcagtgcaa

SEQ ID NO: 4581 - DNA, 29 bp, Candida albicans
gaggttgctgaaataatacactgaatctg

SEQ ID NO: 4582 - DNA, 25 bp, Candida albicans
cccaatcccataaaactcattgtca

SEQ ID NO: 4583 - DNA, 33 bp, Candida albicans
tgatgatgaatatgatgaagattattatgagga

SEQ ID NO: 4584 - DNA, 21 bp, Candida albicans
ttaggtgcacaatcggccact

SEQ ID NO: 4585 - DNA, 22 bp, Candida albicans
tgtttttcctttgagccgcttt

SEQ ID NO: 4586 - DNA, 25 bp, Candida albicans
cctccaattatcaatgtggttctgg

SEQ ID NO: 4587 - DNA, 24 bp, Candida albicans
cgacatttgttgttcaagccaaaa

SEQ ID NO: 4588 - DNA, 20 bp, Candida albicans
tccgcctttctgtcgttttg

SEQ ID NO: 4589 - DNA, 20 bp, Candida albicans
acacgcgtcgactccaacac

SEQ ID NO: 4590 - DNA, 23 bp, Candida albicans
tccctgcaattgttgtcaaagtg

SEQ ID NO: 4591 - DNA, 20 bp, Candida albicans
cgggcttcaagggaaaaggt

SEQ ID NO: 4592 - DNA, 27 bp, Candida albicans
tgagaattgaagatgaaccaactcaaa

SEQ ID NO: 4593 - DNA, 23 bp, Candida albicans
cctggttggtttgtttcctctcc

SEQ ID NO: 4594 - DNA, 22 bp, Candida albicans
tgaaggttgcgcgataaagtca

SEQ ID NO: 4595 - DNA, 22 bp, Candida albicans
cgttttcaacgacaatggcaag

SEQ ID NO: 4596 - DNA, 23 bp, Candida albicans
aaaatttcaacgcactgcaatca

SEQ ID NO: 4597 - DNA, 20 bp, Candida albicans
ccctccctacccccatcaaa

SEQ ID NO: 4598 - DNA, 20 bp, Candida albicans
gtctgcgcgtgtttgtctgg

SEQ ID NO: 4599 - DNA, 22 bp, Candida albicans
tttttcaggtgtgccaggaagt

SEQ ID NO: 4600 - DNA, 31 bp, Candida albicans
tgaaaataaacaagaaacagattcaagaaga

SEQ ID NO: 4601 - DNA, 20 bp, Candida albicans
ccttcttgccaccgcttgaa

SEQ ID NO: 4602 - DNA, 26 bp, Candida albicans
tttggtccatttttcttcagattgtt

SEQ ID NO: 4603 - DNA, 20 bp, Candida albicans
cccatggcgacgacaagttt

SEQ ID NO: 4604 - DNA, 20 bp, Candida albicans
tcggtcaaacttcgcctggt

SEQ ID NO: 4605 - DNA, 25 bp, Candida albicans
catgatgatttccaagctactgctg

SEQ ID NO: 4606 - DNA, 20 bp, Candida albicans
tccccaccaccagcaagttt

SEQ ID NO: 4607 - DNA, 21 bp, Candida albicans
cccaaactcaaacccaaccag

SEQ ID NO: 4608 - DNA, 24 bp, Candida albicans
gaacgaccgaattatcagttgacg

SEQ ID NO: 4609 - DNA, 27 bp, Candida albicans
caataaaatgcactgtcaagtgatgga

SEQ ID NO: 4610 - DNA, 22 bp, Candida albicans
tcaaccacgagatcggagatca

SEQ ID NO: 4611 - DNA, 20 bp, Candida albicans
ccaactcatacgcccaacca

SEQ ID NO: 4612 - DNA, 25 bp, Candida albicans
tgtgtgcaagttatgtgcagtcttc

SEQ ID NO: 4613 - DNA, 20 bp, Candida albicans
cgaccccacaatcgacttca

SEQ ID NO: 4614 - DNA, 21 bp, Candida albicans
ccccgaaggaaacctttgttg

SEQ ID NO: 4615 - DNA, 21 bp, Candida albicans
tgacccatcgacatgactgga

SEQ ID NO: 4616 - DNA, 20 bp, Candida albicans
cccttgacgcccttgtcatc

SEQ ID NO: 4617 - DNA, 27 bp, Candida albicans
gcacgataagaatatttgtttgcttga

SEQ ID NO: 4618 - DNA, 20 bp, Candida albicans
ctggcgccttactccgcata

SEQ ID NO: 4619 - DNA, 20 bp, Candida albicans
tttgcagggtttgctgatgc

SEQ ID NO: 4620 - DNA, 25 bp, Candida albicans
ggagattcagatggaggaaaaatgc

SEQ ID NO: 4621 - DNA, 26 bp, Candida albicans
cgtcccactaatatgttgtgtgttgt

SEQ ID NO: 4622 - DNA, 25 bp, Candida albicans
aaaacaatgaagggtgtttctctgc

SEQ ID NO: 4623 - DNA, 21 bp, Candida albicans
gggggtcaaacgtagcaaaga

SEQ ID NO: 4624 - DNA, 25 bp, Candida albicans
gcaagatatcagaaaagatgccaca

SEQ ID NO: 4625 - DNA, 24 bp, Candida albicans
ggcgagcactaactaattcaacca

SEQ ID NO: 4626 - DNA, 21 bp, Candida albicans
cctgtgttgttgttggcgttc

SEQ ID NO: 4627 - DNA, 22 bp, Candida albicans
gcataatgcagcctttgctttg

SEQ ID NO: 4628 - DNA, 22 bp, Candida albicans
tgctttgctttgctttgctttg

SEQ ID NO: 4629 - DNA, 27 bp, Candida albicans
ggtaacaaaaatatattgacgcgaagc

SEQ ID NO: 4630 - DNA, 22 bp, Candida albicans
tgcacgttagagaagggcatga

SEQ ID NO: 4631 - DNA, 21 bp, Candida albicans
cccttccagacagaacgagca

SEQ ID NO: 4632 - DNA, 28 bp, Candida albicans
aatgataaaaatgttttaagcgccaaat

SEQ ID NO: 4633 - DNA, 22 bp, Candida albicans
ggatcattttcatcggcactca

SEQ ID NO: 4634 - DNA, 20 bp, Candida albicans
tttgttggtcccctcgtcgt

SEQ ID NO: 4635 - DNA, 20 bp, Candida albicans
cgcgagcttggtttggtaca

SEQ ID NO: 4636 - DNA, 26 bp, Candida albicans
tgatacaaaaacctcactgacgggta

SEQ ID NO: 4637 - DNA, 20 bp, Candida albicans
accccgtgaacgggaaaaat

SEQ ID NO: 4638 - DNA, 22 bp, Candida albicans
tggaaacctttcccatcgactc

SEQ ID NO: 4639 - DNA, 20 bp, Candida albicans
caacagaagggccgaatcgt

SEQ ID NO: 4640 - DNA, 23 bp, Candida albicans
gatgctaaccctagagcgattgg

SEQ ID NO: 4641 - DNA, 23 bp, Candida albicans
ttcaaaaaggggacacatccatt

SEQ ID NO: 4642 - DNA, 21 bp, Candida albicans
cggcaattgcacagtctttca

SEQ ID NO: 4643 - DNA, 26 bp, Candida albicans
tggatggataagtcacagttttctca

SEQ ID NO: 4644 - DNA, 20 bp, Candida albicans
tcaagtgggggacaaccaga

SEQ ID NO: 4645 - DNA, 21 bp, Candida albicans
ggcgagagcaaagtggagtga

SEQ ID NO: 4646 - DNA, 24 bp, Candida albicans
gggaaaaatttcactgtggatgga

SEQ ID NO: 4647 - DNA, 21 bp, Candida albicans
cagcattgatgcctggcagtt

SEQ ID NO: 4648 - DNA, 20 bp, Candida albicans
gggaagggtgtgttgccaaa

SEQ ID NO: 4649 - DNA, 23 bp, Candida albicans
cccgattcagcaaaaacaaaaca

SEQ ID NO: 4650 - DNA, 22 bp, Candida albicans
catggtgtatccgattggtgga

SEQ ID NO: 4651 - DNA, 20 bp, Candida albicans
tggcatggtgcagtttttgc

SEQ ID NO: 4652 - DNA, 21 bp, Candida albicans
cccagaagaatctgccgtgaa

SEQ ID NO: 4653 - DNA, 24 bp, Candida albicans
tcaacacttctgtcgtttgcttcc

SEQ ID NO: 4654 - DNA, 21 bp, Candida albicans
gcggtgtcgccactgttaatc

SEQ ID NO: 4655 - DNA, 24 bp, Candida albicans
ttgtctggttcttcttcctttcca

SEQ ID NO: 4656 - DNA, 22 bp, Candida albicans
tgcctcaagcagagtttgacca

SEQ ID NO: 4657 - DNA, 19 bp, Candida albicans
caccaccccattgcaccat

SEQ ID NO: 4658 - DNA, 23 bp, Candida albicans
tgatgatgaaagagccacacctt

SEQ ID NO: 4659 - DNA, 21 bp, Candida albicans
tcaatcacgtgacccggtttt

SEQ ID NO: 4660 - DNA, 25 bp, Candida albicans
tcgttcgcgtataaaaaggaagaca

SEQ ID NO: 4661 - DNA, 22 bp, Candida albicans
aaccttcctcttccctcccaat

SEQ ID NO: 4662 - DNA, 20 bp, Candida albicans
acgacaacctcgacgccaac

SEQ ID NO: 4663 - DNA, 23 bp, Candida albicans
ccaatggtgaaagctggtgagtt

SEQ ID NO: 4664 - DNA, 22 bp, Candida albicans
cgggttcagctgacattgtttg

SEQ ID NO: 4665 - DNA, 20 bp, Candida albicans
gttcgccaatttcgctgtca

SEQ ID NO: 4666 - DNA, 23 bp, Candida albicans
tcgtcgtattctttgcacgacaa

SEQ ID NO: 4667 - DNA, 20 bp, Candida albicans
tgctgctgctgctgttgttg

SEQ ID NO: 4668 - DNA, 22 bp, Candida albicans
cccagctccataccccagtaca

SEQ ID NO: 4669 - DNA, 22 bp, Candida albicans
tggaattttgaaacgggtgaca

SEQ ID NO: 4670 - DNA, 20 bp, Candida albicans
atccggtggtcacgcagttt

SEQ ID NO: 4671 - DNA, 20 bp, Candida albicans
ttgcaaagtcttgcgggaca

SEQ ID NO: 4672 - DNA, 24 bp, Candida albicans
ccaattcaacctgataacccgaaa

SEQ ID NO: 4673 - DNA, 25 bp, Candida albicans
cccattacattcgtttcaacaatca

SEQ ID NO: 4674 - DNA, 26 bp, Candida albicans
tcgtgtgtaatgttacgagaagcaga

SEQ ID NO: 4675 - DNA, 24 bp, Candida albicans
ttttcaactgttcaacccaacacc

SEQ ID NO: 4676 - DNA, 22 bp, Candida albicans
gccacactgttaatcccattcg

SEQ ID NO: 4677 - DNA, 20 bp, Candida albicans
agctggtgccatggctttgt

SEQ ID NO: 4678 - DNA, 25 bp, Candida albicans
tggtctcctgtcaattgaatttgct

SEQ ID NO: 4679 - DNA, 20 bp, Candida albicans
cccccgtaggacctcactcc

SEQ ID NO: 4680 - DNA, 27 bp, Candida albicans
tgtaaatgcttgtcaagaaacacatcc

SEQ ID NO: 4681 - DNA, 23 bp, Candida albicans
cacgcacatcgtacacgtacaca

SEQ ID NO: 4682 - DNA, 20 bp, Candida albicans
tttttcctccaacccgcact

SEQ ID NO: 4683 - DNA, 22 bp, Candida albicans
cgagtttttggtggcatcccta

SEQ ID NO: 4684 - DNA, 28 bp, Candida albicans
aaagaggaacacccttcagttaataagc

SEQ ID NO: 4685 - DNA, 24 bp, Candida albicans
ggtgagagcaaccacaagaagaga

SEQ ID NO: 4686 - DNA, 24 bp, Candida albicans
tcaaagaatggagatttcgcttga

SEQ ID NO: 4687 - DNA, 19 bp, Candida albicans
tttttgccacggacatgga

SEQ ID NO: 4688 - DNA, 22 bp, Candida albicans
gaggaaagaagaggcggaatca

SEQ ID NO: 4689 - DNA, 24 bp, Candida albicans
gctaattgagggtgtttcggagtt

SEQ ID NO: 4690 - DNA, 19 bp, Candida albicans
gggggagggggagaacgta

SEQ ID NO: 4691 - DNA, 28 bp, Candida albicans
caactacaacacattcacaacaggtttc

SEQ ID NO: 4692 - DNA, 20 bp, Candida albicans
gctggcgcaaacaaaaacag

SEQ ID NO: 4693 - DNA, 23 bp, Candida albicans
tcaaacgacaacttcttgcaggt

SEQ ID NO: 4694 - DNA, 27 bp, Candida albicans
tttttctctctttccttttccttttcc

SEQ ID NO: 4695 - DNA, 25 bp, Candida albicans
cacgagaaaactttcttggtgtgag

SEQ ID NO: 4696 - DNA, 25 bp, Candida albicans
tggattgtttgagctttcattacga

SEQ ID NO: 4697 - DNA, 24 bp, Candida albicans
ggacagcatcagaaactggttgaa

SEQ ID NO: 4698 - DNA, 19 bp, Candida albicans
aggccctggtgcgaatgat

SEQ ID NO: 4699 - DNA, 29 bp, Candida albicans
tccacggtaaccactttagttagaatcaa

SEQ ID NO: 4700 - DNA, 26 bp, Candida albicans
tggcttgttgaaagatttctttttga

SEQ ID NO: 4701 - DNA, 25 bp, Candida albicans
tggaaaattcagttgaagtggagga

SEQ ID NO: 4702 - DNA, 23 bp, Candida albicans
tgccgagtattacctcaacacca

SEQ ID NO: 4703 - DNA, 28 bp, Candida albicans
tcatgaagatgatgtatggggttagttt

SEQ ID NO: 4704 - DNA, 23 bp, Candida albicans
gccgcatatgctattcacattgg

SEQ ID NO: 4705 - DNA, 22 bp, Candida albicans
tttgaacatcagggaacgacca

SEQ ID NO: 4706 - DNA, 22 bp, Candida albicans
ctcccttgaaatcgtcgtaccc

SEQ ID NO: 4707 - DNA, 21 bp, Candida albicans
gggtgttggccatgttatcca

SEQ ID NO: 4708 - DNA, 20 bp, Candida albicans
agaggcggcgtcgatgataa

SEQ ID NO: 4709 - DNA, 23 bp, Candida albicans
gcattggcatagtaggcatctcc

SEQ ID NO: 4710 - DNA, 24 bp, Candida albicans
ggcaagtagacaagtaggcagtgg

SEQ ID NO: 4711 - DNA, 25 bp, Candida albicans
tcacttactcatattcacccgcaaa

SEQ ID NO: 4712 - DNA, 21 bp, Candida albicans
ttgatgtgttgggctgtttcg

SEQ ID NO: 4713 - DNA, 24 bp, Candida albicans
ttttgaaaaaggtggtgctgaaat

SEQ ID NO: 4714 - DNA, 20 bp, Candida albicans
tggcccaagtgtggagatga

SEQ ID NO: 4715 - DNA, 22 bp, Candida albicans
cccccattcatccttttatcca

SEQ ID NO: 4716 - DNA, 23 bp, Candida albicans
tggtcgcttgaaagaagcgttta

SEQ ID NO: 4717 - DNA, 24 bp, Candida albicans
accgatatgtcttgctggattgat

SEQ ID NO: 4718 - DNA, 20 bp, Candida albicans
ttgccctccttctcctgagc

SEQ ID NO: 4719 - DNA, 20 bp, Candida albicans
acgtggtgcgaaatgtcgag

SEQ ID NO: 4720 - DNA, 20 bp, Candida albicans
ggccggcagttgcacattat

SEQ ID NO: 4721 - DNA, 23 bp, Candida albicans
tgggcattttaagttttcgagca

SEQ ID NO: 4722 - DNA, 28 bp, Candida albicans
ttgttgatgttgttctaatgattctcca

SEQ ID NO: 4723 - DNA, 21 bp, Candida albicans
ccccacgccataatcactttg

SEQ ID NO: 4724 - DNA, 21 bp, Candida albicans
tgaccggtaatcccccttttg

SEQ ID NO: 4725 - DNA, 22 bp, Candida albicans
tgaaagcaaaactctccccctc

SEQ ID NO: 4726 - DNA, 22 bp, Candida albicans
gatgaaaacgtgcaatttccga

SEQ ID NO: 4727 - DNA, 24 bp, Candida albicans
aggcggtgactgaaattgtatgac

SEQ ID NO: 4728 - DNA, 20 bp, Candida albicans
aaataggggatgggatgggg

SEQ ID NO: 4729 - DNA, 23 bp, Candida albicans
cacctgatattcccaaggtcgaa

SEQ ID NO: 4730 - DNA, 20 bp, Candida albicans
tttggaccagaccttcgcgt

SEQ ID NO: 4731 - DNA, 22 bp, Candida albicans
gcaacggaattcctagccactt

SEQ ID NO: 4732 - DNA, 22 bp, Candida albicans
cggctcaacacaaatactggca

SEQ ID NO: 4733 - DNA, 20 bp, Candida albicans
cgccaacaccaacaccattc

SEQ ID NO: 4734 - DNA, 20 bp, Candida albicans
gtacggttgccaatgccgtt

SEQ ID NO: 4735 - DNA, 20 bp, Candida albicans
gggtgggtgggaaggaatgt

SEQ ID NO: 4736 - DNA, 22 bp, Candida albicans
ggcggtaaagtccgaatacacg

SEQ ID NO: 4737 - DNA, 20 bp, Candida albicans
cccaaccaacgatgaagggt

SEQ ID NO: 4738 - DNA, 24 bp, Candida albicans
tggtggtgatattggtggtagtgg

SEQ ID NO: 4739 - DNA, 20 bp, Candida albicans
tcagccttgcggtcgtgtaa

SEQ ID NO: 4740 - DNA, 20 bp, Candida albicans
tgctgttccggctggagatt

SEQ ID NO: 4741 - DNA, 24 bp, Candida albicans
aaagcctattttggccatgaatgt

SEQ ID NO: 4742 - DNA, 20 bp, Candida albicans
ggggagagcctaccatccgt

SEQ ID NO: 4743 - DNA, 20 bp, Candida albicans
gccggtgcccatactacagc

SEQ ID NO: 4744 - DNA, 20 bp, Candida albicans
gacaaaacttgggcggaggg

SEQ ID NO: 4745 - DNA, 22 bp, Candida albicans
tcagcttgttcacagccctctc

SEQ ID NO: 4746 - DNA, 20 bp, Candida albicans
acccgtgcagttcttccgag

SEQ ID NO: 4747 - DNA, 20 bp, Candida albicans
agcggtgccagctctctcat

SEQ ID NO: 4748 - DNA, 24 bp, Candida albicans
gaggaaaaatcaattgcggtagga

SEQ ID NO: 4749 - DNA, 23 bp, Candida albicans
tcctccaaaacctgaatgtggtc

SEQ ID NO: 4750 - DNA, 20 bp, Candida albicans
tcttctggtggccattgcag

SEQ ID NO: 4751 - DNA, 20 bp, Candida albicans
tagaaaccctgcaaccggga

SEQ ID NO: 4752 - DNA, 20 bp, Candida albicans
cgcacacggacacaaaggac

SEQ ID NO: 4753 - DNA, 22 bp, Candida albicans
ccaaacagtttttgtgcatcgc

SEQ ID NO: 4754 - DNA, 20 bp, Candida albicans
gaaaacgtgggtgcgaaaaa

SEQ ID NO: 4755 - DNA, 20 bp, Candida albicans
cctgccgcccttctctttct

SEQ ID NO: 4756 - DNA, 25 bp, Candida albicans
aaccccttcaagctgtagtatgtgc

SEQ ID NO: 4757 - DNA, 22 bp, Candida albicans
tgcacatagtcgtgcactgttg

SEQ ID NO: 4758 - DNA, 26 bp, Candida albicans
ttgatctaaattgttcggaaaccaaa

SEQ ID NO: 4759 - DNA, 22 bp, Candida albicans
tcgacttttacaagcgcaccaa

SEQ ID NO: 4760 - DNA, 25 bp, Candida albicans
aagccctttaattctatcccaatgc

SEQ ID NO: 4761 - DNA, 20 bp, Candida albicans
gcatggggtttgaaacatgg

SEQ ID NO: 4762 - DNA, 24 bp, Candida albicans
cgctatttcaagctaacccccttt

SEQ ID NO: 4763 - DNA, 29 bp, Candida albicans
tcatgtaagttcaaattctacaggtcgtg

SEQ ID NO: 4764 - DNA, 29 bp, Candida albicans
ggtagtggtaatggtaatggtaatggtca

SEQ ID NO: 4765 - DNA, 22 bp, Candida albicans
ccgctcctgatattgttcctcg

SEQ ID NO: 4766 - DNA, 22 bp, Candida albicans
gggctcaagaagaattggaagc

SEQ ID NO: 4767 - DNA, 23 bp, Candida albicans
tctgcttgttttcccatttggag

SEQ ID NO: 4768 - DNA, 20 bp, Candida albicans
ccaccgccaacttttcatcc

SEQ ID NO: 4769 - DNA, 20 bp, Candida albicans
gacgaaatctggcagcagca

SEQ ID NO: 4770 - DNA, 23 bp, Candida albicans
cagtttggcaattaagggctctg

SEQ ID NO: 4771 - DNA, 25 bp, Candida albicans
gcagcattcttgagtttgttgtttg

SEQ ID NO: 4772 - DNA, 20 bp, Candida albicans
accaggcgcttgttcagacc

SEQ ID NO: 4773 - DNA, 26 bp, Candida albicans
tgtcgttaataggaatcagaggcaga

SEQ ID NO: 4774 - DNA, 20 bp, Candida albicans
caggggtgggacaggtgagt

SEQ ID NO: 4775 - DNA, 20 bp, Candida albicans
tgcgttcacctgatgttggc

SEQ ID NO: 4776 - DNA, 20 bp, Candida albicans
ggaccctccttgatgccctt

SEQ ID NO: 4777 - DNA, 20 bp, Candida albicans
caacgccaacgaaccaactg

SEQ ID NO: 4778 - DNA, 20 bp, Candida albicans
atcaaatgcggtgaatgcga

SEQ ID NO: 4779 - DNA, 20 bp, Candida albicans
ccagcaccaccagacacacc

SEQ ID NO: 4780 - DNA, 23 bp, Candida albicans
tggtctttgaaatgggatcaagg

SEQ ID NO: 4781 - DNA, 20 bp, Candida albicans
acggggtcgagaacctttcc

SEQ ID NO: 4782 - DNA, 21 bp, Candida albicans
gggctttcccaagtttcaacg

SEQ ID NO: 4783 - DNA, 20 bp, Candida albicans
cgcattttcccaatcctcca

SEQ ID NO: 4784 - DNA, 25 bp, Candida albicans
ggaaccgtaagtccctctttcttct

SEQ ID NO: 4785 - DNA, 20 bp, Candida albicans
tcgcaacagcaacggaaaaa

SEQ ID NO: 4786 - DNA, 25 bp, Candida albicans
gcaataatgctcgaaacaagagctg

SEQ ID NO: 4787 - DNA, 24 bp, Candida albicans
cagaggatgcaaagctggaaagtt

SEQ ID NO: 4788 - DNA, 28 bp, Candida albicans
gaagaatgtagaagtggataacgcaagg

SEQ ID NO: 4789 - DNA, 24 bp, Candida albicans
gcagcagccgttaatgagaaaaag

SEQ ID NO: 4790 - DNA, 24 bp, Candida albicans
tgtgggttcctcactaccaatctg

SEQ ID NO: 4791 - DNA, 24 bp, Candida albicans
tcacagcagaaatctgtgaccctc

SEQ ID NO: 4792 - DNA, 24 bp, Candida albicans
ggatggtagagccaccagaactgt

SEQ ID NO: 4793 - DNA, 24 bp, Candida albicans
tccttttatggttgtagcccaaga

SEQ ID NO: 4794 - DNA, 24 bp, Candida albicans
caatcaaatcgcagtaagcagcag

SEQ ID NO: 4795 - DNA, 24 bp, Candida albicans
ttccacgctatgccaaattaaaca

SEQ ID NO: 4796 - DNA, 26 bp, Candida albicans
ggaatcaagagtagttttcagcatgg

SEQ ID NO: 4797 - DNA, 24 bp, Candida albicans
ttgcatgttcggaaacaatagtgg

SEQ ID NO: 4798 - DNA, 24 bp, Candida albicans
ttcgtccttttgttgtccctgtct

SEQ ID NO: 4799 - DNA, 24 bp, Candida albicans
gattgaggctctattggtctcgga

SEQ ID NO: 4800 - DNA, 24 bp, Candida albicans
tgggtccagaaattacaccaacaa

SEQ ID NO: 4801 - DNA, 24 bp, Candida albicans
atttgcatcgatatgcgtgaattg

SEQ ID NO: 4802 - DNA, 24 bp, Candida albicans
ggaatctccgacggaacaaaatta

SEQ ID NO: 4803 - DNA, 24 bp, Candida albicans
cgcaaaattccaaacacacatcat

SEQ ID NO: 4804 - DNA, 27 bp, Candida albicans
tgtaacatcaaattgcgacacataaca

SEQ ID NO: 4805 - DNA, 24 bp, Candida albicans
atttgcagcatttttacctccagc

SEQ ID NO: 4806 - DNA, 24 bp, Candida albicans
tggattgacgggggatttaaagta

SEQ ID NO: 4807 - DNA, 24 bp, Candida albicans
aagttgatgatgttgaaggcgaca

SEQ ID NO: 4808 - DNA, 29 bp, Candida albicans
tggaagaagctattaaaaacttgtggttc

SEQ ID NO: 4809 - DNA, 24 bp, Candida albicans
tcaagttggcaaccatcaagaaga

SEQ ID NO: 4810 - DNA, 24 bp, Candida albicans
tggtttgaaaatgatggtgactgg

SEQ ID NO: 4811 - DNA, 24 bp, Candida albicans
cgggggatattaccgttattgagc

SEQ ID NO: 4812 - DNA, 24 bp, Candida albicans
gcagctcccgataagaagaaatga

SEQ ID NO: 4813 - DNA, 24 bp, Candida albicans
accgcgtatcaaactgctttctaa

SEQ ID NO: 4814 - DNA, 24 bp, Candida albicans
tcatggccaactaccgagtctaca

SEQ ID NO: 4815 - DNA, 24 bp, Candida albicans
ttgggatcaaagattgggttgagt

SEQ ID NO: 4816 - DNA, 24 bp, Candida albicans
acggattggcatattcctgaaaaa

SEQ ID NO: 4817 - DNA, 24 bp, Candida albicans
tacgtctttcgatagtggcactgg

SEQ ID NO: 4818 - DNA, 24 bp, Candida albicans
tcttggtcaggaatagtttgggga

SEQ ID NO: 4819 - DNA, 24 bp, Candida albicans
attgtgtatgctgcacgaccttgt

SEQ ID NO: 4820 - DNA, 24 bp, Candida albicans
ggacgaagcttcagaacgactgat

SEQ ID NO: 4821 - DNA, 24 bp, Candida albicans
tgcattcatgatggtgattggttt

SEQ ID NO: 4822 - DNA, 24 bp, Candida albicans
gcttgttcaagaggtttggtgctt

SEQ ID NO: 4823 - DNA, 24 bp, Candida albicans
atgcattctgtgggtatatcgcaa

SEQ ID NO: 4824 - DNA, 24 bp, Candida albicans
ccaaacaaaggtcttttccaacga

SEQ ID NO: 4825 - DNA, 24 bp, Candida albicans
atgcttgttttatttccccggact

SEQ ID NO: 4826 - DNA, 24 bp, Candida albicans
cgtggtgataccacaatccaccta

SEQ ID NO: 4827 - DNA, 24 bp, Candida albicans
caaagcctcgtgcctaatgaaaac

SEQ ID NO: 4828 - DNA, 24 bp, Candida albicans
gccatcaatctttctgctgtctga

SEQ ID NO: 4829 - DNA, 24 bp, Candida albicans
tgacggtagggttgttacaccaga

SEQ ID NO: 4830 - DNA, 25 bp, Candida albicans
tgccaatatgtcttgactcctttca

SEQ ID NO: 4831 - DNA, 24 bp, Candida albicans
cttgttgtcacaaaacaccgcaat

SEQ ID NO: 4832 - DNA, 24 bp, Candida albicans
tgttcctttcgtatcctccttcca

SEQ ID NO: 4833 - DNA, 24 bp, Candida albicans
tgaagtcggtgacagaactgttga

SEQ ID NO: 4834 - DNA, 25 bp, Candida albicans
caatgcaacaatagcagaccaattc

SEQ ID NO: 4835 - DNA, 20 bp, Candida albicans
tgtttggcatctccccactc

SEQ ID NO: 4836 - DNA, 21 bp, Candida albicans
tgtgcaacacagcttaccgga

SEQ ID NO: 4837 - DNA, 22 bp, Candida albicans
cccatgtggttttaacttgggg

SEQ ID NO: 4838 - DNA, 20 bp, Candida albicans
gggggagtgagagtgggacg

SEQ ID NO: 4839 - DNA, 20 bp, Candida albicans
cagggggtgagaggagcaaa

SEQ ID NO: 4840 - DNA, 20 bp, Candida albicans
agggcacctcttcctcctcc

SEQ ID NO: 4841 - DNA, 20 bp, Candida albicans
aagccttggttggggagagg

SEQ ID NO: 4842 - DNA, 26 bp, Candida albicans
gagatgaaaattacggatcaacttgg

SEQ ID NO: 4843 - DNA, 20 bp, Candida albicans
tgatccgatcggcgtctgta

SEQ ID NO: 4844 - DNA, 20 bp, Candida albicans
cattgtcccctccctttccc

SEQ ID NO: 4845 - DNA, 20 bp, Candida albicans
caaactgcaactgcatccga

SEQ ID NO: 4846 - DNA, 23 bp, Candida albicans
gaaccagcagaaatcatttggga

SEQ ID NO: 4847 - DNA, 20 bp, Candida albicans
gtttttccttcggccgcttt

SEQ ID NO: 4848 - DNA, 20 bp, Candida albicans
ccaacgcatccacacacaca

SEQ ID NO: 4849 - DNA, 22 bp, Candida albicans
cacagacaagagacacagccca

SEQ ID NO: 4850 - DNA, 20 bp, Candida albicans
acctggcccatggttgagac

SEQ ID NO: 4851 - DNA, 26 bp, Candida albicans
tctttgcaatttcataaccagtcaca

SEQ ID NO: 4852 - DNA, 22 bp, Candida albicans
tccctcaagctcatgcaagaaa

SEQ ID NO: 4853 - DNA, 20 bp, Candida albicans
gggtttcagcggtttcctca

SEQ ID NO: 4854 - DNA, 23 bp, Candida albicans
tggcttctttttggttgtttcca

SEQ ID NO: 4855 - DNA, 22 bp, Candida albicans
ggtttcccgattattgtcgctt

SEQ ID NO: 4856 - DNA, 21 bp, Candida albicans
ttcacccatccacaccaaaca

SEQ ID NO: 4857 - DNA, 24 bp, Candida albicans
aaaagtggtggttccttcaacaaa

SEQ ID NO: 4858 - DNA, 20 bp, Candida albicans
gccaagagagggcgagtctg

SEQ ID NO: 4859 - DNA, 21 bp, Candida albicans
tgtgtggtttgaggtgcgttt

SEQ ID NO: 4860 - DNA, 20 bp, Candida albicans
ttgccagatttttggacgcc

SEQ ID NO: 4861 - DNA, 24 bp, Candida albicans
ccaaggttggactagaggttctgg

SEQ ID NO: 4862 - DNA, 21 bp, Candida albicans
tgtgggaactacacgaccgac

SEQ ID NO: 4863 - DNA, 21 bp, Candida albicans
tgggtaaacgtcccttcccag

SEQ ID NO: 4864 - DNA, 20 bp, Candida albicans
tgttggaacacgccatctgc

SEQ ID NO: 4865 - DNA, 23 bp, Candida albicans
tcggttgtattgagtggtgtgga

SEQ ID NO: 4866 - DNA, 24 bp, Candida albicans
ccctttttggtggaaatcttttga

SEQ ID NO: 4867 - DNA, 22 bp, Candida albicans
aaaatccgacaaacaactggca

SEQ ID NO: 4868 - DNA, 20 bp, Candida albicans
cgacgcgattgctaggttga

SEQ ID NO: 4869 - DNA, 20 bp, Candida albicans
tgctgggttctgggtgactg

SEQ ID NO: 4870 - DNA, 26 bp, Candida albicans
ccccctattgtaaaaagtacatcgcc

SEQ ID NO: 4871 - DNA, 24 bp, Candida albicans
cgctaatcaaaaacgcctgcttac

SEQ ID NO: 4872 - DNA, 24 bp, Candida albicans
ccaattgatgtacaaaatgccgaa

SEQ ID NO: 4873 - DNA, 24 bp, Candida albicans
attgggttaacttccccaaaccag

SEQ ID NO: 4874 - DNA, 24 bp, Candida albicans
gtggccaatttcgctttagttcac

SEQ ID NO: 4875 - DNA, 24 bp, Candida albicans
attttctcctggaccccaatcaat

SEQ ID NO: 4876 - DNA, 24 bp, Candida albicans
cgataacaataacgaccctcccaa

SEQ ID NO: 4877 - DNA, 24 bp, Candida albicans
agtttaacggtcagaatacgcgct

SEQ ID NO: 4878 - DNA, 24 bp, Candida albicans
aaaagtgaggcgttattgcacgat

SEQ ID NO: 4879 - DNA, 24 bp, Candida albicans
ttctgttcttagtcatcccgcaaa

SEQ ID NO: 4880 - DNA, 27 bp, Candida albicans
tgcttgcttgtagttcttatgaaagga

SEQ ID NO: 4881 - DNA, 24 bp, Candida albicans
ggaatcacctttggagatgcctta

SEQ ID NO: 4882 - DNA, 24 bp, Candida albicans
ctggcaaaggtgccagaaaaacta

SEQ ID NO: 4883 - DNA, 24 bp, Candida albicans
tcttcacttggctcatcgtttgtc

SEQ ID NO: 4884 - DNA, 25 bp, Candida albicans
tcgttgaaatccagtttgataacca

SEQ ID NO: 4885 - DNA, 24 bp, Candida albicans
ggcggatctttaagttaggggatg

SEQ ID NO: 4886 - DNA, 24 bp, Candida albicans
actactaccgtcggattggcttca

SEQ ID NO: 4887 - DNA, 24 bp, Candida albicans
gcgcaattgcacaaactttaaaca

SEQ ID NO: 4888 - DNA, 24 bp, Candida albicans
tcaattgcttagaaggcacgtcaa

SEQ ID NO: 4889 - DNA, 24 bp, Candida albicans
gccccaattcgcatcaagtattta

SEQ ID NO: 4890 - DNA, 24 bp, Candida albicans
gaggtgtatattggcgttgtgctg

SEQ ID NO: 4891 - DNA, 24 bp, Candida albicans
catcactggagctgcttgaactgt

SEQ ID NO: 4892 - DNA, 24 bp, Candida albicans
attaagttaagcacgccaccagga

SEQ ID NO: 4893 - DNA, 24 bp, Candida albicans
tcaaaaatgggacagatacgagca

SEQ ID NO: 4894 - DNA, 24 bp, Candida albicans
ttttcacgtgccaactgcaaatac

SEQ ID NO: 4895 - DNA, 24 bp, Candida albicans
ttgccgcaaattattttacgttcc

SEQ ID NO: 4896 - DNA, 24 bp, Candida albicans
agctttgagagggaaccttgactg

SEQ ID NO: 4897 - DNA, 24 bp, Candida albicans
ccattgagtttcggtccagaagat

SEQ ID NO: 4898 - DNA, 24 bp, Candida albicans
tttgcagttttcccgatattttgc

SEQ ID NO: 4899 - DNA, 24 bp, Candida albicans
gatcagtggaagattgcgagtgaa

SEQ ID NO: 4900 - DNA, 24 bp, Candida albicans
aatcgatgccacgtcttttgaaat

SEQ ID NO: 4901 - DNA, 24 bp, Candida albicans
agcacaaccgtttgcagaattaca

SEQ ID NO: 4902 - DNA, 27 bp, Candida albicans
agcaaaaagaatacgtaagaaaaggca

SEQ ID NO: 4903 - DNA, 24 bp, Candida albicans
ccaccatcaaaaagcttaccttgc

SEQ ID NO: 4904 - DNA, 24 bp, Candida albicans
atcgctttaattgaagaacgagcg

SEQ ID NO: 4905 - DNA, 24 bp, Candida albicans
gccacaaatggagattgttgagtg

SEQ ID NO: 4906 - DNA, 24 bp, Candida albicans
atttcgcggaaaaactaccacaat

SEQ ID NO: 4907 - DNA, 24 bp, Candida albicans
actaacccccatcctcctccttct

SEQ ID NO: 4908 - DNA, 24 bp, Candida albicans
cttggttccaagagatccaaaacg

SEQ ID NO: 4909 - DNA, 24 bp, Candida albicans
aatgacgatggatgggaggatatg

SEQ ID NO: 4910 - DNA, 25 bp, Candida albicans
ggaaaatgaacgaatgaacgattga

SEQ ID NO: 4911 - DNA, 24 bp, Candida albicans
tttgtatttccgaatctgccttcg

SEQ ID NO: 4912 - DNA, 24 bp, Candida albicans
cgtttccccgctcctactaaaatc

SEQ ID NO: 4913 - DNA, 24 bp, Candida albicans
ccaagttacgtgcggtgttttaca

SEQ ID NO: 4914 - DNA, 24 bp, Candida albicans
aggatgtaagccaatttctttgcc

SEQ ID NO: 4915 - DNA, 24 bp, Candida albicans
gaaagactggccacatttgctttt

SEQ ID NO: 4916 - DNA, 24 bp, Candida albicans
taggaatgccagaaaagacttcgg

SEQ ID NO: 4917 - DNA, 24 bp, Candida albicans
tgcaaaaagaaaaactccccgata

SEQ ID NO: 4918 - DNA, 24 bp, Candida albicans
ttgctggcatttaaagaataccca

SEQ ID NO: 4919 - DNA, 24 bp, Candida albicans
agaggagggtatgtgttacggcaa

SEQ ID NO: 4920 - DNA, 24 bp, Candida albicans
acatctccacctccccactaatga

SEQ ID NO: 4921 - DNA, 24 bp, Candida albicans
attaaattttggaggaggggcctt

SEQ ID NO: 4922 - DNA, 24 bp, Candida albicans
gctttatgctgtggcttcagctct

SEQ ID NO: 4923 - DNA, 24 bp, Candida albicans
actaccaccaccaaaccacaacaa

SEQ ID NO: 4924 - DNA, 24 bp, Candida albicans
aaataggcacagccaacaacaaca

SEQ ID NO: 4925 - DNA, 24 bp, Candida albicans
tccaactattctgggcaacctcat

SEQ ID NO: 4926 - DNA, 24 bp, Candida albicans
accaagcaagagaattggtggatt

SEQ ID NO: 4927 - DNA, 24 bp, Candida albicans
tgccaccaatttacgtttttccat

SEQ ID NO: 4928 - DNA, 24 bp, Candida albicans
actgttggcaaaattgatttgtcg

SEQ ID NO: 4929 - DNA, 24 bp, Candida albicans
cttctctagcgccgatctgctaag

SEQ ID NO: 4930 - DNA, 24 bp, Candida albicans
ttggacgtagacacacgacaacaa

SEQ ID NO: 4931 - DNA, 27 bp, Candida albicans
ttgggagagtgattactgtggttaaaa

SEQ ID NO: 4932 - DNA, 24 bp, Candida albicans
agttcagtttcggcaatgttccat

SEQ ID NO: 4933-5000 - skipped (68 entries)

SEQ ID NO: 5001 - DNA, 22 bp, Candida albicans
ccagatcatcatcatctacgtc

SEQ ID NO: 5002 - DNA, 22 bp, Candida albicans
tatctgttcctcgtggatcagc

SEQ ID NO: 5003 - DNA, 22 bp, Candida albicans
acagtgggttactcaaagttgc

SEQ ID NO: 5004 - DNA, 22 bp, Candida albicans
tttcttgttcatctccactacg

SEQ ID NO: 5005 - DNA, 22 bp, Candida albicans
aacttgataattcgctagtggg

SEQ ID NO: 5006 - DNA, 22 bp, Candida albicans
gtcactggctgttgataattgc

SEQ ID NO: 5007 - DNA, 22 bp, Candida albicans
tatctaatggaacgggttgacc

SEQ ID NO: 5008 - DNA, 22 bp, Candida albicans
ccacttgtatttggagttgttg

SEQ ID NO: 5009 - DNA, 22 bp, Candida albicans
ggatcactttccattccttcag

SEQ ID NO: 5010 - DNA, 22 bp, Candida albicans
ggtgttgtagttgatgttgtcg

SEQ ID NO: 5011 - DNA, 22 bp, Candida albicans
tcttgggattggtatgtactgc

SEQ ID NO: 5012 - DNA, 22 bp, Candida albicans
cgaatttggtgagagatgatgc

SEQ ID NO: 5013 - DNA, 22 bp, Candida albicans
tggtagtactttgtggaatccg

SEQ ID NO: 5014 - DNA, 22 bp, Candida albicans
gtccatgtggttggttaatagc

SEQ ID NO: 5015 - DNA, 22 bp, Candida albicans
tattggtggtggaatcaattgg

SEQ ID NO: 5016 - DNA, 22 bp, Candida albicans
ctttatgtgttggggtgcctgc

SEQ ID NO: 5017 - DNA, 22 bp, Candida albicans
ccttgtttagatcttgtttccg

SEQ ID NO: 5018 - DNA, 22 bp, Candida albicans
cccatcttcaccttcattttgc

SEQ ID NO: 5019 - DNA, 22 bp, Candida albicans
tgatcctactcgggccttatcg

SEQ ID NO: 5020 - DNA, 22 bp, Candida albicans
ttccttgttcaaatctccactg

SEQ ID NO: 5021 - DNA, 22 bp, Candida albicans
ggaacgatcagcaaataattgg

SEQ ID NO: 5022 - DNA, 22 bp, Candida albicans
tctaggtagtggcaaaggttgc

SEQ ID NO: 5023 - DNA, 22 bp, Candida albicans
tggcaacaactgacactaatcc

SEQ ID NO: 5024 - DNA, 22 bp, Candida albicans
ttgccagaaatcaattcagagg

SEQ ID NO: 5025 - DNA, 22 bp, Candida albicans
gctgggttgatgacagtgtgtc

SEQ ID NO: 5026 - DNA, 22 bp, Candida albicans
tagcttgttggtattgtttggc

SEQ ID NO: 5027 - DNA, 22 bp, Candida albicans
ggcaattgttgctggagatacc

SEQ ID NO: 5028 - DNA, 22 bp, Candida albicans
acccgtgcattgaataattagc

SEQ ID NO: 5029 - DNA, 22 bp, Candida albicans
atcgatagacggaacggaacag

SEQ ID NO: 5030 - DNA, 22 bp, Candida albicans
tgagcaacttgttggccttcag

SEQ ID NO: 5031 - DNA, 25 bp, Candida albicans
ccttttggacctaaataaaccgtca

SEQ ID NO: 5032 - DNA, 25 bp, Candida albicans
agggtccatgagtagaggttttcaa

SEQ ID NO: 5033 - DNA, 20 bp, Candida albicans
ccctgttcctgggtgattgg

SEQ ID NO: 5034 - DNA, 23 bp, Candida albicans
ggtgattcaggatgtcctccaaa

SEQ ID NO: 5035 - DNA, 20 bp, Candida albicans
tggcggaggtttatgtgcaa

SEQ ID NO: 5036 - DNA, 20 bp, Candida albicans
ggcgtgcaagacaccattca

SEQ ID NO: 5037 - DNA, 25 bp, Candida albicans
tgccaaacattgatagtctctgcat

SEQ ID NO: 5038 - DNA, 22 bp, Candida albicans
aacatacaaggcacgaggaacg

SEQ ID NO: 5039 - DNA, 20 bp, Candida albicans
ttgacgccactagccccatt

SEQ ID NO: 5040 - DNA, 20 bp, Candida albicans
ccctgggcattcattggttg

SEQ ID NO: 5041 - DNA, 20 bp, Candida albicans
tggaggctcgactcttgcac

SEQ ID NO: 5042 - DNA, 23 bp, Candida albicans
agaagtgggattattcgcattgg

SEQ ID NO: 5043 - DNA, 20 bp, Candida albicans
actcctgcggcaacaccttc

SEQ ID NO: 5044 - DNA, 23 bp, Candida albicans
ttggtggttaattggttcacctg

SEQ ID NO: 5045 - DNA, 21 bp, Candida albicans
tggttgtggttgtggttgtgg

SEQ ID NO: 5046 - DNA, 24 bp, Candida albicans
tctttggaacccttaacccaatga

SEQ ID NO: 5047 - DNA, 22 bp, Candida albicans
tcatttccgtccaacaagctca

SEQ ID NO: 5048 - DNA, 22 bp, Candida albicans
cgacccagctagtttcgtgtca

SEQ ID NO: 5049 - DNA, 20 bp, Candida albicans
gatcggtgttgctggtgctg

SEQ ID NO: 5050 - DNA, 21 bp, Candida albicans
tgactcaatagtgggccagca

SEQ ID NO: 5051 - DNA, 20 bp, Candida albicans
ccactgcagcaggaggttga

SEQ ID NO: 5052 - DNA, 23 bp, Candida albicans
ggaccatctgaatctgagcctga

SEQ ID NO: 5053 - DNA, 25 bp, Candida albicans
tgccaaactaaccataatctgctca

SEQ ID NO: 5054 - DNA, 25 bp, Candida albicans
ccactggttcatcaacaggtattgg

SEQ ID NO: 5055 - DNA, 21 bp, Candida albicans
tggcagcaatttcttgagcag

SEQ ID NO: 5056 - DNA, 21 bp, Candida albicans
tgactgtttcgccctttctgg

SEQ ID NO: 5057 - DNA, 20 bp, Candida albicans
catgccaaaacccggacatt

SEQ ID NO: 5058 - DNA, 22 bp, Candida albicans
tcgccttctatgggactctcaa

SEQ ID NO: 5059 - DNA, 23 bp, Candida albicans
catttgattgtccaacacgcact

SEQ ID NO: 5060 - DNA, 24 bp, Candida albicans
ttttgagcttctgctgtttgttca

SEQ ID NO: 5061 - DNA, 21 bp, Candida albicans
tgtgctcctcgttgtcccaat

SEQ ID NO: 5062 - DNA, 25 bp, Candida albicans
tcaaatgattccgaagtgaagaaga

SEQ ID NO: 5063 - DNA, 25 bp, Candida albicans
ctcaagtcatcggattctttcttga

SEQ ID NO: 5064 - DNA, 24 bp, Candida albicans
ccccaaccaaattctttagcttca

SEQ ID NO: 5065 - DNA, 24 bp, Candida albicans
tcgtcttttcaaatcagcaattcg

SEQ ID NO: 5066 - DNA, 20 bp, Candida albicans
ttgcctttttcggtggcaat

SEQ ID NO: 5067 - DNA, 21 bp, Candida albicans
gccattctccctgactcatcc

SEQ ID NO: 5068 - DNA, 20 bp, Candida albicans
ttcaattgttcccgggttgg

SEQ ID NO: 5069 - DNA, 21 bp, Candida albicans
tggcttttccatcagcacgtt

SEQ ID NO: 5070 - DNA, 27 bp, Candida albicans
tcgtgtgactattctttgatttggaga

SEQ ID NO: 5071 - DNA, 24 bp, Candida albicans
tgattcatcccattcattccatca

SEQ ID NO: 5072 - DNA, 21 bp, Candida albicans
cggccactaatgtgcatctgg

SEQ ID NO: 5073 - DNA, 26 bp, Candida albicans
gcttgagttatcccatcaacataccc

SEQ ID NO: 5074 - DNA, 20 bp, Candida albicans
gggtttccggaaccaaatcc

SEQ ID NO: 5075 - DNA, 21 bp, Candida albicans
gccaatcagctctttcgtgga

SEQ ID NO: 5076 - DNA, 23 bp, Candida albicans
ggattgtgtaattcgggcacttg

SEQ ID NO: 5077 - DNA, 22 bp, Candida albicans
tgttcatctcgctatcggcaat

SEQ ID NO: 5078 - DNA, 21 bp, Candida albicans
tgcaactcgggtgagtttgag

SEQ ID NO: 5079 - DNA, 20 bp, Candida albicans
ggactgatgccggctcgtta

SEQ ID NO: 5080 - DNA, 24 bp, Candida albicans
tgaaccgcttttaacgactgatga

SEQ ID NO: 5081 - DNA, 23 bp, Candida albicans
tgaggctagttgctttcggtacg

SEQ ID NO: 5082 - DNA, 20 bp, Candida albicans
gtgggtcaccccatttccaa

SEQ ID NO: 5083 - DNA, 22 bp, Candida albicans
ggaagcctctgaacggatttca

SEQ ID NO: 5084 - DNA, 20 bp, Candida albicans
tctggggccacaccaacttt

SEQ ID NO: 5085 - DNA, 24 bp, Candida albicans
cacaagcaattcactcaacccatt

SEQ ID NO: 5086 - DNA, 20 bp, Candida albicans
tccaacatggcaccacatcc

SEQ ID NO: 5087 - DNA, 22 bp, Candida albicans
cgacaatccctttagccttggt

SEQ ID NO: 5088 - DNA, 20 bp, Candida albicans
ccccgatcttcgattttcca

SEQ ID NO: 5089 - DNA, 24 bp, Candida albicans
ttctgaacctgaacctgaacctga

SEQ ID NO: 5090 - DNA, 21 bp, Candida albicans
cgaccaaatccaagtccgatg

SEQ ID NO: 5091 - DNA, 25 bp, Candida albicans
gactaattccgacaagtagggacga

SEQ ID NO: 5092 - DNA, 20 bp, Candida albicans
ttccctgctcccacatctcc

SEQ ID NO: 5093 - DNA, 19 bp, Candida albicans
gcccaatgggtagcccaaa

SEQ ID NO: 5094 - DNA, 21 bp, Candida albicans
cgcttctgtctgtgggaggtg

SEQ ID NO: 5095 - DNA, 26 bp, Candida albicans
tgattaaactacggaataacgccaaa

SEQ ID NO: 5096 - DNA, 23 bp, Candida albicans
cactgtcgccattcatatcacca

SEQ ID NO: 5097 - DNA, 27 bp, Candida albicans
tctgattctttctccagacctttttca

SEQ ID NO: 5098 - DNA, 25 bp, Candida albicans
cctgctctagctaacatgtcgtcgt

SEQ ID NO: 5099 - DNA, 20 bp, Candida albicans
gttgaggtgtttggcgatgg

SEQ ID NO: 5100 - DNA, 24 bp, Candida albicans
tgctttccatcttttggttttgtc

SEQ ID NO: 5101 - DNA, 26 bp, Candida albicans
aaactcggttgtagagttagcatcca

SEQ ID NO: 5102 - DNA, 24 bp, Candida albicans
ttgtcgtcatcaataccaatcacc

SEQ ID NO: 5103 - DNA, 21 bp, Candida albicans
ctcactcaaccgcgactgaaa

SEQ ID NO: 5104 - DNA, 26 bp, Candida albicans
attggaccattaaaaacaaacattgg

SEQ ID NO: 5105 - DNA, 23 bp, Candida albicans
cctgaacaagcaagacaatcagc

SEQ ID NO: 5106 - DNA, 22 bp, Candida albicans
ggatcattggctgtggttgatg

SEQ ID NO: 5107 - DNA, 24 bp, Candida albicans
tgtcatctgtcttcttccgtgtca

SEQ ID NO: 5108 - DNA, 22 bp, Candida albicans
tgcaaatgcccctataccagtg

SEQ ID NO: 5109 - DNA, 26 bp, Candida albicans
ttagttgctgtgatgatgattttgct

SEQ ID NO: 5110 - DNA, 22 bp, Candida albicans
gcttgcagtctttgggataccg

SEQ ID NO: 5111 - DNA, 21 bp, Candida albicans
tttcgtgtggctttttcgtga

SEQ ID NO: 5112 - DNA, 26 bp, Candida albicans
tcttctggcttagttggtggtaatga

SEQ ID NO: 5113 - DNA, 22 bp, Candida albicans
ccatttttggttggattgtcgt

SEQ ID NO: 5114 - DNA, 24 bp, Candida albicans
cactggcattagatgcaatcttgg

SEQ ID NO: 5115 - DNA, 23 bp, Candida albicans
cgtcatctccttcaacttcagca

SEQ ID NO: 5116 - DNA, 20 bp, Candida albicans
caacggggaatcgtttgcat

SEQ ID NO: 5117 - DNA, 26 bp, Candida albicans
tgatgatgatgatgttgttgttgttg

SEQ ID NO: 5118 - DNA, 22 bp, Candida albicans
ggactccgactttttgggaatc

SEQ ID NO: 5119 - DNA, 20 bp, Candida albicans
tttgggggaattgggcatta

SEQ ID NO: 5120 - DNA, 23 bp, Candida albicans
cctgccaaaactcctcttttcaa

SEQ ID NO: 5121 - DNA, 24 bp, Candida albicans
tcattgttggtggtgaggtgtaga

SEQ ID NO: 5122 - DNA, 23 bp, Candida albicans
cgaatcttcatttgaaggcaacg

SEQ ID NO: 5123 - DNA, 21 bp, Candida albicans
tgttccttcaggcgcactagg

SEQ ID NO: 5124 - DNA, 28 bp, Candida albicans
agttttaatacattgtcgggttgaaatg

SEQ ID NO: 5125 - DNA, 22 bp, Candida albicans
tcttggtggtgattttccttgg

SEQ ID NO: 5126 - DNA, 22 bp, Candida albicans
tgggactaattgtgcagcatcg

SEQ ID NO: 5127 - DNA, 26 bp, Candida albicans
tctcaatggcggtagttaattgtttg

SEQ ID NO: 5128 - DNA, 21 bp, Candida albicans
ggaatgctttgccaaatcgaa

SEQ ID NO: 5129 - DNA, 22 bp, Candida albicans
gcttccaggaaaactgctttgg

SEQ ID NO: 5130 - DNA, 20 bp, Candida albicans
ttggaaaccacggcacttga

SEQ ID NO: 5131 - DNA, 24 bp, Candida albicans
tggctgttttgtattgccaatttc

SEQ ID NO: 5132 - DNA, 21 bp, Candida albicans
tgccaattcttcatcgccatc

SEQ ID NO: 5133 - DNA, 21 bp, Candida albicans
tgccatggggatttgattcat

SEQ ID NO: 5134 - DNA, 22 bp, Candida albicans
ttgggaaccacaaagactgtgc

SEQ ID NO: 5135 - DNA, 28 bp, Candida albicans
ggctgctatagaaataggacctgaattg

SEQ ID NO: 5136 - DNA, 25 bp, Candida albicans
tcggaatcaagatcagactctttgg

SEQ ID NO: 5137 - DNA, 21 bp, Candida albicans
ccatttgggaaacctgggaaa

SEQ ID NO: 5138 - DNA, 20 bp, Candida albicans
acttgctgcacctccccaat

SEQ ID NO: 5139 - DNA, 24 bp, Candida albicans
gccgatttgatatttttggtaggg

SEQ ID NO: 5140 - DNA, 25 bp, Candida albicans
gctgcatttgtaggcaaatttttca

SEQ ID NO: 5141 - DNA, 20 bp, Candida albicans
gccaccacggcccctactat

SEQ ID NO: 5142 - DNA, 20 bp, Candida albicans
tggttccatgccagggattt

SEQ ID NO: 5143 - DNA, 22 bp, Candida albicans
cgactgttcttcttggggtcgt

SEQ ID NO: 5144 - DNA, 24 bp, Candida albicans
tgacagcatgtttaactggcacaa

SEQ ID NO: 5145 - DNA, 22 bp, Candida albicans
ccgggtaatgtcaattcgtgtg

SEQ ID NO: 5146 - DNA, 20 bp, Candida albicans
tctggatgcaaccacactgg

SEQ ID NO: 5147 - DNA, 20 bp, Candida albicans
gaccagctgagcttgggtca

SEQ ID NO: 5148 - DNA, 23 bp, Candida albicans
tggtagagccctttgtgcatctt

SEQ ID NO: 5149 - DNA, 22 bp, Candida albicans
cccccaataaaagtgacccaga

SEQ ID NO: 5150 - DNA, 25 bp, Candida albicans
caatgcaaataatttctggtctgga

SEQ ID NO: 5151 - DNA, 22 bp, Candida albicans
tcgggttactgaatccgtcgtt

SEQ ID NO: 5152 - DNA, 23 bp, Candida albicans
ttgaatctgatgggatccatgct

SEQ ID NO: 5153 - DNA, 24 bp, Candida albicans
tgttttgaaattcgacccattcat

SEQ ID NO: 5154 - DNA, 21 bp, Candida albicans
ttcttctcctcgcggtaatgc

SEQ ID NO: 5155 - DNA, 24 bp, Candida albicans
ccatcatcaccatcacaatcatca

SEQ ID NO: 5156 - DNA, 22 bp, Candida albicans
ttcgttttcagaaccaccgtca

SEQ ID NO: 5157 - DNA, 22 bp, Candida albicans
tgctaccagcaagcccaataca

SEQ ID NO: 5158 - DNA, 21 bp, Candida albicans
ttggcctgttgttgttgttgc

SEQ ID NO: 5159 - DNA, 25 bp, Candida albicans
tgaagttttggcaactaaaggacga

SEQ ID NO: 5160 - DNA, 20 bp, Candida albicans
ggtgtggcctttttggtggt

SEQ ID NO: 5161 - DNA, 23 bp, Candida albicans
tggaaatggaaaattggttggaa

SEQ ID NO: 5162 - DNA, 24 bp, Candida albicans
ccttctttgaaaaatccaacacca

SEQ ID NO: 5163 - DNA, 22 bp, Candida albicans
gctgctaactcgtttcggttca

SEQ ID NO: 5164 - DNA, 21 bp, Candida albicans
cagtacctggcggaatggttg

SEQ ID NO: 5165 - DNA, 23 bp, Candida albicans
ttcaacatggcaactttttgacc

SEQ ID NO: 5166 - DNA, 21 bp, Candida albicans
ccctttccacatcaccgtttc

SEQ ID NO: 5167 - DNA, 20 bp, Candida albicans
attgcttccgcatcggtgat

SEQ ID NO: 5168 - DNA, 20 bp, Candida albicans
cggttttgaccaggccaatg

SEQ ID NO: 5169 - DNA, 24 bp, Candida albicans
tccaactttttctctgcttcttgc

SEQ ID NO: 5170 - DNA, 23 bp, Candida albicans
ccattcagaatcccccataatga

SEQ ID NO: 5171 - DNA, 20 bp, Candida albicans
aatcccccaattcccaaacc

SEQ ID NO: 5172 - DNA, 23 bp, Candida albicans
cgctgttttcttgaattgctcca

SEQ ID NO: 5173 - DNA, 26 bp, Candida albicans
ttcaattatgtttggatgtggtttca

SEQ ID NO: 5174 - DNA, 20 bp, Candida albicans
ttggcagaagactcggggta

SEQ ID NO: 5175 - DNA, 20 bp, Candida albicans
gccatctggcactggttgtg

SEQ ID NO: 5176 - DNA, 21 bp, Candida albicans
ttttctccgccatctccatca

SEQ ID NO: 5177 - DNA, 20 bp, Candida albicans
ccaccgtctccattcgcttt

SEQ ID NO: 5178 - DNA, 22 bp, Candida albicans
ttgacgtttcagtcagcccttg

SEQ ID NO: 5179 - DNA, 20 bp, Candida albicans
ttgtcaccacccccagtcaa

SEQ ID NO: 5180 - DNA, 23 bp, Candida albicans
ttgctgaggcaatagcaaaatca

SEQ ID NO: 5181 - DNA, 21 bp, Candida albicans
ttccattggcatgtccgtttt

SEQ ID NO: 5182 - DNA, 21 bp, Candida albicans
ccattcgacttcttcgcatcg

SEQ ID NO: 5183 - DNA, 24 bp, Candida albicans
ggtttctcattggtagtggtgctg

SEQ ID NO: 5184 - DNA, 24 bp, Candida albicans
tcaacttcaattctggccgtatct

SEQ ID NO: 5185 - DNA, 21 bp, Candida albicans
tgaccatcgcctaattgtcca

SEQ ID NO: 5186 - DNA, 20 bp, Candida albicans
tcggttcctgctgctgactg

SEQ ID NO: 5187 - DNA, 20 bp, Candida albicans
aaacccacccaaggcaaacc

SEQ ID NO: 5188 - DNA, 20 bp, Candida albicans
cagctgagccttgtgcacct

SEQ ID NO: 5189 - DNA, 25 bp, Candida albicans
aggacccaaatctaactcctccatt

SEQ ID NO: 5190 - DNA, 19 bp, Candida albicans
tgatgatcggggcatcacc

SEQ ID NO: 5191 - DNA, 22 bp, Candida albicans
tgggtcgagtacactccatcgt

SEQ ID NO: 5192 - DNA, 22 bp, Candida albicans
ttctgaatctggttcggatgga

SEQ ID NO: 5193 - DNA, 20 bp, Candida albicans
atggacgtagcgcacattgg

SEQ ID NO: 5194 - DNA, 20 bp, Candida albicans
ccagccaaaccaccagaagc

SEQ ID NO: 5195 - DNA, 20 bp, Candida albicans
ttgtccacggttcggaattg

SEQ ID NO: 5196 - DNA, 25 bp, Candida albicans
cggtataaatggaagatgcaatgaa

SEQ ID NO: 5197 - DNA, 20 bp, Candida albicans
gcgtctgttggcgatactcc

SEQ ID NO: 5198 - DNA, 19 bp, Candida albicans
ggcaaatggtggtccgtca

SEQ ID NO: 5199 - DNA, 21 bp, Candida albicans
tggcacatttgacacccagtt

SEQ ID NO: 5200 - DNA, 20 bp, Candida albicans
ggcgaagaacccaccaatca

SEQ ID NO: 5201 - DNA, 23 bp, Candida albicans
cgaactcgatcatctttggcaat

SEQ ID NO: 5202 - DNA, 27 bp, Candida albicans
tcacctttagttaattcaccttcacca

SEQ ID NO: 5203 - DNA, 20 bp, Candida albicans
aatgggcccaacccaaagat

SEQ ID NO: 5204 - DNA, 21 bp, Candida albicans
tccatgttgttttcgccgttt

SEQ ID NO: 5205 - DNA, 22 bp, Candida albicans
tcgaggcggtaccgtattcttc

SEQ ID NO: 5206 - DNA, 22 bp, Candida albicans
gcccctagtccaactccttgag

SEQ ID NO: 5207 - DNA, 20 bp, Candida albicans
gtggtcaccagcgaacatgg

SEQ ID NO: 5208 - DNA, 20 bp, Candida albicans
ctgctggtgtcgggatgttg

SEQ ID NO: 5209 - DNA, 23 bp, Candida albicans
ccttcgtgggtttgattgatttc

SEQ ID NO: 5210 - DNA, 21 bp, Candida albicans
agcgtattcccaaaccaatgc

SEQ ID NO: 5211 - DNA, 20 bp, Candida albicans
ccgctcagccagcttttgac

SEQ ID NO: 5212 - DNA, 26 bp, Candida albicans
tgtacctcttcttgttcttgttgctg

SEQ ID NO: 5213 - DNA, 27 bp, Candida albicans
caaatttctcttgtgtcactttgatgc

SEQ ID NO: 5214 - DNA, 23 bp, Candida albicans
gtggtgaatgcttggtcatcaat

SEQ ID NO: 5215 - DNA, 21 bp, Candida albicans
cggcattcttagccattgcat

SEQ ID NO: 5216 - DNA, 20 bp, Candida albicans
aatcggacgggttccaaaca

SEQ ID NO: 5217 - DNA, 25 bp, Candida albicans
tgacctcgtaatcgacttcgacaat

SEQ ID NO: 5218 - DNA, 20 bp, Candida albicans
cccaagtgggaagccaagac

SEQ ID NO: 5219 - DNA, 27 bp, Candida albicans
tgaacattcttacgatgttggtaatcg

SEQ ID NO: 5220 - DNA, 24 bp, Candida albicans
tgtttttcagtgattccaccagga

SEQ ID NO: 5221 - DNA, 22 bp, Candida albicans
ttcaaatccatcacctggctca

SEQ ID NO: 5222 - DNA, 22 bp, Candida albicans
tccaaaatccttcttcgctcca

SEQ ID NO: 5223 - DNA, 20 bp, Candida albicans
gacggtagttgacggccaaa

SEQ ID NO: 5224 - DNA, 23 bp, Candida albicans
tgcccctgaattaccttcaaaca

SEQ ID NO: 5225 - DNA, 20 bp, Candida albicans
aagagcaaagcgccctcctt

SEQ ID NO: 5226 - DNA, 23 bp, Candida albicans
tcaggaaacttttcgcccaattt

SEQ ID NO: 5227 - DNA, 23 bp, Candida albicans
tccattgtgtttgacgacatggt

SEQ ID NO: 5228 - DNA, 20 bp, Candida albicans
cggggttgttccacgtcttg

SEQ ID NO: 5229 - DNA, 21 bp, Candida albicans
ggtaaatctgctccgcctggt

SEQ ID NO: 5230 - DNA, 24 bp, Candida albicans
tcttgatcgggttgttcagaatga

SEQ ID NO: 5231 - DNA, 25 bp, Candida albicans
tgctgacatatccaatccatctttg

SEQ ID NO: 5232 - DNA, 20 bp, Candida albicans
accggcaaagtaggcagcac

SEQ ID NO: 5233 - DNA, 27 bp, Candida albicans
tggctttagaatcatccatggaaataa

SEQ ID NO: 5234 - DNA, 24 bp, Candida albicans
tgctcgttctgaatgttgttgaga

SEQ ID NO: 5235 - DNA, 20 bp, Candida albicans
ggccctggttggcacatatc

SEQ ID NO: 5236 - DNA, 23 bp, Candida albicans
tcagtagagccagcaacaaacca

SEQ ID NO: 5237 - DNA, 20 bp, Candida albicans
gtcggcacaaacccaccttt

SEQ ID NO: 5238 - DNA, 23 bp, Candida albicans
tcatgggttctttagtggcatca

SEQ ID NO: 5239 - DNA, 22 bp, Candida albicans
ggggtgcatttctatgccactt

SEQ ID NO: 5240 - DNA, 21 bp, Candida albicans
ttgacatcaccatggggaaaa

SEQ ID NO: 5241 - DNA, 20 bp, Candida albicans
gcgaactctttgcacggaca

SEQ ID NO: 5242 - DNA, 29 bp, Candida albicans
tgatcctattggacaaccactatcaattc

SEQ ID NO: 5243 - DNA, 20 bp, Candida albicans
gcactcccggctttaccaga

SEQ ID NO: 5244 - DNA, 22 bp, Candida albicans
cccgacaaccgactgtattcgt

SEQ ID NO: 5245 - DNA, 21 bp, Candida albicans
tgttggatttggatgcagcag

SEQ ID NO: 5246 - DNA, 22 bp, Candida albicans
tggtccatttggtggttttgaa

SEQ ID NO: 5247 - DNA, 26 bp, Candida albicans
tgtggttttcttcctttcttgggtta

SEQ ID NO: 5248 - DNA, 21 bp, Candida albicans
ggctagcaactcacgggattc

SEQ ID NO: 5249 - DNA, 20 bp, Candida albicans
tcaaatcccgaacgtgcaaa

SEQ ID NO: 5250 - DNA, 20 bp, Candida albicans
cacgatttgccgtcgtttga

SEQ ID NO: 5251 - DNA, 25 bp, Candida albicans
ttgatcagtagtttgggttgggact

SEQ ID NO: 5252 - DNA, 26 bp, Candida albicans
tgcccaattcttctagtaatggtggt

SEQ ID NO: 5253 - DNA, 22 bp, Candida albicans
tggacccaagatttcgtccact

SEQ ID NO: 5254 - DNA, 22 bp, Candida albicans
gcttcctcattggctccttcaa

SEQ ID NO: 5255 - DNA, 20 bp, Candida albicans
ggccccatgaactagcatcc

SEQ ID NO: 5256 - DNA, 20 bp, Candida albicans
ttccgctgccattcttggat

SEQ ID NO: 5257 - DNA, 24 bp, Candida albicans
tggtccatcttggaacttcaacaa

SEQ ID NO: 5258 - DNA, 26 bp, Candida albicans
tctaatgccttagtcacatcactcca

SEQ ID NO: 5259 - DNA, 23 bp, Candida albicans
tggacacgttccatcatacgaaa

SEQ ID NO: 5260 - DNA, 20 bp, Candida albicans
gttttgccgttgtggtggtg

SEQ ID NO: 5261 - DNA, 22 bp, Candida albicans
ccatccctttaggtcccaagga

SEQ ID NO: 5262 - DNA, 25 bp, Candida albicans
tgggtttgtactttatcacccaagg

SEQ ID NO: 5263 - DNA, 22 bp, Candida albicans
tgtttggctttggaagcctttt

SEQ ID NO: 5264 - DNA, 20 bp, Candida albicans
tgtcatcgccggttgatttg

SEQ ID NO: 5265 - DNA, 26 bp, Candida albicans
tcctgggtttcttgtaattgttcttg

SEQ ID NO: 5266 - DNA, 24 bp, Candida albicans
cccattctttatattcggcgatga

SEQ ID NO: 5267 - DNA, 21 bp, Candida albicans
gctggagtggcagcagcttta

SEQ ID NO: 5268 - DNA, 21 bp, Candida albicans
tcccaggtaccttctccacca

SEQ ID NO: 5269 - DNA, 20 bp, Candida albicans
ttggtggcgaaaagggaaag

SEQ ID NO: 5270 - DNA, 20 bp, Candida albicans
acggcatagccgacaacacc

SEQ ID NO: 5271 - DNA, 26 bp, Candida albicans
tcctttccaaattttcttcaaatcca

SEQ ID NO: 5272 - DNA, 23 bp, Candida albicans
tcccagttttcacaacaggacaa

SEQ ID NO: 5273 - DNA, 20 bp, Candida albicans
ttggggttgttggtcgtcct

SEQ ID NO: 5274 - DNA, 20 bp, Candida albicans
ttgagcggcatttggattgt

SEQ ID NO: 5275 - DNA, 20 bp, Candida albicans
gacagggacatcgggcaaat

SEQ ID NO: 5276 - DNA, 21 bp, Candida albicans
gggaacttcatccccaaatgc

SEQ ID NO: 5277 - DNA, 22 bp, Candida albicans
tccaatccaactggccctaatg

SEQ ID NO: 5278 - DNA, 23 bp, Candida albicans
tctggaaggcatgacaaatctga

SEQ ID NO: 5279 - DNA, 24 bp, Candida albicans
tggtcatgattccttcaaatggac

SEQ ID NO: 5280 - DNA, 22 bp, Candida albicans
ggcccagttatttgaatgacga

SEQ ID NO: 5281 - DNA, 20 bp, Candida albicans
cgggtcaccaaatgggaaaa

SEQ ID NO: 5282 - DNA, 20 bp, Candida albicans
cttatggcggctctcggaat

SEQ ID NO: 5283 - DNA, 20 bp, Candida albicans
ggcactggcaatggtgaatg

SEQ ID NO: 5284 - DNA, 20 bp, Candida albicans
tgtgccctcaccaattcacg

SEQ ID NO: 5285 - DNA, 24 bp, Candida albicans
tggaattattcttcccttgccaac

SEQ ID NO: 5286 - DNA, 20 bp, Candida albicans
tctggtcctggtggcgagtt

SEQ ID NO: 5287 - DNA, 22 bp, Candida albicans
tggtcttggttttctggtggtg

SEQ ID NO: 5288 - DNA, 23 bp, Candida albicans
ccaacacgttcgctatgtttcaa

SEQ ID NO: 5289 - DNA, 22 bp, Candida albicans
ttcaattggctcggtatcagca

SEQ ID NO: 5290 - DNA, 21 bp, Candida albicans
ggccttggaaggaactgaagg

SEQ ID NO: 5291 - DNA, 22 bp, Candida albicans
tggctggaatacctggatcctt

SEQ ID NO: 5292 - DNA, 21 bp, Candida albicans
ccgtatcacccagcttcacca

SEQ ID NO: 5293 - DNA, 23 bp, Candida albicans
cactgaatccccattcttgacca

SEQ ID NO: 5294 - DNA, 22 bp, Candida albicans
ttccaaggattccaaaacacca

SEQ ID NO: 5295 - DNA, 22 bp, Candida albicans
ccaaatttgccaatgttgatgg

SEQ ID NO: 5296 - DNA, 20 bp, Candida albicans
cggcaaatggatctggttga

SEQ ID NO: 5297 - DNA, 24 bp, Candida albicans
tcgacaatcaagattcaccgtagc

SEQ ID NO: 5298 - DNA, 20 bp, Candida albicans
cagccgggaaatgggttttt

SEQ ID NO: 5299 - DNA, 23 bp, Candida albicans
gggatagtcgatgcttgaactgg

SEQ ID NO: 5300 - DNA, 22 bp, Candida albicans
cagcagtatcccaaacctgcaa

SEQ ID NO: 5301 - DNA, 20 bp, Candida albicans
catccccgtggctaccacta

SEQ ID NO: 5302 - DNA, 20 bp, Candida albicans
gggtggcaccagctttgaga

SEQ ID NO: 5303 - DNA, 20 bp, Candida albicans
gccgtccaactcgatggttc

SEQ ID NO: 5304 - DNA, 26 bp, Candida albicans
gctgtcaaaccattttcactaaagca

SEQ ID NO: 5305 - DNA, 20 bp, Candida albicans
acgcccgtgcttcaacattt

SEQ ID NO: 5306 - DNA, 20 bp, Candida albicans
tcaatgacttgcggcgtctg

SEQ ID NO: 5307 - DNA, 20 bp, Candida albicans
ggtctgcggccattatcacc

SEQ ID NO: 5308 - DNA, 24 bp, Candida albicans
tctcaaaaccggaatagttgttgg

SEQ ID NO: 5309 - DNA, 24 bp, Candida albicans
ggaaagttggttcctgctctacca

SEQ ID NO: 5310 - DNA, 20 bp, Candida albicans
gccaaatcggaagactgacg

SEQ ID NO: 5311 - DNA, 23 bp, Candida albicans
ttggtgttattggtggtggaaga

SEQ ID NO: 5312 - DNA, 20 bp, Candida albicans
tttggcgtttgcttttgctg

SEQ ID NO: 5313 - DNA, 22 bp, Candida albicans
ggctctcccaatggatgttttg

SEQ ID NO: 5314 - DNA, 20 bp, Candida albicans
ggatgcaccgctgttaatgg

SEQ ID NO: 5315 - DNA, 21 bp, Candida albicans
tcccattcttcaacaggcaca

SEQ ID NO: 5316 - DNA, 21 bp, Candida albicans
tctggccaattcctctgcatt

SEQ ID NO: 5317 - DNA, 20 bp, Candida albicans
cgggtttttgggagcttggt

SEQ ID NO: 5318 - DNA, 20 bp, Candida albicans
gccaccgtaagcgaaagcaa

SEQ ID NO: 5319 - DNA, 21 bp, Candida albicans
gcactggtgggatcctgttca

SEQ ID NO: 5320 - DNA, 20 bp, Candida albicans
ccatgcatcggtgaagctga

SEQ ID NO: 5321 - DNA, 23 bp, Candida albicans
aaccaactcttgggtcagtttgc

SEQ ID NO: 5322 - DNA, 21 bp, Candida albicans
tgatccagtggcaaccattcc

SEQ ID NO: 5323 - DNA, 21 bp, Candida albicans
tgctcggaaattgaaccaagg

SEQ ID NO: 5324 - DNA, 20 bp, Candida albicans
cccgcacctgttcttcagtg

SEQ ID NO: 5325 - DNA, 26 bp, Candida albicans
tcacctacatatgatccaggttcttg

SEQ ID NO: 5326 - DNA, 20 bp, Candida albicans
agctccaccaactggcaagg

SEQ ID NO: 5327 - DNA, 20 bp, Candida albicans
gacccagtcccccaaacaaa

SEQ ID NO: 5328 - DNA, 22 bp, Candida albicans
tgccttcgtttcgaatgtctca

SEQ ID NO: 5329 - DNA, 22 bp, Candida albicans
tgcttgctcagcagtagtctgg

SEQ ID NO: 5330 - DNA, 26 bp, Candida albicans
tttgcatcaatgtctcttctaaatgc

SEQ ID NO: 5331 - DNA, 20 bp, Candida albicans
ggctcgtcttggggatacga

SEQ ID NO: 5332 - DNA, 29 bp, Candida albicans
aaaccatggtaaacatctaccaaaataca

SEQ ID NO: 5333 - DNA, 20 bp, Candida albicans
tggatgtggaggtggtggtg

SEQ ID NO: 5334 - DNA, 23 bp, Candida albicans
ggcaaatgtcttgtgctgtctga

SEQ ID NO: 5335 - DNA, 22 bp, Candida albicans
ccaatttgatcattggcacgaa

SEQ ID NO: 5336 - DNA, 20 bp, Candida albicans
tcttgcccccttttcagcaa

SEQ ID NO: 5337 - DNA, 27 bp, Candida albicans
ctttgattgagcattatttgaattgga

SEQ ID NO: 5338 - DNA, 20 bp, Candida albicans
tggctgcacctgatgacgat

SEQ ID NO: 5339 - DNA, 20 bp, Candida albicans
cccactcatggcacaaccaa

SEQ ID NO: 5340 - DNA, 23 bp, Candida albicans
ccttggttggcattctaactgga

SEQ ID NO: 5341 - DNA, 24 bp, Candida albicans
tcaccaacttgaacattggtttca

SEQ ID NO: 5342 - DNA, 23 bp, Candida albicans
acaatgcaaaagctggagtagca

SEQ ID NO: 5343 - DNA, 23 bp, Candida albicans
tgttttggcagtctttggtttga

SEQ ID NO: 5344 - DNA, 20 bp, Candida albicans
gttgcagtgatgccggtgtt

SEQ ID NO: 5345 - DNA, 21 bp, Candida albicans
tgctggtggcagtagttgtgg

SEQ ID NO: 5346 - DNA, 22 bp, Candida albicans
tgtttccctaccaagagcgtca

SEQ ID NO: 5347 - DNA, 23 bp, Candida albicans
tgggtgagcagatttggtgattt

SEQ ID NO: 5348 - DNA, 23 bp, Candida albicans
cgagtttggtatcgtttccttgc

SEQ ID NO: 5349 - DNA, 24 bp, Candida albicans
gcttcaggtgattcatcagggttt

SEQ ID NO: 5350 - DNA, 20 bp, Candida albicans
cgaaaacgacgcagcacact

SEQ ID NO: 5351 - DNA, 24 bp, Candida albicans
tgaccttgatcttgtttccaatcg

SEQ ID NO: 5352 - DNA, 20 bp, Candida albicans
gttgttgcttaccggcacca

SEQ ID NO: 5353 - DNA, 20 bp, Candida albicans
cgtcaccggctgttgtttgt

SEQ ID NO: 5354 - DNA, 20 bp, Candida albicans
ggcccttcaaaattgctgga

SEQ ID NO: 5355 - DNA, 27 bp, Candida albicans
tggatgtaatggttgtctaaatccaaa

SEQ ID NO: 5356 - DNA, 21 bp, Candida albicans
tccaacaccgcctttaccaga

SEQ ID NO: 5357 - DNA, 20 bp, Candida albicans
agtttgccacagccaagtcg

SEQ ID NO: 5358 - DNA, 22 bp, Candida albicans
tggcaatttcagcccataactg

SEQ ID NO: 5359 - DNA, 22 bp, Candida albicans
tgaattctggttgagggtccaa

SEQ ID NO: 5360 - DNA, 24 bp, Candida albicans
gcaccaataaatgcagacatacgg

SEQ ID NO: 5361 - DNA, 19 bp, Candida albicans
cgactcggacggcttgcta

SEQ ID NO: 5362 - DNA, 21 bp, Candida albicans
tgggggaatgagaattggcta

SEQ ID NO: 5363 - DNA, 21 bp, Candida albicans
tctgctgctgatccagaacga

SEQ ID NO: 5364 - DNA, 19 bp, Candida albicans
cggctttggctgcagtgat

SEQ ID NO: 5365 - DNA, 24 bp, Candida albicans
cgtttcttcgtagagcgagtttga

SEQ ID NO: 5366 - DNA, 23 bp, Candida albicans
tcgatttcccagatccattacga

SEQ ID NO: 5367 - DNA, 24 bp, Candida albicans
actttagggaaatcatcaccagca

SEQ ID NO: 5368 - DNA, 20 bp, Candida albicans
agcagaagccttggcagctt

SEQ ID NO: 5369 - DNA, 23 bp, Candida albicans
tttgacctcgtccttgagatgaa

SEQ ID NO: 5370 - DNA, 21 bp, Candida albicans
ccatgccatacacaaccacca

SEQ ID NO: 5371 - DNA, 24 bp, Candida albicans
cattcaatggcttcttgaggcata

SEQ ID NO: 5372 - DNA, 25 bp, Candida albicans
tggatttggttggtgttttagttgg

SEQ ID NO: 5373 - DNA, 21 bp, Candida albicans
ggcatatttcctgctgcttgg

SEQ ID NO: 5374 - DNA, 20 bp, Candida albicans
ggtgggtcccaagacgactc

SEQ ID NO: 5375 - DNA, 20 bp, Candida albicans
ctggggcccaatgatgtctt

SEQ ID NO: 5376 - DNA, 21 bp, Candida albicans
ttgcaattgctgttgggaaaa

SEQ ID NO: 5377 - DNA, 23 bp, Candida albicans
ggtggcgttttcttagaatgcaa

SEQ ID NO: 5378 - DNA, 23 bp, Candida albicans
tccaatgggatggtagtggctaa

SEQ ID NO: 5379 - DNA, 24 bp, Candida albicans
tcaggaaaagtccaactggtctca

SEQ ID NO: 5380 - DNA, 24 bp, Candida albicans
ttcgttaatgcccaattcagtgat

SEQ ID NO: 5381 - DNA, 23 bp, Candida albicans
cagagtgacgaaggacagcatca

SEQ ID NO: 5382 - DNA, 24 bp, Candida albicans
tccccacgatattttcatttttca

SEQ ID NO: 5383 - DNA, 25 bp, Candida albicans
tcaacagcaatacctgctgaatcat

SEQ ID NO: 5384 - DNA, 22 bp, Candida albicans
tgatccaccatctcctggtttc

SEQ ID NO: 5385 - DNA, 21 bp, Candida albicans
aatgtcaccctcggtcaatgg

SEQ ID NO: 5386 - DNA, 23 bp, Candida albicans
ggggttttcttggttggttttga

SEQ ID NO: 5387 - DNA, 20 bp, Candida albicans
tggcctccttacccaacacg

SEQ ID NO: 5388 - DNA, 20 bp, Candida albicans
gaatccaggcaatccaccaa

SEQ ID NO: 5389 - DNA, 20 bp, Candida albicans
ccgaggagaggggaaggtgt

SEQ ID NO: 5390 - DNA, 20 bp, Candida albicans
tggtggcagtcgtagctgga

SEQ ID NO: 5391 - DNA, 21 bp, Candida albicans
tgctcctccaggtgatgcact

SEQ ID NO: 5392 - DNA, 24 bp, Candida albicans
tgggtttctacgttgtttgaatgc

SEQ ID NO: 5393 - DNA, 24 bp, Candida albicans
ttccctttttcattcggactaagg

SEQ ID NO: 5394 - DNA, 20 bp, Candida albicans
tgggagtggatagggcagga

SEQ ID NO: 5395 - DNA, 20 bp, Candida albicans
gagcgaggcagtgtcgtcag

SEQ ID NO: 5396 - DNA, 25 bp, Candida albicans
ccaaattggaaacataactcgtcaa

SEQ ID NO: 5397 - DNA, 25 bp, Candida albicans
tggtgatgtggataagtttttctcg

SEQ ID NO: 5398 - DNA, 20 bp, Candida albicans
gcccctccaacaaacgaaca

SEQ ID NO: 5399 - DNA, 20 bp, Candida albicans
tgtgccccaaaattggcata

SEQ ID NO: 5400 - DNA, 22 bp, Candida albicans
ttgtctgtcgtggtgtggtgaa

SEQ ID NO: 5401 - DNA, 20 bp, Candida albicans
tcccgaagtcaaggctcgtc

SEQ ID NO: 5402 - DNA, 20 bp, Candida albicans
cccgatttgccttgcgttat

SEQ ID NO: 5403 - DNA, 22 bp, Candida albicans
tggccaatggaccgaaaaatcc

SEQ ID NO: 5404 - DNA, 20 bp, Candida albicans
tggcacagcagcagtgttga

SEQ ID NO: 5405 - DNA, 20 bp, Candida albicans
tggagcagaaccagcaggaa

SEQ ID NO: 5406 - DNA, 21 bp, Candida albicans
tgatttgttggctgaggtgga

SEQ ID NO: 5407 - DNA, 20 bp, Candida albicans
ttggcggcttcttggacttc

SEQ ID NO: 5408 - DNA, 20 bp, Candida albicans
tccgtgccgtcaagatcaaa

SEQ ID NO: 5409 - DNA, 20 bp, Candida albicans
tggcacttgtcccaccaaca

SEQ ID NO: 5410 - DNA, 22 bp, Candida albicans
cagctctaccttcaacgccaaa

SEQ ID NO: 5411 - DNA, 20 bp, Candida albicans
tgccaatgggatggcactac

SEQ ID NO: 5412 - DNA, 20 bp, Candida albicans
tgcatcccggaatccaacat

SEQ ID NO: 5413 - DNA, 23 bp, Candida albicans
tccacaagctgatgacgtttcaa

SEQ ID NO: 5414 - DNA, 20 bp, Candida albicans
tccccaaagttggtgtggaa

SEQ ID NO: 5415 - DNA, 23 bp, Candida albicans
cggggaaatgattatttgctgct

SEQ ID NO: 5416 - DNA, 20 bp, Candida albicans
tccacatcacacgctgttgg

SEQ ID NO: 5417 - DNA, 20 bp, Candida albicans
tggttggcacattgggtctg

SEQ ID NO: 5418 - DNA, 22 bp, Candida albicans
tgggaatccccaattaaaccaa

SEQ ID NO: 5419 - DNA, 22 bp, Candida albicans
tgcacttgctttccatccaaga

SEQ ID NO: 5420 - DNA, 20 bp, Candida albicans
attgtttggcgggagaaacg

SEQ ID NO: 5421 - DNA, 25 bp, Candida albicans
ggagagttcatttccttcatcgtca

SEQ ID NO: 5422 - DNA, 23 bp, Candida albicans
ccaaccaaaaatccaggtaccaa

SEQ ID NO: 5423 - DNA, 22 bp, Candida albicans
cggattgattgacagcttgacc

SEQ ID NO: 5424 - DNA, 20 bp, Candida albicans
ctttcccattggtccctgct

SEQ ID NO: 5425 - DNA, 24 bp, Candida albicans
ttgtctggttcttcttcctttcca

SEQ ID NO: 5426 - DNA, 23 bp, Candida albicans
tgcattatccttggcaactgaaa

SEQ ID NO: 5427 - DNA, 20 bp, Candida albicans
tagacagccgcatgctcacc

SEQ ID NO: 5428 - DNA, 26 bp, Candida albicans
ccatacttttgtatggcagctttcaa

SEQ ID NO: 5429 - DNA, 22 bp, Candida albicans
ttggccctgtctttggttcttc

SEQ ID NO: 5430 - DNA, 23 bp, Candida albicans
tgagcatattcttggccctcttc

SEQ ID NO: 5431 - DNA, 22 bp, Candida albicans
tggatgtccagttctggtcgag

SEQ ID NO: 5432 - DNA, 23 bp, Candida albicans
ccaacagctgcacttccttgttt

SEQ ID NO: 5433 - DNA, 24 bp, Candida albicans
tcacgaatttgttcttgcttttcg

SEQ ID NO: 5434 - DNA, 21 bp, Candida albicans
cacactccagtcaaggcatcc

SEQ ID NO: 5435 - DNA, 23 bp, Candida albicans
cagcacgatcagtttgtttgctg

SEQ ID NO: 5436 - DNA, 23 bp, Candida albicans
aagtgtcttcgtccacctcatca

SEQ ID NO: 5437 - DNA, 27 bp, Candida albicans
tgctgaagtaccatcttctgaacttcc

SEQ ID NO: 5438 - DNA, 24 bp, Candida albicans
tcaacaccagcataaccttgttca

SEQ ID NO: 5439 - DNA, 20 bp, Candida albicans
tctggaaacggcccttgttt

SEQ ID NO: 5440 - DNA, 24 bp, Candida albicans
catttggaacaccttgaactgtgg

SEQ ID NO: 5441 - DNA, 21 bp, Candida albicans
cggttggtttctttgcagcac

SEQ ID NO: 5442 - DNA, 23 bp, Candida albicans
gacattcctggaaaactgccatt

SEQ ID NO: 5443 - DNA, 20 bp, Candida albicans
ttggtgggcaagttcaacga

SEQ ID NO: 5444 - DNA, 29 bp, Candida albicans
tcaaaatcaaaatcaaatgtttagcaatg

SEQ ID NO: 5445 - DNA, 26 bp, Candida albicans
tgtggctagcaccaatcttaatctga

SEQ ID NO: 5446 - DNA, 21 bp, Candida albicans
ccgtctcttcgttcccaacaa

SEQ ID NO: 5447 - DNA, 24 bp, Candida albicans
ctgttcaatggatgctttgcatta

SEQ ID NO: 5448 - DNA, 20 bp, Candida albicans
cattggggttggggttttca

SEQ ID NO: 5449 - DNA, 21 bp, Candida albicans
cagtggcgtattgctgcaaag

SEQ ID NO: 5450 - DNA, 21 bp, Candida albicans
ttcctctttgcttggcagctc

SEQ ID NO: 5451 - DNA, 23 bp, Candida albicans
tgaagctgcagaagttgttgtgg

SEQ ID NO: 5452 - DNA, 24 bp, Candida albicans
tcttttgcagataaagccccaaac

SEQ ID NO: 5453 - DNA, 23 bp, Candida albicans
cggtcttttcatggttcaacctc

SEQ ID NO: 5454 - DNA, 26 bp, Candida albicans
ggtgagataccaatcctttttcttgg

SEQ ID NO: 5455 - DNA, 20 bp, Candida albicans
gggtgtagcaaaccccttgg

SEQ ID NO: 5456 - DNA, 22 bp, Candida albicans
tgacaattccactgcgtcatca

SEQ ID NO: 5457 - DNA, 20 bp, Candida albicans
tatagcggcggccacttttt

SEQ ID NO: 5458 - DNA, 23 bp, Candida albicans
gcaactccggattgtgtcaattt

SEQ ID NO: 5459 - DNA, 25 bp, Candida albicans
ttccatttgtctttggcagtattga

SEQ ID NO: 5460 - DNA, 23 bp, Candida albicans
tgtccaaagcatcaccttcactg

SEQ ID NO: 5461 - DNA, 20 bp, Candida albicans
cttggggagctgcaggtttg

SEQ ID NO: 5462 - DNA, 24 bp, Candida albicans
tttgatgttgatgaatgccctgtt

SEQ ID NO: 5463 - DNA, 20 bp, Candida albicans
cggaaggccaatctttgagg

SEQ ID NO: 5464 - DNA, 20 bp, Candida albicans
tggcatcccactttctgtgc

SEQ ID NO: 5465 - DNA, 25 bp, Candida albicans
tggtccaccacagatagtaaaacca

SEQ ID NO: 5466 - DNA, 26 bp, Candida albicans
caggcacatagagaggagtatcagca

SEQ ID NO: 5467 - DNA, 20 bp, Candida albicans
tggagttttgtcccgtggaa

SEQ ID NO: 5468 - DNA, 22 bp, Candida albicans
gcaactttttcggctgtgttca

SEQ ID NO: 5469 - DNA, 21 bp, Candida albicans
caatgattggagccatttgga

SEQ ID NO: 5470 - DNA, 25 bp, Candida albicans
ggattagtgatttgtttggcggata

SEQ ID NO: 5471 - DNA, 26 bp, Candida albicans
tgttgttgagtgtcaaattgatgagg

SEQ ID NO: 5472 - DNA, 21 bp, Candida albicans
tggttgctcttgctgttgagc

SEQ ID NO: 5473 - DNA, 25 bp, Candida albicans
tcacagctactggtgatctttgagc

SEQ ID NO: 5474 - DNA, 21 bp, Candida albicans
gggggtaacttctggccattt

SEQ ID NO: 5475 - DNA, 21 bp, Candida albicans
ggccattggcgaaagtaatcg

SEQ ID NO: 5476 - DNA, 21 bp, Candida albicans
gcagcggtgaaaacaacatca

SEQ ID NO: 5477 - DNA, 24 bp, Candida albicans
cggaaaacatgaggattttctgga

SEQ ID NO: 5478 - DNA, 20 bp, Candida albicans
tgagaatgtgcggcaatcaa

SEQ ID NO: 5479 - DNA, 20 bp, Candida albicans
tggaaagctcgcaatgtgtg

SEQ ID NO: 5480 - DNA, 20 bp, Candida albicans
gggagatggacccggattct

SEQ ID NO: 5481 - DNA, 20 bp, Candida albicans
tttgcctctcgtttggcatc

SEQ ID NO: 5482 - DNA, 23 bp, Candida albicans
ttccagagaaaatccagctttgg

SEQ ID NO: 5483 - DNA, 21 bp, Candida albicans
tcgaagcatttgaggccaatc

SEQ ID NO: 5484 - DNA, 21 bp, Candida albicans
tgatgggtcatcattccctga

SEQ ID NO: 5485 - DNA, 25 bp, Candida albicans
cattgagtttcttcttcacgaccaa

SEQ ID NO: 5486 - DNA, 20 bp, Candida albicans
cgggatggcaattgatggag

SEQ ID NO: 5487 - DNA, 22 bp, Candida albicans
tggacgatcaggatcaagacca

SEQ ID NO: 5488 - DNA, 22 bp, Candida albicans
tgttgacggtccttctcttcca

SEQ ID NO: 5489 - DNA, 24 bp, Candida albicans
tgatgacctgggaaatcagttgaa

SEQ ID NO: 5490 - DNA, 21 bp, Candida albicans
ggtggccactggatgattagc

SEQ ID NO: 5491 - DNA, 20 bp, Candida albicans
tcgatgcgattcctgttcca

SEQ ID NO: 5492 - DNA, 22 bp, Candida albicans
cccaatccaatttgttggcagt

SEQ ID NO: 5493 - DNA, 26 bp, Candida albicans
tgtgcaaatatactttttgggacgtg

SEQ ID NO: 5494 - DNA, 20 bp, Candida albicans
aagcggcatcaccaccattt

SEQ ID NO: 5495 - DNA, 23 bp, Candida albicans
ttggtgactggagtccaaccttt

SEQ ID NO: 5496 - DNA, 20 bp, Candida albicans
ccaccagcaccatcattgga

SEQ ID NO: 5497 - DNA, 22 bp, Candida albicans
tcggatttgattggcaacttgt

SEQ ID NO: 5498 - DNA, 22 bp, Candida albicans
ttccccatcatcatcctcaggt

SEQ ID NO: 5499 - DNA, 20 bp, Candida albicans
tttcgatgggaaggcatcgt

SEQ ID NO: 5500 - DNA, 21 bp, Candida albicans
acctgaaccactctcgccaat

SEQ ID NO: 5501 - DNA, 21 bp, Candida albicans
gcggtaagtgatgctcgaacg

SEQ ID NO: 5502 - DNA, 21 bp, Candida albicans
ttggccatggcattgattctt

SEQ ID NO: 5503 - DNA, 23 bp, Candida albicans
gggattctggattgtttgccaat

SEQ ID NO: 5504 - DNA, 21 bp, Candida albicans
tttctccccgggtaatgtcag

SEQ ID NO: 5505 - DNA, 23 bp, Candida albicans
tcatttgctggatctcgtcatca

SEQ ID NO: 5506 - DNA, 23 bp, Candida albicans
gcttctcgtgcttctttggcaat

SEQ ID NO: 5507 - DNA, 20 bp, Candida albicans
ggggcaagaggtgttgcatt

SEQ ID NO: 5508 - DNA, 20 bp, Candida albicans
accggcgaaaaggaaaaacg

SEQ ID NO: 5509 - DNA, 23 bp, Candida albicans
tgtctctcaacccatgaagcaca

SEQ ID NO: 5510 - DNA, 20 bp, Candida albicans
tgccgggggtagaactgttg

SEQ ID NO: 5511 - DNA, 22 bp, Candida albicans
tgggcatcttcttgttcaggag

SEQ ID NO: 5512 - DNA, 21 bp, Candida albicans
gctgcttcgatcaagctctgc

SEQ ID NO: 5513 - DNA, 22 bp, Candida albicans
tgtcggtagatgctgtggcaat

SEQ ID NO: 5514 - DNA, 20 bp, Candida albicans
tggacacggtgctggaccta

SEQ ID NO: 5515 - DNA, 22 bp, Candida albicans
aaagatggcatcaagtggctga

SEQ ID NO: 5516 - DNA, 23 bp, Candida albicans
cctcaagtgtcgagtttccatgc

SEQ ID NO: 5517 - DNA, 24 bp, Candida albicans
tcgttcgttagggatttgttagcc

SEQ ID NO: 5518 - DNA, 22 bp, Candida albicans
cagtcatagagctggcgggaat

SEQ ID NO: 5519 - DNA, 22 bp, Candida albicans
tgcatcccaattggatatcacg

SEQ ID NO: 5520 - DNA, 21 bp, Candida albicans
tccaacagctgcatcgacaac

SEQ ID NO: 5521 - DNA, 23 bp, Candida albicans
tggaatgtcactgggagatgatg

SEQ ID NO: 5522 - DNA, 20 bp, Candida albicans
ccggacccggacaatgttct

SEQ ID NO: 5523 - DNA, 29 bp, Candida albicans
cattttcgattagttttccatgttttctc

SEQ ID NO: 5524 - DNA, 20 bp, Candida albicans
tcagcggcaacttcaacagc

SEQ ID NO: 5525 - DNA, 20 bp, Candida albicans
tggctgtgctggtgtggaat

SEQ ID NO: 5526 - DNA, 23 bp, Candida albicans
ttgggattgacacatcaacatca

SEQ ID NO: 5527 - DNA, 22 bp, Candida albicans
tggacttgttgggttgatgtgg

SEQ ID NO: 5528 - DNA, 21 bp, Candida albicans
tcgtcagaggacccatcatca

SEQ ID NO: 5529 - DNA, 20 bp, Candida albicans
aaaatcgggtcctgcaatgg

SEQ ID NO: 5530 - DNA, 21 bp, Candida albicans
gctcttttggctgccttttcc

SEQ ID NO: 5531 - DNA, 24 bp, Candida albicans
ttgtcggataattccaagtcagga

SEQ ID NO: 5532 - DNA, 22 bp, Candida albicans
tgcaccttgtctcttggcctct

SEQ ID NO: 5533 - DNA, 20 bp, Candida albicans
tcaaaggtgccgtgacgtgt

SEQ ID NO: 5534 - DNA, 25 bp, Candida albicans
tgggttgttaaatttgctgaaccag

SEQ ID NO: 5535 - DNA, 26 bp, Candida albicans
tgatgacgataatggttcttggtttg

SEQ ID NO: 5536 - DNA, 23 bp, Candida albicans
tcatcatttgggttaaacgacca

SEQ ID NO: 5537 - DNA, 20 bp, Candida albicans
tggatgcaacggcttgtttg

SEQ ID NO: 5538 - DNA, 22 bp, Candida albicans
ttgatgctggtgaagtcgattg

SEQ ID NO: 5539 - DNA, 20 bp, Candida albicans
cggctgactttgatgctcca

SEQ ID NO: 5540 - DNA, 20 bp, Candida albicans
ggcagcagtggattgagcac

SEQ ID NO: 5541 - DNA, 25 bp, Candida albicans
tgttgtcgtatagcctctgcacttg

SEQ ID NO: 5542 - DNA, 20 bp, Candida albicans
tcaacccaaccggtgaacaa

SEQ ID NO: 5543 - DNA, 20 bp, Candida albicans
gccggttcaacacccaatct

SEQ ID NO: 5544 - DNA, 20 bp, Candida albicans
acatcaaaggggccatcgag

SEQ ID NO: 5545 - DNA, 22 bp, Candida albicans
catcgacaccattccaagatgg

SEQ ID NO: 5546 - DNA, 20 bp, Candida albicans
cccaccagtgagggaaggtg

SEQ ID NO: 5547 - DNA, 26 bp, Candida albicans
tcattgtaggaattttcagctggttc

SEQ ID NO: 5548 - DNA, 21 bp, Candida albicans
ttccgtttcgttcctcggata

SEQ ID NO: 5549 - DNA, 20 bp, Candida albicans
ggagaagccccgtcactcct

SEQ ID NO: 5550 - DNA, 20 bp, Candida albicans
cacaggtcgatcacccatcg

SEQ ID NO: 5551 - DNA, 23 bp, Candida albicans
ccatcgtcatcatcgtcatcatc

SEQ ID NO: 5552 - DNA, 25 bp, Candida albicans
tcatatgccccaatattatcatcca

SEQ ID NO: 5553 - DNA, 27 bp, Candida albicans
tggaattggaatttttaggagtgttga

SEQ ID NO: 5554 - DNA, 21 bp, Candida albicans
tgctcgtccaagtccaacaca

SEQ ID NO: 5555 - DNA, 23 bp, Candida albicans
tggattgggattttgattcagga

SEQ ID NO: 5556 - DNA, 25 bp, Candida albicans
tgattcgttgtcttctccttcatca

SEQ ID NO: 5557 - DNA, 20 bp, Candida albicans
ggagtggctggtggttttgc

SEQ ID NO: 5558 - DNA, 24 bp, Candida albicans
tcatcaccactgctttcttcttca

SEQ ID NO: 5559 - DNA, 24 bp, Candida albicans
tcttgttgatgatgcatttttgga

SEQ ID NO: 5560 - DNA, 21 bp, Candida albicans
ttgcagtttagggtcccttgg

SEQ ID NO: 5561 - DNA, 26 bp, Candida albicans
gcatcacggtaaaagttttctccttt

SEQ ID NO: 5562 - DNA, 20 bp, Candida albicans
tcaaggcccaatcgcagtct

SEQ ID NO: 5563 - DNA, 24 bp, Candida albicans
tttggcggattcaactttacttgt

SEQ ID NO: 5564 - DNA, 20 bp, Candida albicans
aacggccgcctctaaagctg

SEQ ID NO: 5565 - DNA, 23 bp, Candida albicans
tgtggtcgtggttgttgtttgtt

SEQ ID NO: 5566 - DNA, 21 bp, Candida albicans
gggaacctctatccgccattc

SEQ ID NO: 5567 - DNA, 20 bp, Candida albicans
ccgctgtggcacttccaaat

SEQ ID NO: 5568 - DNA, 21 bp, Candida albicans
tgctgctgccaaaatgctttc

SEQ ID NO: 5569 - DNA, 20 bp, Candida albicans
gcagcaggggaatcttccag

SEQ ID NO: 5570 - DNA, 22 bp, Candida albicans
ccaacaccaccactcaatgctt

SEQ ID NO: 5571 - DNA, 23 bp, Candida albicans
ttggcgctaatggttttctttga

SEQ ID NO: 5572 - DNA, 20 bp, Candida albicans
catgtggtggtggtggtggt

SEQ ID NO: 5573 - DNA, 24 bp, Candida albicans
agggatttctccttgtcctgttgt

SEQ ID NO: 5574 - DNA, 20 bp, Candida albicans
gcccacaactgccacagaca

SEQ ID NO: 5575 - DNA, 25 bp, Candida albicans
tcttcctcctcctcctcttcttctt

SEQ ID NO: 5576 - DNA, 20 bp, Candida albicans
gttgaggctgcccaggttgt

SEQ ID NO: 5577 - DNA, 22 bp, Candida albicans
gcgtataatgctgacggggtaa

SEQ ID NO: 5578 - DNA, 19 bp, Candida albicans
cccctgcggatcattgttg

SEQ ID NO: 5579 - DNA, 24 bp, Candida albicans
tcaatttttcaacctgtggtccaa

SEQ ID NO: 5580 - DNA, 20 bp, Candida albicans
tcgaatcaagtcgggcatca

SEQ ID NO: 5581 - DNA, 20 bp, Candida albicans
acccagactcgcaccattcc

SEQ ID NO: 5582 - DNA, 21 bp, Candida albicans
tgggatggtttgccattcttg

SEQ ID NO: 5583 - DNA, 23 bp, Candida albicans
tggattctctttgttctggtgga

SEQ ID NO: 5584 - DNA, 20 bp, Candida albicans
ggtcggccacactccactct

SEQ ID NO: 5585 - DNA, 22 bp, Candida albicans
ttcgtcatcatcgtcatcgtca

SEQ ID NO: 5586 - DNA, 20 bp, Candida albicans
tgcacccatctcggcaattt

SEQ ID NO: 5587 - DNA, 20 bp, Candida albicans
tcactgcagcaaccgcaaat

SEQ ID NO: 5588 - DNA, 22 bp, Candida albicans
ttgggtcgtgatggcttaatca

SEQ ID NO: 5589 - DNA, 26 bp, Candida albicans
ggtggtgatttccaaatatcagatcc

SEQ ID NO: 5590 - DNA, 20 bp, Candida albicans
cggcaggtgtgccaaattct

SEQ ID NO: 5591 - DNA, 20 bp, Candida albicans
gtatgtcttgcggggcgatg

SEQ ID NO: 5592 - DNA, 20 bp, Candida albicans
ctggcagcaccgtatttgga

SEQ ID NO: 5593 - DNA, 21 bp, Candida albicans
tcgtggttgtttccattgctg

SEQ ID NO: 5594 - DNA, 22 bp, Candida albicans
gcaactggttcaacgtggtttg

SEQ ID NO: 5595 - DNA, 20 bp, Candida albicans
tcgtgatggcgacctaggag

SEQ ID NO: 5596 - DNA, 20 bp, Candida albicans
gccacggtgtttccttgagc

SEQ ID NO: 5597 - DNA, 25 bp, Candida albicans
tgtgtttcaggttctttggtgatga

SEQ ID NO: 5598 - DNA, 20 bp, Candida albicans
agccgatgccctttggaaat

SEQ ID NO: 5599 - DNA, 25 bp, Candida albicans
tgaaaccttgaatgattttccgttc

SEQ ID NO: 5600 - DNA, 23 bp, Candida albicans
aatgctgcttccttttgtccaac

SEQ ID NO: 5601 - DNA, 24 bp, Candida albicans
tcccatgctctgaacaattgaagt

SEQ ID NO: 5602 - DNA, 22 bp, Candida albicans
gcccaaggtctctttggatgaa

SEQ ID NO: 5603 - DNA, 22 bp, Candida albicans
gggaatgagatgatttcccaca

SEQ ID NO: 5604 - DNA, 20 bp, Candida albicans
acgctttcgccctatgagga

SEQ ID NO: 5605 - DNA, 23 bp, Candida albicans
tccgtggtggtgttttctttttg

SEQ ID NO: 5606 - DNA, 26 bp, Candida albicans
ggttcttcttggttgatgagatgaaa

SEQ ID NO: 5607 - DNA, 23 bp, Candida albicans
tggcaataaatgctccagaacaa

SEQ ID NO: 5608 - DNA, 20 bp, Candida albicans
tgacggaacctggcacctgt

SEQ ID NO: 5609 - DNA, 21 bp, Candida albicans
catttgcagcagtttggttgg

SEQ ID NO: 5610 - DNA, 24 bp, Candida albicans
ttttggttcaaaagctgctaatgc

SEQ ID NO: 5611 - DNA, 24 bp, Candida albicans
tgggatgattcttgacctttgaca

SEQ ID NO: 5612 - DNA, 22 bp, Candida albicans
tgccctgtcttgatttggttca

SEQ ID NO: 5613 - DNA, 20 bp, Candida albicans
tcggcattggagaaggagga

SEQ ID NO: 5614 - DNA, 24 bp, Candida albicans
ttgcaattttgccaactcttcttc

SEQ ID NO: 5615 - DNA, 26 bp, Candida albicans
ttcttggtattcccatcattcgtaaa

SEQ ID NO: 5616 - DNA, 21 bp, Candida albicans
ttgctgcttgtttgggatcaa

SEQ ID NO: 5617 - DNA, 20 bp, Candida albicans
ccccaggcatttgttctcca

SEQ ID NO: 5618 - DNA, 20 bp, Candida albicans
tcggaagcgggactattgga

SEQ ID NO: 5619 - DNA, 21 bp, Candida albicans
cgccaacgggtctataaacga

SEQ ID NO: 5620 - DNA, 20 bp, Candida albicans
ttggaaattggtggggcaac

SEQ ID NO: 5621 - DNA, 20 bp, Candida albicans
ttcgtctgcggtagctgctc

SEQ ID NO: 5622 - DNA, 22 bp, Candida albicans
tggtctggaagctctgtggatg

SEQ ID NO: 5623 - DNA, 24 bp, Candida albicans
tcaatctttgttggtctggtggaa

SEQ ID NO: 5624 - DNA, 20 bp, Candida albicans
ggccgctgggtctaagttga

SEQ ID NO: 5625 - DNA, 20 bp, Candida albicans
gttggggtgatggcagaagc

SEQ ID NO: 5626 - DNA, 21 bp, Candida albicans
tcgaccagttggtgcaacatt

SEQ ID NO: 5627 - DNA, 20 bp, Candida albicans
tgacacgccttcaccaccat

SEQ ID NO: 5628 - DNA, 21 bp, Candida albicans
ggaggcggcttatcaaacacc

SEQ ID NO: 5629 - DNA, 22 bp, Candida albicans
tggttgcatcaccaagaggttg

SEQ ID NO: 5630 - DNA, 21 bp, Candida albicans
ccgtggtcgacatgtgctaaa

SEQ ID NO: 5631 - DNA, 20 bp, Candida albicans
tcacgccaaatccagaatcg

SEQ ID NO: 5632 - DNA, 20 bp, Candida albicans
tcccgtctacaacggcacct

SEQ ID NO: 5633 - DNA, 23 bp, Candida albicans
cgggattcctgtagaacgagctt

SEQ ID NO: 5634 - DNA, 21 bp, Candida albicans
gcagctttgacagcatgagca

SEQ ID NO: 5635 - DNA, 20 bp, Candida albicans
tgctttgggtttgcgtctga

SEQ ID NO: 5636 - DNA, 23 bp, Candida albicans
gccacaagacaatttttcgaagc

SEQ ID NO: 5637 - DNA, 21 bp, Candida albicans
tggtgctgatacggcaaaagc

SEQ ID NO: 5638 - DNA, 20 bp, Candida albicans
cccacatgaggtgcaacagc

SEQ ID NO: 5639 - DNA, 22 bp, Candida albicans
tgggttctttttggtggattgc

SEQ ID NO: 5640 - DNA, 21 bp, Candida albicans
ttgtgggatgagatgcagcag

SEQ ID NO: 5641 - DNA, 21 bp, Candida albicans
ggtttggtccatcgtttcagg

SEQ ID NO: 5642 - DNA, 20 bp, Candida albicans
cggtggtggagatggctctt

SEQ ID NO: 5643 - DNA, 22 bp, Candida albicans
tgggttcccatttgtgttttga

SEQ ID NO: 5644 - DNA, 21 bp, Candida albicans
ggcgtttttctttgggtacgg

SEQ ID NO: 5645 - DNA, 25 bp, Candida albicans
tccatttcattttcgaatctggttg

SEQ ID NO: 5646 - DNA, 23 bp, Candida albicans
tcggaagacattgttgcatgttg

SEQ ID NO: 5647 - DNA, 20 bp, Candida albicans
ccttcaatggctgctggttg

SEQ ID NO: 5648 - DNA, 27 bp, Candida albicans
tcagcttgatttgaaaattgaggatgt

SEQ ID NO: 5649 - DNA, 21 bp, Candida albicans
tgatgatcataagcgccaagg

SEQ ID NO: 5650 - DNA, 21 bp, Candida albicans
ggttcacctgctttgggaaca

SEQ ID NO: 5651 - DNA, 20 bp, Candida albicans
ggcttggcaatgccttgttc

SEQ ID NO: 5652 - DNA, 21 bp, Candida albicans
cagagtggctgcattcaaacg

SEQ ID NO: 5653 - DNA, 23 bp, Candida albicans
ggacgatttaaagctcgagcaac

SEQ ID NO: 5654 - DNA, 20 bp, Candida albicans
tgcaggtcctcctccaatga

SEQ ID NO: 5655 - DNA, 22 bp, Candida albicans
ttcgatcggcttcttcatcatc

SEQ ID NO: 5656 - DNA, 24 bp, Candida albicans
tcaaagaatcctccgtcacattca

SEQ ID NO: 5657 - DNA, 28 bp, Candida albicans
tcaatcaaattgtggaaatcattagttg

SEQ ID NO: 5658 - DNA, 25 bp, Candida albicans
tggtgtcttgttgatacagatgtcg

SEQ ID NO: 5659 - DNA, 20 bp, Candida albicans
atttgaaacggggaccagca

SEQ ID NO: 5660 - DNA, 21 bp, Candida albicans
ttttggcgaaatcgacattga

SEQ ID NO: 5661 - DNA, 23 bp, Candida albicans
tccatttatccaaatcgggttga

SEQ ID NO: 5662 - DNA, 23 bp, Candida albicans
tttccatctcacgacaatccaac

SEQ ID NO: 5663 - DNA, 25 bp, Candida albicans
tgcttcacttaatgcttttgatgct

SEQ ID NO: 5664 - DNA, 22 bp, Candida albicans
ttccgtttctttgatgcagagc

SEQ ID NO: 5665 - DNA, 20 bp, Candida albicans
tgctgcggaatctgctcttg

SEQ ID NO: 5666 - DNA, 21 bp, Candida albicans
tcagggttggaccaatcatcc

SEQ ID NO: 5667 - DNA, 27 bp, Candida albicans
tcatccccataaataaaactccattca

SEQ ID NO: 5668 - DNA, 25 bp, Candida albicans
tgttgatttaccactttcaccagca

SEQ ID NO: 5669 - DNA, 22 bp, Candida albicans
ggggattgttttggtggtcatc

SEQ ID NO: 5670 - DNA, 23 bp, Candida albicans
catttgctatttgatgccaccat

SEQ ID NO: 5671 - DNA, 21 bp, Candida albicans
tgaaaccggaacatcccatga

SEQ ID NO: 5672 - DNA, 24 bp, Candida albicans
atagtgatcgtaatgggctgcgat

SEQ ID NO: 5673 - DNA, 24 bp, Candida albicans
ggaatggtttgccatattcagctt

SEQ ID NO: 5674 - DNA, 24 bp, Candida albicans
aggtactgagttctgggcaatgga

SEQ ID NO: 5675 - DNA, 25 bp, Candida albicans
tgatgttgttgttgtttttcgcttt

SEQ ID NO: 5676 - DNA, 21 bp, Candida albicans
tgcttggatacctgcctcctg

SEQ ID NO: 5677 - DNA, 22 bp, Candida albicans
cagcagtgtcccagatttgtgc

SEQ ID NO: 5678 - DNA, 21 bp, Candida albicans
tgaccaccgacatcccataca

SEQ ID NO: 5679 - DNA, 25 bp, Candida albicans
acagagacttgaggtggtgatgaaa

SEQ ID NO: 5680 - DNA, 20 bp, Candida albicans
gggatgggggaactcgacat

SEQ ID NO: 5681 - DNA, 24 bp, Candida albicans
tgacatgattgacaaatggtggaa

SEQ ID NO: 5682 - DNA, 20 bp, Candida albicans
tggcttcgtgttggatttgg

SEQ ID NO: 5683 - DNA, 21 bp, Candida albicans
aaatcgatgagggcaatggtg

SEQ ID NO: 5684 - DNA, 20 bp, Candida albicans
gggcgtagttacggcccatt

SEQ ID NO: 5685 - DNA, 21 bp, Candida albicans
tgcaaagataaagcggcatca

SEQ ID NO: 5686 - DNA, 25 bp, Candida albicans
agtgaaactcgggtaagaaatcgag

SEQ ID NO: 5687 - DNA, 20 bp, Candida albicans
ttccacctggaccatcacga

SEQ ID NO: 5688 - DNA, 22 bp, Candida albicans
tccaattgggatggatcagaca

SEQ ID NO: 5689 - DNA, 21 bp, Candida albicans
tggtcttggcatcaccatcaa

SEQ ID NO: 5690 - DNA, 26 bp, Candida albicans
aatttttaaatcctaccatcgccaaa

SEQ ID NO: 5691 - DNA, 27 bp, Candida albicans
ttcatcatcagtggaaaaatgactttc

SEQ ID NO: 5692 - DNA, 22 bp, Candida albicans
gcagctacagatggagcagcaa

SEQ ID NO: 5693 - DNA, 20 bp, Candida albicans
tcagcacccaaagcaaccaa

SEQ ID NO: 5694 - DNA, 23 bp, Candida albicans
ttttggcttcttcttcagcaaca

SEQ ID NO: 5695 - DNA, 20 bp, Candida albicans
ttggcccctttttgattgga

SEQ ID NO: 5696 - DNA, 25 bp, Candida albicans
ggattcccatgtctttcttcccata

SEQ ID NO: 5697 - DNA, 21 bp, Candida albicans
caacggctcgttgtgaagtga

SEQ ID NO: 5698 - DNA, 24 bp, Candida albicans
ttggggttgttcttcttgttcttg

SEQ ID NO: 5699 - DNA, 22 bp, Candida albicans
gctaacccatcttcaccccatc

SEQ ID NO: 5700 - DNA, 29 bp, Candida albicans
tcttggtcaaggaaagacttgaattactg

SEQ ID NO: 5701 - DNA, 26 bp, Candida albicans
tttgttgcaaatgatccagtaaatga

SEQ ID NO: 5702 - DNA, 20 bp, Candida albicans
ttctccggcattccaccaat

SEQ ID NO: 5703 - DNA, 20 bp, Candida albicans
ccggagctggtttgtggatt

SEQ ID NO: 5704 - DNA, 23 bp, Candida albicans
tgggacgacaaacaaatggtaaa

SEQ ID NO: 5705 - DNA, 22 bp, Candida albicans
tccgtaagatcgatgccatgaa

SEQ ID NO: 5706 - DNA, 21 bp, Candida albicans
cacttggctcatcgtttgtcg

SEQ ID NO: 5707 - DNA, 22 bp, Candida albicans
tgggactaattgtgcagcatcg

SEQ ID NO: 5708 - DNA, 20 bp, Candida albicans
gctgctgctgctgctgttgt

SEQ ID NO: 5709 - DNA, 24 bp, Candida albicans
tcatgcaatactttggagcaatca

SEQ ID NO: 5710 - DNA, 23 bp, Candida albicans
caccatcaatgtctggcatttca

SEQ ID NO: 5711 - DNA, 23 bp, Candida albicans
cgcttgaagagggatgaactgaa

SEQ ID NO: 5712 - DNA, 24 bp, Candida albicans
gattctcgagcacaccaaaattga

SEQ ID NO: 5713 - DNA, 20 bp, Candida albicans
tgtggcaattgctgaaccac

SEQ ID NO: 5714 - DNA, 27 bp, Candida albicans
ccttaaagatctatcatcgggattgaa

SEQ ID NO: 5715 - DNA, 22 bp, Candida albicans
caccaacgggaaattgattgtg

SEQ ID NO: 5716 - DNA, 20 bp, Candida albicans
atgctgtcattcccgcaaca

SEQ ID NO: 5717 - DNA, 23 bp, Candida albicans
gcaagtacggtcttttcccttcc

SEQ ID NO: 5718 - DNA, 22 bp, Candida albicans
gaggtgttttcaatcgggccta

SEQ ID NO: 5719 - DNA, 27 bp, Candida albicans
gcactggtgtttgataatggatattga

SEQ ID NO: 5720 - DNA, 20 bp, Candida albicans
tctgtgatcccggtccaggt

SEQ ID NO: 5721 - DNA, 21 bp, Candida albicans
tggttgtgtgcctggtagtcc

SEQ ID NO: 5722 - DNA, 23 bp, Candida albicans
gcattgaattttcccttttccaa

SEQ ID NO: 5723 - DNA, 20 bp, Candida albicans
tccgcttgtcccccatctaa

SEQ ID NO: 5724 - DNA, 20 bp, Candida albicans
tggtggtggtggtggttttg

SEQ ID NO: 5725 - DNA, 20 bp, Candida albicans
tcccaactcctcccaagggt

SEQ ID NO: 5726 - DNA, 20 bp, Candida albicans
ccggggaacatgtgaccatt

SEQ ID NO: 5727 - DNA, 20 bp, Candida albicans
tgttgcatccaacgagccat

SEQ ID NO: 5728 - DNA, 20 bp, Candida albicans
ttgctgttcccaacaaggca

SEQ ID NO: 5729 - DNA, 20 bp, Candida albicans
ccggcaaattaaatcccggt

SEQ ID NO: 5730 - DNA, 23 bp, Candida albicans
ggaactggggtagtttcattggc

SEQ ID NO: 5731 - DNA, 20 bp, Candida albicans
ttaactggttctgcggggga

SEQ ID NO: 5732 - DNA, 20 bp, Candida albicans
ccccaatggtacgtggtggt

SEQ ID NO: 5733 - DNA, 24 bp, Candida albicans
ggcaacttctttaaaccccattgc

SEQ ID NO: 5734 - DNA, 20 bp, Candida albicans
tgcaaaacagtcgcctccaa

SEQ ID NO: 5735 - DNA, 20 bp, Candida albicans
gaacccattgcgggcaaata

SEQ ID NO: 5736 - DNA, 20 bp, Candida albicans
ggcgtgtctggtacccaagg

SEQ ID NO: 5737 - DNA, 20 bp, Candida albicans
cttcatgggccatagctccg

SEQ ID NO: 5738 - DNA, 21 bp, Candida albicans
tcccggggatagtatcagcaa

SEQ ID NO: 5739 - DNA, 20 bp, Candida albicans
caacaaaccttgcgtggcag

SEQ ID NO: 5740 - DNA, 20 bp, Candida albicans
acatgggaacatcggccagt

SEQ ID NO: 5741 - DNA, 20 bp, Candida albicans
tgtttggtgttcaatgcggg

SEQ ID NO: 5742 - DNA, 20 bp, Candida albicans
cccccaaccaattaaacccc

SEQ ID NO: 5743 - DNA, 22 bp, Candida albicans
tgaatgttggacctccgtgaga

SEQ ID NO: 5744 - DNA, 20 bp, Candida albicans
ctggcccaatcgtgcttgta

SEQ ID NO: 5745 - DNA, 20 bp, Candida albicans
ccttcgatggatcggcattc

SEQ ID NO: 5746 - DNA, 20 bp, Candida albicans
accaccgccaattcctgcta

SEQ ID NO: 5747 - DNA, 20 bp, Candida albicans
gcgttggcacaaattgggtt

SEQ ID NO: 5748 - DNA, 20 bp, Candida albicans
aggcggtctttcccgtttgt

SEQ ID NO: 5749 - DNA, 20 bp, Candida albicans
ttggatgcagagcccaatca

SEQ ID NO: 5750 - DNA, 20 bp, Candida albicans
gtgctcccacaagcaaaccc

SEQ ID NO: 5751 - DNA, 20 bp, Candida albicans
gggacttctgggtgggcaat

SEQ ID NO: 5752 - DNA, 20 bp, Candida albicans
tatggccccacacgactcct

SEQ ID NO: 5753 - DNA, 20 bp, Candida albicans
aacacggcatccttaacggc

SEQ ID NO: 5754 - DNA, 20 bp, Candida albicans
tggcggtgaaggttgtgcta

SEQ ID NO: 5755 - DNA, 25 bp, Candida albicans
tttccctttctcttgatcttgttcg

SEQ ID NO: 5756 - DNA, 24 bp, Candida albicans
ttgttgtgggtaatcatcacatgg

SEQ ID NO: 5757 - DNA, 26 bp, Candida albicans
tgccaatactgaggtcagaaaaggtt

SEQ ID NO: 5758 - DNA, 25 bp, Candida albicans
tgtgattcttgtctgctgtgttgtc

SEQ ID NO: 5759 - DNA, 20 bp, Candida albicans
tcatcgccttgtggttcgag

SEQ ID NO: 5760 - DNA, 20 bp, Candida albicans
tcatcgggttgcaaagttcg

SEQ ID NO: 5761 - DNA, 26 bp, Candida albicans
tctgcttcttcatcttcattgtcaaa

SEQ ID NO: 5762 - DNA, 20 bp, Candida albicans
cccttttgttctgccgttgg

SEQ ID NO: 5763 - DNA, 20 bp, Candida albicans
agcagcagctccaccagctc

SEQ ID NO: 5764 - DNA, 20 bp, Candida albicans
tgaaggaacggggccagtaa

SEQ ID NO: 5765 - DNA, 20 bp, Candida albicans
tttcatcttgggcagtggca

SEQ ID NO: 5766 - DNA, 20 bp, Candida albicans
tcaagcgagtccaatggcaa

SEQ ID NO: 5767 - DNA, 20 bp, Candida albicans
tacggccgaggcaatacgtt

SEQ ID NO: 5768 - DNA, 20 bp, Candida albicans
taccattactgtccccgccc

SEQ ID NO: 5769 - DNA, 21 bp, Candida albicans
ttgaacggcatccatggaaat

SEQ ID NO: 5770 - DNA, 20 bp, Candida albicans
cggtgttgtccaagcgtgag

SEQ ID NO: 5771 - DNA, 20 bp, Candida albicans
gtcgttgtcgtcgtcgtcgt

SEQ ID NO: 5772 - DNA, 20 bp, Candida albicans
gaagcatttgggcggttgtc

SEQ ID NO: 5773 - DNA, 22 bp, Candida albicans
tctttcggtatcagcagcatcg

SEQ ID NO: 5774 - DNA, 20 bp, Candida albicans
accggccatagcaacaccag

SEQ ID NO: 5775 - DNA, 20 bp, Candida albicans
tggaatgccttgagcagcag

SEQ ID NO: 5776 - DNA, 20 bp, Candida albicans
gtgagcgttgtggacggatg

SEQ ID NO: 5777 - DNA, 20 bp, Candida albicans
tcgtggacggatttgacagg

SEQ ID NO: 5778 - DNA, 20 bp, Candida albicans
gggtatccacgggtgcaaaa

SEQ ID NO: 5779 - DNA, 21 bp, Candida albicans
cggtggagatgatgttgacga

SEQ ID NO: 5780 - DNA, 20 bp, Candida albicans
cacatcggaattgccaccaa

SEQ ID NO: 5781 - DNA, 21 bp, Candida albicans
cgcaactcattttgtggagca

SEQ ID NO: 5782 - DNA, 20 bp, Candida albicans
tgtgccatctatcgtcgcct

SEQ ID NO: 5783 - DNA, 20 bp, Candida albicans
tcccatggaatgccaaaaca

SEQ ID NO: 5784 - DNA, 20 bp, Candida albicans
ttggccgtcttgcggatatt

SEQ ID NO: 5785 - DNA, 21 bp, Candida albicans
gcagctgggttagcaccaatg

SEQ ID NO: 5786 - DNA, 24 bp, Candida albicans
ctgctgttttccccttacctgatg

SEQ ID NO: 5787 - DNA, 24 bp, Candida albicans
tccaggaccaccactgattacctt

SEQ ID NO: 5788 - DNA, 24 bp, Candida albicans
gatattggatgaacggcattctca

SEQ ID NO: 5789 - DNA, 24 bp, Candida albicans
gttgctgttgtgggtactgtggtt

SEQ ID NO: 5790 - DNA, 24 bp, Candida albicans
aaagcagatttggcaccattgttt

SEQ ID NO: 5791 - DNA, 24 bp, Candida albicans
ttaccgtcacgcttacttcgacaa

SEQ ID NO: 5792 - DNA, 24 bp, Candida albicans
cttattgtgccattgggcaatttt

SEQ ID NO: 5793 - DNA, 24 bp, Candida albicans
tcctgcccaaaatcctttacttga

SEQ ID NO: 5794 - DNA, 25 bp, Candida albicans
tcgttaaccaactcatggtttgacc

SEQ ID NO: 5795 - DNA, 24 bp, Candida albicans
acagtcacttgcctcattgcgtag

SEQ ID NO: 5796 - DNA, 24 bp, Candida albicans
attcaggaacaaattgacctccca

SEQ ID NO: 5797 - DNA, 24 bp, Candida albicans
cataagcttgggcgtaaggcatag

SEQ ID NO: 5798 - DNA, 24 bp, Candida albicans
agatagaagcgacttgttcggtgg

SEQ ID NO: 5799 - DNA, 24 bp, Candida albicans
tatgtcttgcccatttggatgttg

SEQ ID NO: 5800 - DNA, 24 bp, Candida albicans
cgaaacaccaccacaagaaccaat

SEQ ID NO: 5801 - DNA, 24 bp, Candida albicans
gctgtggcttctcctgttttgatt

SEQ ID NO: 5802 - DNA, 24 bp, Candida albicans
aatcagtccaatcccacctggtaa

SEQ ID NO: 5803 - DNA, 24 bp, Candida albicans
tctcgtatttgtaccattcgggct

SEQ ID NO: 5804 - DNA, 24 bp, Candida albicans
tctgaccaagtgaatggatcacca

SEQ ID NO: 5805 - DNA, 24 bp, Candida albicans
ggaaatggtggtggagtaggtgtc

SEQ ID NO: 5806 - DNA, 24 bp, Candida albicans
caattttccgaacctcattctcca

SEQ ID NO: 5807 - DNA, 24 bp, Candida albicans
tcaagatcatttggcgaaacttca

SEQ ID NO: 5808 - DNA, 24 bp, Candida albicans
tgcataatttgttggtttttccga

SEQ ID NO: 5809 - DNA, 24 bp, Candida albicans
ctcatggctgaataacacgctttg

SEQ ID NO: 5810 - DNA, 24 bp, Candida albicans
atgatgaggggttgattgctccta

SEQ ID NO: 5811 - DNA, 24 bp, Candida albicans
tacaattggcaaatgaaatcgctg

SEQ ID NO: 5812 - DNA, 24 bp, Candida albicans
gccatctaaatggtctccatggtc

SEQ ID NO: 5813 - DNA, 24 bp, Candida albicans
tggttttggttaggtccattctgc

SEQ ID NO: 5814 - DNA, 24 bp, Candida albicans
ttcatgggggaagaatcttgctta

SEQ ID NO: 5815 - DNA, 24 bp, Candida albicans
tcaatgtcggcataacttgcaatc

SEQ ID NO: 5816 - DNA, 24 bp, Candida albicans
cacatgaccaacccgttaaccaat

SEQ ID NO: 5817 - DNA, 24 bp, Candida albicans
ggttgcctttacaaacaaacgctc

SEQ ID NO: 5818 - DNA, 24 bp, Candida albicans
ggttggataaacggttcgttcgta

SEQ ID NO: 5819 - DNA, 24 bp, Candida albicans
attgatactatacccgcggcctct

SEQ ID NO: 5820 - DNA, 24 bp, Candida albicans
ggaggtgaagaagatgcaggtgat

SEQ ID NO: 5821 - DNA, 24 bp, Candida albicans
aagggttgcattgaataacgatgg

SEQ ID NO: 5822 - DNA, 24 bp, Candida albicans
gtggataagcagacgctaattcgg

SEQ ID NO: 5823 - DNA, 24 bp, Candida albicans
cgttcttctgcagcctttgaagat

SEQ ID NO: 5824 - DNA, 24 bp, Candida albicans
ccatcaacacaatattggaccgaa

SEQ ID NO: 5825 - DNA, 24 bp, Candida albicans
ttttgggcgatatttttgttcgac

SEQ ID NO: 5826 - DNA, 24 bp, Candida albicans
tttcacaattcaaacaatgtgggg

SEQ ID NO: 5827 - DNA, 24 bp, Candida albicans
caccctggatacggtcaacttctt

SEQ ID NO: 5828 - DNA, 24 bp, Candida albicans
ccgttcgtcttcttcttcctcgta

SEQ ID NO: 5829 - DNA, 24 bp, Candida albicans
atggttgcgctttagtgtcgactt

SEQ ID NO: 5830 - DNA, 24 bp, Candida albicans
gatgctggtgaaaaatcttggtcc

SEQ ID NO: 5831 - DNA, 24 bp, Candida albicans
taaacaaagttgcgtggaggttca

SEQ ID NO: 5832 - DNA, 24 bp, Candida albicans
atgtattggcaatctctggtgcag

SEQ ID NO: 5833 - DNA, 24 bp, Candida albicans
cccaatcagtcggcaaattgttat

SEQ ID NO: 5834 - DNA, 24 bp, Candida albicans
cagaaaatcccgagaaattgccta

SEQ ID NO: 5835 - DNA, 22 bp, Candida albicans
ttccagcgatgtggaatcttct

SEQ ID NO: 5836 - DNA, 20 bp, Candida albicans
acgaatgcaacgagcaccaa

SEQ ID NO: 5837 - DNA, 20 bp, Candida albicans
gtcatcagagggcaaatgcg

SEQ ID NO: 5838 - DNA, 20 bp, Candida albicans
tgtcgtcgttgtcgttgtcg

SEQ ID NO: 5839 - DNA, 22 bp, Candida albicans
ttccttgagagggtctttccga

SEQ ID NO: 5840 - DNA, 20 bp, Candida albicans
gagtgttggccgattcgtca

SEQ ID NO: 5841 - DNA, 22 bp, Candida albicans
ttggactcactgccagttcctg

SEQ ID NO: 5842 - DNA, 20 bp, Candida albicans
aggcaaaccaggcaatggtg

SEQ ID NO: 5843 - DNA, 20 bp, Candida albicans
tccgccgtcagttggatttt

SEQ ID NO: 5844 - DNA, 24 bp, Candida albicans
cccatagctgccatatatccatga

SEQ ID NO: 5845 - DNA, 20 bp, Candida albicans
gcatcggccacgtaaccatt

SEQ ID NO: 5846 - DNA, 22 bp, Candida albicans
tccagcaacaatagcacttgcc

SEQ ID NO: 5847 - DNA, 20 bp, Candida albicans
taccgtagcactggggtccg

SEQ ID NO: 5848 - DNA, 20 bp, Candida albicans
gaggcttttctcccgtgtgg

SEQ ID NO: 5849 - DNA, 22 bp, Candida albicans
tcacgagccagttcatcagtcc

SEQ ID NO: 5850 - DNA, 20 bp, Candida albicans
taacacccccaccaacagcc

SEQ ID NO: 5851 - DNA, 20 bp, Candida albicans
atcatccccacaggaccagc

SEQ ID NO: 5852 - DNA, 24 bp, Candida albicans
cgccagtgctgttgaagtatcttt

SEQ ID NO: 5853 - DNA, 20 bp, Candida albicans
ttgatccaccttccccatga

SEQ ID NO: 5854 - DNA, 26 bp, Candida albicans
caacattgacagctacttctgcttgc

SEQ ID NO: 5855 - DNA, 20 bp, Candida albicans
atgcctgggcagaggatgac

SEQ ID NO: 5856 - DNA, 20 bp, Candida albicans
tgactctggcgtaaccgtcg

SEQ ID NO: 5857 - DNA, 24 bp, Candida albicans
tcaacttcacgtttggaaccaatg

SEQ ID NO: 5858 - DNA, 20 bp, Candida albicans
tcttggagctttggacccca

SEQ ID NO: 5859 - DNA, 20 bp, Candida albicans
tgtgtgtgtggcccctgatt

SEQ ID NO: 5860 - DNA, 20 bp, Candida albicans
atcggcaatggggaaaatcc

SEQ ID NO: 5861 - DNA, 20 bp, Candida albicans
ccaaaggcaatatccccggt

SEQ ID NO: 5862 - DNA, 20 bp, Candida albicans
accgttggtgataccgtccg

SEQ ID NO: 5863 - DNA, 20 bp, Candida albicans
tgctgggccgatttcagaat

SEQ ID NO: 5864 - DNA, 20 bp, Candida albicans
ggccaatcgttgaacttcgg

SEQ ID NO: 5865 - DNA, 22 bp, Candida albicans
ggatgtcctggacctggagaaa

SEQ ID NO: 5866 - DNA, 20 bp, Candida albicans
ccaaacgagcaaaagccctg

SEQ ID NO: 5867 - DNA, 20 bp, Candida albicans
agtctgatggcaattgcggc

SEQ ID NO: 5868 - DNA, 20 bp, Candida albicans
tcaaatagaccggggcatcg

SEQ ID NO: 5869 - DNA, 20 bp, Candida albicans
cacatcaacccacgtctggc

SEQ ID NO: 5870 - DNA, 22 bp, Candida albicans
cgttgtcactatcatcgtcggg

SEQ ID NO: 5871 - DNA, 24 bp, Candida albicans
tcagtagcaaatgggattggtgaa

SEQ ID NO: 5872 - DNA, 24 bp, Candida albicans
ggttttgcatgatttgggtagcat

SEQ ID NO: 5873 - DNA, 26 bp, Candida albicans
tcgtcgttgtcaaagtcattaactcc

SEQ ID NO: 5874 - DNA, 24 bp, Candida albicans
gggctcttctccataacggagttt

SEQ ID NO: 5875 - DNA, 24 bp, Candida albicans
agtccgtccgattggttttctttt

SEQ ID NO: 5876 - DNA, 24 bp, Candida albicans
ccaccacctgaactacctctgtca

SEQ ID NO: 5877 - DNA, 24 bp, Candida albicans
tttcatttatgggaacgcaaaagc

SEQ ID NO: 5878 - DNA, 24 bp, Candida albicans
actctgggtttggtcgacaatgtt

SEQ ID NO: 5879 - DNA, 24 bp, Candida albicans
gaggaattggcactaatgattcgg

SEQ ID NO: 5880 - DNA, 24 bp, Candida albicans
tgtgcattcaaaaccgataccaaa

SEQ ID NO: 5881 - DNA, 24 bp, Candida albicans
ctccaaactggtcaacaacaatcg

SEQ ID NO: 5882 - DNA, 24 bp, Candida albicans
gtctggtgatggttcaccactttg

SEQ ID NO: 5883 - DNA, 24 bp, Candida albicans
gccacaagaattaaatgacccagc

SEQ ID NO: 5884 - DNA, 24 bp, Candida albicans
ggttgttcttctgcggatctgatt

SEQ ID NO: 5885 - DNA, 25 bp, Candida albicans
cggcatttcttttctggaaaatctc

SEQ ID NO: 5886 - DNA, 24 bp, Candida albicans
tcgacaaaggcaagattgtggtaa

SEQ ID NO: 5887 - DNA, 24 bp, Candida albicans
gttaatgaagcttgagcaccacga

SEQ ID NO: 5888 - DNA, 24 bp, Candida albicans
cttcaatgagtggatgcgtggtag

SEQ ID NO: 5889 - DNA, 27 bp, Candida albicans
cattgagattgaaacccatattcagga

SEQ ID NO: 5890 - DNA, 24 bp, Candida albicans
cgtatgcttcaaaggcctcaactt

SEQ ID NO: 5891 - DNA, 24 bp, Candida albicans
ttttctggaaccgacattggatct

SEQ ID NO: 5892 - DNA, 24 bp, Candida albicans
gatctgccaatggagaaatgtgtg

SEQ ID NO: 5893 - DNA, 24 bp, Candida albicans
tttttgtttggggtagcaatggag

SEQ ID NO: 5894 - DNA, 24 bp, Candida albicans
acaatggctcaccttcttttggtg

SEQ ID NO: 5895 - DNA, 24 bp, Candida albicans
tataacccatggcagtaccccaac

SEQ ID NO: 5896 - DNA, 24 bp, Candida albicans
tgaactgatccaacactcatctgc

SEQ ID NO: 5897 - DNA, 24 bp, Candida albicans
gatgggtttaccatcttgggcata

SEQ ID NO: 5898 - DNA, 24 bp, Candida albicans
tttgctaatccagccacaacaaga

SEQ ID NO: 5899 - DNA, 24 bp, Candida albicans
tcaatgtatggggtcttggctctt

SEQ ID NO: 5900 - DNA, 24 bp, Candida albicans
tgaccatagtttgtggccactgtt

SEQ ID NO: 5901 - DNA, 24 bp, Candida albicans
caaatggatcaccaatatgtcgga

SEQ ID NO: 5902 - DNA, 24 bp, Candida albicans
gggtgcatcacgatctttaattcc

SEQ ID NO: 5903 - DNA, 24 bp, Candida albicans
atcgtgggacataacccacaaatc

SEQ ID NO: 5904 - DNA, 24 bp, Candida albicans
tccgccacattcgatattcttctt

SEQ ID NO: 5905 - DNA, 26 bp, Candida albicans
cccatctcctttactaggaaatcgct

SEQ ID NO: 5906 - DNA, 24 bp, Candida albicans
ataaccatggtccagtttgccaag

SEQ ID NO: 5907 - DNA, 24 bp, Candida albicans
tggatgggacttggaaaagaatgt

SEQ ID NO: 5908 - DNA, 24 bp, Candida albicans
agcctgtaagggcggtaatgaaat

SEQ ID NO: 5909 - DNA, 24 bp, Candida albicans
caagagaatggttaacggaccagg

SEQ ID NO: 5910 - DNA, 24 bp, Candida albicans
cgtctttggatgccgtcaatttat

SEQ ID NO: 5911 - DNA, 24 bp, Candida albicans
actttgcatgagtttggcatttga

SEQ ID NO: 5912 - DNA, 24 bp, Candida albicans
ccaccaaatgttatgggatgaggt

SEQ ID NO: 5913 - DNA, 24 bp, Candida albicans
accaaccatgaaataaatgccgac

SEQ ID NO: 5914 - DNA, 24 bp, Candida albicans
aaaatctccaatccccgattttgt

SEQ ID NO: 5915 - DNA, 24 bp, Candida albicans
acgtcttttctttcacgggaagtg

SEQ ID NO: 5916 - DNA, 24 bp, Candida albicans
cagataagtagtccaacccgtggc

SEQ ID NO: 5917 - DNA, 24 bp, Candida albicans
cttctcaccttccactgatgacga

SEQ ID NO: 5918 - DNA, 24 bp, Candida albicans
acacacagccaagtcacacacaaa

SEQ ID NO: 5919 - DNA, 24 bp, Candida albicans
taatcctgctccagaagcaaaagc

SEQ ID NO: 5920 - DNA, 24 bp, Candida albicans
ccaccaatggcaatcatagaaaca

SEQ ID NO: 5921 - DNA, 24 bp, Candida albicans
aatgcactagcgatttctgccatt

SEQ ID NO: 5922 - DNA, 24 bp, Candida albicans
tcaacatggacagcagcatattca

SEQ ID NO: 5923 - DNA, 24 bp, Candida albicans
gaatggacctttaggggcagtttc

SEQ ID NO: 5924 - DNA, 24 bp, Candida albicans
ggattcatctggttgggacaaatc

SEQ ID NO: 5925 - DNA, 24 bp, Candida albicans
tgctaccgaatctcaatgtgtggt

SEQ ID NO: 5926 - DNA, 24 bp, Candida albicans
attgaacgtattttggccatcacc

SEQ ID NO: 5927 - DNA, 24 bp, Candida albicans
gaccatcaggactgttcttgcctt

SEQ ID NO: 5928 - DNA, 24 bp, Candida albicans
gtaggaactggacatggaaaccca

SEQ ID NO: 5929 - DNA, 24 bp, Candida albicans
tctgcatgcataggcaaatctgtt

SEQ ID NO: 5930 - DNA, 24 bp, Candida albicans
ttatcccaattttctgcacccaaa

SEQ ID NO: 5931 - DNA, 25 bp, Candida albicans
acatgcacgatgaatatcagaaggt

SEQ ID NO: 5932 - DNA, 24 bp, Candida albicans
cttgtaatgttcctccttggtggg

SEQ ID NO: 5933-6000 - skipped (68 entries)

SEQ ID NO: 6001 - DNA, 1116 bp, Candida albicans
atgacggatacacaaccaaggaaaatacgtaaagtgtctactcaagagcaaattgaagattatgaaaaacttcgtcaaagaatcaaaaatcatttcaaagatgcccttaaaggtaaaggatcatctatgctgttgcattatattgatgaaataaccgaattatataaaagagttcaatcacaaaaagttaaagatacaagagttcatttagaagattctgaagttttcaaagaagcatcggattttgctgccttgaatgcacgtaatatagttttcgatgattcgggaattgctcttgatgataaagaatttttcaaatgtttaagaagatttgctgttactgatcctagtcttttaagtcgtaatgatataggagataatgatggcaataatagtaacgatgaggatgacgtagatgatgatgatctggatgaagaagaagaagctattactgatgaatacacattcaataaaacaaattggttaaaacttgggattctttatcatcaagttagtaaaaaatccatactggtagattttttaaatggacccttaaaagcagaaaagaggaaaatagttcgagcaagaaatgttgatgatactaaaggtagcgggatggcgaaaactgctcgacaagttcaagctagtgatatttctggtaatcaagaacaaaatactgccaacatggttaaatcagtttatcaaacatatattgaaaaatatgatggtaatggtgttaatttatttaaattttttataaaccctagatcatttggtcaaagtgtggagaatttattttacaccagtttcctcgttaaagatggtcgattgaaattatatgtgaataatgacgggatgccttgtattcaaagagtgagtagtgatgaaatcagagaggctcaattggaaagcaataaaatttttgctagtcatcatattgctagttttaattacaaagcatggaagaaatatactcaattatataacataagagaagcatttttgggacatcgtgatgaacctgaagaccaaatgccacctgaagatataattgattataatgacgaggaacctataccgtcatctcaaagaagggatctgaattcatcggattaa

SEQ ID NO: 6002 - DNA, 2148 bp, Candida albicans
atgtcattgaaaccatttacggggttattattctgttgcactgggttggaatcaaccacacgacgagaggtggtagagaagatagagacccttgggggaattcattattcagatttaatgacagatgtcaattatcttatagtgggagatagagacactgagaaatatcgattttgcattaaatatagacctgacattatttttattgatgctgattccattttcacaattcataaacattggataaacggtgaagatgagaacctggacttactacgaatagagaaatataggttggcaatatttgctcaattgaatgcatgtttctcaagaatagaaatgtcaacctctcaaattgatcatttagtcaacacagtaaaatttcgacagcgtactaatacttcacctgagtattttcgcccgaaaaatttattcaaattgtttgttgataatggtggtattgccaaagaatctttactgtgtcatcagaattttattatcacagctgatccacgaggaacacgatacaacaaggctcttgaatggaatgtacccgcaatacatcctatttggattgtcgatagtgtattgagaggtgctgcattagattggaaagattatattttaaacaacaatccaaatgattgctatgatcgagggtgtgatgtttggcccgaagttttcgattgtcaggagaaacaaaaacagaaatctcaacaacaacctaaaagattagagtctactgaaccagaagtaaaacggaaaatcaccaataataaaaccaatgctgatatttggaactcgattatggatcataccaagaagcaaacaaagcaattgattcacgacaagacctgggatgatgatgaggaggaggaagataatgatgatgatggtgatacccaaaccaaaaatgaaaagaataatcaatacaagaatattactacaattcctaaagatggaaagcaaaaaccagaattaaacggtaaaatacataatttggatcttaaattggtgtcagaaagtaaagaaaactcaccaaatgtcctggaaagtcaattatttttagggttcaactattatacggtcggttttgactctcgtgagtttgacttgttatccaaagcaattgaaaactacctgggagaaatatctaatgatccaaatgacgattctatcactcatgtggttattcctgcaaaaaaggggtatcagtcaatgctggttttgaaagtcttacctgctgaccttaagctgagaattgcaaatgggtttgtcaaaattgttactgagtttttcattgaaagatgtatgttttacaagaaaattatattagatagatggggacagccaatgaagggattagtgccgtctaaaaaatcatttaaaatttgtaccactgggtttactggcattgaattattgcatattgaaaaactaatacggtcgtttaactttgaatattgtgaaacattgtcagaacagagagatctactaattctcaacgtaaatttatttaaaaaaagcttgatgaattcgccaaagttatttcaatacaaatgtaaggacatcatcaattgtccaactggtggatctgtgtcgttgatgtcatctaaacacaaagttgaagctgcaaaacgatggaacattcctgttgtttcagtggcatatttgtgggagattttagaactttcaactaataaatcacatattattatgccggatattacagatttgcaatggtgtgtctttgcaccgagcaactataataaaccgaaatcattattggagtacgtgaagaatttggataaggctagtagagaaagttcttttagtcccaaaagtcaagaaaatgaagcattggaagaacccacaatggataatctggtgagattgccatcaccacgaagagttaatctgaaacaaaaatacggtaaattagtgggaggcaaatctcccaaatcaattaaacggaaattactcgaagctgcaaatctgtttgctgatggacagaatgatcatagtattaatccagatgttacaattgaagaggatctgatgtctcaaataaggtatcaagacaacgaatcaatgatcaaccaagaaagattattagagaaattggatggatcagctgtgcttgtgtaa

SEQ ID NO: 6003 - DNA, 2424 bp, Candida albicans
atggatacacaggcagaaatcaatgctgatttaatatcatcaattataccgttccccaacttgactgatctatccaacaccacatctgatttcgacaatgatatacagattttattagattggttgtctccttatataccagcaacttctttaaccaagtatcaggattgtggttcccccttgttattgctaagagttcaggaaccgtcacaaagagtgaaatcagctattcgtgggtgtttgaaggatgaaatcaatcagatccaattcattgaattatacattaacacaatcaatgaaaaagtctcacaattttttgaatcgatcgtcacaaagaacttgaaatttattgaatacgttaatataattaagattttgctacattattacaattctcaatttgaatatctcaatttatctgataatgtttataaaaaatttcaagcaaaactcagttttataatcacgtgtaatttgcttaatgaacaatcgtcattcagggccaagatgaaccaattttttgaagaatcattatatgttagagcaactttgagtaacccactgtcatcgatcacattgaacttgattgatataatttccactctagcatcaattggcatgtctgatttgttgaatgaaattgtcatcaaattatccattgataaaatcaaacattttacaaatacatatagtagaaatgtatggaataaacctttactatcaaccatcaacaatttcattcaaaatgaaatttatccaaatttttatattgtgattagctataccacatcgtccaatttgacagattcaatgaataatgtttatctttatgaattggtgagaattgcacatgatgaactaataaatttaagaatccaagaaatatattctatggttttgcaatatcctgaatctcaagttgggctaaacgaattacatcactgtttactgaaagttaaatttaatctgaaacaatatgaattaacgttgctttcgtgtgctattgatcattcagttaatattcaagcagcacagagaactgaattggtaaatagttttatcgattactgtcataagaatattttgcatgccggcgccaataccattgacgtcataaccacctatatcaagactataaaatcatttttaattgttgatccaaaaggtgtattgctcgataaggtcgtgaggcccatacgacaatatttgaaaacgagagaggatattattataaaattagtgcatggattacttgatatttctcctaataatgaattgattgaattggctcgcgaattacgtcatccaagtaacaagtaccgttcaaaacatgatcattcaaaagatgtgttggaagatttgcttgatttgaattggcagcctgatcctattgatgcattacctgatttcaagaaaggtaaagtaagtgatataattgagtccttgatctcgatatttgactccaaggatattttcattgatgaattcacaaggttgtttggtgatagcttaatcaaattgaaggattataacgtggaagaaattgaactgaatttgaatttgctaaaatcccgatttggtaagcaaaattttgccactttggatgttatgattcgtgacataaaggaaagtgaatatttaaatgatttgtttgtcaggaacacgaggaataccaatttcaatacttctgtattatctcatttatattggtcgagtattttggagaacataaataccgatgctaacaattttaaagttcccaaagaaatcgaggacaagtttcaactgtttaaagataaatttgctcaagagaaatatggtagaactttggaactattaccaagtttagggttggttacattacaactagaatttaagaaaagtggtcctcgagtttttaaagtcactccagataaagcatcgataatctctttgttcaatgaaaaagaagatgaattatcagtgagttacatagctcaaacattgaacatgtcagaatatatggtttccaacgggttggcatattgggtgaaagagggtgtacttacggaattaacgaaaaccttgtatattgtcaacgatgatgatgatgaagaagaagaagagggaaatgtgtttccagaaaaggcagaaagctcaaaacatggaatcgatagtgctactagtaatctaacgtcagttaaatctggaatggaagataaattttcagagattgctattattgaatcttatattgttacaatattacaaaatataaccctgataaattttgaaagaatgaaaacattgcttaatttaatggttccaaaagataagctcgactttgccaatgttagtgaaagtctacttgaagaatatcttgattcgttagtagaaaattccaaaattgcttttcaaaacggaaattatagtttacccaagtaa

SEQ ID NO: 6004 - DNA, 870 bp, Candida albicans
atgtcatttagaggtggtggtggtagtggtggtagatcaactcaaagaactattcttccatttggattagattatgctgatattatatcatcaactcaagagacggaaaaaccacaattattattacccataaatggagatataactgaaattgaatcaattattgctaaacaatcaatgaatttcactaaactaatgtcagaaggtccatttttcacggggaatctagatagtattgaaatcaccaaaaaacgtaatcataatgatagtgaaaatgaagaagaagaagaagaagaaggaggagatacagagaatactggcgatagaaagaaaaagaaatcaaagactaatggtgatggtagtagtagtggtagtggtagtggtagtgccagtggtgatggaatagaaagatattccgatcgatataaaaaaatccaaaaaattggtagaacaattgatgaacatccatatcaaccagaatatttccctagtgaattatattcagtcatgggaataactaataaacatgataagaagaaatttttattattatcgaaatttaaatcaaatggaggattaaaacaaatattatccaatgaaaaattggaaaatttagatgaacaatcaaaattaaattcaatgaaagaaaaaatgttaagtatgattgataatagtgtgaatgtcaatgatgatgataataataatgatgggaaaacacgtagtggagatgaacaagaaattgatgaagatgatttggatgatgaatttgaagatgaagatgatgatgattataatgctgagaaatatttcgatgatggtgatgacgatgatggaggtgatgatggaggtgatgatgaagcagcattttaa

SEQ ID NO: 6005 - DNA, 1419 bp, Candida albicans
atgacagatgaacagctagagtcaaagacttcaaagggaaaacaaaatcgtaaccgtaatattgacaatgacaatgaaaatgacaacgataatgaggacgataaatttcaaacagaacaagtttatgacgttgaagatgaaattcaagattggaaatttttgaataaatcaactataccgaaaagaggtactaaagaatttgaacctgatgggaccaattatcaaatttcagcattagaacaatcacaacaaaccatgtttcaagcaattaataatgttagaggacatcatactacgaaaaaattaattggaatttggatgattgatgagcatgatcaatattgttttattccacaaattcgtggtaattattttaaagatttggggaaagcaatcaatattgggaaatttcaaggtatgaaattgaatagtttagaaacaatttatttagcagaaagaggatcattgattgtatatttgggaaaccaggaatattccgattggttgtataatagtgctgaggtggaagaaaatgaagatggggacaaaaatgtactgttcgatgtggagtcaaatctaattgcattggatttggaatatttgtatagtttgttaactatcccactagcgaattatcaagtttatgcttatttaaaaagattaggatatatcatacaggaatataaagtgcaagatgatgtgatggacaaaacgttattatcatcatcaccgacaaaggacccaaagaaactagaactgttggttcaattcacattatggcctcgtgaatgggggatcatggcatatcctcttttccattcattacattttaaaacgaaacattatttcaaatatactgatgtatttaagaatttaaaattgaattttaaaccaattgaatctgaccccaatgaatcgaatataaatataacattcaatgtatggaaaccatcaccatcattttctaaaaagactccaccaccaccagattttcaattatgtgttgttgattcatccaaaaataccgatttcttaaaacttccacaaatacaaagattattcttccaattgtcaccaccaccatcacaacaacaacaacaacaacaacaaaagcaaaatctttttaagaagacaaaacctagtaccaaaatggaatcaaaacgagatattcgtgcaagaagatatgctgaacgtcaagctaaattagataaacaattacaattgaaaaatgaatattatcgattacgtgatgattgttttaaaaatgggggtcaatcagttattatagctattgttaataatgggattatgaattttatatcattatcatcaggtcaatttgactcattacaaaatgtgaaaactcgattaaatgaaatatatcctaaaaaaattcattcaattatatacaatgaatga

SEQ ID NO: 6006 - DNA, 1302 bp, Candida albicans
atgcctagtcatgttaccaatgtatataacgatattgatgatggaatgcttctactgtctttgtcattaaatgagagatcaaatgatagaagaggtttggaaattgaagaggtatacgactccagttttgatgatcctatggatattgatgatacaggtgagttgtcgaatcacatggatatagatgatacaacttttgagatagatcacgtcgcaagtgataactacgcaaataaaagagaagacgacaatgatactaataacgaagaagaacgtcgggaagatgggttgttttctttactatctcctacgttgatgggggcaaaacttgcaatcaaaaagccattactattaatgcctccgcccactgtttcggaacaatctgattcaaaaactgaaagtgcatcttctgttgattatgaatatgacactagttcattcaaacccatgaaaagcaatggattgattacacgaaaaaccaatagcagtacatttcagccaagcaatatagactcgtttttattccacagtgatggaatttcactgggtcagctgttaggtggttatcaagatttacatagcaattatcaacagccagtgactatccataatcatcaccatcactattactattacaataaagatgaatcagtaccgtcgccaccttctaacaacaatttacaatcacttgaacacgagcaaagaaatttgcagatgcaacaatacaaacaacaattagaggagcatcagttatatttacaagagtataaacgtaacaatcaaatacttttaccttctccttggcagcataatatatctccaatagaaagagtcccctatctattgatgtcctacttacaaatgttgataaatttcattgcttcgttatatggtgtatatcttgtttattgtttatttcgaacgataaatacagacatcaaaaccaaaatagaggaacaacaaacgaatttgattatcagcattgagtcctgtcgtcgatcgtactatcagaatggctgtgacgacaaggataacttggtcccattattggtatccaaatgtcaaaaatttgagaaatgtatgaaacaggacccttacaaattaagtaacgtttccattatgagtgctgagattattggaatgatcatcaactcattaattgaacctttaagtttaaaattttacttgtttatgttagcatttatattaattatatttgcatgcaattttacgtttggatatattcgagccaaggcatattatggtggtagtatgaagtatagtcttgacaaactcgattag

SEQ ID NO: 6007 - DNA, 2367 bp, Candida albicans
atgttgaaaaacgataccgttttcactaaagatatttcttgtacggcgataactggtaaagatgcctggaatcgrccaacaccacaaccaatcactatatcattatctttcartactgatttccakaaggcatcggaattggataatttgaaatrctcaattaattatgctgttattaccagaaatgtaactgaatttatgaaatcaaatgagcatttaaatttcaagtcattaggaaatattgctcaagcaattagtgatattggattagatcaatctagaggtggtggatctattgtggatgtgacgataaaaagtttgaaatcagaaataagagctgaaagtgtcgaatataaaattaatagaaacactttgggtcaacccgttccattagatattttccaagttaataaattgagattattgacrattattggrgttttcacatttgaaagattacaaaaacaaatagttgatgttgatttrcaatttaaaattgmacctaattccaatttatatttccatcaaataattgctgatattgtttcatacgtggaatcatctaatttcaaaactgtagaagcattggtgtctaagattggtcaattgacatttcagaaatatgacggagtagctgaagttgttgctactgtcactaaaccgaatgcattyagtcatgttgaaggtgttggagtatcatctaccatggtcaaagrcaatttcaaagatatggaaccagttaaatttgaaaacacaattgctcaaactaatagagcattcaatttacctgttgaaaatgagaaaactgaggattataccgggtaccacactgcatttattgcctttggatccaatactggaaatcaagtagaaaatattaccaattcattcgaattgttgcaaaaatatggaatcaccatagaagcaacttcatcattgtacatttctaaaccaatgtattacttggatcaaccagattttttcaatggagtaattaaagtgaatttccaaaacatttcacctttccagttgttgaaaattctaaaagatattgaatataaacatttagaaaggaaaaaagactttgataatgggcccagatcaatagatttggatattatactatatgacgatttacaattaaataccgagaatctaattattccacataaatcaatgttagaaagaacatttgtattacaaccattatgtgaagtattgccccctgattatattcatcccatcagtgcagaaagtttgcatagccatttacaacaattaataaatgataaacctcaagagacagtacaagaatcgtctgatttattacaatttatcccagtctctagattgcctgtcaaagataatattttgaaatttgatcaaattaatcataaatctcctactttgattatgggtatattgaatatgactcctgattcatttagtgatggtgggaaacattttggaaaagaactagataatactgtgaagcaggcagagaaattagtcagtgagggtgctacgattattgacattggaggagtttccacacgcccaggaagtgttgaacccactgaggaagaagaattggaacgtgtgattccattaattaaagctattcgtcaatcactgaaccctgatttactgaaggtgttgatttcggttgatacttatcgtaggaacgttgctgaacaaagtttacttgtgggtgctgacataatcaacgatatctcaatgggcaaatatgatgaaaaaatatttgatgtggttgctaaatacggatgtccttatatcatgaatcatactcgaggatcacctaaaaccatgtctaaattgaccaattatgaatcaaatacaaatgatgatattatcgaatatataattgatcctaaattaggacatcaagaattggatttgtcacctgaaatcaagaatttactcaatggaatcagtcgtgaattgagtttacaaatgtttaaagccatggctaaaggagtgaaaaaatggcaaattattttggatcctggtattggatttgctaaaaatttgaatcaaaatttagcagttattcgtaatgcctcgttttttaaaaaatattctattcaaattaatgaacgtgttgatgatgtgacaatcaaacataaatatttaagttttaatggtgcttgtgttttggtggggacatcaagaaagaagtttttggggacattaactggtaatgaagtgcctctggatcgagtatttggcactggtgcaacagtgtctgcgtgtattgaacaaaacactgatattgtaagagttcatgatgttaaagaaatgaaagatgtagtatgtataagtgatgcaatttataaaaatgtataa

SEQ ID NO: 6008 - DNA, 558 bp, Candida albicans
atggggtcaaaggtaaggaacgcatcagatattaaacaagaacagataacaagggatgaagctcttaggttgtacacgaacacgctaaatttcaatgtcattagccgatatgaccctgctattaaacagttgttgtgcaacacttctcattgtgtcttgtacaatttcaatgacgaaactgaagagtgggtgaagtcagattttcaaggaacattagcactttatgttcgagattttaaagttccatctactgcaactgcaccaagctatagagatttgcaaaaccttttctgttatggactcatacttttgaatagaaacaacccagaatgtttttcattgggtttattaccaaacaaaatcagcagtcagttttttccaaatggtttagatgactcttcgattctggaaatggacgttgaattgaatgacaacttaatcataataagaaatcttttaggtgaaatatacggtttatgggtgtttaatgaaagcgatagaatcaaactatttaaatcaatagagttctgtcttaacacagaggcaagcttaagctga

SEQ ID NO: 6009 - DNA, 966 bp, Candida albicans
atgggtaaaagaagagtagatgaagaatctgattcagatattgatgttagttcacccgattcagaaactgaattagaaagcacgcaccaccaccaccaccaccaagaaggtgctactacaattcaagaaactgttgatgttgattttgatttttttgatttaaatcctcaaattgatttccatgctactaagaattttttaagacaattatttggtgatgataatggagaatttaatttaagtgaaatagccgatttaattttacgagaaaattccgtggggacatcaattaaaactgaaggaatggaaagtgatccatttgcaattttaagtgtaattaatttaactaataatttaaatgtggccgtgattaaacaattgattgaatatattttaaataaaaccaaatctaaaactgaattcaatattattttgaaaaaattgttaaccaatcagaacgatactactagagataggaaatttaaaactggattaataattagtgaaagatttataaatatgccagttgaagtgattccaccaatgtataaaatgcttttacaagaaatggaaaaagctgaagatgctcatgaaaattaygaatttgattattttttaattatatcaagagtttatcaattagttgatccagtggaaagagaagatgaagatcacgaaaaagaatccaatcgtaaaaagaagaacaagaataagaagaagaaattggctaataatgaaccaaaaccaatagaaatggattatttccatcttgaagatcaaattttggaatyaaatactcaatttaaaggaatatttgaatataataatgaaaataaacaagaaacagattcaagaagagtatttactgaatatggtattgatcctaaattaagtttaatcttaattgataaggataatttagctaaatcagtcattgaaatggaacaacaattcccacctccataa

SEQ ID NO: 6010 - DNA, 3825 bp, Candida albicans
atgtgggacaaatataattttatcactccagcaaaagttcgagtgttgttggttccaataaatgattgcactccgtccaatttccaacgatatttacatttaatccaaacaaatgtcggagaggtgcgattattggatatcagagagaacaacaaattgcattatttcaactctgtaacttccccgcaaggaagaatcttcccagagtttattaccagctccattgataacgaattgattttccttcatgattttgatccatttagaaaaacattcatagtgctaggggtgggaccatatgggcaagatccttcgacggcattagttgaattgaaaaagaaatataacactgccattgttcacaatgttatactatttgacaccccagaagacaaattgaatgaacaagtacccgaggtgtttttccacaatgggactactagtcatttgacagctctagaaacaatattttgcgatataagtgggaattttttagaaaaactagacgcatatgcttctgcatatgctaatattacattgaggtctcctgtttcgattactgatagccatgtactaacaaaaactatcaatcaagcacagaaaagattaagttcagggtctacttcattcaaggttacctttaacaactcaacgacaacatcaactacaacacctggtagtacattagagaaatccaagactcatttaaaacatctaggcagacaacgtaagttgatggggagcttttatctcttggcaggcaagtaccatgatgcatttcaaaattttatagagagtttgacaagtctaaaaaaatctgatgatttcttatggctagcaagcgcacttgagggggttgctgtcagtatagtgttaatgcaattcattggcacagcatatcaattacctaatcaaacaatgaacccagtgctacaggtatcaaagatacgaggaagtatagacacggcgacagttcggaaaacatctatcgattccaatgtttcttctcccaggaattcaattaacggctcaaatgggtttggttttaatgctttaacctcagcaatccctgactttaacaatttaccggtgcaagaacttttgaagattatcacttcgcgggttgtgtactattttagcatgagcacaaatgatattgaaaacatggttcctgatattgtttacgtggaaagcattttacgaagaattaagctattgattggcattcatttttccagtagtatggaagacatagtcaagggaacgattacacctacaccaaacggatcattcccgaaaattgaaatcatcgacgagattgacaaaatattcctgctacaaataactgatttgaatattgtggatcaatgtagaatatattctgccttggcaacaatgtatgctgatttaggattaatgcgaaagaatgcatttattttaagacttttaatatcagcaattttgcctcacttaagttctggagagcttccagcccagtcaattaaagaagtccttgagaatgtatttgtcttgtatgatatctgtgatgaacctgaatcattttctgaagcagcgaggttccatggacaaagcaactggacttccttgcaaatacagcttttgagattggctttgaaagtcgcagaaaatttgaatgaccaagagctattgttaaagttgtgcacattattattgactagatacacacattgtttgccaactgatgaccaaatcaaattgaagaataaggtggatctggctttgaaatcaaatggtggtctaagtattccatattgggatccttttcttgttcgcaaagtcaagtttgtaaattcaaaaccccgtggcaacttaattcctatgaaagagacattgaactccaataattcactgcaaccatttttcgatccatacactaaaaaggaatcagataaagcgtttgttccaacattggtcaaagatgatatttctcaattgaaagtcactttacaaaacccatttgcatttgaagttgagattcatgagataaccattgttagtgaaggtgcacaaatagaaacgatcaaaagtttaattcgacctttggaatcaataacatccaaaccttcttctactatgccgaatggaaatatagttaataataaattacgtggtcatcctggaaaaaaatcgtcttcaacaaccctggtagttcatcaaggtgtatcgcacacgacgtctaccaattctgccagtacgtttgttcttgctccaaggtcaatggaaagtgttatgctttccttcaaagcaatttcgacaggacaggttaaaattactgggtttgatgtatctattggaaattgtcaaactcaattcttccatataatagacgaagagaagtttgatcatacaataaaattacaaaaagtgaatcaaaagtcaaaacaaactacatcagtgctagacaaagttgtgactaaccttcaatcgcagtccgttttgggtagggttatgacgagcctgttgagcttatccattattccaccacaaccgtctttgactttattagaaattctggcatcaaatggctgtttaatgttgcttgaaggagaaaaacataatgtaaccgttacattagctaaccactccgctcagtctattaattacttgactttttcattctgggactcaaacatcgagtttctcaacaagaaacttacgaacccaaatctaactgcagctgaggttcacgaattggaatggaagttacttgtattcaagccttttagaattttgaataaagacgttataggagaaacgataaacccaggtggggtagtcgaactccaatgtgagcttacaagcaggaagtttatgaatgaactgaagataatattggaatatgcccacaaatctgacaccgagcaaagcttcatgaagaatttgaacattcccttaaatgtgtcggtaatgccatcaatagatgttgttggctgtgaaatgttgcctgccataagcatactggataatgtgccccatagtattggacaagcattaaagtgcgttaagaatgtggatgactattgtttacttgtacttgatttgagaaactcatggggggagagattggaatgtaatttgaaatataatgagtttgaattgtctgaaccaatgcaggctgggaaaacacagagatttataataccaatcaagagaatcgaggtagacatcaccaagactataccttcgttacgtaacaaacaatttatcaaaaactataacatatcggacgaagaggagaagcatatgaagaaattgttttggcttaggaattccattttggaaaacttagtggggtcttggaaattgggcaggcgtcatggagtaattgatttacgtccaatcaggttgaccacaaaaatggcaaatatcttgtcctatgaaaacatccaggttcacaacactgtgcttacagatgatgatttgcaagtggattccattggaaaatcttataatttatcaactgaccaattttacgtgctcaaaacgactataatcaaccattcaaaaaagccaattaatggaatagtgcgtcaattaccatttccaatacataatactcctacaaagagtagtagtctgcgtcctcaactttctatcgataagaaaatgctcgtcaacggtactttacagaataaatttccagaaattgcacctggagatcaactagtattagaaaccagttttgtcattattcaaaacggtgagtttgaatggggtacagtagtagatttgttcagtgataaaataatttgtagagaacaactttacattacagcaaattaa

SEQ ID NO: 6011 - DNA, 660 bp, Candida albicans
atggatatcgaaactgccgcttgcttttcaatagcatttatagccacaccgatcctcatagtattggtaagattgctattcattcttccatcattaagacttccaacctccgtaaagaaaaagaaaaagctcattcaggaatgccaactttcaatcttgcttggttcaggtggccatactggggagatgatgagaattatatctaaacttgacatgggaaaagtttctcgtacatggatatacacttcgggcgacaatgcgtccttagcaaaggcacaggattatgaaaggaaatcgggtacatccctgcagtacataccaatcccaagagcacggacagtgggccaatcatatatactgagcattccaaccaccatatactcattcttgttttctgcaattgcgatgctcaaacacagaccagcagtgatacttttgaacggcccaggtacttgtgttcccgtggcatacattttgtttctctataaactccttggattatgcaatacaaagataatttatattgaaagtttagctagagtgaacaagttgagtctcagtggattactattattaccgatcagcgatcgatttattgtccagtgggaaagtttatatcaacagtatagccgtgtcgagtattatggtatattgatatag

SEQ ID NO: 6012 - DNA, 579 bp, Candida albicans
atgtcaggtataaaaatcagtttaaagaaaaagaatccaaaactaaagaaacttatagtgaataattcacaacaaacagatgaactgtcagagcagcagaagaaattgattacatcatattctacagaagataagactactcataaagatgaaaccaaaccaataatagttttgaagcaaccatgtaaaagtatgttacagaaagaaatcgaaattgacgagaaaccaatactaccgtatggtgtaacaacgtttgaaaaagtggagactacaaaacaatcaatgatcaaaaagatcgaatcagaagattccgatgatgactccagcgatgatagaaaaatcccaatagatgaatttggtgcagcatttttaagaggacttggttggcaagaagaagaggaaaagaacaaggatgacagcaaatccactaacactcaaaatttatctcataggaaacatggaatcaccttagggattggagcaaaacctatagatgaagaaataatacaagatttaaactctacggaaaaaggtattccaatcataaaacgacgtaaattaaatcatataaataaataa

SEQ ID NO: 6013 - DNA, 3363 bp, Candida albicans
atggggaaggatttgttgactgcagaagcggtgactaaactattaagatcgaaggacacctccatcacagagattgtcaatactgcaaatagtcttttgaataatacattggatatatatttacctggaaaagaagtgtttgtattgaacttactatgtgacagattgaatgacaaatcaaatggtaaatttggaaagtggaagtttaacaaggatgtatggaatttgcttcttctggtttggtcgaaattaaatcaccagaaggtagacagacaaagggtaatacagagattgaaaatcattgagattataattttggttttacagcagaacaatgacaatgaagtcttctcgagcttgtttgagtttcttggtattatgtttcaagagtcttacattattgcagatgaaaattctgctacacaattattgaaatgctttgttgaacacatggatgttctccaagctagcgattcaattgtgagttggactgaactagttcgagatatatatactcgtgcctgcctgaaaatcagtttagaaggatcaaagaagttttacaataagttttttgaagattgttgtttccccttgatcgagtatttagccatttctgaaggtctgtctgtctcaccaatattaaaggagttgttaattcaaggggtgttcaatgcggattccacaaagtactaccaatcaagtttagagcgggagctcaaaaagaaagacatcaaagaggtatcagtgatatatttatacaccttaacggtgcaacttttcagtgccaaacatatggaaatatgtgaaggggtatattctatcatggcttcaaagtgtcctgacttggcagaaaagctattgtctattttggcaagctgcaggaaaacaatttctaaaccatttatagagctgatttacaaagtagaggttgctgataagccttttaaacaattaaactgggacatggttaaacatatatttgcaattgatagtgagttggcaattagcaaatcagggtttttgttcaagacttacaagtctgaatttcagttggatgacaaagttgtacctgttgctgaagtgattgttgatggttttgcaagaaaccgcgaattgctggatttttttacaaaagtgtggcccaaagccataaagagagacgagatatgggaatcagatgagttcatacatactgtatcacagcatgttaagactttttcagggaaacagttaattgatgtcatcgaaagctcgttttatgcggataaggggagtcaacgtgcgatttttacagcaattacaaagggactaaccagttcatctgcaaacctaattgatgccgtcaaacagacattattagaccgcagcaactatttcaatgccacagagaatttttggtgtattcgttattacttgctctgtttatatggcacggattttactattgctgaacagaatatgaaacagaatattgatttgtactatcatttttctattttcagattattggagttacaggttatcaaggagtattcaaagtctgatcaaaagtattttattgcttgcattgaaggggagaaggaaatgatatctccgattttcaaaagatggttggtcattttcaacaaattttttgatagtgacttgttgattaagttaattctgcttggatatccagacattgaatttgacgatgtatttttcgaacaaccaaagctaacaacttcattgattagattcattactgagaatttaccagcaagaatggatcttatcgcttctatacctattgtttgctttaataaagcattcaaaaaggagttacttaatggtttgtttgtcttatttgtaagcaatcccactaaggaaacactcgaaaacattcagtatttgcttggccagcctacttacctgtctattttggagacaaattttgataacatgttaaaattgttgactgttagtactgaggaatcaaaattgatagcttataatgtcattgaaattgtatggaaaaataatgtccggcagattaaaaatgaagagaatcaaaagtatgtcaacgatgctatctcgaaattgagtagttatttggactccatgtcacaacaaataattctgcctgaactagaagcaattctgataatacttacaaatactaaggaagttggtttattcgaaaatacggaaaaggggttgaataagttaaatgaaaagtttacaaactattgtattaacactttaaacaactgcaacacccaaaattttattactgtaaggtggctattacaggcacttgtaatgttgccacctaaatcattgtcttttgaaaatgtcatttcctgtacaaaaagattagatccaaatattttgaaagacaactctattcaatccacattgtttcaattgatttgcaagacaatagactttaactacaagagtttggtctatgttttgagtttgtttgtctctttgctgtctgggagaaatacggagttgtatacagtgttaaagtcgttatttcaaaaattttctaaacattcgcagttatattttgaagtctttgatttttttacccgttcaattgatgctgtcccagttgaattcaatttaagttttgcacagattgcttccatatttttgagcacagttccaaaagacgcagatgccaatcgctacaacagcaaatgttttactttttatgttaacgctttacaatctggaaacgaatgtgtggccatgcagattttgactagcttaaaagatttgttgactaaccagtcctggattttcaaacaaaatttgctagaaataactttagttattgttaaaaccggattgcaaaaactaaactcttttgccaaccaagaacaaatttatattttatcaacccaaattgtttcccatatcttgttgtatcacaggtttaagattgccactagacaccatcttgttttgaacgtgatgtcaagtttattgaagtacctagcagatggaacttcaaagttatcatcaaacacagaagctgcatctgcctatgctcgtttattgagtaatctatgtgaaccttcggagagagttggagataagatgtttcacttaacaacttcggcaagttatttcaaaaaattgttaagaaaacatttgtctgttttattaagcaattatatctattttaatttgaagtacacttttactcgtactgtgaatgatgctataatgccaggaatttacagtatgtttactgttttgtcacaaaatgaattgagagtagttaatgattctttggactacggtgggaaagcattctataaaactttgtataatgattacaaagatcatgggaaatggaaagatcaataa

SEQ ID NO: 6014 - DNA, 3528 bp, Candida albicans
atggcaaaacggaagttagaggaaaatgatatttctaccattgaagatgatgaattcaagtccttttccgatcgagatgaacaaatagatgaactcagcaacggccatgcaaagcatagagagaacaacgcacaggagagtgatgaccacagtgcaagtgaagacgacgatgatgaagacgatgaggaagagggagaaaaatcagtacaaccacctaataagaaacaaaaaaagcagctttctgcacaagatgtccaagtagccagagagacagctgaattattcaaatctaatatatttaaacttcagattgacgaactaatgaaagaagtgaaagtaaagaaagctcacgaagaaaaaattgagaaagtattgcaccgtttgcatgatttgattaaacaagtgccacctgtggaaaatctaactttacaacaagcagaacaacattttaatcccaagaaattagtcatcccatttccagatcccaaaccaacaaaagtaaactatagattttcttatttgccactgggagatctttctttggttgggtcgtacggattaaaaacagctattaaccaaccacatggacaaagtatcgaagtagcactaactatgcctaaagaattgtttcaaccaaaagattatttaaattatagagcattatataaaaagtcattttatttggcatacttgggtgagaatttaatccatttgtcgaaaaagaataatttgccgatcaaggtgtcgtatcaattcttcaatgacgatgtattgaaccccgtcttaaaaatagagagtatccaaactgaaaatcccgaagatttgacttttactaaaactaaaattgctattaatttaatagtagcattcccatttggtgtttttgactcgaaaaagctacttcctgataaaaactgtatccgtgtgcaatcagacaccgagactttgccacctactccattgtacaattctagcgtgttatcacaaacatcctacgactattatttaaagtatttatataccaccaaaaaatcaacagaagcattcaaagatgcatgtatgttggggaaactttggttgcagcaaagagggttcaattcgtctctcaataatggggggttcggtcattttgaatttgctattttaatgagcgcgttgttgaatggaggtggattaaacggtaacaagatattgttgcatggattttcctcataccaattattcaaaggtaccatcaagtacttggctacaatggatctaaatggagggtatttatctttctcgtctttaattggagaaaacattgcatcgaaatacaaatcagatgggtttaatgttcctaccatattcgataaaaacaccaaattaaacatcttatggaaaatgaccaagagttcttacaagagtcttcaattgcaagcacaacagactttggaattattgaatgacgttgtaaaagacagatttgacgccattttgcttcaaaagtctgattttgatccgatgagatacgatattgtcttcaagttatcagcacctgaagagttgtacgattcttttggtccattggaaaagatagcatacattacttttgataattatttcaagagcagattatttgcaattttaacaaaagcattaggtgaaagaatagaactgattgttattaaaaatgaacacccttcaaacacatttgccatccacaagagaaagccatcacacacaagctcaacctttgttattggtttgcaattaaatccagaagaatgtgacaaattagtaaccaaaggtccgaataatgaagataaggatgctggtatcaaattcagatccttttgggggaacaaagcatctttgagaagattcaaagatggatctatccaacattgtgttgtttggaatattaaagatcaagagccagtggtaatgaacattatcaaatatgctttagatactcacttgcaatctgaaatatcacaacatttggcatctctgatcagttattttgataagaaattgccagttccattattgccttcagcaacaaatcaagtgatcacatctttaagcagctttactgctttaaggaactcatttgaaaacttgagtaaagtcttgacaaatttagagttaccacttagtgtgaagacagttttgcccgcatcatctggtttaagatacacgtcagtattacagccagtgccatttgcagcatccaaccctgatttctggaactactgtgtattacaatttgagacttcaacaagatggccagatgaactaagtgcattggagaaaacaaagacggcatttttattgaaaattagcgaagaattagctgaaacagaatacaattcatttatttcaaaagatgaatcagtacctttcaatgaaaatataactttgttgaacattttaactccagaaggttacggattcagaatcagagcttttacagaacgtgacgaattgttatacttgagagcagtatcaaacgcagacaaacagaaagcgttagtccaagatgtttatttgaaattcaatgaaaaatatatgggctcagtaaagcacaccagatctgtaacacaacttgcacaacattttcacttttattcaccaactgtcagattttttaaacaatggttggattcccaattacttttgcaacatttcagcgaagaattggtggaactcattgctttgaaaccatttgttgacccagctccatactcaattccccattctgttgaaaatggatttttacaaattttgaatttcctagccagctggaattggaaagaagacccattagttcttgacttagttaaaagttctgctgatgatgatatcaaattaagtgataagttaactatacaagcacatagaatcattgagcaaaattttgaaaaaattagaaaaacagacccttcaggtattaaaacacagtattttattggatcgaaagatgacccttctggaatattatggtctcataatttaactttaccaatttctactaggctaactgcattgtctcgagctgccatccagttgcttagaaaggaaggcattactgaaaccaacttggatttgatatttactccagcattacaggattatgacttcactattaaggtcaaggcgaataacgttactacttcttcaggtattttaccaccaaacacatttaaaaacttaattcaaccattaacttcattccctgatgatataactacaaaatacgatttggttcaaggttatgttgatgaattgaataaaaaatttggtaatgctattatattttcaagtaaaaagttcacaggtttatgcaagaacaatgaaaacgtcattggtggtatttttgttcctaccaacttgaccaaaaagaaattcagggtcaatttgggcattaacgttaaacctttggatgataaaggagatgaagttataatcaacaccagctccatatacgatgaaattgaattacttggtggagatttaattaaagcattcgataaacgtaaataa

SEQ ID NO: 6015 - DNA, 1518 bp, Candida albicans
atgcctgaactacaacagccagataaacattctatggatatcccccatgtggcagctattgatcttccactaaatgtgcacaatgtaactagagcggttgatatgttaggtggagaggagttgatacgggcatcaatcagagaatcacatccattggagttgaggttaagaaaagatccattccatcacccaatacaagccctgagtaataattcagaaagaatattgatgaaaatcaaaatccccaaaaaaagcttaccaaaaaataacgaatcatattccattcaacaattacttgaacttaataaccaagataaactgacacccagagaacggattcaacccgtggcaatcatagacaaaacatatctgtttaaagcaatggcagacttccaagtttctacaaggaataactcatttgtgcaaaagtttaacaaagcgatgattaaccatactggaataaatgaaattaaagagtacattgatgagcataaaggctggcaggggtatgttaatttatctgaaaactatttccaaaataacgatcaccaattgattccaccaccaatactatcctcaatcagatttccgtttgattacaaatatcaacagaatcctggtacgtcaacagtcagagatatacatggtgaggtaaaagtgatttcaaaccagaatcgtcaaaaattgtatacacttttgatagattataataccccgactccgcaagaaccggtagaggaaattagaaagaactgggaaaagttgtctaacgccaatttatctgtcaatagttcagagcttttactagtgcaatgtatcagaaaattacaagcattatttgaaatcaaaccaatctggaatagaaagcagctatatagcatacttccagaagatatgaagaaatttttaaagcatgctttgccatatgttgcctatacttataaaagtggtccatggagattctgtaacattaaatatggactcgatgttgtacatgacccatcttattggagttctcaaactgagtattttagagtgcttgggtttaaaaaggggacaactaccgatgattccaagatgatagttcctccttctttgcagggatctttagaagtggttgaaatacccgaaaatttattgtttaacggagtttcgttaccctcagtggctactttccaaataggagatatcatggatgcagacataattagtataattcaagaccaccagagtagtatgggtgaggactttttaagaaatgtatgtgatcctcaagacggttggatcaatcgacaaacaatggaggtaatcagacgtataatgaggtacaaattgaaacaattagtaaatgaagaaagcattgatcaaagtaaaatacacaagattatcaataccaattatatcgaggataaggaagatgaagaagaggctaatgatatgcacgaggacagaaacggtcccgatgagttagatgaagacgacgaggaagaagaagaagaagaaactgctctatattag

SEQ ID NO: 6016 - DNA, 1092 bp, Candida albicans
atgtcctcttctcaagcacgaaaagctcttcaagatgtaattcccaattatttaggtgaatttacacccaagctactagattatatcaattccttatatcaacttagtttaaggaaacaagcaatactaccaaataaatcggaaattgcacgttttcatctatgtgctgttgttattgttgaaaaatataaacaatcttttgaattgccgactcctgatgtgtcaagaataccaacacaacctaaagtagcagcaaagttactagacacttttcgtgagttgatagaacaaatctccgcagccagcacacctgtatcaagtcccaaaaaggtgaaaccaccatcccaaagtccactgacaccaacaaagagtcgaacaagcaaagagaatttgaaatcaggatcccctttaaaacgtcttcgagcagaaatgttgcaagaagaccaggtcaatggtaactcccccgatggccaacttaaggatgtagactctccctttaacccaaagaaaagaaaagaatccaaggcaggcaccccaacacataaagtttataaatacgataagaaacacgttctgatagcagattttatagcattctgcaacactttccttataccaggtgatatcaccgccaagatggtgggcacatttttaacgcatcaacacaagtttcttaaaaaaagtgattggtcattggcctgtggtatggtttatgcggcatacattcggataaataacagattacttgcacaactggttggcaccaagtcagagttcacgaaacaattgttacaataccagaagggaggtttactgctaggggccatgcaatcttggtgtggtataatcgaagaatggattcaagatgaaccatggattcaagagatagaaaagacttacgcttatggtagcaaaacagctgaagaaaccagaaattcttttgaaagaaaagcgaaaataggtgaaggctgggacctaatggaacagtttggggctatgattcatggcgagacaatttcgttatcaagtcaccaagaagagtattacaaaaactggcgtaaagaggctttagagaaatgtgaccaactataa

SEQ ID NO: 6017 - DNA, 1479 bp, Candida albicans
atgaaacaacatccacttgtcacggcatataaaggcattgatgacttgcaacaattgaaaaaatggttttacgagtataatgacacaatagaccatagaaaaaaagcaatatcaaaagtaaaaggattgttaaccagagggaaattaccacatggagttgaagccacatcgcttctaacatccatagttttggatgatttgcaaagaaaagacattgactcttgtgtgttacagttatcttacaccatggctttgattagatttgttaatgggttgttagatccttatcagcagtcaaactatgccattcctatgcacctattggcaaaacaattgaacctacctacatattttgtagaattgcgacacatggggactcatgaaaacttgccaagcctagatatattgagaagtacttgttcaaaagcattgacttggctttatgacaattattggtgtcatgtggaagaagcaaatcaggataaacaagtttctattggggggccattgactgatgccgttgaatttcgaagtaatgatctaaggacaagaattgaagattctcagatttacaataatttgaaagcgttcaagcgaatacggaaacaagatctaaacaaggtttacgagaagaatgatacaacgagcgatttagctgcgacatatcataggtgtgttctggacatagtcgaatttgctaaagaaaattgtgatttattagtgaatgttttattgctcaagaattaccttatatacccttcttcaaaagtcaaagataagaaactgaaattcaatcccttgattataaaattgtatgaaccattatttgacgcattggggttgtcatttaaactcaaatgtttttccaagactatcgaattgattgaggcgaccccttcaagttttgtggacaagaaggtatatcgaaagcttggttttactgaaaagtttgagtatgacgaactcttccaagtaatggaatgggtgttatatttcatgcaagaccttttgagaaacgaaaatgttcccctgccagtccacaacaagaatgagttggtaatcttatttttggacagtctcaaactgatagaacaaaagatatcacaatcacttttgcctagttttgcaaaaatcttgcaaggtctttgtgacgtggtgaacgatggagttaaatctgaaattgatccagaaactgtacaaaagttggatgcttggaataaactgcttaataacctacatagtacaaagaagatttttgagttgccaccatccttggacgatttattaggattatcgccgtcgcctggtccaatcccagagacaacttccagcaacccaatgaaacatgtcttagatgatgatgatgatgaagaggaagaaggtgttcgtagaaagcagcaccactcgagtgatagtaaaacctatattttgaaaccccataagaattggaggcccgttccttttgggacatgtatttag

SEQ ID NO: 6018 - DNA, 810 bp, Candida albicans
atgagacaaaagcgtgccaaggcctataagaaacaaatgagtgtgtatgtccacgcattcaaattcagagaaccataccaaataatagtagacaatgaactcatcaccacttgtcaatcagcatcatttgacattaataaagggtttactcgaactatccaagcagaaaacaaacccatgattactcaatgttgtatccaagcattatatgatactaagaatcaaccagcaatagatattgctaaatcatttgaacgaagaaaatgtaatcatcgtgaagccatcgatcctagtcaatgtattgaatcaatcgttaatattaaaggacaaaataaacatcgatatatcgttgccagtcaagatttacaattacgtaaaaaattgcggaaaatccctggagtaccattgatttatatgaatcgatcagtgatggttatggaaccgatcagtgatgttagtaatcaatataatatgaattatgaatcgaaaaaattgaccggaggattgaatgatattgaagctgggaaattggaaaagcaaaatgaaggtgaagatggggatggggatgaactggaagttaaaaagaagaaaagaaaaggacctaaagaaccaaacccattaagtgtcaaaaagaagaaaacagataatgcaactgctgccagtactaatcaagagcagaaaaagaaaccaaatagaagaaaaagacatggcaagtcaaaagcagaagagaaggaagaccaagaacaggagcaagtgaacgaagcaacaactaatgaagatgcacaggaggcaataacagctactgaataa

SEQ ID NO: 6019 - DNA, 837 bp, Candida albicans
atgttcaaacaatccatacgtagtctagctaccaagtcaccaatttcaagtgctgctgccacgaccaccaccgctagtaccaccagcactaccaccacagcttccttgaattttgcaaaaccaccatcttatacattagctcaattacgtgaattcccaagtttagaaccaaaaacatttattccattaccaacgacatttttcaacaccgaaaaacctattcgtagagatatattatggagttgtgttacatatgaagccgataaggcccgagtaggatcaaattatgcaattttaaaatcggattcaccttattctaatcgtaaattacgtcctcaaaaaggttcaggtcgtgctcgtttaggtgatgccaattctccacatatggataatgaaattaaagctcatgctataaagggacctcatgattggagtactgatttacctagtaaaatatattctcgtggtattcaaaatgcttttactatgcattataaacaaggaaatttaaatgttgttgaaaatgaattagatttccaatatggatatgatattataactcaactgtttgtttcagtgcataatttgaataaattgaatttattatttataactaatgaaccaagagataatttaatggaaagtattaaaaaattctacattaatgaaaaagaatttaattcattaaataaaaaggaaaaaccaaaatatttacagaaattaaaaggcaaagtattgacaaaggaagatgttgaagttagagatatattaagagctcatagagtattcattgaatcttctgctttacaatggttcatcactaaacatactgtttaa

SEQ ID NO: 6020 - DNA, 3540 bp, Candida albicans
atgacatcaagttcacaattatctgcttcttccaacgaactgattcaaaatgagagattattatctctgctgttatttgaccaaataaggccggtttgcatagaactatcagaagcttcaactctgcaaccattcaacacaaacaaagttgtcaatttgatgatatcaatggaagacattcttaaaaagcaccacgatgagtataataaggatggaaattttagaatctatcagctatcgcccaagctagcagattatatcttttaccctttatccaatatattgaaacagccggctttagatgatacaattatacagcatttgttcggaataattagattcctagttgaatactcttggagcttcaacgttaattttgttcttaccgatcagttacttcctttagtgatatacctttccagtggagatttgaacaaggaaccattactcataacaaagaaatccatacaattcaaaatagcaacagtttctgtattatatactattacgagcactttgaacaaggaatattttcaatccctaactgaaaaaagactattgtttataagcaatgtcataactatttgtttaagtatcatagtcggcctgcgagtggaatctcaagatacaatacaattggtcctcaaatgtcttagtttaatctccaacgtgaaaaggtatttgaattcgagtcagatatcaataattcttccaggtattgtttcttcgataactaaatttatatcactaaatttaaatttaaattatcaaatcataatccaattcttgcgattattatcaggtttcatatgcgcttcctttaatgataaagagttagatgcccaaatcgagttgaacgaaggtataagtgatatttcagaaatccatgtcggatgggacgacgacaatgagactttgggcaacaattcattatattcagatgtcactattacagagaatgatcataggtcaagtgcatggttaaaagccacttccaaacaattgaaattatcattaataatcatttttaagtcgatactacttggatcaagaaatagacatcggttgagatccaagcaagaactatacgatgagattcttggatttgttgagactattttgaaaaattgtttcaacagcttgtttaaagaatttgcctcattggcaattgacatagtatcaattcttggatacgtaacatctgaagacaacaaagaaatggccgataaaaccaacaaactatcaaatacactttgcatgattattgaaggtgaaaccaacaaagaggaagttcttttcgaattagttaaaactaaacttgctgatttaattgataataaactatcagggattgtttttgccttagatgaagataagatatcgtcaactgtagcatcaatgatgttcaattttagtcttttgttatgtttatcaagaaaagtaaaacttgattgtgaggacttggattcattgaaacaaagatgtttggccctattaacagaatatgttgcggataggttcaaattcgagagttccaaaccgatcaaaagctctaatgctagtgggttactcgaaacgtcttcaatgacaaatcaactagactcgatcgaattacctgggtacattaatgcaaaaagtgttgtaaaacaagaaccattgaagaaagaacaggacaagagggcttatattcataatttgaaaacaatttcccgcaattggaataccaatgaaattaataactcttctggtaatacactaattggtataagttctaagttttcagagacaatactacagaactttattaattatttatcaagcttaaagtacgaagctagcaacagttcaacgttaacagaattggagaatatttttgaattagctgacgataatgacatgattactaaaagtacctctctttgggttgcttctaattattacaaacgatcaacccttggcaaagtgatcaattttgatttaggaaaatacttggttttagatgatgatgaagatatggaaatagatgatgataccaaagaaatgtcatttttagttttatcaagggcagaagagttacttgaagagatttccgagaaccaagaaaagtactcttcacaaacttatatcctagcttacaatgcagcattacaatcaattaaagttgttgctggctcgatcccacttgatcagtttagaaccaattttttgatggatcatttgttgtcagtatttcaagcattaacgtataatgatatgccagaaatacaattacaggcacagtcgacgttgaaagtggtattggatacatattataatggttcgatggtcaacttgatttctgataatctggattatcttattgacagcataagcttgcagatgtcagtggctagtaatttaaccccaatgcttccaggtattcttttgatcattgtaaagattgccggaatccaattattggagtcgaatcaattgcacgatgttttgactgatatgtttgtgatacttgactcctttcatggttacaataaactcgttgaaagttttttcatagtgtttgaggctttgatagatcagatccatcataagttcgacagtcaacttaaagttgaatttaaggagtcttcgaaaacaaacacttcattgtataagccatggggaatgaccaataaggatcaactattggaactacttaacgagtcaaacaaaatggtcgataaatatgaaggttatgatagtaacaaggagtattttaaaagaaaagctgacttgcctttttcggagatggatgcagattctgatgacgaagaagaggacgatgaagcaaatattgatgacaatggagaagaagaagaagaaaaagaggaaatatggagctcacccgtctcaaaggacatttatatgatttcactacgaatatttaattatggttttacattggtatcacaggaatcttacacattgaaaacacaaattatcaaaacactaagattgttattgcctttgctttgcaccaattacaaattattattacctgtattagccttaaattggcagatgctaattgctttagtgacaggttcaaaatctttatctacaagtattgaaagcaatggtgaatatgcttcggaagatattggtgtcatgaccgaggcccttcaattggtgactgaaatattagaagaggataaaaggagatatgaacatttcttcagtaaaaagtttcaggaagcttgggaattcatatctcgacactcaaaactagtgcgccaaagagaagtcacatcaacaactaatattagagaacaaaagcaactagttgtttctgaaaaagcgatatatactttcagaaactatccattactaaagacatcactagtaacgtttttaattactggtgtacaaaattatgaaaaaatgatccctgatattcaccgctttgagattatcaaattgtgctatgaattgcaaattcctcaaagtattcctttatctagggatacaatcggcgtactagaagttcttaaaaatacaacgtaa

SEQ ID NO: 6021 - DNA, 999 bp, Candida albicans
atgtcaacagtatattataaaaaactagataaattacaattccagatttacgacttgttcagctctttgcttcaattatccgaagctgaagatgaatctgtctacaaggccagctttgatgacaccgtgcaagaaattgatctgttattgattgctttcaaagacctccttagacttttacgacccaaagataaatccaacaaattcgatacatacgaattgaaatttcattctttgaagcacaaattgcgtgagttgcaagtatttattaatgatcaacaacaagacaagttgcatgaatataggataaagcatttccatctacaagatctgcctgtggataccatcaataacgaatttgctcgagaccaattatttgctgatcgttccactaagaagactaagaaagaaatggaagcgtctataaatcaacaaattgtcagccaaaataaacaaataacaaaatccttgcaagcatcgagacaattgttatcagcaggtatattgcagagtgaattgaacattgacaacattgatcagcaaaccaaggatttatacaagttaaatgaaggatttatccaattcaacgatttgttaaatagatctaagaaaattgtcaagtttattgaaaagcaagataaagctgaccgtcaacgtatatatttgagtatggggttcttcatactttgttgttcttgggtggtttatagaagaattttaaggcgaccacttaaaatattcttgtggtcctttttcaagatctttaatattttcaactggttgcttggaggtggtagaagtaaagggttatctgcaagtgatatgatagtttcatctgtgattgctgctaccacggaaatcgtcgactatgaggcaacgaaaactttgttggataccttgtcgaacgctgtggactctaatacagcgattgatacacttgcaatggtagtggaatctcttacgacatcatcaatggaacatattgtagatgaactatag

SEQ ID NO: 6022 - DNA, 984 bp, Candida albicans
atgatgtccacaaattttcaatggccaggaaccaataagaatgataatacagaagtatctgttgaaacaccatcaagcacagatcctcatgtccctcgctatccatttaccgcaatgtcacatgcgacggcaagcacaactatgaagaaaagaaagcgagacgattttgatggcgacaagtcaacaactatcaccatgaataccacgacaacacgtaaatacatacaatcatctttaggatcttccaagttcaagaaggccaaaacacccaaaatcagtgggcaacctttgccactacctagattgattgaatcattagacaaatccaatttacaaaaacttgtgcaagatttaataactgttcatcctgaattacaatctacattaattaaaatttcccctagaccttctattcaagattccattcaacttttacaagacaaatttgatatgattatatctcatttaccttacaaatgtgatgttgaaagtgattattcatatttaagaatcaaacctcatttgcaagaatttttatcatcagtgtctgattttattttaaattatttacccccattagaaacaaatatgacacattctttgcaatttttacacgaaactaccaaattagtgtataacttgcctaatttcactaatcaagaatttcaatacaccaagtcctctgcattagaacagattgctaactgttggttgattgtattaagccaggatgaagaaaaagaaggaaacactgatgtggtgaaagttatacaagaattggaattgttagagaaattacacgaacataatgagatatcattcaataagtttgaaaaagttgttgattattgtaaagacaagttagaacaacatgaattaatcatgaataataacgaagccggctctggtgttacatcgtcaataagtgacttgatcactgtggattattctaaatactctatagccaatacaacttctatatag

SEQ ID NO: 6023 - DNA, 1299 bp, Candida albicans
atgtcaaaagcatttagtgcacctggaaaagcatttcttgctggtggatatttggttcttgagccaatttatgatgcttatgtgacagcattgtcatcacgaatgcatgcagttataacaccaaaaggaaccagtttgaaagaatctagaatcaaaatttcttcaccccaatttgcaaacggagaatgggaatatcacatatcatcaaatacagaaaaacccaaagaagttcagtcacgcataaatccatttttagaggcaactatattcatcgttttagcttatattcaaccgaccgaagcatttgatcttgaaatcattatttactcggaccctggatatcattcacaagaagatactgaaaccaagacatcctcgaatggagaaaaaacttttctttaccattctcgtgccattaccgaagtggaaaagaccggattaggttcatcggcaggattagtgtcagttgttgccacaagtttattatcccattttatccccaatgttatcagtacgaataaagatattttgcacaacgttgcacagattgcacattgttatgcccaaaaaaagataggatctgggtttgatgttgcaactgcaatttatggtctgattgtatatagaagatttcagccagctttgataaatgacgtgtttcaggttctagaaagtgatcctgagaagttccccacagagttgaaaaaattgattgcaagtaactgggaattcaaacatgaaagatgtacattaccacacggaatcaagttattaatgggtgacgtcaagggtggctcagaaacacccaaattggtatcacgagtactccaatggaaaaaggaaaagccagaagaaagctctgttgtgtatgaccagcttaatagtgccaatttacagtttatgaaggaattgagggaaatgcgtgaaaaatacgactcagacccagagacttatattaaagagttagatcattctgttgagcctttgactgttgcgattaagaacatcagaaaagggttacaagcattaacacaaaaatcagaggttccaattgaacctgatgtccaaacccagttgttggaccgttgtcaagagattcctggttgtgttggtggtgtggttccaggtgctggtggatacgatgcaatagctgtattagtgttggaaaatcaagtgggaaattttaagcagaaaactcttgaaaatccagattattttcataatgtttactgggttgatttggaagagcaaacagaaggtgtacttgaagaaaaaccagaagactatataggtttataa

SEQ ID NO: 6024 - DNA, 2670 bp, Candida albicans
atgaaacaaagtaatggaagcggtgcttctggttttcattcattcaaaggattaaatgaggcagaagtagcgaaaacaacagctgaattaaaagcgaaataccaatcatcgtccacccctaatgatttatataatttgattgatgagattgatgctgccatggctaacatagacaataatcttaataattttacagcattgaattccggtagactccaacaagatataaccaatatagagttggcaagaactactaaattgtcatctacaatttcaaattcgagtaaattaacgtcgattttttcacaagcaaatgatttgggccataagttgacgtttaaaatcaaatcattagatcaagaaattggcaatgtaaacaaaacgttggactacgtgacaaatattcaattattaaaaaataacatcaaccaagcaaattatgccattgaacacaaaaattgggaattggccgctcaatgtatacatactatcaattcaaaaatcccctctgaattgatttctggcaaatatgcatcggttgtgattccatccaccgagttgccagaactgcctacagttgcaatagctaattggatagataagttaacccaagtgtttaaggaaaaattcaccgaggcagcaaaagctaaaaatgttgaacaattgacgaaatttttccaattattcccactaatcaaccaggaagagataggtcttaactgttattccaaatttatttgtgaaatcatcaatgaaacatctaaaagtctaacagcagggttggagaatgcccatgatttgaaacccgctattttttctaatgttgtcatgcaattatttgagaacatttccatgatgttgtctcaacatggacctttaatcaaaaaatactatagtgctacatatccactggcattgtcatatgttattagcaaaatccaaagagaaatcgatttacaagttggaattattgctgacaccttttatgatttaagaagattagataaacattttcaagacatcaagctttacagttttcctgtattgacacgaagattggcagaattaaaagatcacccaaatcaagatcaggaatcaagaagaactagttttgatacatcagacgatttattaccaataagattaattggagatttaatacaagaattgtcttcaatttttgaaaactggacgttatactgccgatttataaccgtcaaatacttacaagaaccgaaacatagacaaaatgggaaagaagtagtgacaggaaaatcacctacggaagacaaagatgcattacttttacctgatttaattcgcaaatccacttttacaagaaaaattaatgaaaagcttttgccttcatttgaaacattgtacaagttttatttccgtcgttccatagaaaaatcaatcaccattgaagaattgccatcattagatgcatatttggtattaagtaacgagcctggagtacaccccgaacaagtacctatatcttctgttgttgaagatttgactttggtcctaaataacactttgcgtaacattattcaatctggtttacctacagcagtgaagagttttattaatgaaagtttcggcattgttcaacaagatttgttaaatggatttttcattaaaaacttgaatgacaatcaaccaagatataaccaaacattatcattgatagaccctgcaagtactattaaccgtactaatagtccaatcagtagaagtgctactccagatgtgcatggaggtagtggtggattatcaactggtgcaggatttttgaagggagcgtcaagtgccttgggaagtgtcgttagtggttctggtgcaattgtaggcagtttacaaaccactcccaataatacaaaattgttaagtttcatcatttatttgaacaccgtggctatggcacaagaatatttcacaaaagtatttcagaatataaataaggacagttacttacaatcatattatcctttcggtaaagacaagagtaaaatctcaaatattttacaacaagattttttggacccatttactagtgtaagtaacaaaatcatttcagaaagtttgattaatttatacaatcaactgatcaagaacaaattgttattgcttgttaatgaattctttacagatattccaacagccaataatgaaaacaattatgtgatttattcaagcaataacataaatgacccaacaatcttaattaaattcacgtcaaactggcagtcattaatgaaaccatacctacaaacattacacaaaactctttggagtaaattgttgcgattagtcgtggttaatttaaccaatttgttagaaaagaagttgttcatgatattaaataaattgaaaattaatgaattgggagctataaagctagagaaagatgtttcgtatttaattaatgaaatttgccgtgataattactatttgcgtgaaaaattcgttagattgactcaaattgtattattggtaggtatggatgatgaagagtacgaagaaagcaaccaaccagtaactaaagctcgtgaaactgaagaggatggaggagaaggaagagatgattttgacgatgaaattggtggtataaattgggtattaaccccacaggaaagaatccaaatacgtaaatacagaatttag

SEQ ID NO: 6025 - DNA, 1695 bp, Candida albicans
atggctagaagaaatagaaataaaactgtgaatgaagaagagattgaacttgatgaagttgactcatttaatgccaatagagaaaagatattattagatgaagctggagaatatggacgtgatgatcaatcggaggaagatgattctgaagaggaagtcatgcaggtagaagaagatagtgaggatgacgaagaagatcaagaagacgaagaagaggaggaggaggaggaagaaggggaagaagaagaagaagaggaggaaaaaggatggggaggaagacagaattattatggaggagatgatctaagtgatgatgaagatgctaaacaaatgacagaagaagcattgagacaacagaagaaacatttacaagaattagcaatggatgattatttggatgatgagatgatggaagattggcagaaaaaggctgattcatatgacaataaagacacactgtcatcaacccagcagcagcaacaacaacaacttatcattgaaagcaatagttctattgcgaatttggaagatagtgataaattgaaattacttcaacaatcattccctgaatttattccattattaaaagaattgaacagtttgaaagttaaattagaagatttacaaaaattagaggataaaaacaaatgcatagagacaaagattgtagcattatcagcatatttgggagctatatcgtcatattttgccatatttgttgataatttgaacaatgaagaatcgtttgtatcgatgaaagataatccaatcatggaaactatattgagttctagagagatttggagacaagcaaatgaattacctgatgatattaaattggatgatgttaaagtacatgtttccgatgttgtttcttctagtgatattgatgacgaagacaattttgttgacgccaaagaagaacaatctgaagatgaagagatatcagaagaagaagtttctcaagacgaagacgaagatcaatcagatgatcttgacattgatgctaattcagaaagaattatcaagcatgtttccaaaaaacacggtgatgatttcacagaagctgatatcgaagatattgatatggaggataaacaacgtcgtaaaaagacattaagattctacacttccaaaattgataaagctgcagctaaaaaagaccaatcatattctggtgatatagatgttccatataaagaaagattgtttgaaagacaacagcgtctacttgaagaagcaagaaaacgaggattacaaaaacaagatgatgaaaatatatcggataatgacaatgacaatgacggtgtcaatgatgatgaaggatttgaacaaggtgatgattattacgaatcaataaaacaacataaattaaataagaaacaatccagaaaatcagctcatgaagctgcggttaaagctgctaaggaaggtaaattggcagaattacaagaagctgttggtcaagatggtaaaagagcaattaattatcaaattcttaagaacaaaggtcttacgcctcacagaaagaaggaatatagaaactccagagtcaaaaagagaaaacaatacgaaaaggcacaaaagaaacttaaatctgttagacaagtctatgatgctaataatagaggtccatatgaaggtgaaaagacaggtatcaagaaagggttatcaaaatcagttaaattggtgtaa

SEQ ID NO: 6026 - DNA, 2550 bp, Candida albicans
atgtccgatcaattagaaaaagatatagaggaatcgatagctaaccttgattatcagcaaaatcaagaacaccatgaaacagaacaagataaagataaagaacatcaagacgtagagaagcaatccagcgaagaagaaaccaaaggaattgagcatgttacagattcaaatacagacgatatcggcgtaacaaaactgcaggatacagaagaagtcattgaaaattcgccagtggaccctcaattgaaagaacaacaggaatctacaaccaagatgctgttgtctgaaagagatttggtagatgagatagatgagctttttactaactccacgaaaactgtcactgaaaataatcaaccaagtgaaactaacaaaagagcctacgaatccgtggagaccccacaggaactaacaccaaatgataaacgccaaaaactagatgcaaatacagaaacctcagtgccaactgaacttgaatctgtaaataaccataacgagcaactgcagcctatagagccaacccaagaaagacaaccctctacaaccgaaacaacttactccatatcagtacccgtttctactacaaatgaggtcgaaagagcgtcttccctgattaatgaacaagaagatctagaaatgattgccaaacaataccaacaagctacaaatcttgaaatagagcgagccatggagggtcatggtgatggaggacaacacttttcaactcaagaaaatggtcagccttctggatcgctgctaatatcttccattgttccttctgattctgaattgctcaacaccaatcaggcatatgctgcatatacttcgctatcttctcaattagaacagcatactctggctagtgctatgctttcttctgccacactttctgctttgcctttgtcgattattgctccagtatatttaccaccaagaattcaattgttaataaatactttgcccacattggacaatttagcaacccagctattacgtacagttgcaactagtccataccaaaaaataattgatttggcctctaacccagatacatcagcaggggctacttatagagatttgacttctttgtttgagtttacaaaaagattatacagtgaagatgatccatttttaactgttgaacatatagctcctggtatgtggaaggaaggagaagaaacccctagcatttttaaacctaaacaacaaagtatagaatctactttacgtaaagtcaacttggcgacatttttggcagccactttaggtacgatggaaattgggttcttttaccttaatgaatcgttcctagatgttttttgtccgctgaataatttggaccctctgaatgcattatccaatttaggaggttatcaaaatgggttacaaagtactgatagtcccgtaggtgcgagagtcggaaaattgttaaaacctcaagccacgttgtatttagacttgaagacccaagcgtatatctcagccattgaggctggagagagatcaaaggaagaaattttggaggacattttgcccgatgatctccatgtttatttgatgtcaagaaggaatgcaaagttgttgagtccaacggaaactgactttgtgtggagatgcaaacagagaaaggagctgttattaaattacaccgaggaaacacctttgagtgagcaatatgattggtttacatttttgagagacttgtttgattatgtctcgaagaatattgcttatttgatatggggaaaaatgggtaaaacaatgaaaaatagaagggaagacacacctcatactcaggaattgcttgataatactactggttctactcaaatgccaaatcagttgtcttcatcttctggtcaagcttcatcgacaccatctgttgtagatcctaacaaaatgttagtgtcggagatgagagaagcaaatattgcagtgccaaaaccctcacaaagacgggcgtggtctcgagaagaagaaaaggctttaaggcatgcattagaactcaagggtccacattgggcaacaattctagaattatttggtcaaggtggaaagatttcggaagctttgaagaatagaactcaagtgcaattaaaagacaaggcaagaaattggaaaaagttttttcttagaagcggtttggaaattcctagttatttgcggggtgttacaggtggtgtagatgatggtaaacggaaaaaggataacgttactaagaaaactgctgctgcacctgttccaaatatgctggaacaattgcaacaacaacaacagcgacaacaagaaaagcaagaaaagcaacaacaagaagagcaacaagcacaacaactggaaaaacaactagagcagcaacaagagccacaacaagagcagcaacaagagcagcaacaaacagagaaacaacaagcagagcaagagcagccagatcaaccccaggaggaacaacaacaagagaaagaacaaccggatcagcaacaaccagatcaacaacacccagatcgacaacaacaagagcagatccaacaaccagaaagtctggataaatag

SEQ ID NO: 6027 - DNA, 822 bp, Candida albicans
atgacagactcatcagctaccgggttctccaagcaccaagaatcagcaattgtatcagattcagaaggagatgcaattgattccgaattgcacatgagtgccaacccacctttattgagaagatcatcttcattattctccttatcctcgaaagatgacttgccaaaacccgattccaaagaatatttgaaattcattgacgataatagacatttcagtatgattagaaacttgcacatggccgactttatcactttattaaatgggtttagtgggttttattctattatttcatgtttaagatacactttaactggacaaactcattacgtacaaagagcacattttttcatattgttggggttatttttcgatttttttgatggtagagttgcaagattaagaaataaatcatcattaatgggacaagagttagattcattagctgatttggtatcatttggggtatctccagcaacaattgcctttgctattggattcagaacaactgttgatgtgttatttttggccttttgggttttatgtggattaacaagattggctagatttaatatctccgtcaataacattcctaaagataaacacggtaaatcacaatattttgagggattgccaattccaacaaatttgttttgggtcggattcatggctttattggtgtacaaagattggattcatgacaacttaccatttggaatagttttccaagatactctgtttgaattccatttggtcacaataggatttgttttacaagggtgtgctgaaatctcaaaatctttaaaaattcctaaaccatag

SEQ ID NO: 6028 - DNA, 1416 bp, Candida albicans
atggcgtcttctattttgcgttccaaaataatacaaaaaccgtaccaattattccactactattttctcctggagaaggctcctggttctacagttagtgatttgaattttgatacaaacatacaaacgagtttacgtaaattaaagcatcatcattggacggtgggagaaatattccattatgggtttttggtttccatactttttttcgtgtttgtggttttcccagcttcattttttataaaattaccaataatcttagcatttgctacttgttttttaatacccttaacatcacaattttttcttcctgccttgcccgttttcacttggttggcattatattttacgtgtgctaaaatacctcaagaatggaaaccagctatcacagttaaagttttaccagctatggaaacaattttgtacggcgataatttatcaaatgttttggcaaccatcactaccggagtgttagatatattggcatggttaccatatgggattattcatttcagtttcccatttgtacttgctgctattatatttttatttgggccaccgacggcattaagatcatttgggtttgcctttggttatatgaacttgcttggagtcttgattcaaatggcattcccagctgctcctccatggtacaaaaacttgcacggattagaaccagctaattattcaatgcacgggtctcctggtggacttggaaggatagataaattgttaggtgttgatatgtataccaccggattttccaattcatcaatcatttttggggcattcccatcgttacattcaggatgttgtatcatggaagtgttatttttgtgttggttgtttccacgattcaagtttgtgtgggttacatacgcatcttggctttggtggagcacgatgtatttgactcatcactactttgtcgatttgattggtggagccatgttatctttgactgtttttgaattcaccaaatataaatatttgccaaaaaacaaagaaggccttttctgtcgttggtcatacactgaaattgaaaaaatcgatatccaagaaattgaccctttatcatacaattatatccctatcaacagcaatgataatgaaagcagattgtatacgagagtgtaccaagagtctcaggttagtcccccactgagagctgaaacacctgaagcatttgagatgtcaaatttttctaggtccagacaaagctcaaagactcaggttccattgagtaatcttactaacaatgatcaagtgcctggaattaacgaagaggatgaagaagaagaaggcgatgaaatttcgtcgagtactccttcggtgtttgaagacgaaccacagggtagcacatatgctgcatcctcagctacatcagtagatgatttggattccaaaagaaattag

SEQ ID NO: 6029 - DNA, 582 bp, Candida albicans
atgctaatgtacaccatccttataccaagccttttatacattgctttgacaatcgcatcatccgagttattgaattccatacagggaacatggcaaagtcaaagtgaacgagtaattactggaccaactttttttgatccccagaaggaattgctagaagaacctaagctaccaggtatatcatattcatttaaaaatggatactgggaactggcacaatatattgtcatggggaataatagaaaccaccaatgtcctcaagcaatgttaatttggcaacatgggaaatataatttaaaacgaggaaaacttgtgcttattcccaatagaaatgacggtcgacaattaatcagcgatccttgtttggataatggtaaatctgaatataaaaggtttcataacggagaaacattagaagttgatattagatttgatggatattttggtaattggaagttggttttggtagattatcttacaggtaaaaagaagcaaccaatgtggttgacactgagaaatgccacaatgttgcccacaggaaccataacctctacaaagaggaaatatgttaaaaaagagtag

SEQ ID NO: 6030 - DNA, 597 bp, Candida albicans
atggttaacggtccagctgaacttcgtagaaaattagtcattgtcggtgatggtgcttgtggtaagacttgtttattaattgttttttcaaaaggtactttcccagaagtttatgtcccaacagtttttgaaaattacgttgctgatgttgaagttgatggtagaaaagttgaattggcattatgggatactgctggtcaagaagattatgatagattaagaccattatcttatccagattctaatgttattttgatttgtttttcagttgattcaccagattctttagataacgttttagaaaaatggatttctgaagttttacatttctgtcaaggtgttccaatcattttagttggttgtaaatctgatttaagagatgatcctcatactattgaagccttgagacaacaacaacaacaaccagtctcaacttctgaaggccaacaagttgctcaaagaattggtgctgctgattacttggaatgttctgctaaaaccggtagaggtgttagagaagtgtttgaagctgctactagagcttctttaagagttaaagaaaagaaggaaaagaagaagaaatgtgttgtcttgtaa

SEQ ID NO: 6031 - DNA, 1587 bp, Candida albicans
atggctattgttgaaactgtcattgatggcattaattattttttgtcccttagtgttacacaacagatcagtatattattaggggttccatttgtttacaacttagtatggcaatatttatattcattaagaaaagatagagctccattagtgttttattggattccttggtttggttctgcagcttcatatggtcaacaaccttatgaatttttcgaatcatgtcgtcaaaagtatggtgatgtattttcatttatgttattagggaaaattatgacggtttatttaggtccaaaaggtcatgaatttgttttcaatgctaaattatctgatgtttctgctgaagaagcttataagcatttaactactccagttttcggtaaaggggttatttatgattgtccaaattctagattaatggaacaaaaaaaatttgctaaatttgctttgactactgattcatttaaaagatatgttcctaagattagagaagaaattttgaattattttgttactgatgaaagtttcaaattgaaagaaaaaactcatggggttgccaatgttatgaaaactcaaccagaaattactattttcactgcttcaagatctttatttggtgatgaaatgagaagaatttttgaccgttcatttgctcaactatattctgatttagataaaggttttacccctattaattttgttttccctaatttacctttacctcattattggagacgtgatgctgctcaaaagaaaatctctgctacttatatgaaagaaattaaactgagaagagaacgtggtgatattgatccaaatcgtgatttaattgattccttattgattcattcaacttataaagatggtgtgaaaatgactgatcaagaaattgctaatcttttaattggtattcttatgggtggtcaacatacttctgcttctacttctgcttggttcttgttacatttaggtgaaaaacctcatttacaagatgttatttatcaagaagttgttgaattgttgaaagaaaaaggtggtgatttgaatgatttgacttatgaagatttacaaaaattaccatcagtcaataacactattaaggaaactcttagaatgcatatgccattacattctatttttagaaaagttactaacccattaagaatccctgaaaccaattatattgttccaaaaggtcattatgttttagtttctccaggttatgctcatactagtgaaagatattttgataaccctgaagattttgatccaactagatgggatactgctgctgccaaagctaattctgtttcatttaactcttctgatgaagttgattatgggtttgggaaagtttctaaaggggtttcttcaccttatttaccatttggtggtggtagacatagatgtattggggaacaatttgcttatgttcaattgggaaccattttaactacttttgtttataacttaagatggactattgatggttataaagtgcctgaccctgattatagttcaatggtggttttacctactgaaccagcagaaatcatttgggaaaaaagagaaacttgtatgttttaa

SEQ ID NO: 6032 - DNA, 2499 bp, Candida albicans
atgaaagattcacaatctgatataattgagctttgcaataaattaaatgaagcaacaaaactaaaacgtaatgggaaatcaatcaagctcaccaattttgtcagtaacactcaaatcaaattagattcttggaaatttttggaatgggattatggcaaaccttcggttcaacttccaattcaagcgcgtggattgtttacattaaataatgatactattgccgtaagaggatacgataaatttttcaatgttgaagaaaaaccattcacaaaagaaactaatttgaaaacctctactcatggaccctatgaagtcacattaaaagaaaatggatgcattatatttatcagtggattaagtacaggagatattgtggtttgttccaagcactctacgggagacagaattgatgataatgaaagtgacaagacaacaacggcaacggcaacggcaacggcgccgaccagaaatcatgccaaacaaggggaatttgaattattacaacaatttgatggcgatcaacaaaaagttaaacaactagcacattatttatatgaaaacaatctaacagttgttgctgagttatgtgatgatgagtttgaagagcatgtattgccttaccctaaagataaatcagggttgtacgttcatggattaaactataataccataacgtttaaaactttgccaatggatcaagttttgcaatttgccaaagagtgggggttcaaatacgtttcatacttaacatatgataatgctgacgaattattcaagttcttacacaagtgcagtgagacggggacatataatggtcgagaaattgaagggtttgtgataagatgtcaccgccaactgcataccaatggtgacactgacggggattgcttttttttcaagtataaatttgaacagccatatttgttgtatcgacaattcagagaggtgaccaaacaacttttaaatggtacacctatcaactcaatcaaaatcaagaaaaataagccaattaccaaaaagtatttacaatttgttgagaagttattcgaacaggaaccagaaattgctagaaattttgagaacggatttgatatcattaaagtgcgtcagttatttttgcaatcattaaacgaaactaatggtatgaatttgttgagtattgatagtgaattaagtgaccaattgaaaaatctagcattagctaatggtaacgaggggttgagtaccactaccaaatacatatttgttcctatcgccactattggttgcgggaagactaccgttttcaacacactaaacaaccttttcccacaatggacgcatattcaaaatgataacatttcgaaaaaggcaaaattaaaaatctgtgatttgactttattggcattagaggatgacgaccaaagtgtggttttgtttgatagaaacaattcggcatctcgtgaacgtagacaaatcttcactactattgatcaaaaaagagatgaacatttggatgatacagtggatttgaaatatattgctatcaattttatccctgaagatttatctgaagaagaactttgggatatcacttataatagagttattcaaagaggagataatcaccaatcgatcaaatcacaactggatgagaatttggtggaaagtgtcatgaaaggttttattcaaagatatcagccaataaatacttcaagatcccctgatgatcagtttgatcatgtcatacatttaaaattgtcaaaagatgagaattcgctgaagtcgtctttggagaatgttagaatcataattgatgatttggtgcaaaatttccccgatttgattaaagaaaaaccagctgatgaattaatcaatgagtgcttccaaaaagctcttgattataaacccacgtttgttaaaaacatgactgctaatactattaagaaagaccccacatattatggtattgctatgcattattcttcaattctagagaatttagaaatcgtttcccataatgaacattttcaaaatataaaatcacacattcaaacggaatttcatgtaacattgggtcatatagcaagcagtaaacaagataaagccggtcgagtcaaatggaaaaaacttgtcaagactttaggcaaaggtgatcccaataagccaaaatcagcgttgaaattttttgctgatgttaaattgcttcaaatagtaatcaacaccgataaattggcatgtattaaagttgaaatattgaaaatttacgatactaatgacgttctacaaagtgaaattgaaccaattaataaacaactccatattaccattggttgtattccgccagctactgctgttgagtcaaacatgacattggaagaattgtatgacaatccagatgaacaagaactcaaaccagatggaacttacaaatgtggtgacgatactttgcatgtatttaattttgacaacccagatttgaagttgtttagccaacaattgtttgttgcttaccaataa

SEQ ID NO: 6033 - DNA, 576 bp, Candida albicans
atgcaaactataaaatgtgttgttgtcggtgatggtgccgttggtaaaacttgcttattaatctcgtataccactagtaaatttccagctgattatgttcctactgtttttgataattatgctgtaaccgtgatgataggagacgaaccatttaccttgggattatttgatactgctggtcaagaagattacgacagattaaggcctttgtcatatccatcgactgatgtattccttgtttgtttttccgtcatttctcccgcttcgtttgaaaatgttaaagaaaaatggttcccagaagttcatcaccattgtcccggtgtgccaataattattgtcggtacccaaactgatttacgaaacgatgatgttattttacagagattgcacagacaaaaattgtccccaatcacccaggaacagggtgaaaaattggctaaggaattgagagctgtcaagtatgttgagtgttctgcattgactcaaagaggattgaaaacagtgtttgacgaggctatagtagctgcattagaacctcctgtaattaaaaaatcgaaaaagtgtactattttatag

SEQ ID NO: 6034 - DNA, 1164 bp, Candida albicans
atgggattttcactttcaaattttactagtgatccatttgccatttctacagtatcatttggtattatggcatgggtagttgctattgcaggagcagcatcatccaaacaagaaaatttccctcatttcagttggtgggggataagttatcaaattgttataattcttataatatttgtcttatatgccaataataatattgaattatataaatttaccttagttggattagtatcaattgcatttatttatacgacgaattccactaataatttaatttataattcaaattctgcaggtaatctttgttgtgctgctggttgtatattattgagtattttaaatttgatttggatattatattttggaggacatcctgaatcaccaactaatcaattcattgattcttttagtttaagaggtcaaggtcatgaacaattaggttctggttctcataatcacaatgccaataatgccaataataatatccccattggtgctggtaatgctattattggtaaaggtgaaatgtcaccttataatgatagatttgctgctagtggtgtcaatcaaccaacttcagaaagtttaagacttgctagtggtccacaaatgggtaatggaccatttactactactggtgccatcattaatcctaatttacaacaaccattatctgattctattggtggatcagctcatcatacacctataaatgtcaataataataataataataataataatactggttatatgacatcatctcatttgacaggattagagaatttcagttcaccacatgtaccaggtagtggaactggtgctggacttggagttggtgccggaagagatttaactcataatagtaatggtggtggtggtagtggaggaggaccagcaagtgccaataattctaataatactaacaaacgtaatacgatatataccgattcagaaactggtaccgggataacatttagatataaggctaaagctttatatagttatgatgctaatcctgatgatataaatgaaatatcatttgttaaagatgaaattttggaagttgatgatattgatggtaaatggtggcaagcaagacgagcaaatggtcaagttggtatttgtccttcaaattatgttaaattattagatacttga

SEQ ID NO: 6035 - DNA, 1563 bp, Candida albicans
atgaatgttggatctattttaaatgacgacccaccatcaagtgggaatgcgaatgggaatgatgataataccaagattattaaatcccctactgcataccataaaccttctgttcatgaacgtcattcaataacgagcatgttgaatgacactccgtcagattcaactccaactaaaaaaccagaaccgactataagtccagagtttagaaaacccagcataagtctgttaacttctccaagtgttgcacataaacctccgccactaccaccgtcactgagtctggttggaagtagtgagcattcgagtgcaagatcgtccccggctatcacgaagagaaactcgattgcaaacattatcgatgcttatgaagaaccagctactaaaactgaaaaaaaggctgagctaaactcaccaaagataaaccaactgacaccggtgccaaagcttgaggaacacgagaatgatacaaacaaagtagaaaaggttgtggatagtgcacctgaaccaaaaccaaaaaaggagcctcaaccagtttttgacgaccaagacgatgacttgacaaaaatcaaaaagctcaagcaatctaagaaaccacgtcggtatgaaacacctccaatttgggcccagaggtgggttcccccaaatagacagaaggaggaaactaatgttgatgacgggaatgaagccataactagactttctgaaaaaccggtatttgattataccactaccagaagtgttgatttggagtgtagtattactggtatgatacccccaagttcaatcacgagaaaaatagctgaatgggtgtatgccaatttttccaatgttgaagaaaaaagtaaaaggaatgttgaattggagttgaaatttgggaaaattattgacaaaagaagtggtaatagaattgacttgaatgtggtgacagaatgtattttcactgatcattctagtgtgttttttgacatgcaagtggaagaggtggcctggaaagaaataacaaaattcttggatgaattggaaaaaagtttccaagaagggaaaaagggaagaaaatttaaaactcttgaatctgataatactgacagtttctatcaattggggagaaaaggtgagcaccctaagcggattcgtgtaaccaaagacaacttactatcgccaccgagattggttgccatacagaaggaacgtgtggcagatttatatattcacaatccgggctccttatttgatttgaggttatctatgtcattggaaataccagtgccacaggggaacattgagtcgattattaccaagaataagccagagatggtcagggagaagaagagaatttcttatacacatccacctaccattaccaaatttgacttgactagggtcattggtaataaaacagaagataaatatgaggtagagttggaggcgggtgttatggaaatatttgctgctattgataaaatccagaaaggggtagataatcttagattggaggaattaattgaagtttttttgaacaatgcaagaactctcaataatagattgaacaagatttgctag

SEQ ID NO: 6036 - DNA, 3294 bp, Candida albicans
atgagtggtcctgttacttttgaaaagacatttcgtagagatgccttaatcgatatagaaaagaaatatcaaaaggtatgggcagaagagaaagtttttgaagttgatgccccaacttttgaagaatgtcctattgaagatgttgaacaagttcaagaagcacatccaaaattctttgccactatggcttatccttacatgaatggtgtcttgcacgccggtcatgcctttacattgtctaaagttgaatttgcaactgggttccaaagaatgaatggtaagagagcattattcccattgggtttccattgtacgggtatgccaattaaagcagctgccgataaaatcaaaagagaagttgaattgtttggatctgatttttctaaagctcctgctgatgacgaagatgcagaagaaagccaacaaccagctaaaaccgaaactaaaagagaagatgtcactaaattctcttccaaaaaatctaaggctgctgccaaacaaggtagagccaagttccaatatgagatcatgatgcaattgggaatcccaagagaagaagttgccaagtttgctaacaccgactactggttagagtttttcccaccattgtgtcaaaaagatgtaactgcttttggggctagagttgattggagacgttctatgatcacaaccgatgctaatccttattatgatgcatttgttagatggcaaattaatagattgagagatgttggtaaaattaagtttggtgaaagatataccatttattctgaaaaggatggccaagcatgtttggatcacgatagacaatctggtgaaggtgttggtccacaagaatatgttggtataaaaatcagattaactgatgtagcaccacaagcacaagaacttttcaagaaagagagtctcgatgtgaaggagaacaaagtttacttggttgctgcaactttaagaccagaaactatgtatggtcaaacttgttgttttgtgagtccaaaaattgattatggtgtttttgatgctggtaatggtgactatttcattaccactgaacgtgctttcaaaaatatgtctttccaaaacttgactccgaaaagaggatattataaaccacttttcactatcaatggtaagacattgattggatctcgaattgatgctccatatgctgtcaacaaaaacttgagagttttgcctatggaaacagttcttgcaaccaaaggtactggtgtggtcacttgtgttccatcagattctccagatgattttgttaccacaagagacttggccaataaaccagagtactatggaattgaaaaagactgggtacaaacagatattgttcctattgtccataccgaaaaatacggtgataagtgtgctgagtttttggttaatgatttgaagatacagtcaccaaaagattctgtgcagttggccaacgccaaggaattggcttataaagaaggtttttacaatggtactatgcttattggtaaatacaaaggtgataaagttgaagacgccaagcctaaagtcaaacaagacttaattgatgaaggtcttgcttttgtttacaatgaaccagaatcccaagttatttctagatctggtgatgattgttgtgtatcattggaagatcaatggtatattgattatggtgaagaagcttggttgggtgaagccttagaatgtcttaagaacatggaaacatactccaaggaaaccagacatggtttcgaaggtgttttagcctggatgaagaactgggctgtcaccagaaaatttggtttgggtactaaattgccttgggatcctcaatatttggtcgaatctttgtcagattctactgtctatatggcttattatactattgatcgtttcttgcattcagattattacggtaagaaggcaggtaagttcgacattaagccagagcaaatgactgatgaagtatttgattacatctttactcgtcgtgatgacgttgaaactgacattccaaaggaacaattgaaggaaatgagaagagagtttgaatatttttacccattagacgtcagagtttcaggaaaagatttgatcccaaatcatttgacattcttcatctatacccatgtcgccttgttcccaaaaagattttggccaagaggtgttagagccaacggacatttgttgttgaacaatgctaagatgtccaaatcaactggtaactttatgactttagaacaaatcattgaaaaattcggagctgatgcctctagaattgctatggccgatgcaggtgacactgttgaagatgccaactttgacgaagccaatgctaatgctgcaatcttgagattgacaactttgaaagattggtgtgaagaagaagtgaaaaaccaagataagttaagaattggtgactacgattccttctttgatgctgcttttgaaaatgaaatgaatgatttgattgaaaagacttaccaacaatacactttgagtaattacaaacaagcattgaaatccggattgtttgatttccaaatcgccagagatatttatagagaaagtgtaaacacaacaggaattggtatgcacaaggatcttgttttgaaatacattgaataccaagcattgatgttagctccaattgctcctcattttgccgaatacctttacagagaagttttaggtaaaaatggaagtgttcaaactagcaagttcccaagagcctcaaagcctgtttccaaagctattcttgatgctctggaatatgtcagaagccttaccagatctatccgtgaagcagaaggtcaagctttgaaaaagaagaaaggaaagtctgatgttgatgggtcaaaaccaatcagcttgacagttttggtttccaacactttcccagaatggcaagataactatattgaacttgtcagagaattgtttgaacaaaacaagttggacgacaataatgttataagacaaaaggttggcaaggacatgaaacgtggtatgccatacatccaccaaattaaaactagattggcaactgaagatgctgacactgttttcaacagaaaattgacttttgatgaaatcgatacattgaaaaatgttgttgaaattgtcaagaatgccccatactctcttaaagttgaaaaattggagattcttagtttcaataacggtgaaactaaggggaagaatattattagtggtgaagacaatattgagctcaatttcaagggtaaaataatggaaaatgctgtacctggtgagcctggtatctttattaaaaatgtcgaataa

SEQ ID NO: 6037 - DNA, 969 bp, Candida albicans
atgagattattcgtcctactagcatatattattccatttatattatgtcagttaactccagtgttggttgcttctcataagttagttcgaggtttgaaagaagaaatcaatccttcaaacactttgcctcataatgttacttcggtgacaaatatgcttaagaagctaataactgaatgttcttcagatgcatatttacttatcaatcaaccagggttaacatatgctgatttgactacggaaaagaaagataattggccatttttaaggaattacttgtatatgtcatcaacaattgttggattgcctagagtggaaaaccctatagatttagattttcttgaacagtacattatcagtaattgtgatgcagagactatcaatgtttggcatgatagtgaagatgaagtagttgattattatgatattcggaaacgagtgattcgaattgatttatcaccattatcaattagcaatcatgatgatcgagtcaaagaaatatttgaacatgatcaattgattagaaaaattttgaggaaattaccatctgctcattatacaattattttaactagtttagaacccgggattattcatccagtgccacggtttttaatggaagaaaccccagcttcgtttgaaattttcgatgatattattaatgatccatttcataatcgagaaattgaaaaaaatgatcgatttcacaaagtagaaccaaattggaatccaataagagatagtaatgatagatactacagaaataaaaagaaagatgaaattcatttgtttgattatgaattatgggaaaagaatgaaaaattaatcactacgatatttgtgatggttttaagtcttttcatgatgaagatcatttccttcttcaattacttgaaacaaaaaataatacaaaagaaacaacaaaaatcgaagcgaggtattattgctgacgataagaaattagattaa

SEQ ID NO: 6038 - DNA, 1347 bp, Candida albicans
atgagagaagtcatcagtattaatgttggtcaagccgggtgtcaaattggtaacgcctgttgggaattgtattcacaggaacatggtattagaccagatgggtatttacaagaaggtttagacagaccaaagggaggagaagaaggtttttctacttttttcagtgaaactggttcaggtaaatacgttcctcgtgccttgtatgttgatttggaaccaaatgtcattgatgaagttcgtactggtgtttacaaagatttattccaccctgaacaattgattgccggtaaagaagatgccgccaataattatgctagaggtcactacactgttggaagagaaattttagacgacattttagatagagtcagaagaatgagtgatcaatgtgacggattacaaggtttccttttcacccactctttgggtggtggtaccggttccggtttgggttctttgttattggaacaattatctttggattacggtaaaaaatccaaattggaatttgctgtttacccagctccacaagtgtccacttcagttgttgaaccatataatactgtgttgactacccacaccactttggaacacgccgattgtacttttatggttgataatgaagccatctacgatatgtgtagaagaaacttggatattgccagaccaaattttagttcattgaacaacttgattgctcaagttgtgtcatccgttaccgcctctttgagatttgacggttccttgaatgttgatttgaatgaattccaaactaacttggttccatacccaagaatccatttcccattggtcagttatgctccagttttctccaagagtagagctacccatgaagccaactctgtttctgaaattactcaatcttgttttgaaccaggtaaccaaatggtcaaatgtgacccaagaactggtaaatacatggccacctgtttgttataccgtggtgatgttgttactagagacgttcaaaatgctgttgctcaagttaaatctaaaaagactgttcaattagtcgattggtgtccaactggtttcaagattggtatctgttaccaaccaccaactgccattaagggatctgaattggccagtgcttctagagctgtttgtatgttgtctaacactactgccattgctgaagcttggagaagaattgacagaaaattcgacttgatgtactctaagagagcctttgttcactggtacgttggtgaaggtatggaagaaggtgaattcactgaagctagagaagacttggctgctttagagagagattatattgaagttggtactgattctttccctgaagaagaagaagaatattag

SEQ ID NO: 6039 - DNA, 1485 bp, Candida albicans
atgctagcaaggcttttgaaacttgcaatagtagttgcagcaatagcggcaatcacacccaataacccaatacgtacactgatttcatttgggtgtataggttacgtggcaaccttactggtaataccgaaagttagcccaagttttgtcaagatcgggctcaaagggaaagatttatctaaaccaccaccggtgtcagaaatacccgaaacaatggggctagtggcgtcaactacatatatgtttcttatgtttggtcttatcccatttatttttttcaaataccttgtttcttttggatcaatgtctaacgacgaggtgataactaaaaattacttgtctcaatatcaatcgcttgccgacaacaggttattcccccacaataagttggcagaatacttgagtgccttgttgtgtttacagagtaccacattgttgggattactagacgacttgtttgatatcaggtggcgtcacaagtttttcttacctgcagttgcatcattgcccttattgattgtatactacgtcgactttagtgtaacttcagtcgtgatccccaagtttgtcactgaattccctggaggctacgttctaattaatactataaatttttttataaagtatagtaaccatttggtcacaagtatcactgggctttcatttagaactttacaaacagactatgttgttcctgacagttcaccaaagttgattgatttgggaattttctactacgtatacatgtcggctatttcaattttctcaccgaattcaatcaatattcttgcaggcgttaacggtttggaggttggacaatcattagttttagcagccatatttttaattaatgatttctgctatcttttttcaccgggaatatcacaagcagctcatgattcacacatgttttctgttgtatttataattccttttgtcggagtgtcattggctttattgcaatacaactggttccctgcaagagtatttgttggtgatacgtattgttatttcagtggcatggtatttgctattgttggtattataggtcatttttccaaaactcttttgatatttttgttacctcaaataatcaattttgtgtattcagttcctcagttgtttcacatcttgccctgtccaagacacagattacccagatttagtattgaggatggtttgatgcatcccagttttgcagaattaaagaaagcaagccgtctaaacttggcgattttagaaactctcagttttttcaagctcataaaagtggaaaggggttccaaactgaatcagattgttagattttccaatatgaccataatcaatcttacgttggtgtgggtaggacctttacgagaagaccaattatgtatatctattttggtcgttcaatttgttattggcgtgacaatgatagttgttagacataccattggaccatggttatttggatacgataatttatcatggggtgtaaaataa

SEQ ID NO: 6040 - DNA, 5694 bp, Candida albicans
atgtcgtataacgataataataatcattattacgaccctaatcaacagggcggtatgccacctcatcaaggaggagaagggtattaccaacaacagtatgatgatatgggtcaacaaccacaccaacaagattattacgatccaaatgctcaatatcaacaacaaccatatgacatggatggatatcaagaccaagccaactatggtggtcaaccaatgaatgcccagggttataatgctgacccagaagccttttctgactttagttatggtggtcaaactcctggaactcctggttatgatcaatacggtactcaatacaccccatctcaaatgagttatggtggtgatccaagatcttctggtgcttcaacaccaatttatggtggtcaaggtcaaggttacgatccaactcaattcaatatgtcatcgaacttgccatatccagcttggtctgctgatcctcaagctccaattaagattgaacacatcgaagatattttcattgatttgactaataaatttggtttccaaagagattctatgagaaacatgtttgattactttatgacattgttggactcgagatcttcccgtatgtcaccagctcaggccttgttgagtttacatgctgattatattggtggtgacaatgccaattatagaaaatggtatttttcttcacaacaagatttggatgattccttaggttttgctaatatgactttaggtaaaattggtagaaaagccagaaaagcttccaagaaatccaaaaaagctagaaaagctgctgaagaacatggtcaagatgtcgatgctcttgctaatgaattagaaggtgattattcattggaagccgctgaaatcagatggaaagccaagatgaactctttgactccagaagaaagagtaagagaccttgctctttatttgttgatatggggtgaagccaatcaagttcgttttactcctgaatgtttgtgttacatttacaaatctgccactgattatttaaattctccattgtgtcaacaaagacaagaaccagtgcctgaaggtgattacttgaaccgtgtgatcactccactttacagattcatcagatctcaagtttatgaaatttatgatggaagatttgtcaagcgtgaaaaagaccacaacaaggtcattggttatgatgatgtcaatcaattgttttggtacccagaaggtatttccagaattatttttgaagatggaaccagattggttgatatccctcaagaagaacgtttcttgaaattaggtgaagttgaatggaagaatgttttcttcaaaacttataaggaaatcagaacctggttgcatttcgttaccaattttaatagaatctggattatccatggtaccatctactggatgtacactgcttacaactccccaaccttgtatactaaacattatgtccaaaccataaatcaacaaccacttgcttcgtcaagatgggctgcttgtgccattggtggtgttcttgcttcatttattcaaattcttgccacacttttcgaatggattttcgtgcctagagaatgggccggtgctcaacatttgagtcgtcgtatgctatttttggtgttaattttcttactcaatttggttccaccagtttatacattccaaattaccaaattggtgatttattcgaaatcggcatatgctgtgtcgattgttggatttttcattgctgtggccactttagtattctttgccgtcatgccattgggtggtttattcacttcatacatgaacaagagatcaagaagatatattgcatcacaaacatttactgccaactacattaaattgaaaggtttagatatgtggatgtcttatttgttatggtttttggttttccttgccaaattggttgaatcttatttcttctcgactttgtctttaagagatcctattagaaacttgtcgaccatgacaatgagatgtgttggtgaagtttggtacaaagatattgtttgtagaaaccaagccaagattgtcttggggttgatgtatcttgttgatttgttattgttctttttggatacttatatgtggtacattatttgtaactgtatcttctccattggtcgttcattctatttgggtatttccattttgactccttggagaaacattttcaccagattgccaaagagaatttattccaagattttagctaccacggaaatggaaatcaaatataaacctaaagttttgatttcacaaatttggaatgccattgttatttccatgtacagagaacatttgttagccattgatcacgttcaaaaattattgtatcatcaagttccatctgaaattgaaggcaagagaactttgagagctccaactttctttgtttctcaagatgacaacaattttgaaacggaatttttcccaagaaattctgaagctgaaagaagaatttcatttttcgctcaatctttggctacaccaatgccagaaccattaccagttgataatatgccaacttttactgttttcactcctcattattcggaaaagattttgttatctttgagagaaatcattagagaagatgatcaattctcaagagtgacattattggaatatttgaaacaattacatccagttgaatgggattgttttgttaaggacaccaagattttggctgaagaaactgctgcttatgaaaatggtgatgattctgaaaaattatctgaagatggattgaaatccaagattgatgatttaccattctattgtattggtttcaagtctgccgcccctgaatatactttaagaacaagaatttgggcttcattgagatcccaaactttgtacagaactgtatctgggtttatgaattatgccagagccattaaattgttatacagagtggaaaacccagaattggttcaatatttcggtggtgaccctgaaggattagaattagctttagaaagaatggccagaagaaagtttagatttttggtttctatgcaaagattgtctaaattcaaagatgatgaaatggaaaatgctgagttcttattgcgtgcttaccctgatttgcaaattgcttacttggatgaagaaccggctttgaatgaggacgaggaaccaagagtatactctgccttgattgatggtcattgtgaaatgttagaaaatggtagacgtcgtcctaaattcagagttcaattgtctggtaatccaattttgggtgatggtaaatctgataatcaaaatcatgcggttattttccatagaggtgaatatattcaattgattgatgctaatcaagataattatttggaagaatgtttgaagattagatcagttttggctgaatttgaagaaatgaatgttgaacatgttaatccatatgcaccaaatttgaaatctgaagataataacaccaagaaggatccagtggcatttttgggtgctagagaatatattttctcagaaaattctggtgttttgggtgatgttgctgctggtaaagaacaaacttttggtacattgtttgcaagaactttggcacaaattggaggtaaattgcattatggtcatccggattttttgaatgctacatttatgttaactagaggtggtgtttctaaagcacaaaagggtttacatttgaatgaagatatttatgctggtatgaatgccatgatgagaggtggtaaaatcaagcattgtgaatattatcaatgtggtaaaggtagagatttaggttttggatccattttgaatttcaccaccaagattggtgctggtatgggagaacaaatgctttcaagagaatatttctatttgggtactcaacttccattggatagatttttgtcattttactatggtcatccaggtttccatattaataacttgtttattcaattgtctttacaagtgtttattttggtgttgggtaacttgaattcattagctcatgaagctatcatgtgttcttacaacaaagatgtcccagttactgatgttttgtatccatttggttgttacaatattgctcctgccgttgattggattagacgttatactttgtctattttcattgttttcttcatttctttcattccattggttgtacaagaattgattgaaagaggggtatggaaagcgttccaaagatttgttagacattttatttccatgtcaccatttttcgaagttttcgttgcccaaatttattcatcatcggttttcactgatttgaccgttggtggtgctagatatatttccactggtagaggttttgccacttcaagaattccattttcaatcttgtattcacgttttgctgattcatccatttatatgggagcaagattgatgttgattttattatttggtacagtttctcattggcaagcaccattattatggttctgggcttcattatcggctttaatgttctccccattcattttcaatcctcatcaatttgcttgggaagactttttccttgattacagagatttcattagatggttatctagaggtaacactaaatggcacagaaactcatggattggttatgttagactttctagatcacgtatcactggtttcaaacgtaagttgactggtgatgtttctgaaaaagctgctggtgatgcttcaagagctcatagatccaatgttttgtttgctgatttcttaccaacattgatttatactgctggtctttatgttgcttatacttttattaatgctcaaactggggttactagttatccatatgaaatcaatggatctactgatccacaaccagttaattctactttgagacttattatttgtgctttagctccagttgttattgatatgggatgtttaggtgtttgtcttgccatggcatgttgtgctggtccaatgttaggattatgttgtaaaaagactggtgctgttattgctggtgttgcccatggtgttgccgtcattgttcatattattttctttattgttatgtgggtcactgaaggtttcaattttgccagattaatgttgggtattgccaccatgatttatgttcaaagattattattcaagtttttgacattatgtttcttgactagagaatttaagaatgataaagccaatactgctttctggactggtaaatggtataatactggtatgggatggatggcttttactcaaccatctcgtgaatttgttgctaaaatcattgaaatgtcggaatttgctggtgatttcgttttggcacatattatattattctgtcaattaccattattgtttattccattagttgatagatggcattcaatgatgttattctggttgaaaccatcaagattgattagaccaccaatttattctttgaaacaagccagattaagaaagagaatggtgagaaaatattgtgttttatattttgccgtgttgatattatttattgtcattattgttgcaccagcagttgcttcgggacaaattgctgttgatcaatttgccaatattggtggatctggttctattgctgatggattattccaaccaagaaatgtcagtaataatgatactggtaatcatagaccaaaaacctacacttggagttatttgagtactcgttttactggaagtaccaccccttattctacaaatccattcagagtttag

SEQ ID NO: 6041 - DNA, 390 bp, Candida albicans
atgtcccaagaatatataaatcccagcacattaaactcttcgaattcattgcttatagatgaattaactgaatcaaatgatttggtagttttggaggagcaattatcacctgatgaagtgattctcaacgctgacattataaatacagagcgcttgattgaagaaagtagatccttagaagagcaaccatcatatgtcattgatatttttggaatactaaagaaagctgccatcaatttggttctaccatttattaatggtatgatgttgggttttggtgaaatattagcacatgagattgggttccgttataattggattggtgcaagagtcgagcctccaagaagaatggtgcagaaaaagaatgagtctgcttccaagtatttgtag

SEQ ID NO: 6042 - DNA, 741 bp, Candida albicans
atgattcattactgtcaactctccagtaattcaacatcccatccctatcttatcatgtctagacgatcagaaatcaaacaaaaacaagaacttcaggcacgattccaattagccatgtctgctaataatcaaaaggcattaaattggctaaaaccattgaaatctactgcttccaccacatcaacatcatcagaaacccccaatgcgaataatcccacttctgatgattcatttatggatttacaaattattcctcaaggtgcaagtctatcgaaattggacaatttacaaaaaattggggattttataaattcaaaagatataacaaaaatgaaacaatcaacaacaacaacaacaacaactgcttcgaatttaacatccaatagggtaactaaatcaaaaccaatgttggcattaatgaataaaatgagagacagtaataggaaaaatgttcgacaaaaccaacatcatcatcaacaacaacaacaatcaacatcaagtataaatggaaagagcaataaaccaatgataccgaataaatcacagtctatagtaaaaaactacaataatgaagaagaggatgatgatgatgacgaagaggatgatgatgacgaagaggatgacgaagacagtcgagctataaggtctagaactgtgaaaaaggggtcaagtttattacttgagaataaattgaataataagaatagtggtacgaaaaagaaaaatgtacgtccattttaa

SEQ ID NO: 6043 - DNA, 1599 bp, Candida albicans
atgaaaccaatggtgaccacactttataatggcaagctcccgttggcgttggctgaccctaatgggatattcacatggtgtccgcatttgaatttgatatttatagccatgaacaagatgtcgatctggtgttatcgaatgaatggcgagcgaatatattccatcaacaacaaatcgattgtcaaacatatagcgttttaccgcgagtacttttgtttgtcggggacagacaacttgatcaagatatatgattctaataatgggcagttggtgaaggtgttgccgcaggagtttgatggtgttgagtttgttgggtggaatgggactgagtatagagtgctggtgtcgatgccgatggtttatgacttggttagtgagttggattatttggtggtgagcgacggcaagaggatggcgattacgtttaaccagttgttgacggtggactgggagtgtgagatgagtgtgcaccagcaactaaatagggacttgttcaaccaagtgtatgtcgctggggataagctagttagggtcaggtttgttgtcgacaaccagaagttgtatacggagcagattatcaaggtgtgtcagcttatcagtttgctagagtatggggagcagcacatacaaaagattaaggggttggtggtaccgtttttgctggcgatggaccggtatatgtcgaatttggaatctgagtgtggtgatttggcgcagtacttgtctgatcttgttgttagtaatatcattcctgaattttctaaagatttctggctaaaccagtatggcgagcgtggacacaagaggatggttaaattggcaggggtgtatgagagttgtgtaaaggatacgtaccagcacttggtgagcaccacagagagggtgatttcgattgtgggggagttgattggtgtgtccaaatgggagcaaggattgttggcgacaacggagttggaggccttgttagaccaggcgaagctgcagctaaagttttattataggtttatttgggatttgcagactgagcggcagcaggtaagtcagtttttggtatggacaaagagtattatcgatatgctaaatgatcaggagtgtgatattgcctattcgactacagatgtgttgtgctttatcaatggggcacttacgaagagtgtgatgctaaagtattttgatatcaagggggtaccagaaacgccaatgacgaatattagtatggatttgactacaattggtgagtaccaccggtcgagggttgaggtggaggtgttgcagaacatttcattaccgtctgtctatacaaacctaaaactagcccaatgggaggaggtggtggttacctatcaacaaggtaacgcccttgttattgctaatgtggatggtgtggtgtcaacggtgcaagatgtgtactcctatcaacacaggcagaccgatttggtggcgttgacgagcaagtcgttgttgattattgattcgtcgtcgtgtataccgattgcacttccggaaacactgttccaaccgaccaagctaattcttaaccaagagtatggtgtgttgctcgactcaacgagacagcactattcaatatttaggatgtag

SEQ ID NO: 6044 - DNA, 2004 bp, Candida albicans
atgtcgtacaatttagatgttgatgaagctgacgttgcagttttgaatcaaaacttgattcgatcaaaagagctatttgaatcaattggtaaatcattacataaaatttcaaccaaatcccaaacggcatcctctacaattaatcctgtgttaaaacaggtgaaccaattaaccaccaataaacatgaagtggagaatggattgaaactattacaagaggttagtgaaaatgccagcaagatcaatgatttagagaacttattaaataattcaattgaaaactctccaggagggataaaactgtatttaataaacttgaaccaactgaaaaatttattgtcacaaattaaaactcaatccaaattcaaacaattcaaaggcattttatataattttgaaaacttgattgatcgttcagaaaccaaagtacaaaaatattatcaagatttaattaatggaaaagattctcgtgccattatcgacaaacgtgatgaaattaaattaattttccaatacttctccaaccctcagaccaaatctaccagcaatagtggtggcaatgaagagtatgtcacaaagttgtatgtgcgggcaaggtcaaaacgattgattgagaaattgaaaccaattgaatcatcaacaaagccagcagtgaaagcaaatgctaatataccttatgaaaagggaaccaatggaataactaaatatacagatgttttaagtggagaaattgaacaagaattgataatcttaaacgaatgtcaattatctacgcatttgattggacctatagtagaagaatcaatcctgagatataatggcattatcaataagtacaaccaagtttatttcaagactcctcaagagattgttgacaatgtaatattgatattagaagttttgaataatttgattgatttcaaagttaaattgaaacaaattgggttgaatagaacattggagcagtccaatttcataaacacgtttgaacaatatttagaaacgaattctgtaattttcaaggaatttattcaagctatagacaacagatttcaaaacttgggcaagttcaatgaaattaacactcaagaagtgattgttgaattaatgagtaaattacgtcgtttgagtgaattcaagttggcattattacaattgattaagaattactctattggacaatggctagtgtcacaaccgccaatgagatttgttaatgttttctcctcggtgattcccaactctcaaccacaagctaatagtgatggagaggaagatgaagtaatacaagaatatttgttgtcgtcattttactcagatgtcattgatgccataatgataaacattgaaattggattaaagaagaatactagtggtggtgattcattgccactgtcctcttcaacttcagcatcgacaaatgcaacatcaggaacatcatcattgagtttaaacaaaaagtcaacccaagggtttattttgattaagaatttatttatgttggaatcaatagttaaccgatcacagtatttgtatcagagtttaggaagtttgggagaggaaagaatattacgattaaagaatcgatttttgaaattattccttgatgattggagtcacgcttcctatattattattcgagacatgacaacaattgctactcagctggcacagcaccaacaatcacaacaacaactgagtaataccataggaactggtggtgggactgttacgaatttgtctaacaaagaaaaagatcaagtgaaagacttgtttaagaactttaatgaatcgtttgaggaggcattatttaattatcaaaagtacaattttggtgatgcaatattaaaaaagtatttgagtaatgaaattaagaaattaattttgaacacttatttcaagttatatgacaagtatggtaattctgatttcacgaaaaataaatcaaaatacgtcaagtatgataaattgaatttcgaaaagttgttgaacgagaggttatag

SEQ ID NO: 6045 - DNA, 1521 bp, Candida albicans
atgtcgaaagtggaagagcatgagagtgtgaataacctaaagaggaaattcccctcgttggcaaaacccagacagccgttgaaagagacgaattctaacatcccatcaccacataagcgtgctaaaatagaatccccaagtaaacaacaatcaacgcaacaacctcaacagcaaccacaaccacaaccacaaccacaaccacaacaagaaaaggctactcacaagccaaagaaatcatcacatcagctgaaaaataatgacaagcttgctggggatgaaatgcacgaatggcaacagtcttggagaagaattatgaagagttcaattgtttactttgaaggagaccagcaactgctagaatatagaaaagcacataaactattgagactagttgggtgcaaagtgactcctttttatgacaacaatgtaactataattatttctaaacgtccgtacgacagtaagacagaatattctccgcatgacattttcagcaacgtaagcaaagcgagtatcaaggtttggaactatgataaagtgtttcgttttttaaaacatcttggtattaatatccagaccggggtagacgagcttgcggttaacacacatacaattcttcctccatcgttgaccaataacaatgagaaacccgatttatacaatttgttgaaagaagaaaaaatatatggctcaaccgatagagatcctaatgcaaagcgtgatgatttgcattatttgggcaagaactatttatatgtttatgacttgacccagacagtacggcccattgccattcgtgaatggagtgaccattatccggttatgcagttatcattggacggcaagtgtccatttatagaagatcccacagaccagaacctggagagaaaacggcttaaacgattaagaaagttcgaagctaatcaagcgcatcgtgaggctttgagattggccacatataagatgatcaatggcatttcaatgagtgtgcatggtttcactgccacgagcaccagcacagacaaggttgatgaagaggaggattccactgtcaaggaacctagtgaagatccaagattccgtcaaccacttaacagaaactcttcttgcatgcagtcaaaggcatttgaggcaatggcttctggatataatggggcatctaatgcggttcagccctcaatggattctaacttgaatagtgctgctgcaatggctggcgggaacggtttaggtccagcattatcacaggttccttccaaacagttaaataacttgaagagaaggattttgatgaagaagaaaacgacaaacacaactgaaaagaaagataaggaacatgcctcgggttattgtgagaactgtcgtgttaagtatactaattttgatgaacatattatgaccaataggcatcgcaattttgcttgtgatgatagaaattttcaagatatagatgagttaattgctagtttgagggaaagaaaaagtttgggaaatgtcatctcaaacggcgattatgtatag

SEQ ID NO: 6046 - DNA, 1908 bp, Candida albicans
atgtcagcaaatgatattcttgatgtgttaaacattcaacgagatgagtcgaatcagccacccaagaaaaagcagaaatcatcttcgacgcctacattaccagatggtaaacaattaactgggatggccagagaattatataatttagtaggtccaaatacaccacctataaacttaaattcaaattcatatactgctaataaagaaaaaatgaaaaagttcaaaccatctccatggactagaatgccattcactcctaaacaaggtatagaattaaatcattgggttaagggttccaaagagttgattgaacaacaagagttcgaagaagatggtacacccaaaccatattttttcgaaaaatataacgttcagttggaaatccctgaatttgtcgacgaagacacttatgatctttatatgatcgagattaaagaatatgagagtaagatgaaagaggaaagagcaagaagagagaaagaacgcaaagaaagggagaagagagatttagaagagaagaagaaaaagcagcaacagcaacaacagaaatcacaacaaaatccacagaaccagatcaaggacgatgaaaaaaatcaggatacaagaaacaacacagataaaaaggacagtgaacaaaaatctgaggacaaaccaaccgtagaggcaaaaaaggaaactgacgaaaagaaagatgatgtggtattgaaagataatacaaatgagacgaaaccagtcaccgagactacaaaatcagaaacggaaactactgaacagaacaactctgaaaagaccaatgaaaatgaaactaacaaaaccaacgataaagatggagaagggaaccttactaagagtaaagactctgctacggaagatcaatcaaacaataaaaaagaaaatgacgaagacacagagctggagtggacatataaagaaaccaaacatttatttgaattatgtcaggcatttgagttgaaatggccaataattcatgataggtttccaaatccaaatcgaacagcagaagacttgaaagaacaattctacagaatatgtatcaaaattctcgagaatcaaaaaaataaaaaccaagcattaatagattcattaaaggcttattgcaaacctcgagaattggaaagaaaacaatatcttgaaaacttgcttaagagaacgccagcagaaattgctgaggaggaatcattagttattgaagcaagaaggttcgaaatagcagcaaagaagatgttaatggagagatcaaacttgttaacattgctcgattctccacaaactactcaaaatgtatcacaatatcaatcttctcaaggtataaccaacttgtataacaatttgttaatttatgacaaacatcaaaagaagaagcaaatggcaaataagtcgaaccctcaacaagaaccagtcccaccaccaataccattagctgcatcatcatctgtgaaacgtgaccgcggtttccaaactcaacttcagcaatacttgtctagttttttgaaacaaaatcatcatacaaaccctgcagtcaaacaggaaatcaattctatacaacagttattaatgaaaaggttgactcaaaaggaagaagaagcatatggtttgtatttccatggaacagaaaagttaaatccaggtgtaatgcttaggtctcaacaaaaactacctggtttaaatcaaagacaatcaatattaaagtcagtcaatattttgttacaagaaatggatatccctactggaggtggtacttcttggaaaccaataatgcccaccaggaaaaccatggcaaaatacgacgaattaattcggtcagtcgtaactttacttgatgtgaaaaaggccaaagacaaattggaatcggaaatcaaattgataaagagtcaaagagggctataa

SEQ ID NO: 6047 - DNA, 2049 bp, Candida albicans
atgacacagagaaaaagatcatctcctgaagatgaccttagtaactcatcagattcagagcttgaatcacctcagttagaaaatgacgatgatttaaagacacactattacataacccccaaaacaaacagcaccgactcgtcatttgaaaatgtttactgcagagtaactagtcaaccaaagcaaccacagaaaaataccacgccattcttgagcttgttggacggaaatgagtctagtgaaaatgtgctgcgcagatttgagttgtacaatcaggtatgggcaaatcaatcggacaaaattcagtcaattttaaataatgccaacgatgaactattcaaggatttgatccaatttgtaaatctagaaaacttacaacaactatcagttggatatgtgcaattgacaacaaacactgccaataacttgagaatcttgcaggagttttatcaatacattcagagaaagtcagactacgactataaattaattactcttaattccaagcattttacatacaatataaaggcaacgttgcgagaagttgtcaaacagttttatgacacctgccagatagttgaggaaatgcacaggctaaactatgatcttgatgctattgatgattggttcgatgaagaaagattgtacaactcgaggttagttttggttttagaagataccaatttgattaacaatcaacttttaaatcaattactcaaaatattgctgtcatatgttggaaaatggcctctcaaaattgttatgggactatcatgtgaaacagtcagctcatggataaatggtaacttgactaatgaactaagaattgggattgaaggtcacaagtttaaaagtaatgacaataagagtttgggatatatcattttaaacaacttattcttgacaccagaattgacaccagagaatccattgttgattaatagtacattgagtacaattattttgaataggtttgaaaactcaaataattctatcgatgccttgattgccgagataaaattatgttatatgatttatttttaccgactgcccttgtctattcttattgcggaagagaaccctcaacctcaagaattgtatgcagatggattaaggaaactctcttcatttaaaaagtacattgaattaaagctacaccaaggtgaccgcagtgtcaaggatttgttaaataatgacaagtcagtgataaaactattcaacgaatcacgaagtaatttccggaaattcaaattagctgttatgaatgccatcaatatcatttaccaattacatcctaataaaccgaaacagaaatttgagctttataaattattaatcaatcataaattgctaaattcaaaatacttgtacgaactggtgaaaaacttgtccaaactatcagattcagttcttgggaaagtgcttattgggttgacagacaattgcacggagatacttgatggaataagtgacaaccatttaattcaactaataaaaggcttaggtgaattgtcagatttgagaggcgtcagcgataaacttcaaaattattttgataacagtatattaactacacctttggaatacatggtatttcatgaagtgttttccatggacggaggtctaatccaagagaaattcacgaagccaccattgtttgaagaaaattacgaaaacttgatgatcaacttgttgcgaccaaatctcagagctacaatagagcgtggcttggataactatgaaacctatttggccaatccgttgattgaaaatagtgtagaacaaccattgatgccaccaacattgactcatttgtttaaattgtacaaggaagcaccaacaactatcaatttatacgacttttatcaggcgttcaagtctactttagatgaaaaagaactctcattgcagttgtcaacaaatgaggactgggagaaattaacttatgcgtggtttgtccaaaattgccacgagttgatgcttatgggaattttacaacaaaaaccaaagggtgattttttggaaaaggcaatatggaaaggtatctaa

SEQ ID NO: 6048 - DNA, 921 bp, Candida albicans
atgaccgacttaacaccattattccgtcagtgtgttgacatcgttcagcaagagtacaagactcagccaaccacagccaaacaaccttactaccttaacgacacatttattaaggagacgaccgcctttttccatgtcttgaccaacttgaaccagttcatcaacgaaaccaaatcaagttatctagccataaacgatgacacgaaactagctgggtcgattgacgacaaaaacaagatcgacgaagagttcaattacaaggtccagcaaatgtacaagcgattaaatcatttggagacatacgaaacaaagaggcagtcgttactaccaaagactagcgggtggttcagtttcctagacgaatccaacgaccaggacatatactttgagacattggcgaatcatcgtatgcagatattgcggttcctcatggagacactcaaccatgtaaacaaacgctttgaaaacatccaacaaaaaagattggctcgtgaacgacaactaaacttgttaaacttccaaaactttgaagacggcgaggagttggaggatgtgtttcccacactagaccaaatccagcaagtaccagaactatcccaacaacaaatccaacaacttgaaacggaaaaccaggaatttctcaatatgaaaactagccaattgaaacaagtcgaaaaagtgcagcagtcaatactcgacatcgtcaacatccaaaacgaattggcatttaagctacaagaccagggccaacagatcgagtcgttgatggactcacatgctgatgttcaaacagaagtccaaatggggaaccggacattaagtcaggctacgaaaaagaataaaagaggtgctaatatgttggtcatgctatgtatagtactaggtgtgttattagtgttggtagactatgtatcattctga

SEQ ID NO: 6049 - DNA, 1092 bp, Candida albicans
atgacaagtacacctcaagaatcctctaatttaaagagacaattagaaaacagtgaggactccagctcaccaaataaggaatctaaaacagagactaccacggaaaaccagagctcatgggagtctgactttaatagtttaccagtggaattactacaaactgaaacaaatggtacatcaccagcaccagcaccagcaacaccgatcgataccaccaatgcatcaagcacaaaggaacgtgatcaggatacttctaaattaaatgacgcgattgctgctgcaggagttgatattcaacaagaagaagagatattattacaacaacaattaaatagaaaatctgcagagggtatggcaagcaatctaaaaagtgtgatcaggtccagcaaactgcctccatttctacacaattaccatttagctgcctttattgataaagtggctaaacaaaatggaattcaacagaatttcttaatggatggtgagatgttggaattaatttcagctgcttgtgagacttggttaagtaatctagcaacaaaaacgataatcttgtcacgccacaggagaaggggaatacctgttattaataagaagtcaggaagtagttcagttccaagatcagaaatttcaaaagaattgagaagcttggccttaaaacaaaaggaaatggaagagaaacgagtgaataaaagagtgatgttggggttggaaaaaagcaccaaagacgcatccaaaaatgacgaaaatggtgaatcaaaagctggtgctgaagaaacattacatcgtgcagcaaatgctacagctgcaatgatgactatgaatcccgggagaaagaaatatagttggatgacttcaagtgctacagcaggcggtgggtcagactttggtaaatcaagtggtggctcatcaaaggactcgggaaaacaccaaagtcctattatttcagtacgtggtgataatggccttaggtttagagaaataaggtcaggtaattccattattatgaaagatttgttaggcgcaattgaagatgaaaaaatgggtacgagaaatgctgtaataaaaggatatgcaaaattgaaagattaa

SEQ ID NO: 6050 - DNA, 2616 bp, Candida albicans
atgaatacgttttcatccccaccaaacgtgatacgagagtataatgactccacatatcagctgccattgaattcacaattccaccaatcaccattcttgcagactcaatcaccagactatgtcagcttacgagaagaagaggatgataataatgataagaatctagacatcatgtcatcatgtatagtagattcagtaatatataaatcacaaaaaattgctggcccactattgagtcaaatatccaatttgaacattcagcaagcattgattatacgagaactactattcacattgttaggacatgaaggtcattacattcaatatagtaaacgttatgatccaacctcacaaatcagccgaattgaaggaccggactataagattgcaaagaacttggatataagtcttaaagttatcaccaagaaattggtcaaatttggaaagttttacagtgggttaaaatcgtttattcaagtatttgataataacaaatttgggaaaattgtgcaaaagttttgctctgaagtgagaaagtttttatcgagttatcaacaagtgctaataaatgttgagcatgagttcaagtttaataagaattttaatttgaatatgttggatctgctcttacatcaagaaatatcgaatgaaatgactcatttatatcaaattggaatagagattagtcggataacggaagaaagacagaaaatgtcacaggcggaaatcatgggtaattttgaaccaacgactttggcaaacacaagtatgaatgggatcaattccgagcctaatttgtattatggcaaatttgattgttgtaaaggtggactattacttcaagttattcaggaaagaatggtttattataaaggtgatcctacatctctagattttttaactcaactttttgatattgttagttcggattatattgggatgttgaatcagtggcttttggaaggtgtaataaatgatccgtttgatgagttcatgattagagaaaaacgagtgccagactcctttatggaaatatttcaaagtaaaagtgaatactattggaacgaattgtttttaattaaaatagatggattactcaatcaatttcagaattcaaccatacagtcgaaaattctcaatacagggaaatacttgaatatattcaaacgatgcacagggttacacaattttgaatcattaaaagaaaaattgacaactataactagtttggcagctcctgatttggaacttaagattgatgagttttatcatagagcaaacaaaatgttgatgaagttgcttttcgatggatataatttcccaagtgtggtgaacatatttcaaagattatttcttttcgctgattcttttcaaatcgacaactttattgatagtactttcagtgaattgaaacgtgggaaactcaaaatctcagtttccagactacaaaagcaatatgatgatatattcaaagaaaaaattgaaaataaagttggagtacggccaagtgtatacgacgtgttgaagaaaaatcagaagctatcggtaacgtcggagtcattgtataaagtggttgaggaattaatggaaaagaacctggattatttgatttcagacaacaatttgcgtgggatatttcatcgagtggcgtcgttaagagacgacctgcgacttaccatactgagtactgctgattctgcaactgaaaacgtgaaggatgaaccaacaataactagtgttgatcttactataccgttgccattcccattaaatttggttttgaatcaacaattgtcataccaatatgaaataatgtttaaattattaattaatatcaagtttatttcaaaatataatagttccaattggcaagagatgaattattctaaaatttggacaaattcgcatttcaactcgagtgtgaaaaaatggatattgcgttgcagagtattgcattcgagaatttgcagttttattcatgaacttgaaaactatatagtgcatgatgtcattgaacataattttgaggaaatcaaaaatttgattcacaccacggctactaacttggcgacaagtgaactaggatcagacataaatgatgaaggtgataatatattcaatggatctttgattcgaggtacatttaacaataattcgatctttgattccaaagttcacaaacataggacaacaacatacgtggaaggtatttcaacagttgaacaattaattcaaaaatttctagattattcaagtactttgttgaatgattcgttgcttacccgtgaagagtcgttgcgtcaattacgtaaaatgttggacttcattttccatttcaataattacattgtccaagtaaagaaagttttggtattgttgaaccatgaattgttcaatgagtattctaaggaattccctaccaagtttgaaaagccaatggatcaagagctgatagataaaagatttgcaaacttgagtgatacttttctaatgcagtacgaaaagtttggtgaaaatcttgttacatttttagccaccattaaacaggttggtgaaagagaaaaccaaggattattggaattaagtaatagactagaactttgtttcccagaatag

SEQ ID NO: 6051 - DNA, 1296 bp, Candida albicans
atgcaatttgctccagataaccaaataggcaaagagttacagcaaaacttgattcaagaaatacaaaggcgtttcaataaaccggctgatgatgccgtagatattgctgactatatcatctacttgattgtggcaaaaaagagcgaacaagaaatagtcgcagaagtcaaagatattgctgacatatctattgatgttgggtttattggggatgtttatctggaaatcagaaagttggaagtaaaatataatcaacctcctgctgcagtggaggaagcttctcaacctcaacaagaacagcaacagcaatctcaagcttctgtagtggctccacaaattcctattggtcctaagaaacaattaactgaggaagagaagattgcccttcgaagtcaaagatttggaactactactagattgagtgggcgaggtggacgtggtggtataactaaaactagaaccgatttcagaaatgggcacaataataagaacttcctagaccctaaaaaattagaccaaataatttctggtgccaataatggggctattaagtttgtaccactcccaccaaaaggtagatgtccagatttcccatattgtaagaatcagaattgtgaaaaagctcatccaacaaaaaactgtttcaactacccggattgccctaacccaccgggaacatgtaattttttgcatccggatcaagaccaagagttgattgctaaattagaaacatctaaaaaagaatttgaagaaaagaaaaagaatcaacttatggtcaaacaaggctcatgtaaatatggtttgaaatgtgctaaagaaaattgtccatttgctcacccaacaccagctaatcctgaatctggtaagattgaaactttggaatggtgtccacaaggtaagaattgtcaagatagaaattgtactaaatcacatccacctccacctacggcaaactcagaaaaattattatcagctgctgacttggcattggaacaatgtaaatttggttcacaatgtactaatctcaaatgtccaagaagacatgcaacttcggctgtgccatgtcgtgctggtgctgaatgtagaagagtcgattgtacattttcccatccattgaaagaaccatgccgttttggaacaaaatgtacaaataaagtgtgtatgtaccaacatcctgaaggaagaactattgcctctcacacttggaccaaggatggtagtggcaataataacagtacctcaaatcgatcatttgctgtttctgaagatcagattatggaacaagttgctcaatag

SEQ ID NO: 6052 - DNA, 846 bp, Candida albicans
atgtcaagaggtaaaacaataagaccgtcgtattacgatgaagaggaatcttcacaagatgaattgagtcacactttaagtaaaggccgttcaaatattggctcacaatcagatgatgaagaaatgtccaaaatatcatttggtgctcttaatcgagcccaatctaaattgaacaaacacaatcaaaaacataaaacacaggaggacaactataagtcttcagaagaagagtttttcgattcaggctcagattcagatggtccaccagaggaaacaagttctaaagatactaaaaagaagaaaaacaaacatgctccatcagaatcctcttccaaaagaccagtttcaaggataagagatatacctggattaccgtctagaaaacaacaaactttgcataccgatattaggtttgatgctgcgtatgggaaagctgatttggccaaggcaagaaaagattatgcctttttagatgaatatcgaaagcaagaaatagcgaatatggaaagtttattaaaagataaaaagagtagattgaatgatgatgaaagagaagaaatcaaactacagttacaatcattaaaatctcgtatggatactttgaaaaatcgtgatttggaaaataatatcttatcaaattataaaaagcaacaaatggaaagtttcaaagaaggtaaagtgaataaaccttattttcttaaacgtagtgataaacgtaagatattacaaaaggccaaatttgattctatgaagcctaaacaaagagaaaaggcaatggaaaggaaaaggaagaagagattgggtaaagaattcagacaattggaattcaaaccaactaatcgttaa

SEQ ID NO: 6053 - DNA, 828 bp, Candida albicans
atgaaaacgtcagtatttatagcaatcttcaatttacttgtttgcgctcttgcgtacacagacttgacaggatcaattaaaatcaatgacaaaaagattacccttggtgagttcaatactcaagaagttaaacaattgacaatcaattctccaaaggatataatagaaattgacttaaaaagtaaagatatcaagggtaaacctgagcagattatggttagtttggcagatgtcaaaaacccagctatttctacgcattatgttcctgtggtcaaagaatcgaaaatcaagttgaacatcaaagcactttcaatcccggaagttttgaaaactaaagacaaattagttttgactattgtaattgccgactcaaaatcaaagaataacatgattagaagattggttgaagttttgccaagtcccgagtttaagagtacaagcaggtaccaggctaaaccaagaattggaatacaaccagagatccatcacattttcagagaggatgagaggactgttaacccaattgtgccagttgtatttataattgcagcttttactttacttcttggtttgtttggctcgtgggttggttttattggaattgataatttatttagaacgttcaagactattagtaaagttcaattgttacacaacgttagctttttgatttcagttttggggtttgaattgaattttgtcaagtactatttgggtcaatcaattttcaccactttgttttacggatttattttgagcattccatgtgtttactttggagtcagcgttttgagaagtttagcaaaaaaccgtgctttaggcaagtaa

SEQ ID NO: 6054 - DNA, 1230 bp, Candida albicans
atgacttcactgatcaatattttattattacttcatccaacagtagtcactgatgcccaattagtagaacaaatcaaactgaaaatttatcaatcacataataacaataacaacaacaatggtggcactacaacgacgacaacaggaacagtgaatatcaatcttaatcaacaaataatagatagagtcactaaagggatcattgaattaccatatgattattatgatgaaataatatatattaacccaaataatgaatctcaatatcgagaaattcctattctgttaatgcaattaatttataaattattgaaatcaaatgggaaatttaaaggtgatttaccattagatcaaaatttagatgttttaatgacaggatttataatagaagaagaagaaaaagaaaaagaaaaagaagaaaacaatcttgaaggtgaattagttaatgtatgggttaaaccaatacctgttgatgaaccagtggtgacattattgaaaaagaaaacaactactagtaatactactaccataaaaaaatcattgccgttatttaaaaaactaaataaagatgaaattaataattctgataaagatattaacaatgataatataactaataataataataataataataataaaagaaaattggtggagacaaaattaacttattttagtagtgatgatgaaaatagttctgatggatcagttttggagaatgatgacattgatgatgatgatgaacttatagatgaaaatgatttacttaactttaacaacaacaacaacacaaatggtgggagtttattatctgataaattaattacaccaagaaaatgtgatatatcattaaatggaggtaaaaaaagaaaaaaagcttgtaaagattgtacttgtggattaaaagaattggaagaattagaagtatcaaatcaacaaaatttacaagatcaaattttaggtaaattggctcaatcagcaactttagaagctataaaaattgaagaaagattaaaacagcaacaacaacaacaacaacagaaagttaaagttaaatttactgaagaagatttatcagaaatagatttcaccgtacaaggtaaaactggtggttgtggactgtgtgctcttggtgatgcatttagatgtgatggatgtccttatttaggattaccaccttttaaacctggtgaagttgttaaattagatggatttggtgaagatatctaa

SEQ ID NO: 6055 - DNA, 801 bp, Candida albicans
atggcaggatttaaaaagaatagagaaattttaactggaggtaagaaatatatccaacaaaaacaaaagaaacatttagttgatgaagttgtatttgataaagaatcccgtcatgaatatttaactggtttccataaacgtaaattacaacgacagaaaaaagctcaagaatttcataaagaacaagaacggttagctaaaattgaagaacgtaaacaattaaaacaagaacgtgaacgagatttacaaaatcaattacaacaatttaagaaaactgctcaagaaattgctgccataaataatgatattggatttgatcaatcagatgacaataatgacaatgataatgaagaatggagtggattccaagaagatgaagaaggagaaggagaagaagtaactgatgaagatgacgaagataaggaaaaacctttgaaggggattttacatcatactgaaatatataaacaagatccatcattatcaaatattactaataatggtgccataatagatgatgaaacaacagtagtggtagaatcattagataatccaaatgctgttgatactgaagaaaaacttcaacaattggctaaattaaataatgttaatcttgataaatctgatcaaattttagaaaaatctattgaacgagctaaaaattatgctgtgatatgtggagttgctaaacctaatccaatcaaacaaaagaagaagaaattcagatatttaacaaaagcagaacgtagagaaaatgttcgtaaagagaaatcaaaatcaaaatcaaagggcaagaagtaa

SEQ ID NO: 6056 - DNA, 837 bp, Candida albicans
atgagcctgttattcattaatgaggaggatgatatgactcccgaaccatataaaccatcaacatctacaatcagggaggaagaagaagaagtgcaagtgaaacaagaatttccagacgagaagatggttgatccagatgaagatgatccaatagtcgaatcgataccattacttataaacacagtaccagaaagggcgaaacagtcattacatgttttgcaatatgccggtcgacccaaatcacgcccaaatagagctggaaattgccatgcctcaataaaaccagaatcacaatatcttcaagtgaaagtaccccttgatactgaaaaattctttaacgtcgacaaaattcaagaatggggtgaacaaattgttgaacaaaccattctgggtgtgctagatgggtcttatgaagtaggaaactatgctgcaaaaataataaatgacagcgatggaagaagagttgtattgattccagtggatagtacagtccaattaaaaccttcattcaagtacattgacgatttggaagcccaaagtatccaacaaagaagacaacaagagagtactaatgaaaaaccagcaaatgtccaaattttacaatcagctgctaagcattctactcaatctggagaatttctgcattctttgggagactcattgaaactggtaaagcattttgaagaagaggaatggcaaaatctaatttggaaaagaggcgatgatgatgtaaccaagagtataaagtttggtttagatcaccacacagatactaatattgaattaaaaacaaacacttcatatgatgaatacatagacatgttaataaataactga

SEQ ID NO: 6057 - DNA, 591 bp, Candida albicans
atgtccgccgatgaaaataacaaagtgagatttgagcggttgaggcttgttgccaggaaagccttagaacaactgattaaaaagtctttgactatggagcaagtaaaaacatgttttccgactctagtgacttctcaagatggagtcagatcactcgaattggccctttcacaaatgtccgggttttggcatgcaaactcgttggacgaatttgatctaatatataaagaaaaagatattgaatctaaactagatgaattggacgatataatacagaatgctcaacggactaaagacagtgggaaagaaccaagtaatatagatcagctttcacctttagaaattgttgattccacgattgttagcaatagcaaaaatgttttggatagtcttcaaatgatatacgaccaattgtgtctcgataatgctgagctatatacagaactttcagaactcacaaaagaaagcactagaatcaataattctataaaatccggtattgaacaattaaacaaagaagctaatagtgttgagctagaaaaagcgggacttcaaattgacaaattaatagatatccttgaagaaaaataa

SEQ ID NO: 6058 - DNA, 2307 bp, Candida albicans
atgtcggacctaactccaattaaacttccttcgtccgctccatttccggttgtcatatcatctgtattatgcaaacctggagatacaatttccaagcacaagactatattcaagtacaaatactgggactaccaagatgatccaacttcaaaggaggacccacctaagaaaatacgagtagaacggttaggtacatttgagagtcccatagaaggcgaaattgaccagattaacatcaagccattgcaagaagtgatgcatagtgatgtggatttgttatttgttaaagaagcatgtcctcatactgtgcaatacagtgggttatgtgcattatgtggcaaatccttagaagaagaaaaggattattcaggatacaattacgaagacagggccacaattgaaatgtcccatgacaacactggcttgaaaattagttttgatgaagcagctaaaatcgaacacaacacaactgaccgattaattgatgaaagaaagttgattcttgttgttgacttggatcaaactgttatacatgccaccgtggacccaactgttggagagtggcaactggacccagccaatcccaactatgctgctgtcaaagacgttaagacattttgtttggaagaagaggcaattgttcctcctggatggacaggtccgaaattggctccaacaaaatgcacctattatgtcaaactccgtccagggttgctggagtttttggagaaaatggctgagaaatatgaaatgcatatttacacaatggccacaagaaactatgcgttatcgattgctaaaatcattgatccagatgggaaatattttggtgatagaatacttagtcgtgatgaaagtggttctttgactcataaaaacttgaagagattgttccccgtggaccaatcgatggtagttattattgatgataggggagatgtgtggcaatgggaaagcaatttaattaaggtggttccctatgatttctttgttggtattggagacatcaattcgagtttcttaccgaagaaaaatggtcaattaacaggaccaaccaaaaagaggaaatctatagccaaattagaagctgctgctgaactagccaaggaatcagataccaataatgacaagcaagagactgaatcgggggaagaagagggtgaagaagatgctgatggtcactcggacgtgtcaaactcccctgttgaaagaatccttgaactcggaggaggtgaaggaaacactagtttattgttggaacaatcattgacaagaaatcagtcaatagaagaacaacaacagaagcgtccattagcaaagttgcaacacgatttggaacaaatgcatgagcatcgccacgatagtgatagcaagtcagagagtggttctgatgatgagagtgatgaagaagacaatttgttatttgatgatgataatgaattagcagccttggataaagtcttggggaatatccatcaagggtattataacttgtttgataaagacaaaatcaacaaaccggatttgactgaaatcataccgtcaatgaaaagcaagacattggaagggataacggtcttgttctcgggtattattccattgggaattaatttggattctgccgatatcgtgatatggtgcagacaatttggtgtgaaagttgtcaatgaagtgtacccagaagttactcacgttgtttgccgcgatgttagtgaaggtgctggaccaacattcaagaccagagttgcaagaaaactatatcctgacactatcaaaattgtcaatccagattggctatttgcatgtttgagtaactggacaaaagttgatgaaaaagattatttgatttcaactgatgatacaaagctttggaccgtgaaagagaatgagattaccaagtaccagaaagctttggaagacagaagtgctttggcaaatgctactcatattgattctattgagtcatttgatgagtacgatttggatgaagctaatcaagaagttgatgatttcttggcagggttaagtgatgatgatgaggaagaagaggaggaagaagaagatgaagagatcgagaatccagaatcaaataatgatgatgaagaaatctatgagcaatcaaccaatggacatgattcatttatcaaggatgcttatagtaagaagagaaatagagatgaagaggaggtacaacttgttaaaaagcaaaaaatagaaaatggagaaaatggagaaaatgaaaatgaaaatgatttagacgatttggaaaaagaactacttgacggttttgacgacttggaagaataa

SEQ ID NO: 6059 - DNA, 378 bp, Candida albicans
atgctgaaaacaaatactgctatataccaaaagattgctgaaaaaagagcaaacttggaacgatttagggaatttaaagaattgacagatgatttggttttacaactagagtctataggtgacaaattagagacgatgaatggaggaactgccagtgtagcattaattttagcaaactggaagagtgtggtacaatctatttcattagcatctctagctttaatgaaagagtctaatgataataacaaagaggctttccctgaaccattagtaagagtgcgtgttggacaatcaaatgaagaaaatcaagacgatgaagaagcagatgaagaagaaggtgttagagatagtgaagaagttgaagaatccacggaataa

SEQ ID NO: 6060 - DNA, 666 bp, Candida albicans
atggcaggtgatctaaatctaaaaaagtcttggaatccagcattagttaagaaccagcaaaaagtttgggaagaagaacaacaaaagttagatgaacttaaacgaataaaagagagaaatcaggagtataaacaagaacaagaatacttggaattactaaagctacagcatggagatcaatttcaaattaaagacttgaacaaacagcagaagctcaaaatatccaaactaaattggatgtatgatgatgtaccatttgaaggcaatgagaaagtggaagagaattcaagtgggtttattgaatcaaatgtagagtttacagatggcaaatccaaagttgagaatttattaaaaggaaatcatgttgtgggcaagaagagagatggtagtggaaccagtgatagaataaataagataattggggtggggatgaccaaatcaagtaaagtcagctattccgatgatccattactcaaaataaaacagcagcaacaacaggcacaaagagttgcccgaaaacaacatcctagtgataagcattctcatcgttttagacatagttccaaaagttcatccgatagagtgcacaaatcacatgagcacgagagaagtcgaaagcataattcctcacatactcgtcacaaagatggatcaccccacagataa

SEQ ID NO: 6061 - DNA, 1524 bp, Candida albicans
atgttagcactgaaaaaaaaaaggacaagaagaataaaaaggcaaccaatttgtgaacaaattccaacctccaatacagcatttttcttcactcttgatataccaattatgccagtgaattttttaactagtgttgtgtttgatgggccagaggtgattccatattgggaccaaattaaagaatatggacctaccgttcttcccattctattaactcttgctggagccaagtattatttccatggtgccaccaatacgtgggagcgagacatgcatgggaaagtgtttatgattactggtgggaccagtggtattggagctcaaatagcatatgaattgggacaacgaggagcacaactaatattacttactagaagaaccaatgatcaatgggtggctgagtatattgaagatttacgtgataaaactaataatggtttgatatatgccgaagaatgtgatttgagttcactttattcaatcagaaagtttgctacaagatggcttgataatcagccaccaagaagattagatggagtcatttgttgtgctgctgaatgtatcccacgaggaaaatccagacaaataactatggatggagttgaacgacaaatcggtattaattatttggctcatttccatttgttgactttattgggtccatcactaagggttcaacctcctgatagaaatgtacgggtgttgattgcaacatgttcgtcgcaaaatttgggagatgttgatttaaacgatttattgtggagtaacaagaggtatccagcaactcagccatggaaggtatatggaacatcgaaattacttttagggttatttgccaaagagtatcaaagacagttgatgggatatgagcgtaaagataaggccccttgtaatgttcgtatcaatttaatcaaccctggtattgttagaacaccgtcaacaagaagatttttgtctttgggcactgtatgggggttgattatctacttgattttattcccgatctggtggttgtttttcaaaagtgctgagcaaggtgctcaatcattttactttgcgttatttgctcctattttcatgaaaatcgaaggtggtaacgtggtacaagaatgtaaaataatgactaaagttagaaaagaatatactgatgatgacttgcaacaaaaagttttccacaacactgaagaattgatcaaacaaattgaaacaaaatcagctattgaacgtaaaaaacatgaaaacgctaaaaagactccagaacaaaaagccaaggaaaggcaagaggaattgaatagaaagagggatttgcatattaaaccagaaactccggaggaactagaactgaaattaaatctgttgagaaatcaaattggtatggggactggtattctgtctaatgaaatgccattgttccccgatgacgaaactctcaagaaggtgatcagttccaagaagaatgctagtagtaataatagtggtggtctgaaatcaaataagagtcaaaagaaatctaaaaaagtatag

SEQ ID NO: 6062 - DNA, 447 bp, Candida albicans
atgtcagatatagatatagataatgtattaaatttagaagaagaacaatatgaattaggatttaaagaaggtcaaatacaaggaacaaaagatcaatatttagaaggaaaagaatatggttatcaaactggatttcaacgatttttaatcattggttatattcaagaattaatgaaattttggttatcccatatagatcaatataataactcttcttcacttcggaatcatttgaataatttggaaaatattttggcacaaatttctataacgaatggagataaagaagttgaagattatgaaaaaaatattaaaaaggcaagaaataaattaagagtgatagctagtataactaaagaaacttggaaaattgattcattagataatttggtgaaagaagtaggtggaactttacaagttagtgaaaaccccgatgatatgtggtga

SEQ ID NO: 6063 - DNA, 2019 bp, Candida albicans
atggcgaaaaataataacaataataaggatagtagtaatccacgaaaaccaattacgcaggatgaacgtttcaagtcggttcataatgatcccagattcaaaatgcccaagttaaagaacttgagagttaaagttgacgatagattcagtaaagatgagttgaaaaaattgaatgctggtgcattagggaagaaagttaaaattgacagatatggtagaaagatcaagaaagaatccgatgacttgagtaaattttacgaacatgaagaagatagtaaagaagaacaatcgagtgacgactccagtgaaggtgaagaatcagatgatgatttacaagcactcacagaaaagttgcaacaagaggaacagtttttagacagagcaagaggagaagggttagtgagctcttctgaagatgaagaatcctctttatcatcatcagattctgactctgatgaggagaatgaaggagtagtcgaagatgaagaagaatcagatattgagattgaggaaaccaaacctgaagacacagagccaacatgtgcctttgccgttgtaaatatggactgggacaacatcagagctgttgatttaatggccacttttgtgtcatttgttccgaaaggtggtgctataaaatcagtcacaatatatccttccgaatttggtaaagagcgaatgcagaaggaagagatcgaaggtccaccaagggaattattcaaaagtaagaaaaaaagggaagtggactctgattctgaagacatagattcagacgttgatgtgaatgatattgacaatttggcaaaaattactcggaagttatacgaagaagatgacgggaaagaagattacgatagcaaggcattgcgtcgttatcaattgcaaaggttgagatattattatgcagtggttaagtgtgactcggttgaaactgctagactgatttatcaaaattgtgatggtactgaatacgagtcaacagcaaatatttttgatttgagatatgttccagatgatatggagtttgatgatgacgaagctaaggatacctgctccaagattccctcttcatacagaccagactcaacgtttgtaactgatgcattgcagcattcaaaagttaaattgacttgggatgaaacacctaaagaaagactcactttgtcttctagaccattgtcacagaaagaaatagaggagaatgatttcaaggcatatttggctagtgatagtgacgaaagcgaagtggaaaaggatagttcaataaaagataaataccaaagtttattaggaaataccctcactaaatttggcaaagaagaaaatgatgatgatgtggatatggaaattacttttgatcccggtttgaatgacaaactgggcaataatgccgaagaagaagataaggaggagacaacaattgaagcataccgaagaaaggaaaaagagcgtcgtcaaaagagattagccaaatttaaggagtctaaacaaactgaagaagttgcaaattcacaagaaggctcagctgataagagttctaaaaacagaaagaattccaagaaaggtaaatctatgccagatatggacgaaaaatccaaggctgaattagagttgattttgatggataaccaagagggaaacaacaatgaacatttcagcatgaaagaagtcatcaagtcagaaaaggacaagaaaaataaaaagaacaaaaaaggtaaaaagattgatcaagaaatggtacaggatgggtttgtggcgaaccttgatgatcctcgttttaaggaagtttttgaaagccatgattatgctattgaccctaccaacagtgagttcaaaaaaaccgaaacaatgaagaagattttgaaggaacgttctgccagaaataaggataagaaaaacaagaagaatagtagtaaaaatgccaccaagaattcaaaacgtagtagatcggaattagaatctaatgataatgttcactcacttgcagaaaagatcaaaaaaagaaacaaaagcaagtaa

SEQ ID NO: 6064 - DNA, 384 bp, Candida albicans
atggctgcatttgatgaaatatttgattatgtcgatagagatacttttttccaatatttccgattgacattagttgtttgtacttatttgattttccgtaaatattattcttcatgggccattaaaaagcaaacagcaacacaattagaacaagataaaagagaacaatctgaaaaatctgaaagagaagctaaagaatctaaagaaaaatttgatactatttctaatgaagctaaagaatttggttggggtaaaaaaactagaaataatgttaaattaactgaagcagtattagctgaatatagtgaacaacaaagacaaagaaatcaaactagttatgatgctcaagaagatgctgatattgatgatttattagaagattga

SEQ ID NO: 6065 - DNA, 408 bp, Candida albicans
atgagctcaagttcaaacctacaatacgaagaaatacccaagaaatatatagatcctttagctcctaaagacaaaggggaaggttcaagagttaatgggaaagattggaaaataaagaaagatgcttttcgtgtaaagactttgggagtggtttcgaaaacaaaaaaggattcattcaagcaacgtgagctaaaacgattggaagaagaacaatacaaagcaagattgaaagagttgaaggatgaaaaagaatctgctaagaatcaacgaattgctgatttgaaaagacgaagagaaattaaagcagagaaagaaaggtatgaaagaatggctactaaaatgcatgctaaaaaagtggaaagaatgagaaagagagagaagagaaacaaattattgaaagaacgttaa

SEQ ID NO: 6066 - DNA, 1242 bp, Candida albicans
atggcaatagaacaatttatcacgaagggtgacgatgcccttaaatcgaaagactatttaggtgcaatttcctactattctcaggcaattaaggaaaatcctcaagcgttctccccttatttgaagagatcaaccgcgtatcaaaaattaaagaacaatgacaaagcaaaggcagacatatccagtgcattttccattgccaccgaaaaaggcaaaagagtagatattggcttatgttattttaagcttggattggtttattatcaggaaaagaaagtcaagttaagtttgacccaatttgaaaaggcagtcgaatacgactgtaaggaaccaactttatctatgtggaaggccaaggccgagtatgatttgaagaaccaccctgaatggaatgttgagggcgataaagaagaagacgatgatatagatttagttcttggtgttgaaaacgagtacacccaatcaatggctaataccgagaaggacaaatctcatgaaccaaaaattgtggaattggatgccaacgaagaatcaagtgaaaagaaatccaaccaagagtctacatcatctgctcctgctgctcaagctactactcaagctccaaagtctactaacgttgatgtgattaacaagatcgcaccactaaacgttaaattcagagatgactggtatcaatccaatgaggaagttattatcactatctatgccaaaaaagtcaatgaagaaaagttgaaggtcgaatttgatacaaactcggtttctatttcctttccaagcgcagccgcctctgaatacaactattacttggatccattatttgcagaaattgttccatcggaatcaaaatataaagtgtactccacaaagttggaaatcactttgaaaaagaaggacgcaaacaagtggcccgaattagaaaagcaagcagtagaaggtgtgactgacaaccaggacaaggataagaaagttgatccatccgaattagtctatcctacatcatctaaaaagaagatcaactggaataactttaaaattgatgatgatgataaagaagaaggcaatgaaaatgactttttccggaaaatattcaaagatgttgacgaagattctagaagagcgatgatgaagagttatgttcaatcgaatggaactgttttgactacaagttgggatgaagctaaagataaagaatttgaggttttaccaccagatgggatggaagtcaagaaatgggatacgtaa

SEQ ID NO: 6067 - DNA, 1275 bp, Candida albicans
atgctaagatcaggtataataaaggcccagcctgccacggctattataagaccgttatctagatgtttccactatacaaatattaactttaacgacaagccaccgtcgtctgactcacctttaaaagttttctttgacacatttaaaactgaagtgaaaaagtcgaacgaattaaaggaaaacataaaggcattacaggatgagtcagggagaatggcagaatctgaagcttttaagagagccaaagaagcctatgccaaggcacagttgggtagtactgctgccgggaaagttttaaagaaaggtgctgaaactgttggggatgctgcgtacaaggcatgggagtctcctgttggtaaaggtgtgagaaccggtgttaaagtgacagcagatgttgccgataaagcatttgagccagttagaaaaactcaagtttataaagacatgtctgaagttattgatgatgggtcgtctactgcttatggtgggttcttgacgaaggaacaaagagaggctttgagaatgaaagagttggaaagaaagaagaaacagggattccaaggaccggtaagagaaaacgacgaagcaggaggtgctttggttgccaccgaacacaaacctactggtccaactatgggagaaaaatgggaaaacttcaagttgaaatccccaataggccgtggtgtggtgtatttgcaggaaagatgggaggaatcagaaaacgggttgattgcattgattcgtactattgtggaaaaggttactgggttcttttccgagaccgagcaagctaaagtcgttaaacaattgaaattgatggacccatcattccgtcttacggatttccaaagaacattaaccaactacattgttcctgaagttgttgatgcttatatcaagaatgatgccaaagtattaaaagagtggcttagtgaagcgccttataatgtgtgggaggccaataacaaacaatttatccaacagggtcttttctctgatagcagagtgttggatatcaggggggttgaaattgtcacttgtaaaagcttgcaaccaaacgatgttccagttattgttgttagttgcagagcccaagagattcatctttatagaaaagccaaaaccggtgaaattgctgccggtactgaagaccacattcaattgagtacctacgccatggtgttgactagaatacctgaagaatttgacaataaggtcactgatgggtggaagatagttgaatttgcccgtggtggttcaagaccattccattaa

SEQ ID NO: 6068 - DNA, 1173 bp, Candida albicans
atgtctcaacagattaatccaccattaggctctactgacatagccaagttgagcatcccaacgttgcctcaagtgacaaccgaaccaccaaagcaaaatggattgtggtcatcaaacccagttttcagttacatcaacgatgtttatatcactataaacgaacaccgtaaatcattgggattaaccaacccgggaacaattgaaaacttgaacaaggaggttgcccgtgatgtgtttttgggtcaatatttcttcacagggttgagagctgatttaaacaaagccttttccatgatgccagcattccaaacatcccacactttaagtattggatccaacgttttaccagcctatgctttcagtgccttatatgccaccgatgattatttcttacaaggtaacattgacaatgatttatcattttctggtagaatcaattacggatgggacaaatcaaacatttccaaagtcacattacaattagctcatggacaaccatccatgatccaattagaacaagattatcaagctaatgattgttctatcaatgtcaaaactttgaaccctaactttttatcaggtaatgaattcagtggagttgttgttggatctattttacaatccttgtcatccaagttggcagtcggtttggaaaccatgtactccaagcaaccattagcaccaccagacacagctgtttcttatgttgctcgttataatgcaggcaactggatcgcctctgctcaactccaagctcaaggtgctttgattgcaagtttctggagaaaggtcactgataaagtcgaagctggtttagaaacccaagttgctgccactatgaaacaagttgctgatccattaatgggtgttggttttgaaccagtcattgaaggtcaaactactattggtgccaagtatgaatacagaactgccgttttcagaggtcaattggattcaaagggtaagatcagtgcatttttagaaaagagaatcatgccaactgtttccatattattttctggagaaattgatcaattcaagaatacatctcgtttgggtttgggtttgcaatttgaggctgctggtaatgaacaattgatgttaatgcaacaaggtttagtcgacgctaatggtaatcctatcccaggtgctccagctccaggtgctttgtaa

SEQ ID NO: 6069 - DNA, 2145 bp, Candida albicans
atggctaaagcatcgaaacaaacaaagaagtttcaaaataagcatttgaaacatacaatagagcaacgtaagaaggttcaggcacagaacaagaaaattgcttccagaaaaaagagtggtagttcatcatctggggaaagcaatgcccccaaacgtgctgatggaaaagccaaggaagtctttgaagatatgtcagtagacgactttttcggaggtgggtttgaagttcctaaagaaaagaataagaacaagaacaagcaagatacaattgaagaaaacgaagaagaagactcgtcttctgaagaggaagatgaagaagcaatgaaggaaaacttgaaaaaattagaggcagacgatccagaattttacaaatacttgaaagataatgacaatgatttattagattttgaagctgtcaatcctttagatgccataagtgatgacgagggtgatgaagatgatgacgaagaaattgaaaaagaagttcctagcgatgatgattctgaggaagaaccaactctaggaaaagtaaaaggatctaaaattgaaataacgaaatcgttggttaaaaaatggaatcaacaattagataagccaacccctaagattacaagaaacatacttattgcttttaaggcagctgtcaatatccacaattcggattctgaagattataagttttccataacagaccctaaagcattttctgaattgatgttattagttttgaaaaaagttcctatttctgtgcaaaagttggttaaatacaaaactaacactcaaggagtaagaactatcccgcaaaagaatcaatatgccactcaaattgcagctattttgaaatcacatgcaggttcattcatcactttattaaacgatatcaccaatactgaaactgctgctttaattttggcttctatttatgaggtgttcccattttatttgtcacacagaagattattaaaacaaattttgactgccgttgtaaatgtttggtctagttcttcagatattgatacgcaaatttctacatttgcatttttgaacaatgtatctagagagtatcctaaatcggtcttggaaaccgttttgaaattaacttactcgtctttcttacagaattgcagaaaaacaaatgtccataccatggcccagattaacttttgtaaaaactcagctgtggaattgtttggaatcaatgaaactttgggttatcaagttggttttgagtatgttagacaattggctatacatttacgtaacagtatcaatgctacttcgaacgcaaaagagggatacaaaactatatacaactggcaatactgtcattcattggatttttggtccagagttttgtctcaacattgtaatcctgaaaaagagttgcaaaaccataaatccaaagaatctccattgaggcaattaatttatccattagtacaagttactttgggtgctattagattgatccctaccgctcaattttttccattaagattttatttaattagatccttgatcagattatctcaatctaccggcgtgtttattcctttattcccattgatttcagagattttatcatctacagcaatgaccaaggcaccaaaagcttctactttgcaagctgttgatttcgaacacaatattaaagttaatcaagcatatttgggcactagagtttaccaagatgggttatgtgagcaatttatagagttatctggtgaattttttggtttgtatgcgaagagtattgccttcccagagttggtgaccccagctgtgttagcattgagaagatttgtgaaaaaatcaaaaaatgtaaaattcaacaaacaattgcaacaattgatagaaaaattaaatgcaaatgctgttttcattactggaaaaagatccaatgttgagtatggaccatcaaataaagcagaggtacaacaatttttgagtgactttgaatgggaaaagacacctttgggtcaatatgttagtgtacaaagacagttgaaagcagaaagattaagaatcttgaaagaagcccaagaagaggaagcaaaagcacaagctgaacaaaagaaaaaagaagaagaagaggatgagcaagaagatgaagatattgtaatggaggaggaagatgatgagtag

SEQ ID NO: 6070 - DNA, 504 bp, Candida albicans
atgggaaccaacaacaaaactgtcactaataagtcaaacaagagaatccaagggaaacgacatatcaaacatagtcccaacttgactccctttaatgaaacacaaaatgcttcgaattttttaatcaaatcatcaactccttatatatcagctatcaaacaaattaccaagaaattgaataaattctccaaatcaaagaatagtcacacgataaataaatttcaaaatgaacaatacaagacgatcaaatatatagccgtcaaaggtatgggtaaaacaattgaaaaagtggcgagtattggtactcatttccaaaaggattataaagttgatgtgttgacagggtctactacagtgttagatgagtttgcaccaattgaatcaaaccaagagcctgataatgagaacaagagtgatgatgatgacgacgacgacgacgaaactatatataagaaacgtactgtgagttctatagagattagaatatggataaaacgagattaa

SEQ ID NO: 6071 - DNA, 300 bp, Candida albicans
atgtcaaattcttcatctaatccatctaaaaatgaatatttcataaaacaacgagatttactaatacaagaaatatcaaataatttatctatagtacaaacaaatttagaaactttgaatcgatcattacatgaactgaaacaaattggtaaagaatttgatgatgttgctagattatggtcgacattttatgatggaatgaatgggatgaatcatcaaacaagagaaaatacccgtgacgaaaataataaaataagttcctctgatacagaagatgaaaacaacaacaacaagatatag

SEQ ID NO: 6072 - DNA, 648 bp, Candida albicans
atgttttcgggtataagcaagttggttttgggaaagtctgccatatcttcggcgtactcaattccaaaaccttttaattaccaaaccatatcacgaaccttgtcaacatcatccacggtagcaagcgtacagagagctaacaaaaatgcatcaatgtctcaattagcccagaaattgaataaaaacaaaactaacgaaaaagtagtttattggaaactatacgctacatttaatagacacaacaccagatgcacattagtggccgtggttgaagacttagatttcatggagaagaacaaagatttaccatataacgacaaagtgttatactacttacagttgcctcataaggttaaatatagtgtaactgctggacaattaggattcagaaaatcccagagacaagaatacgaagctggtttccaagtttcgagtaaaatgtttaaaaccatagaagaaagaaactatattggccctcacgataagattgagttgattttgaaaaactttggtaaaggaagagaagccttccaagctgccttgttgggtaaggaaggttcaaaaatcaagaacaacatcgtcagagtctgtgatgctacagtcttgaaattcggtggtgatagaccaaagaaattacgtcgtttgtag

SEQ ID NO: 6073 - DNA, 543 bp, Candida albicans
atgacatgtcaagaggattgttcatgtaagaataatgaagcccccacaacaaagacaactgccaccacaactaatgttggtgatggccctggccctggccctatccctggcaataatgatgatgatgatgatgacatttggtcagatgatgatacgaaactaatacctgaaaatgatataatacgatcacattataaaaaagggtatgttgatgggataactcaagctaaagaatcttcattacaacaaggatttgatgatggatatcctgaaggtgcaaaattagggattaaagttggtgaaattttagcaaatttaatcaatcaatgtaaagatagaaacagacaaggagatgatgatgatgatgatgatgatgaacaactggtaagatttaatgaagcgaaaaaggaattgaatatagttaatgttttaaaaaaatcttattttgatgaagatttgaatttgaaaaagagtaatgacaataaagaaactgatgaatcatatcatgaattaattaataaatgggagaatgaaatgaaatga

SEQ ID NO: 6074 - DNA, 1554 bp, Candida albicans
atgtggaagccacagaaagacaaaacttttagactgaagtatacaagtcagtatggttataatgtcgaccattttaattttctcaatgattacaaggaagattggaatgattatgttgcatatgttaatgagagtttagtggagaaatactcttcaaggtcaaggaaatttgattcgattcccctaaacaagctaaacctagacgataccaaatatgatagtactgatgaagattatgtcagagaaaactttaaatacacaaatcctatagctttaaaatctaatagttccacgactaaagtggatttggttccggaaaccccagttcatttgcaagaacacactaaacgaaatgcctttgcaatagcagttggtgggcagatcacttgcatacaatggttgccacaaaatggaaatagtaccagcagttattttgcggtatcattagttaatagtgtcaatgggatcaaagccaatgaccctaatttcagcattttcaataaatcaaaaattcgcgatatgaaatccgcaattcaaatttggaagtatgactttgataaaaacgaattgaaattacagaacatgttgattacaagtgaatttggcgcctgttcaaatctcaaatgggccccaatacaaagtaacgggactattttaggcgttttgacagggttgtttaccgatggaaatgtttacctatttaaaattgaagagtcactaccgccgtattcaatcattactgaaccatctcttgcatacaaactacacgaaggttctacgaaaatcaacatcacatcatttgattttattggtagcgaaaaattggttgttgggtctaacgatggttctattgccgaatttatgcttccattccgctacaatggcaatgatatagatatacctaatttcaaaatgggaatatgctggagtgcaatcctgtcattaatgtgcatacagaaccccacaggcaagtatttatgtattgcgcacacaggcgctcatcgaagcataacatttgtctatgacaatccattacaggacatgtatccaacaacggtgaaactcaacactcagcctagtttcaattatccattgcagaattttgtaatcacaaaccaagcagaacagtctcagatcgcgttcccgaggacaagccattgtacatttatcagtttagcccgttcagatgcttattacacgatatgcaaagtgtctgaaattctcggccatccatttcttatcactggtgctaccaatggagacatatgtattatgaactatttcaaaaagtttttggggatcaattcaagcttaagtaaagttacaccattgaggatatggaaagtcttggcggaaccagatgaacctataacattgttggccgatgttcaaatacaagatcaggatgcagttgtcttaccgacttcgatgaaaaccgagctgaatataactgcagctgcttggaacgaaaatagagtggggagttcaacatatgctgttggtaccgctcttggaattcttctactagaaaggttggatccaaaatatctatag

SEQ ID NO: 6075 - DNA, 1203 bp, Candida albicans
atgtctttcagaactacttccatgagaatggctagattagccactgccaaagctactttgtccaagagaaccttctccttattggccaatgctaccaccagatacactgctgcttcatctgctgctaaagctatgactccaatcacctcaatccgtggtgttaaaaccatcaactttggtggtaccgaagaagttgtccacgaaagagctgattggccaaaggaaagattattagactatttcaaaaacgacacctttgctttaattggttacggttcccaaggttacggtcaaggtttaaacttgagagataacggtttaaacgttattattggtgttagaaaaggttcttcttgggaagctgccgttgaagatggttgggttccaggtgaaaacttgtttgaagttgacgaagctatttctagaggtaccatcattatggacttgttatcagatgctgctcaatctgaaacctggtttcacattaaaccacaattgactgaaggtaaaaccttgtacttctcccacggtttctccccagttttcaaagacttgactcacgttgaaccaccatcaaacattgatgtcatcttggctgctccaaaaggttctggtagaactgtcagatctttattcaaagaaggtagaggtatcaactcctcatacgctgtctggaacgatgttaccggtaaagctgaagaaaaagctattgccatggccattgctattggttctggttatgtttacaagaccactttcgaaagagaagtcaactccgatttatatggtgaacgtggttgtcttatgggtggtatccacggtatgttcttggctcaatacgaagtcttgagagaaaacggtcacactccatctgaagctttcaatgaaaccgttgaagaagctactcaatcattgtacccattgattggtaaatacggtatggactacatgtacgatgcttgttccactactgccagaagaggtgctttggactggtacccaagattcaaagatgctttgaaaccagttttcgaagaattgtacgaatctgttaagaacggttctgaaaccaagagatctttggaattcaactctagatctgattacaaagaaagattagaagaagaattacaaactatcagaaatatggaaatctggagagttggtaaagaagttagaaaattgcgtccagaaaaccaatag

SEQ ID NO: 6076 - DNA, 1170 bp, Candida albicans
atgggtaaaaaaaacaacaaatttttaaataaaatatatagtcaaccattaccaataacgttaacttctagcaagtataatgtttcactacccaatttgtatccccataatccaatttcatggatttggtatataataaggtattgtcaaataaatatagtttatcaagtgcccgaattacacaatccacctctctctgtgatttatgagaatcaaatttttaaagtcattgatcgtgaatccatgttaaaattatggagacaaggtttctttgggaaaggaatactatccagatctgagccaacatgggaaaaacgtaccatcacaaggttgaatttagataattccaacaatggtaaagatttggcgatggaggatatcaccaaaaagagacgtgaagaacgaaagtttttcaagttggaacgtgctagatttcaagaattggaattgaagaagagacaaggtataattactgatgaggaagtggaagaaatgaacaagttggagattcaattgactgaattacggaagattcaagttcgatttgataaacaggaaaatggtgaagtaaaggagatccatattagagatgaagatgaggacattatcactgaaaatggagaattgttgcccttggagtttttacaattgcaagaagttgaaactttctttttgaagtttgccttgcagagaattgatatcgttaatgttgattcacttttagatttattttataaatgttgttcacatcatagtttttcacccattcctacttccaacaatcaattcatcattgaatacattgcgtatcattacttccgaactaatggttggtgtgttcgttcaggtatcaaatttggtacagatttcttactatacaagcgtggtcctcctttcacacatgcagaattttgtgtattggtcatgacaaaggattctaaatacgattggtttcaaattgctgctaaagccagagtcataggaagtgtgaagaaagcatttgttctatgttatatagaatatccaactcaagaagaatttgatcagatcttgcaaaagcagaatgaagaagatattgaccatggtttattgttgaaagagttacttagtaaatacaaaatttctgaagtgatctataaacgttggaatcctagccggactagagattga

SEQ ID NO: 6077 - DNA, 1260 bp, Candida albicans
atgattaccacggatagaaatttatttatcaatattttgaaatgtatttctcacttgttgattatttgggataagggtgccaaagcaaaggccgaggaagatgggaacggcgatgacgaagatgaagatttggcacaagaagaagaaggggaagaagaggtgaaattaacaaacaactgcatagacagtatttctgattctcaactggagactatcatcaacactcttcttattgccgatagcgagatgaacaatgctgttttggattttctcaaaatgtatttgttttccgaagccttgcatgaaaagtattccagttccattaaagattctcagagacatagattgagaaagttgttacagttaaacacttctaaggccacattcaacaccttaatgaaacagttacccttgttgttagtatctgacttgcctttgaatgaaccgattgaagaacaacctgtcccctccttaaacttgacaaagagatcccaatactcaggggtgcccacatctgcaccagaattaactgaagaattatacaaaataattgtggcttttcctgaaccaataagagcttcaacctggttgcactgctgttatgaggcaacaatgactgaacaggcagaagtgacacaaatttctatttggaaagcttatgaaacacaattccaagagatctggaaaccaaataccgagggaactctcaatcataactataaaccacttttgcctgctgtggagtttattaaaaatgttacgaaagcatttccttatgctgaagctaaagttgtagcattacctcaagctccaggtgaagaaaaccaagctcctaagaaaaagtttattatcaaaggaattcagcccagacaatttccagtgagtatagatgttggtaattatgatgcattgaaaccaatgggagaagccactgttaccgaaggtgatgaaagtttaccaattggtcatatggatgtcaaaaaattccatcatctgttgacttctggtgtggataacattttgtttgcggactctgccaataaaatcgccaaagaatcattgaatctgattaacgaatccagtcacgatatattagaatacattatactggaagttttggaagttgcagggattgaatcgaaagaatctagcatattccgtctttacaataaatactggattcctgaattagtatacgccaacccttctttgttagaaaaaggtattatagaaaccacttggttgaaatatttgctataa

SEQ ID NO: 6078 - DNA, 1095 bp, Candida albicans
atggatgagtcgttttattttgctctactaaggatatctattgctcagattttgaaggctaatggatttgacaaatgcaaaccttcaactttaaatgtcatgacagacttatacttgcaaacctttcaaaatgccattagggaatcactcaagtgcagcaatatgcgaacaaactcaaactcacccgagttgcaggatattacacaagctttgatcaatataagcatttttaaagcgaacgaagccacgaaaattcacgatgagtattatgaagagagtcgatacaataccaaatcgattgaagcgttctatcaatggtgcaaaaaaagtgaacctcttgctatagagaaaaagttgaatgaggtccccaataatttgataaaaaacttgattgagaagagaaaactagatatagatgatggggaatctgatctagccaagagaaagcggaagcataaagaacgtcaggaattttataaccagttaaaattgaacgacgaccagaggcatagggttgatgaagacgagttggacgaggatgtaataacagcgaaagacaagcttacttggctcaactatttaatagagaaagacttgaagttagggcatgatttgaaatttttgcatacagatccgattatagctaaggagtttttgaaatttcaaaataattataaatttcatccagtgggtgtaagaaatgacaaagaaacaaatactaattgggatagaatccaaaatcatttaaagcatttgaataaaactgatcatattgtgggagaggtgtcacctgaggaggtcgctccaaatgagggtgatagagacatattgaaatcattggctaacgtaagttgtctattgccatacaacttaaagtatgatgagaatcttttggaagaggacttgacaaagcttactaaggcagaagtaatacagaatgaagaggaaggtataaatgaccagcatcgagctccagatgacgaagtggaacaaacacctaatgagctgaccttaaatgacggcgagataaataatgatggtctattaatagatgatactggaatagggggtgaaaatagcttaatatttatgtaa

SEQ ID NO: 6079 - DNA, 1065 bp, Candida albicans
atggatatcgttgaaataaaactgaaaataaaggaatgggagtatgcgttccgtaaacaacataataaacttccatcgaaagcggatataaaagatgatgtggagattcataaattgtactcgttatacaagtccataaaactgggacagcaacagaaaccaagcaaacaagaaactgttaacgagccggcatcagtccagtcttcaccagtaaagagaaacgattattctcctagaggtgaactaggacctactccacaagctaatggtcgagtactatctatatttgatttgaaaatgactccaccggattcatctccattaaaacacaaatcggacaaagcatccccgtcagcattcgcaatgcctcctccgcaatctcctgtgaagaacataatagagacgcctactaaatcaaagaataaactgtttgtgactcctatcaagggtcggaaaatagtatttgaaacaccgtcataccttaacaagcatcgacagaacccacagactccggattcccataataataataataataataataataatactgtaatcaatttcctggtctctccgtcaccattcaaaacacagagaagcatagggaaaaggttgactgaagtttacaatacatctttaaaagaagcagaggatctaaaaagctttaatcttgaagaagaattccagagtcatgaggaacaagaatctgaggaaacggaaacaacgaccaataatgacagaaagattgcaccaagaagtaaaagaacccagaaacgtctgacgagaagagttaaaatggcaccacgacctgtaaactcgaagccatcgttggaaaacgtaaatcttcaagaccatatcacaaaactagaggaaggtgaaagaaaacaacttgttgcatatatggattcagatgaagatgatgagaatagagatggagaggttggcattgcttctgtattcgaaagtccgacaaagaaaaccagaatgccggtgagtaataatttcaagaggctaaagatcaatgaccctagatcaaggcgcttcaaacaacgtatgagaaggtaa

SEQ ID NO: 6080 - DNA, 1053 bp, Candida albicans
atggctgaattgaaacaagttacattttcaccagaagtattggcaagaattgcacctgatgtatcattacaaagacatttagcattaggagtcagacctaatttacgtaatttcactgaattcaaaccagtcgaagtatctaacagtactcaattccaagacaataatgacaatgtattttcatcatcagtcgttaaaagcggttcaactactattataaacaccattacattggggattgttgaaaatttcaatagcaatgaatccgaatatgccactatttacccttgtgtggagatattacgtggaagattgggagcacccacagatgaagaaatgatattatcacaagatttatttgaaactttatatcataacaaaataattccttctacaagtttaaaaatcaataatttagggatttctatcaaagatgaccagacgacgacgacttctcaaaccaactctaccatatattacccagatttaaatcctgaacaatgggaatacatcaatcttacaagtcatcatcacaaatcatactcatttgtattgttgtcaaatataaaagtatattctaagagtacatcgacgtgttcattgtttgacttgtgttatttatcgatgcttgaagcattgaaatcgttgaaattacctagatgttatgtatcagaaagtttcactactaaagttgccatgaaatcacgaagatcgaatactagagggttggttgataccaataaagcaagtataaatattgatttgaataaatcgttatatgaaaaaatcgatttaaatataaaaagtgggacaattgctagtaattttggtgttatatcacatgaaggtaatacaatattattggctgatttagaaggtgaagctgaagaaagttcagtgttgtctcgtttatcaattataacaaataatgatagtattaacaaaataagtttggttaacggtgatccagaaagtgaaattacattagaaatgttgaaaaatgcaattgaaataagtaaacaaagaagtagagaacaaggtcaacagatatag

SEQ ID NO: 6081 - DNA, 1212 bp, Candida albicans
atggatacggtacttgaaaggatagtgggaaccttgcttgagacaagaaactatacttttacggagcaatttcttgaccaactaacagaactcacattacaatttgtcaatgaactttcagcggatctttcaaagtatacacggatacagagaaggcaacagccatctttatctgatatcaaactattgttaaaactaaaacatatttcaataaatgagctaataagggaaattgaactaagcaagaagtttacgtaccgaaagcaactagcctcattgttagaccagttggtcgaagaaccaatcaaagaacaatcacgtccattctttgaccaatcgtcaatcacagagctagtacccagattaaatgtcaaaccagactatatcccgtcttatttacccgatctacctccagactatacctaccaatcgaccccggagtacatggaaacactaacagatttaaagaaattgcgaatgaaattagttgaagaatcaagaatgacagaaaactctttatacaaattgattgaatatgatgatattgaatggagacagaaattcgagcaagaattggtagagttgagtcctgactcatcagccaacgaaaccacagaagtaccaataccgactaccaatgggaagagtgaagatttcaaatttgatattgttgaatatgcaagaatgagaaaacgacttttgattaaaagagacagagatttagagaataggcggaaagcaagagaggagaacatgttcatgaaagcagaaatgtactattcaccatactccacactcaagccaacagcagaagtcaaacaatatttttccgatgccttatcggacggattcaagagtgtgattgtgtcggtacgaaatgcagaaaaactcaaagagcaaaacatcaaacgtcaaatggaagaaaacgccagacgtgaacaagaattgcagaaacaaaacgagtctatatcatttagctttcctacaataaaccaattggaaagtgaaagcgagagtgacaatgacttcgagcaagaagtaaaagacaatatagaattaaactttgatggtagtgacaacgagagggaaagccggaatttggttgtcgtacaaaactcggacgagaaagccttacagcaagatcccccaccctctaagtttgccgaagacgtatctgacatgtcgtcggatgatatggacactattgcgtga

SEQ ID NO: 6082 - DNA, 2724 bp, Candida albicans
atgtcgatccaattacgcaatggtttagctaatcaaactctagatcgggtgttggaagatttgttagttagatttgtggtgaatgttcccgaagaggatttatcttccattgaaagaataatgtttcagattgaggaagcacaatggttttatgctgactttgttcgtcagttgaatcccgatttgcaaagcatgaagatgaagacgttcagtacaaagattttagagaaatgcccgcttatttggaaatggggtgacccacaggaagcattatctaaattcggaaaatataaatcgaccataccggttcgtggtgttgcattattcaataaagatttgaacaaagttgtgctagtcaagggcaccgaatccaactcttggtcgtttccaagagggaagatttcgaaagatgaatctgacattgactgtgcagttagagaagtagaagaggaaacagggttcaattgccgacaccttattgatgaaaacgactgcattgaaagaaacataaggggaaagaactacaagatttatttggtcaaaaatgtgccggaagatactttattcgaggcacctacttatgagatatcgcaaatcaaatggtttgacattaaaacaatccaaaagaaatgtaagacaaacccaaacacttttttcattgtggggactattttgaagccgatgactaaatggattaacaagaacaagggtgtattgaacgaggaagaaattatgttacaggttgagttgaaattgaaggagttgttgggacttaatgctaaagaaccggaagaaaatgtggatgcaggtagagaattgttgaatattttgcaaaaagttggacaaaaggaaagccaatctgcaatatcaccaagctcttcataccaaaataacgatcaacaaccacagccaccaatggttaatgtacctgttccgcaacatctccataaccaaatccctttttttgcaggagcacacgctgctttcccattttacaatcagccttttttcaatcctatgtcgtttatgcctccacaattcatgcctcatcatcctgcatatgttagtccacataaccaacaaccccctaaccctcaaagctttcagaagcccaagactaactcgaaagagttgttatctattttgacggctaaatcagacaagaaaagggatgacgagaactcaaaacagcgcaagccggtggaagatgacaatatccgctccagagcacaacaattattgagcgtatttcctaaaaagcacatcaaagagactaacacgtcagcagagtcagaggttgagaatgagaatgaacttgccaagaagcatttgttgaagtccttgcgcagatctgcaactccagaagcgggcacaacagagactaggtctcctggaatgagtccaataatagacaattcttaccaagagccatccaacgaaattgaagagtcaattagagcacaacgtcaacaagtcccagtaacatcaaggagaaagataaaattactaaagagatctgataatgaagcatctgcaaatttgttggagttattaggtccgaaaaagacagagagtgtggatacagcaaataagaacccagatgcaggcaacgaactattaggattacttcataagaagcaggaacaaaaccaggaactgttgcccaacgtagagagatcatcgacaagaaaagaagagctgcaaaacacctccaacgaattgttaactatgcttaaaaaaccaactgccgcaaaagaatccacatcagagtcacgatcccaaaatttgcttaacttgcttaagaagccagaatcacaaaatgcaccaggaagcaaggggaaggatcaagcttctggcgaccagttggctgacactcacctaccaagctacacacaaaacaacttgcaacctcaactcagcaatttaaaccctttaccaagccccatgaacttcttgtcgagtccagagcagaagccacaacaagcatcacaagtatcttctgcgaaccaattattgggcttgcttcataaaaatggtaccgaaagaaataaaagtataacatctccgaacgagttatggggaacaagtactcctggttccacaggggggcccagcgttggagaggccaataaacattccaatgccaccaccgggggtccgttcagaagtaacgtgctttctccaaatctagacatttggacgaatgatacaaaaacatcaagcttgctgggcagccagtttcaattcccagagccaagtagaaggagcagtcagttattggatttattgaacacgaatagagatccagtgcaagatgctcaatattcgcaatctaattcgaataactacaacaatggaggtatagaaattgctagaagagattctccatctgataagtttgaaaattttgaggatttcgaggactataacgatggatatcagtttaatgatgaacttcttgataaaacatacaggaattttgatatcgctagtgacgaagaggatgttgattatttaattgaccctttgattacacataatgacaagctgctgcatcaagacaacgaaatcaaaccttcgctggtagataaccagaatgatcaaccaaagaagataagaattttgaagcctggtgaaaacattgacaatcttttcggttctcaaggaagtaacgagcctggaaaagggttattggctttattgaatggtggaaaggcacagtaa

SEQ ID NO: 6083 - DNA, 1383 bp, Candida albicans
atggatttcataggagagattatagagcatgagacagaggcacctaaagaaccaaccccaaaacccacaattggtggattccccgaacttaaaaaattaaaagaaaagaaagtctcaagatggaggcaaaagcaacaacaggaacagagcacaacttccccaaaaactactgaaatccgttcagaggcttccaaaattcaccaagaaaatatcgagaagatggctcaaatgtcagaggaagagattttgcaagagcgtgaggagttactaaagggtttagatcctaaattaattgaaagtttgattggtagatccaagaaaagggaagcaacagaccatgaacacaatggacatgctcatgaacatgcagagggataccatggatggattggatcaatgaaaacttctgaaggattaacagatttatctcaattagataaggaagatgtggaccgtgctttgggtataagttcattatccttatctgaacctgagggtggcagcaatacgaaaaaagtcgctttcgacgataatatcaagacggttaaatttgaagctttggatgatgaaattgaattggatccaaatggatgggaggacgttactgatgtcaatgaattagttcctaataatgatcacattgcacctgacgattaccagattaatcctgatagcgatgaagaaggattgaataatactgttcattttacaaaacccaaacagccagatttggatataaatgatcccgatttctttgataagctacatgagaaatactatcctgatttgcctaaagaaacagaaaagttgtcatggatgacacagccaatgccaaaacaattgtctacagtttatgaatcaatatctgatatgagatttgacttcaaaggagatttaattgaattgagcgcagagggagaagaaccaaaagatagttcattcgaaatacctacttatatgggacttcatcatcattcggagaacccacatatggcaggttatacattgggtgagttggcacatttagccagatcgactttagctggacaaagatgcttgagcattcaaacattagggagaatattacataaattgggattacataaatacagtatactaccaaaaacagactcagatgatcagagttttacagatgaaatcaaacaactatcacttgactttgaagatatgatgtgggacttgatagaccaattacgaatcattgaaacaataacagaggcagctgatgaaaaaaagaccagaaacttatctgtcagaaattatgcaatagaggcattgtggttatatagaactggaggtggaagaccagagataactaaacaaaccgaagaggatttgatagcacaagcagttcagaaataa

SEQ ID NO: 6084 - DNA, 714 bp, Candida albicans
atgtttactggtcttgttgaaaccattggtactgttttagactactcaaagcacgatgattcctccactggtggagacggagtttccattaccattggaaattgctcagaaatcttggaagatgtcaagttgggcgattcaatctccacaaatggtgtttgtttaactgttaccgaattcaatctcgggaagaccctttttaaagttggtgtggccccagagactctccgcagaaccaatctaggagatttgaaacacggtgcaccagtcaatttagaaagagccgttacaagtgaagttagattgggtggccatattgttcaaggacatgttgacactattgccaaaattgtcgacaagaaaccagatggaaatgctattgcctatacttttgaattaagagataaagaatttatcaattacattgtccacaaggggtttattgctattgatggggcttcattgactgttaccaatgtcgatccatctaaagttcaattctcaattatgttgattagctacagtcaagaaaaggttatcttagccaagaaggaagtaggcgacactgtcaacattgaagttgacttgacgggtaagtttattgagaaacaagttgagataaatttaactggtcaaattgaaaattccgacagcccattgaacaaattgattagctcgttggttgaaaagaaagttaaagaatatatcaagtaa

SEQ ID NO: 6085 - DNA, 2679 bp, Candida albicans
atgccatcaacacagataaggaacagtaaaacaaggacatccttgaatggaaagtattccaagcaagttcaaaacaaatcaaatgggcctgttgttgatagtctacaattggagaacttattacttagagatgaagatattttccaaaccacactcaattcagaggactacttggagagtctagcacctatcatgaaagatgcaataaagtctaatgggttgagtgaattgcttgtgaaattgaatgaaattgtgaagtcaaaagacgaggaattaaatcaagcttcgatggagtccatggatgaaatcaatacatgtatcaacaccatcgacaatatccacaaggaagccaatgagttgaataaacaatttattcaagtgagctcaagtttaaataaatcagcctatgaattgatgtcaaagaaaaagaactacgtaaagtataaagatgtttgcgaacgaattaacgaaacacaagtggtgttgaatgaatgtattcaagtattagaattgatgaataaaattttagaattgattagacaaactaaatatttcctggctttgaaattaatagatgaaatcatcaacattcatatacaaaaagttgaggatttcagcttcgccaaaaaaatagttgattcgatccctcatttgacaaaaatggttaaagacgagtcatttgaaaacttgtgtaaatggttgtcgataaatttagagcggaaattacaggatattgccagtggactatacaataatttggatgaattgcaaaataactggtcaaaaatcaaaaaggaaaatggaccaacgtttttaccttacaaaataaattctcctgttgagttagcacttagggatcctgaattgaattacaatgtttttgaggatgtgagtttacaaataaacttaaatgctgtctacgacgccgtgttagtatatcaaactttacaagagttggatactttgagttctgcctatcataaagaatggatgtccaaatacagcagggtcatttatccgataactactgcatcagtgagtaaaaaagatgtggtgtttgacaataacgaattatatgaatacttgaggaagatagcagcattttttgttaccgataagcaattgaatcttataaccaaatttcagttaagatcaaacactcaagctgatgaattgtggttatcttacatgacaaagttgaaaccagtgttgattcaacttttgaaacatcacaactttaccaatatacaagaattgggttcatttaaaacaattgttggtgaatttttacaaattatggataatcacgattatgatatcagtgagttatacgaagtgatgatgatgattttcaaagaatactatgcaccattaacgatacagacattccggaaacagtttgtggcatccatacaatccgatcgttatcgaccacttacagtcacggatgaagccgattatactgcgattatgcaaaatgtgtggtacaaagatgatgcatcatttgctccagcatatgttaagagcttcccagtgacattcccctttagtgaagattatgtccattactgtatacaagtgagacgattgcttaaagatgtcttgcggtttattggtgattattataattatgaaattggggaattgaccaacaccatagtcaataacattattgaagtggtgttaagtgatgaaaagggatatggtattgcttatgaaattgaagagtttattaccagaaatgagaataataaagaaatcacagcccagacttataccaacttggaatattatttgtttagtttgtatgagattggcaaattggtcaatcgtgaattgcgtaaacatactggtatgggtgtgcacaatatagatgctaacgacacatttactttacgtgctgttgaaacatttaataaacttaaaaaacatgctgaagagactgttttcaagatggtggataataaaattaatgaattattggatatggttgaatatgacgagtatttgcctgtggaaaagaacgacgaagccaattttgccattaaagattttgcgttatttttggagaatttgtttacatcaatcttcaacaatttaccactgcaattgcgtacattggggcttttcaggacttatgattttgtttctgaatattttttaaatgtgttgaaagatgcaaatgtgtacaatagaatatttgttgccaatttcgatttggatattcagtacttggaaacctcgttgaggaatttacatgggtttaaagaagacggcgatgaagccaatggtaatggaggtaacgttgctttggaatctacattcactgaattgaggcaatgtattgatttgttgaatttagaagattatgaggaattcattaatgactcttcatttagaatgagacgctttgatagagtgaaatatgaagatggtataaatttgattaaaaaaatgcaagataacgaatctcaacaacaaacatcggtatcagcaatgtctgaaagaggaaccattggtggtgttatccctaactccagttcaacaagaagttttgtgaacatgttgagtaatttgtcaactgatgatgcaggcaacacttctagtgggagtatcgaatcgaccagtactacttcaaaattagctcagtttactactaggttcaaacagaacaaatag

SEQ ID NO: 6086 - DNA, 1740 bp, Candida albicans
atgtatataaccccgaaccaatatgcaaagacgttccaagatataaaacgctcatcattatctcactccacctgtaaacttgttatatttgtttcttgcttagatgtggatgcattatgtgctgccaaaattttgagtttacttttaagaaaagaattaatccaatatcaattaattcctacaacaggatactcggatttaaaattgcattatgataagttggatagtgaggtcacaaatataatactaattggatgtggtgccatgttggatttagaaggatttttcgatgtcaatccagaagagtttttaggtgataattctactaccaatggccacacaatagataacgacactgaattagaactagatgcagtgaaaactgacaattttgccttgacaagaaaaatctatgttgtagatggacacagaccgtggaatttggataatttatttggatcggccatggttgtttgtttggataatgggtatattgatgggaacttgaacgaagaaaaggaagcatacaatgtgttggtagaaatgagtgatagtgaagacgaagatgaagatgaagggcacaaccagaacagtcatactgatgatgaccaagagggagacaaaactgatgctgatgatgaaaatgacgaatcaagtgtttcaacatcacgcaaaggagttaaatccatcaatgaagataagattcagacatattacaaccagtcatcaacaatagcaagctcatgctcgataacagtttatgcattagttagtgccatcggtgagaccaatgttgacaacttatggttaggcattgtcggtgccagtggatttgattgttctatatttgtcgacgaagtgaggcgtttctcgaccgattctggtattcatatggaacgtgggacgtaccttccgttgttgcgacattcttctctttacgatgccttgctttataactggattgacggtgacaagagaatacacaagattcttgcaaaaatgggtgttccgattgttgctgcaaaacaacaatggcaatatttagatccaccaatcaagaacaaactacctggattattgaagaaatatctacctgaactcccacaagttgaaatattttaccgatgtggtgtcacgtccatggacgtgtttgtttcattaactgcattattagagaccggggttggtctcaacaatactagtgctaatagtattgaccatggtgaccttgaagatgaaaatgaactaattcgaagagaaattaaaagcagagagtcaagctacattcgaaatttttggtcagcctttgattcagtaagttcttttgggatttccaacaacattggattagaaaagggaataacagcagcaaaattggttcaaaaagaattattccaaactatcaaatacataattgaacaaaaattaattaaaaatttaaaagtttatcgactttgcattttaaaagatgagtcctcgcatctgggttttgataatccagtattgttaattaaattgtttaatcgtatcatggattatttaaaacaacaaacactgaaacctttagtggtagcagcagaactttccaatacttattttgttttgggtatgggaattaacaatgcattttctaaaatttctggtgcccaaatgaagaaggatttctttgaagcatcattagtggaaattaaaaaggaagatttggctccatttttggaacagttgaccttcaatttataa

SEQ ID NO: 6087 - DNA, 900 bp, Candida albicans
atgtcagtggaagttagaaaaagaccagcagataacttcagtctggcgtcgaaaagaagggcaaccgtgcaatccactaatcctaaagacggcaatggcttgtctgaatgtttcaaaacagtttccacatcattatatgtatcattggcaccagtgcatttacaaaacccaataaatggtattaaacaacagcatttagatccgttaataatgacgtattttaccaaggctaaagggattgtcgtagcatattcaaatatcaaatttttggagaataactatgacaatgaagattcagcttatagtcttgccaagatagaaggaagttcgccttttacatttttgtggatttcagtggactttttatgctggtgtccagaagttggtgacgttttggaaggtgacatatatatgcaaaccccatcccatattggtcttttaatatgcgatacatttaatgctagtataaagaaatacaatattcaccgcacatggtcttttgttcccaatcaaattgatgaggtgtctggtgatgacagaaaaacatttggacactgggtggatgaatctgaaaccaaagttgaaggaaaattacagttcactattaaagccattcatactactggtagaatcgtttccgttgaaggtacattaattagacctggtgaagaaagaaatgctcaacctgtttataaagaaagactggaaacaaaatcgactggtaaacatatgaaatttgccgatgatgaagtgatcaccaccactgaaattgcggaaccggatgaaaatgacgagttaccagcttatatcaaggattcagatgacgaagattcgggaagtgatgataacaaagttgttaataactccgattcagatgaagataaaattgaatcagattag

SEQ ID NO: 6088 - DNA, 2127 bp, Candida albicans
atggaagtcacttctttgccaattaaacttcagccatcaaacattagacccatagcatttcgaatattgtctaaaaaacatggattaaatattaatacagatgctttagcaattttaacagagaccatcggctacaaatttggaactgattggaaaagtgtgagatcacaacaatttcttgaagaggttgccaaagtttggaaaatcgaagatcggggactatttattgatggcgatgggttaaaacaagttttgaaggatatgaattccaaaagcagcaatgatacaaaaagagctcatcgaactgacaccctagttgatatcactaatgatggtaaccaaaatcatactcatagccaccaggataagcaaataagttttgaagataaaaatatggaacatgaagaaagagatgatgtaccaatcaactggcaagattatttcaaagttgtatctcccaataaccaacctactagtatattcgacaaaacaagaaaacaatttgacatagtatttaaaaataatgatgacaaggataagaaagccgagcgtggcgggaaacttgagtcaattgtggcagagttagtaaaaaatttgcctgcatctattgaatcattcaataatcgatactatctcttaagtgatcgattatcgagaaacgaaaattttcaaaaaaaatcattaatcagtctatcagcgttaaattctttcaaagaaggaaaaacagatagtataactggtcatgaaattagtttaatcaaaaatatgttgggtcgagatggtcaaaaatttttgatattcggtttgctcagtaaaaatgcaaacgatgaatacacattggaagatgaaacagaccacattgaattaaacttatctcaagcttttaaatctcaaggattgttttattgtcccggaatgtttctattagtggaaggtatttattctgcaagtgggggtaattccaaccaggatcatggttatatcggaggatgtttttatgttagtaatatcgggcacccaccaagtgaacgaagagagacaagcttagatgtttatgggaatttggattttttagggatgcatagacaaattgcacctgtgacaggtgaaaaaatcaccaaaatatctaaaaagtttaagaagagattggttctaatcgaaaagaccttgtataatcataaacttatttttgtgggtaccgatttatacttggatgatttcaaagttttggatgggttgcgaaagtttttccaaaaattagaaaattcaattattgaatcaatcgaggacgaagaagggcaaatggccgaaggaaccaatataccacttgctttagttttcacagggtcatttgtgtcaaaacctttatcagttacaaattcatcagtgaccaacatcaccaattcagaatcatacaagagcaattttgataatttcacaacaatcgtgagcaaatacccaaacattgtatctcgctgcaaaataatattgattccaggtaaaaatgatccttggcaatctacttattcattgggatcatctagcttaaactattttcctcagtcgtctattccaaaagtgtttatcaatcgattggaaaaattattgcccaagggaaatttagtagtttcatggaatcccacaagaataaattacttgtcacaagagttggtagtattcaaagacgaattgatgaccaaattgaaacgaaatgacattattttccctcgtgatattcaagaacaagaagagttgattgcacaagatgaccaaagaactaacgaggagagaatcaataatttaatccagaataaaaatactcatttgccttcaaaaatcaaacaggcaagaaaactagtgaaaaccattttggatcaaggaaatttacaaccattcttgaagaacctaaaattaatcaacttggcttatgattatagtttaagaattgaaccattgcccagtgtaattattttgaacgattcaagtttcgacaattttgaagtgacttataatggttgcaaagtggttaacattacttcagttgtcagcttgaataatagaaaattcaattatgttgaatattatccaggaactaaaagatttgaatttaaggatttgtatttctaa

SEQ ID NO: 6089 - DNA, 978 bp, Candida albicans
atggccaattcagatgatgatgatgatgcttttctttattcagatgaagagcaagaagttgaagaacaaggaccaaaagttaaaagagtaaagtttgctgatgaagaaagcaacaaggaggaagataaaactaatgaaaaagagcaacaacaacagaaacaagaagcatcaaattctgaatcaggttcaggttcaggttcagaatcagaatccggttcagaatcagatgatgatatagatattataataggagatacccaaccaacaaaatcaaaatctagtggtacaaccatcattgggaacgaggcattatctgagatgacagatcctgaagaatcaacatcatcgtcgtcgacaacagcagcagcagcaggaacaacaacaacaattaacaagagacaatctagctcagctattaatcttgaatcggtgcctcgatatcaacaagaagaagatggagaaggagatggcacgttgataactcaattagatattgaaacattaaaacttaaaccatggagagcgcctggtgttgatgtatctgattatttcaattatggatttgatgaatttacatggttggcttattgtcataaacaagataaattaagaggtgaattcaatcctcaaaaagtgatggaaaatattatgaaaggtcccggtggtgctgtgggtgctaatggtactaatggtgttaatttgggtgacaaaacaggacaacagcaacagcagcagcaacaacaacaacaacaacagccgccacaaccacctatgggtatgatgatgccacctccaggattcatggctaacatgccgatgccaccaatgggatctatgccaccaatgcctaatatggccaacatgccaaatatggccaacatgccaaatatggctaatatgcctccgccacctccagggtttaatggccagttccctgcaccttataatatccctcatactatgaatcaaaagcaataa

SEQ ID NO: 6090 - DNA, 843 bp, Candida albicans
atggcacctacagaaataaaagggttttatgtgttgcctctcaagttaacaggtaccaaatcaatacattacatatactttaagaaacatgaactgaaaggcactgccaatgataacagatcattatttatttgcaacttgccaatatccacagacttgtctactatcaaaaaattttttcagaaagtagccataggatctacaatagaactgtttataaactcacttttgactgattatcctgaagacatatggattaatttaaccaaactaacatcggacttggatttggtcgacgctgttgatgaacaagcaagcaagttacctaaaaactgtggtattgtggcatttatagataaggcctctttcacactagcctttaactcattgaaaaagttatcatctagccttactgagtgtgaatggccaatacaacagttcacatcaaattattatttgaaacaatatcagaagcagatactagacccaaatagcttaacagaagaagtctcccaagcgttaatagattttgacaaagcagaacaacagtcaattgaagaattacaactgcaaagaaatttggttgatgaagatgggttcactttggtggtcggtagtcacagaaaaaccaaagcgggtattttgggcaaacagaaattagcatcaaccgttggagttgtgaaagctcaatccaagatgaagagtaaggaaaaacaagacttttatagatttcaattgaggcaacgaaagaaggaagaaatgaatgagttgttgaataagttcaaattggatcaagaaaaggtcagaatgatgaaggaaaagaaaagatttagaccttattag

SEQ ID NO: 6091 - DNA, 1495 bp, Candida albicans
atgaaaattttcagattattttcactactaatcgtacaatttatcataaataccactgttgcagtatcacctgtgtcggcagttttaccaaaactgagtttcagtccatttgattcgccagaattttgttcacaaatcataactccaacttgtaatacaactttcacctacatcgatgaattgaataaagatattcgtccctacttgtcggaattagtcaagaccctgtatttccgttatttcaaagtcaatttagataaacaatgtcgtttttggaatgctcaacatttttgtgctagtgaaaactgtgctgttgaaatattggaagacttcaattggagtcaagtcaccaatgaaagtttgaaaccttcaggattaggtaagatttcattacctgacaaatcatcaattgataattccattgaaactgaagaagttcaaacttgtgaagatttagattatagtgaaatagatgatgaccatcattgtgtttatgtcaacttggtaaataacccagaaagatttactgggtatggtggtaatcaaagttttgatgtttggaaggctatttacctggaaaattgtttccctaatactaatccaatgtcaatgacaaatgatgccgacaatggtggtgaacaatgtatcgaaaagaacttgttttatcgtgttgttagtggtatgcatgcttcaattgcagtacatttatcaagagaatatttgaattctgaaactggtgaattttatcctaatttaaaggtgtttatggaaagagtaggtatgcataatgacagattatctaatatttatttcaattatgccttagtgtcccaagctatagttaaattgagtgaaattttaccattgagagagttcattcaactggggtatgatgacattactccagctcaaaagcaacatttattggctaataatgatgtcgaatcagtcgaagtttatgatcgtttgttgttagatgacattattcctagtttggaagcaaatgttgtgtttaatacttccaacttgtttgataatagcaatttgagagatgaatttagatcaagatttagaaacatttctgccattatggattgtgttggttgtgatagatgcagaatgtgggggaaaatccaaaccattggttatggtaccgctctcaagattttatttgaagatgacaactatgataatcacaatttgaaatttagaagaattgaaattgttgccttgattaatacttttgatcgtttatctaaatctattgaaagtattaatatgtttaaagaaatgtatttgcaacaccttaaagatgttgctgaaggattaacccaacctggtgtttacgacaaaatacaaaacaacaaaccaggtaacggatttgccttcccatttgttagtccattacctcagaaaaaacctgaccaaaccaacacccccaaaaatcaacaacaaaaacaacctcaagaaactgacaaaaaaagacttacattag

SEQ ID NO: 6092 - DNA, 573 bp, Candida albicans
atggttcgaatcaagcacagatacattttgtttgaaattttgtatccaccaactgcagacacaagagtcactcctcgagaggattttaatcaatttagtcaatctgagctgaatgcattattaacattacatcaatcatcgcctaatagtatcaatgtgaaaacaattttaaatgtcattcgaaaatcattactggatcattatggagatgtgggagcagggaaagcaggaatgttattgaatgttaaatatttttctaatcgtacatcaacagggatactacgatgtggacgagatcagagtgattatattattggggccatgtcattaattgaaaaaatggaaaataattatgttataattagatgtttacatgtaagtggtactatcaagaaatgtgaagaatattctatagaaagaactaaacaattgattaatgttattaaaaataaaagtaaagggaaagttgatgaatatatatctcagatgaatgaaattaatcatgttgaagaagacgaagaagaagaacaagaagaagaaaatcaggatgatgtaaggataagcaaatcataa

SEQ ID NO: 6093 - DNA, 1362 bp, Candida albicans
atgtccgatttcaaaaaaagtgaaactaccatccaatctggtcaacatgttttgatccgtctaccatcagaggggttgaaaatcgttcatttacaagatacaggtataataggattagggaaatttggatcttttgaagtttccaatattttgggctacccattgggcacgtcatttgaaattattgaagatcacaaggtgaagccaatcaagagtatatccactttggatttgacagattctgatgaaacagttcaacgtcaagaattgaccaaaatgttttctgatagcgctgaaaataatcaaaatattattaatattggatctaaaattcaaaaattatctaaagatgatattgacgaattgaaaaaactgggtgctagttctaacgttggtcaaatgatcattgaaaaaatgattgctgggcatgaagggtttgataagaaaaccatattttcccaacaaaaataccttaaaagaaagcaacaaaagtttttgagacgtttcacagttgattatcttggagggagtgaattattgcagtattatattgagaaagatttgaatagggttttagatcttagtgttgaaaccttaggcttgatgttgacatacagtaatgttcgtcctggtgggaaatatcttataattgacgaaacaggtggagtgttaacttatgcaatgatggaaagaatgaattgcgaaggaacaatagtttcaattcacgagaatgaacatgcaaatttaatagccttaagatattcagactatggtaatgaattggaaactaagaccgtgaaaagtgtgaattggttacaatttatagaccctcaaagcgagagaattgattggacagatcttccagacgaagaagttaaaaaaattaagaataaaagccagtataaaaaacgtcgtgaccgtgctttacagattaatgaagttattcaactagttgaagaaggaaattttgatgcattcatatctgtctcaacattaaatatgtctgaagtgttagagtatgtccttcctaaaatcggtggctctagaccgattgtcgtgtataatcaattcaaagaatcattgttagaggttcaacaagcattgtcaggagacaaaagagtgttagctccatccatatatgaaaccagagttagaccataccaaactattccaggacggatgcatcctgtgatgacaaatagaggcggtggtggttatatattgtgggggacacgagtgattcctcatgatgctattactgcagtgggcaagggattcgcaaagcgaaagagagtggaaactccatcgaagactgacacaggaacagtagaagtacaaaacgatcaagagaactctgcctaa

SEQ ID NO: 6094 - DNA, 3129 bp, Candida albicans
atgggtaaaaaagcaattgatgcacgtattcctgccttgatacgtaatggcgttcaagaaaagcaaagatcttttttcatcattgtgggtgataaagctcgtaatcaattaccaaacttgcattatttgatgatgagtgctgatttgaagatgaataagtcagtattatgggcatacaagaaaaaattattaggcttcacctcccacagacagaagcgtgaagcaaaaattaagaaagacataaagcgtggaattagagaagtcaacgaacaagatccttttgaagcatttatatctaatcaacatatcagatatgtttactacaaagaaactgaaaaaatcttgggtaacacttacggaatgtgtattctacaagattttgaagccatcacccctaatttgttggctagaacaattgaaacagtcgaaggtggtggattagttgttatcttgctcaagaatatgacatcattgaagcagttatatactatgtccatggatatacattcaagatacagaactgaagcacatgatgatgttgttgccagattcaatgaaagattcttactttctttagggtcttgcgaaaattgtttagttgttgatgatgaattgaatgtcttacctatttcagggggcaaacatgttaaaccattgccacctaaagacgacgacgaattgactcctaatgccaaggaattaaaggagttgaaagagagtcttgctgacgtacaacctgctgggtcattagtggccttgtccaaaactataaatcaagcacaagcaattttgacttttattgatgtcatctcagaaaagacattgagaaatacagtcacattaactgcaggaagaggtcgtggtaaatctgctgctttaggtattgctattgctgcagctatttcccatggatattccaatatttttgttacttcaccatcacctgaaaacttgaagacattgtttgaatttattttcaaaggttttgatgcattaggatataccgaacatatggattatgacattattcagtctactaatccatctttcaacaaagctattgtcagagttgatgttaaaagagaacacagacaaacgattcagtacatttctccaaatgatagtcatgttttaggacaagcagaattattgattatcgatgaagcagcagccataccacttccaatcgtgaaaaaattgatggggccctatttgatttttatggcttctaccattaatgggtatgaaggtactggaagatcattatcattgaaattgattcaacaattgagaactcagtccaataatgcaacaccttcagaaactaccgtggtatccagagataagaaatccaatgaaattactggagctttgactagaacattgaaagaagttgtattggatgagcctattagatatgcaccaggcgaccctattgaaaaatggttaaataaattgctttgtcttgatgtttcattatctaaaaatgccaagtttgcaacaaagggcactccacatccatctcagtgtcaacttttctatgtaaatagagatactttgttctcctatcaccctgtctctgaagcattcttacaaaagatgatggcattgtatgttgcttctcattacaaaaattcacctaatgatttacaattgatgagtgatgctccagcacatcagttattcgtgttgttacctccaatagaggcaggtgataatagagtacctgacccattgtgtgttattcaattagcattggagggtgaaatatccaaagaaagtgtaagaaaatctttatctcgtggacaaagagccggaggggatttgataccttggttaatctcacaacaattccaagacgaagaatttgcctcattgtcaggtgcaagagttgttagaatcgctacaaaccccgaatactctggtatgggttatgggtctagagcaatggaattattgagggactattactccggtaagtttaccgatatcagtgaatccaccgaattgaatgatcacacaattacaagagtcactgatagcgaattggccaacgcatcactaaaagatgaaattaagttgagagacgttaagacattacctccgttgttattgaaattatcagaaaaagccccttactacttgcactacttgggtgtctcttatggtttcacgtctcaattacacaaattctggaagaaagcagggttcactccagtttatttgagacaaacacctaatgaattaactggggaacatacttcggttgttataagtgttctaccaggaagagaagataaatggttacatgaattctcgaaagatttccacaaaagatttttgagtttgttatcatatgaattcaaaaaattccaggcttcccaagctttaagcattattgaagctgcagagcaaggcgaaggtgatgaaactactagtcaaaaattaaccaaagaacaattagatctgttgttgtctccatttgatttaaagagattggactcgtatgccaataatttattggattatcatgtaattgttgatatgttaccactaatctcccaattgtttttttcaaaaaaaactgggcaagatatcagtttatcatcagttcaatctgccattttattggctattgggttgcagcataaagacatggaccagatagcaaaagagttgaacttaccaacgaaccaagccatggcaatgtttgctaaaattattcgtaaattctcaacctatttcagaaaagttctcagtaaagcaattgaagaaagtatgccagatttagaagatgagaatgtcgacgccatgaatggtaaggaaacggaacaaatcgattataaagccattgagcagaaattgcaagatgacttggaagaggctggtgatgaggcaataaaagaaatgagagaaaaacaacgtgaattgattaatgctcttaatttagataaatatgctattgcagaagatgctgaatgggatgaaaaatcaatggataaagctactaagggaaaaggtaatgttgttagtattaagagtgggaaaaggaaatctaaagaaaatgctaatgatatttatgagaaagaaatgaaagcagttaagaaatcaaagaaatcaaaaaaataa

SEQ ID NO: 6095 - DNA, 1050 bp, Candida albicans
atgaatgtaacttcacccaagatatctgaaaatgttcgattacgtaacaatggaaatactcaattaaagaacataacttgtgatatgaataataacgacaatgaatcaaatgaagattcggagaccaaagcaccaccaaattcttatcggatatataacatctttagtataattttggcgttattccgtagtttaatcaaaactactagtaagaccactaattcagtgtttcaaatgtcgatgttttatattaatcattttatcctactaagtttattctttatgattgccatatataagaatttccaatatctttatcgtcgtgtatatttaaaatatttggcagtaacttattatccaagcaagtcaccacaagtgattagggaggacattaataaattggaaaagatcccgaaaattgttagttgtatattagatttacaggatgacgaagatgaaaatggtggtaaagatggattaatcaattcaattagtgagttgacagcatggtcaatgagtgctgggttaaccaaattgattatttacgaattcactggagctttaatagaaaacagtggttgtattgttgatttacgtaagtacattacgaaaacattggtgttatattttggaacagaggcaattccaacattttccattagaatccctcataagaatttgatcatctatagtgacaatcatattgatggcaatgcagttgacttagagattgatttgattagtcgtattgatgggaagccaacattggtagaattgactaaaacccatgagtggttagctgtcaatcgagaattactgataagagatattactattgacttaattgatgaagaattacatgaattagtgggaccagaacccgatctattgattagctttgccccatcattgaatttggaagattatccaccatggcatattagattgagtgaaatatattgggagccagataataaggatgttaattatgcagtatttcttcggggtttgcaacaattttccaattgtaaaatcaatatagggaaataa

SEQ ID NO: 6096 - DNA, 711 bp, Candida albicans
atggatattgacgatattttaaaagaatttgaagagtcttcaaaagatgaaaagattagcagtaaaacatcgtctatcaacttatatcaagacttgctaagagctatgatcaacgaacgtatggctccggaattattgccatacaaacaagatttaatgtccactgttttaacaatgatgtctaaccaacaacaatatttattagaatctcacgaatatggtgatatgaatggcgacagtggtgtattatccggagactttaaattacaactaatgattatcgaaactgatttagagcgtctcaactatattgttcgattatacatacgaactcgattgagtaagttgaataaatttactattttttacatcaatgaaagcagtcaaaatgataatttattgtccaaagaggaaagagattatatacacaaatatttccagattttgactcaattatataacaactgtttcctcaaaaaactaccacaaatgttgacctatttggatgacaccagtggtggacaatcaatgatcgttgagccagatttagaccagcctgtgtttatcaaatgtaccctggaagtcccaatattactagattacgacggtgctacagagatagatttagaattaataaaaaagggagtctacgtggtgaaatacagcctagtcaaaagatatattgatattggagatgtggtattgatatga

SEQ ID NO: 6097 - DNA, 1659 bp, Candida albicans
atgcccacaaacatacaaggagaagaagtgataatacctcctaaagatgaagaggaaatattgttggagaaattagtatttggagatgccgcagggtttgaaaataacttgaaaaaattagacaacttatatgattattcagacgaggaggaagagatagatgaaaaaggtctggagaaagaatcagatattgaagatttacaagatgaagacctattttttattgatgatgggaataatgaagagcatagcagtggtgatgatatggaaatagatcaatccgaagacgaagaagaaggcgaagatcaagattcagataatgcatgggaggatagcgatgatgaaaaggttaacatttccttattaacatcagataaattgaaaaagttgagaaaaacaccacaggattcagttatatctggcaagtcatatattattagattgagatcccaatttgaaaagatatacccaagaccacaatggatagaggatatagaaaacaacagcgatgatgagaaagacttgtcggacgaagacaaggttgacgatgaagaaggacaagtaggatcaacaactgcattattaaacatcttgtcaagtactgaaaaattcataaacacaaagcaattgaaactaattgctgcaaataaaatatctataaccagattgaaagatgcaaactataaaagaatcggtaaatcgggtatccagaccattgacttccatccaaactatcctattttgctaacaggtgggtttgataagactattagaatttaccaaattgacgggaaatcaaacaactttatcacttcatactttttgaaaaactgtccaataatggaagccagcttctatccacaattgtcaggcgatgacaccaaaaccagcaacttaatatatgctagtggtcgaagaagatatatgaataaaatcaacttgtcaactggggaaatagagaaaatcagtcgattatatgggcatgagcagacacaaaagtcgtttgagtacttcaaaataagtcctcaaggtaaatacattggattgactggtaacaacggatggtgtaacttattaaatgctcaaaccgggcattgggttcatgggttcaaaattgaaggaacaatagtcgactttgcatttgccaacgatgaatcatttattatgattgtaaattctgctggtgaagtatgggagtttgctctcgaagggaaaatcacttccaaaaccccaaacaaaatcattcgcagatggtacgatgatggtggtgtcggaatcacaaagctacaaattggtggtaaaaacaatcgttgggtcgccattggtaacaataacgggatagtcaatatctacgatcgatcagtatttgctcctgaaacaacacacccaaaaccaatcaaaacagtggaaaacttaatcacatcaatatcttcgttggttttcaaccccgacggacaattattatgtattgcatcaagagctaaacgtgatgctttgaggttggtgcacttaccaagtggttcagtgtatagtaactggccaaccagtggcacacctttaggtaaggttaccagtattgcattctcgccaaataacgagatgttggccattgggaaccaaaccggtaaggtcactttgtggcgtttgaaccattattaa

SEQ ID NO: 6098 - DNA, 1410 bp, Candida albicans
atgttcagaactcaatccagatatttggtgagatctattttggctaatcattgtgtattgccaagcacacgtatgacagtttctccaatacttaaccaatcgatcaagttctattcatccaaagacaatgccaccgacaagagtcaggaaaaagaacaacctaaatctattttaaacgacgacatgttagctagagcagggtttgaagatgttgatcctaaagaggaaaccagcaatagtgaagaacaagctactaaacaaacaggacgtaaaagaaagagagctcaaacttctaaagacttgcaacgtgaaagatatgccaatatgttttatttatctgctttaatatttggtgtagcaggggttggatacatgagtagagactgggattcggaaaaggaacaagaagagatggatggtaagaacgtggagaatggttataccccaaaattaatgtatgaaagattgagtaaaagattgggatcattgttcacatttttctcagaaccagcatttgaaaacttattgccaccaccgccaccagagcaataccgtcgtccattaactttagttgttactttggacgactttttgattcattccaactgggatacccaacatggatggagaactggtaaaagaccaggtttggattatttcttgggttatttgtctcaatattatgaaattgtcgttttttcttcaaacctgcaaatctactccgataaaactgtcaataaattagatccgtaccatgcatacatttcctatgcattgtttagagaagcttgccgttacaaagatggtaaattgatcaaagacttgtcattattgaaccgtgatttgggtaaaactgttatgattgatgttgacgaagattctgctgctttgcaacctgaaaattcaattattgttaagaaatgggaaggccaacctgatgaatatttaatttcattgattccattcttggaatacttggctacacaaccagtcaaagatgttagaccaatcttgaattcatacaaggataaatccaatattgtcgccgaattcgcagaacgtgagaacaaattgagagaacaatggagaaaagatcacggtggaaataatgggaaaccaaatgccggtaatttcattgctaaattgttaggtattccagttccagaaccaaaaatgccattggatattattagggaacacggtcaattgcaatacgaacatttccagaaatacttgcaagaaaatgcccacaaattcttagaagaagaacagaaattgaaagatgaatttggtaaagttactttgaataaattgattactgaaggtgctcctaatgctgaagaaattgccaaagtgcaacaacaaagagcattagaggaagctcaaaagcaacaagagggtcacaaataa

SEQ ID NO: 6099 - DNA, 993 bp, Candida albicans
atgacagatatgtcaaacactactactgatggtaatgtttctagtattgttgttccaggacaatatattagtcctacttataaattagaaaatagcaacaacgattcatctataccagtgaaatatattcctggatcggggacaataatatcaaatatcaatatcccatcgccaaacacctcaacaaactcagttaaatcaatgccaattatagtatcgacaatattagggaatgtatccatctcacctattgatcaaaccccaacatcaaaaccatcgagcaatgatgatatggttatcgataatgagcaaactaaactggatgaagataaagataaagataaatatgttaaaagttatttagtctctgtgataccaaaatctaccaaacatcaatccaccacctccaccactactagtaatcaatcaggctccaaggcaatttcagcaattgcattacctaaagaaaatgatattgtattagttcgtattactaaaatcactaaaatccaagcatattgtgaaatcatatcattagataccaccaccaacattttaccagattcaggtcttggtaataatgggaatggatcacatgtatcaatgtcaactaccggaagtaattcgcaacataatttcaatcaaaattcaattgcttctagtcaatcaactaatcaatcagtacaaatttatgaattgggagaaaattttaaagggataattagaattaatgatattagattgactgaaagagataaattaaaattaattgattgttttaaacccggtgatattgttaaagctcaagttatatcattaggtgatggatctaattattatttaacaacggcaaaaaatgagttaggggttgttttcgctaaaagtgaaaatggtgctggtgatttaatgtatcctattgattggcaaaatatgattgatattaatagtggggttatagaaaaacgtaaaaatgctaatccatttttacaataa

SEQ ID NO: 6100 - DNA, 963 bp, Candida albicans
atgagtgcaacatcagatagggaaagtgattttgaatctgaggatgaaagcaactttcaggacaaagtcttcaacgtaaagtcgaaaaccagttctttttttcacgcaaatacgcctgataacgaagattttctggaagacgaagaggataaagatgagcaagatgaaggtgatacaaagacaaaaccaaaagatggaaagcataattttgaagatatagcatatgatgaagagagtgaggaaaacattggtgacgatgaagatggaaatgcagacctcagtctagatggtggaagcaaagtcaataaaaagttgaagaagttgactagtaaagagttggcaaaagagcagaaaagaataaagcgtactggggtttgctatttatctagggttccaccgtatatgaagccagcaaagttgcgttccgttttgtcgagatttggcgaaattgacagattgtttttgaagcccgaagatccatcagtttatcacaagagagtgaagtatggtgggaacaagaagaagaattttacagaaggttggatcgagtttgtaaataagtcggatgccaagctttgtgctgcgacgttgaatggaaacaagttaggtggtaaaaagacatcatactactacgatgacataattaacataaaatatttgccaggtttcaaatggctagatttgacccaacaaatagccaaagaaaatgaagtaagacaagcaaaacttgcgatggagatatctcaacaacagaaactcaacaaatcgtttgtcagtaacgtggaaaaatcaaaaatgatagctaatatccagaagaaaagaaagactacagatgatgacaatattagaagggattttaaacaaagaaaagttacaacgaccagaagtgacgctaaggatgatttaaaatcaaagtccaaaccaacggacaaattaaatgatattttatcaaaagtattttaa

SEQ ID NO: 6101 - DNA, 2280 bp, Candida albicans
atggctaaaaaaagaagagctgctatattgcctaccaacattattcttttacagaatgttgtgcgtagagatcctgaatcataccatgaagaattcttacagcaattttcccattatgaatctcttcgagatttgtatttaattaatccgaccggtgtggatgctaactctacaaccgagtttattgatttaataggatttatgtcagctgtatgtaactgctatccaaaagagactgctaattttcctaatgaattaaaagagatattattaaacaaccatcgtgatttaactcccgagttacgtgagaaaattatccaatgcttgacaatgttaagaaataaagacattatatctgctgaaatgttgatacagacaatattcccattattaattactagtaatgctggacagcaagtgaagcaaatgagaaaacaaatttattccactttgattgcattgttgaaatctgttaatacaggcacaaagaaccagaaattgaatagatcaactcaggcattattgtttaatttattggagcaaagggacaatcaagggttatgggctactaaattgacaagggaattatggagaagaggtatttgggatgattccagaaccgttgaaataatgactcaggctgctttacatccagatgtcaaagttgccgtcgcaggtgctaggttctttttaggggctgacaaggaaagggaagacaattttgaagaaagttcagatgaagatggtttcgatatgaatgagttgagacataaaatgcaaattaataaaaagacatccaaaagaggtaagaagttggagcaagctgtaaaagccatgaaaaagaagaataattccaaacattcagcaacttacttgaacttttctgccattcatttattaagagatccccaaggctttgcggaacaaatgtttgataatcatttgagcagtaaaaattccaataaatttgatttggatcaaaagattttgtttatgaatttgatttcaagattaattggtacacataaacttattgtgttgggtgtatatacatttttcttgaaatatctcactccaaagcaaagaaatgtcactcaaattatggctgccgctgctcaagcatcacacgatttggtaccaccagagtcaattcaaattgtcgtgagaaaaattgctgacgaattcgttagtgatggtgttgctgcagaagtagcatcagcaggtataaacaccattagagaaatattagccagagccccattggctatcgacgctccgttattgcaagatttgactgaatataagggttcaaaatctaaagcagtgatgatggcagcaagatcattgatttctttgtatcgtgaagtagcacccgaaatgttgttgaaaaaagatcgtggtaaggtggctagcatagaattgcagaagggtgagaaaagtggcttgcctcaatatggggttgagaataacgttacttcaattccaggtattgaattattagctaaatggaagaaagagcaaggcttagatagtagagaggacgaagaagatgatgccaattgggaggttgacgatgatgaagatgcaagtgatatcgaaggtgattggatagatgttgaatctgacaaagagatcaatatttcagatagtgatgatgacaatgaagaggatgagcaagaacaagaaccagagaaaggtaaagcaaaaataggtaaagcagaagataacgaagatgaagtttctgatttagagttgtcatcagatgacgacgatgaagatagcgaggagaacaaagatggaaaagcagttgctgattcagaagaacctcctaccaagaagcaaaagatcagaaacgaaaatgcagatatcaatgccgaacaagccatgaatgagttactttccagcagaatattgacaccagctgatttcgccaaattagaagaattaaggacagaagcaggtgtatcgaagattatgggtatttcaaatgaagaagctgttgattctacttccttggtaggtaaagtcaaatacaaacaattgcgagaagaaagaattgctcatgctaaagagggtaaggaagatcgtgagaagtttggctctagaaaaggtaagagagatactcctcattctactaccaataaggaaaaggcaagaaagaagaattttgtcatgatgattcataaaaaagctgttcaaggtaaacagaaactttctttacgtgatagacaaagggttttaagagcacatataacgaagcaaaagaagaaagggttatag

SEQ ID NO: 6102 - DNA, 1695 bp, Candida albicans
atgaattcacaggaccatttcaaggatgattttgaaggcgaatttaaaccaattaagtatttgcccaaacgaaaaatagacaaagaagagtcatcaatcaattctgtgaacccgaatgctaatattaaaagaatcaaaaaggcgtcactggtgattggtattgatgacgacaatacatatctagacagcccattggataaaactaaacattccaaaacagtaccagatggtcaatatgatgctaatgaccatgctataactcttccagaggctgtagaagatgacattgaaacagtgaaaacccaaatactcgatcaactaaatggaaatttgcaaatattttcatcaactccttccgtatctgaaaaatattctgaaatctattcgatatttgagcgaactatcaaagacaaagaaagtcactctgtgttaatggtaggaccaagatctagtggaaaaacaacgattgttaaaagcgccttaaaagagttaaatggcaattacaagggtgagtttatttccatatatttaaattcctcagttcaaactgatgacagttccgctcttcgagaaatagcaagacagttggatatcaatgtgaaaaaagatgtgggtgggtatggttccgattcgatggagttgacaaatgaaaagatcgggtatgcaaattttgaaaaaaaatctataaatgacactttttccaacatattaagtgtattgaccagcaacaagggagatcgggatgaaagaatgcccttggtttttgttattgatgaatttgaaaaatttactgttgacagtagacagactttattgtataatttgctagatatatcgcaaagcagtgcaactccattatgtgttgttgggctaaccaccaacataacgacaaaggaagcgttggaaaagagagttagtagcagattttctcaaagggtcatttctttggttcatgaagcttcattagagaacttctgggataactgtaaagcgtcacttttgttacaagattccaccattgataaattgaaaaatccagagtatggattactgtggaataagcatgttgagcaattgtactgcaaaaagaacagtcttcttaaaggcatggttgttcgtaattatcacaccgccaaggattatagaaagttcaacaatgcctgtaaagtgcctgtttcaaagttgagtttacatcatacctacattgaggaaagctattttaaattgcgtactaccggtagcaacggggtgcaggatttggtgacttcattatcagatttggaattgcttttggttattgcggccgtaaggtggatagaaaaatttgaacttcaaaccataaattttaacttggcctacacagaatatcaagagatggtcaaaaacttcaacactggtaacgctattgtcagctcgacttcccttgacagcagaattgctgcaaatatcaaagtggatagaaaggttttatcccgaaaggtgtcgctaaatagttggagcacgttgtacaagctaggtatattgttggaccctaaaggtgactatgtcgaaggtcaatctaacaactatagctatcatatcaacaagaatttaattatagaggagaatcaaatggtgttggtagatatcacgctcgatgagttaaatggctttatagaagacaagcatgtgttcaaacgctttgttaggttgtaa

SEQ ID NO: 6103 - DNA, 792 bp, Candida albicans
atggaatcattagacgaaatacagtggaaatctccagagttcatacaagagagagggcttaataccaataatgtgttggagtacttttctttatcgccattctacgaccgaacatcgaacaaccaagtgttgatgatgcaatttcagtaccagcagatacaaataccacctggtgtatcattccaccaatactttcagtcgcggttgagtgagatgaccggaatagagtttgttattgcgtatactaaagagcctgatttttggataatcagaaaacaaaaacgacaggacccccagaacactgtgacactacaagattactacataataggagcaaatgtttaccaggcaccgaggatctacgatgtgttgtcatcgagactccttgcaagcgttttgtcgataaagaactccactgacctattaaatgacatgacaagctatcatatctcagacgggggtcattcctatatcaactccatacacggcagctcctcgaaaccatcacagtcatcggctgtctcgaagccactgtcaacaaatactggaacgaatgcaactactaccccgatcactttgacgactccactgggtgctactgtcccgagcacagtgtccaatggaatctcaaccagcacagagattgccagcggagtgtttgatacgttgttgaatgatgtggtgatgaatgatgatcacttgtacatcgatgagattccattatatggtgagggaagcacacttgagagacttgggttaaagggaaataaagatgcgggtttgagtctatga

SEQ ID NO: 6104 - DNA, 984 bp, Candida albicans
atgattaggacgatcaaaccaaagaatgctcgttctaaaagagcattagctaaaaaggaagctaaattagttgaaaacaccaaatcagcattatttgttccaggttcaacggggaataaatttttacatgatgccatgtgtgatttaatggcatttaaaaaaccatttgccaaaaaattttccaaaaaaaatgaaattagaccatttgaagattccagtcaattagaattttttgcagaaaagaatgattcatcattaatggtattttcatcaaataataaaaaaagaccaaagactttaacgtttgtaagatttttcaattttaaagtttatgatatgattgaattatcaatacaagaaaatcataaattattacaagattttaaaaaattaacatttacaattggattaaaaccaatgtttgtttttaatggtccaatttttgatagtcatccagtttatcaacatattaaatctttatttcttgattttttccgtggtgaagaaactgatttacaagatgttgctgggttacaatatgtgattgccttatctgctggagaagtcgaagatttaaataatgataaagtattaccattagttcatttcagagtgtataaattgaaatcttataaatcaggtcaaaaattaccaagaattgaattggatgaaattggtcctcgttttgattttaaaattggtagaagaattactcctactccagatgttgaaaaagaagctactaaaaaaccaaaacaattggaagctaaagtcaaaaagaatgtcactaccgatttcatgggtgataaagttgctcaaatacatgtgggtaaacaagatttgagtaaattacaaacaagaaagatgaaaggattgaaagaaaaatacgatcaagaaagtgaagaagaagatgtgtatgtttctgatgaagagtactttggtgaagatatagaagaaccagagactaaaagacaaaaagtatag

SEQ ID NO: 6105 - DNA, 1830 bp, Candida albicans
atgagtgctctactatcagcagatgatttaaatgattttatatcacctggtgtagcttgtataaaaccactagcatcatcatcaaccaataccaccaccaccaccaatactactgactcatataatgaaaatggagaagtagaaattcaaatagattcacaaggaaatccattagaaatttcaaaaattgatgataaacaatttcaaactaataaattaacaccagcacaaatatcattagctgattgtcttgcttgttcaggttgtataacatcagctgaagaagtattagtagcacaacattctcatcaagaattaattaaagcccttcaatcacaaaaggaaaccaataaagtgtttgttgttagtatatctcatcaatcaagggcatcattagcaatggcatataatgtatcgattgaaaatatggataaatgtttgattgatttatttattagacaaatgggatttacttatattgttgggacatcattaggaagaaaattatcattaattaatgaagccaaagagataatcaacagaaaaaccaaaggcagtggtactggtggtattgactcagattcctcctcaggacctatattatcatcaatttgtcctggttgggtcttatacgctgaaaagactcatccttatataattccaaaaatgtcaaccgtaaaatcaccacaacaaatcacgggatgtttattaaaaaatttaacttcaaattcattaaatattgaaaaatcaaaaatttatcatttatcaatcatgccttgttttgataaaaaattagaaagtgctcgaccggaagtatatgaagaagaagaagaagaagaagaagaaaaagacaaggccttagtgctggttcctgatgttgattgtgttattactgctaaagaattaattacattattagaagaatgtcctcaatatcaattaatcccaccaacactaccacaagaagaacttattggtggtggttgtttatcaatgacggaaatttataaacaatatgcaccaccaaattggccatttatagaaatatcatggtcaaatgattcaggttcagcatcaggaggatatgcatataattatttaaccatttatcgaaatgatttaatattaaaaggttatgatggtaataaattcaccataaatttaattaatggacgtaatccagatatttatgaaatgagattaatgtataatggtgaaaataaagaaaagttggctagtgctgctgttgtcaatggatttagaaatattcaaaatttagtaaggaaattgaaaccaaacacaggaaagacaacaaacaccaccaccaccaccacaaagagtaaagttaatccattggcagctagaagaagagcaagaatggccaacaatcgaggtaaaccagaaacaaaatcaacatcagaagtgaattcccaagaaatggaaattgttgctgatgcttcaaaagttgattatgttgaaataatggcatgtcctaatggttgtattaatggaggtggtcaaatcagtgctccaaataccaccaccaccaccagtatcacgttaccacaaaaggagattgaaaaacaatggattaatgcagtattagagaaatataatagtattccaatgtttgatttaagttcacaatcatcatcatcatcatcaccaaatgaaattattaaatttattgaatggagtaaaaaatttgaaaatcaatttaatattagtgataatcgattatttaaaactcattttaatcccgtggagaaaaatatcatcatgtcagttgatgatcctgctactgctttattagttggatctaagtggtaa

SEQ ID NO: 6106 - DNA, 513 bp, Candida albicans
atgactacaggagctttaccatctacaccagcaaatgaacccttgatcaaatctgcagataatgttgctaatttgattgaatcatttatagaattaggagtattagtccatgataatcaaggaactccacaatccaatcaagcgttaatgaataaattaaatcaattgattctgcaattatctcaaacatcaaccacagccaatgatcctaatgatgctaatacaaatttaaagcaatttcttatacccattgatgtgatttcatatattgaagatggaagaaaccccgatatatatactagggaatttattgaagttaatgctaaaagtaatgctcgattaaaagggaaaatgttggggtttaaaaaactacgtgatgtttttggtgataagttgaaacaagagtttcctcaattggaaaaaggtgttgacgatataattaaccgaaccaatgataatagtagtcacaccgctagtgtgatcacagacactgctaataataacaatagttaa

SEQ ID NO: 6107 - DNA, 744 bp, Candida albicans
atggcaaaattggttcataatgtacagaaaaagcagcatcgagaaagatcacagacgcagagtagggcaagatatgggttgttagagaagaagaaggattataaattacgtgctgctgattatcataaaaagcaagcagcattaaaagcgttaaaagaaaaggcaaaattacataatccagatgaatactaccatgctatgacacggaagaagacagatgacaagggaattctcatatctgaaagagataatgaagttttatctgtcgaacaagccaaattgttaaaaacacaagatgtgaattacatccgaacaatgcgtttaaacgaattaaaaaagatagaaaaagaaaaagaaggtaagctatttggagcactggggaaacacacggtatttgtggattcaatagaggaacaagaatcatttaatccggaagagttttttgatacagatgcagccttattggataacagagagaacagacttcgcatgaatcaattatatgacaattcaggacttttaacactgaatgatctagatatcgatacaaaaaacaaattggatttgaaaaaattgaagcaatacaaacttttgcaaagaagattgaaaaaagaaaaagaattgaaagaagtagagtctataatgagcaaaaacttggagaaaatgaaaaagggtaacaaaaagaaggttgtcgactcaaatgggaaagtgcatttcaagtggaagaacgagagaaaacgctga

SEQ ID NO: 6108 - DNA, 474 bp, Candida albicans
atggcaccattagaagcaccaatattagctatacctggagaaaataacactcaccaacagcaacaacaacaatttcaatacacaggtcaattacaaaagaagaaagctgccgaaggatcaatagaatggtattttgatcaaacgataaatttcatgggagatcatcctgtgatcactggtataggggcatttgcagtagcatattttgctgctggatttattaaatctaatcaaccaggtataaacgggaaagcatttgtcaaaggtggatttggtgctaaaatgactgccaaagaagcattacaaatattaaatttgaaagaaactaatttgagtaaattgaaattaaaagaacaacatagaaaattaatgatggctaatcatcctgataaaggtggttcatcatatattgccaccaaaattaatgaagctaaagatttcttagataaaagaggtggtatgaaacctaaatag

SEQ ID NO: 6109 - DNA, 813 bp, Candida albicans
atgtcggatacaataatattacctggagacaaactccctatagatgaagatatttttactgtgaaaaccaccattggacctggaatttacaaaaagccaaagactcaagaattaattccatcagcagcaggaacattacattatgaacgagcaaaatcatcatcacagcaactaatctatattgaatcgaattcgaagagatatattcctcataccaatgattatgtgattggaataattaccggagcgataggtgagagttataaagtatcattacaatcgaattctacaccagtgttattatctttttgggctttccctaatgctagtaagaaaaaccgtccaaatttgaaaaatggccaagcggtatatgcaagagtgagtcaagatataccggaaattgaaactgagctagaatgtattgatccaactagtggtaaagaaggagggtttggagtgttggatgaatcaggatatatatttgatgttcatttgaattttgctcgtgaattactattcaatccgaaaactatatttttggaaacgttagcaacaagatgtcaatttgaaattgctataggaatcaatggtaaaatttggattaaatgtggtaatggtgtgaaaaaagaagccaatgatggtagtaataataatcaagaccaaggtgaagatcaagagatgattgatgtgagtgaagagaatttaaaagatttgaaaagtacattagcagcagctacatttttaactctatgtcaatttgtaactcaagacaagttaaagcaagaattgaataatgcattccaagggatttaa

SEQ ID NO: 6110 - DNA, 939 bp, Candida albicans
  misc_feature (191)..(191): n=g, a, t or c
atgactgacattgaagtcaaatcacgttccagatccattaaagctatttcctccgatgcatatcccccggactcgtcagttcaggaattaatctacgaattgagttctgataatcatatttccgaacatagacttagattaactaaattagaaaatggcaaacaagtagctttgattcctcataagacttntgctgagaacggtatcccaaagactgcaagcaagattgaattgtttgtcaaagatttgggtccgcaaatctcatggagaactgtttttttggttgaatactttggtccctttatttttcatccgttattttactatgtccaatcactctatggttctggatctttcgaacacacacaaactcaaaaatttgcctttgcaattgtccttttgcattttttaaagcgtgaattggaaaccatttttgttcataaattctctaacgcaacaatgccagctttcaatattttcaaaaattcaggacattattggattttgtctggttttaatttggcatattttatttatggtccaagtgataaactgggggtattaaaatactttttccatgttaatgaattaccaagctcagttgtatatggtcttttcggcttgtgggttttcgccgaattatctaacttgactactcatttaattttgagtaacttgagaaaaggtgattccaaagtttacgttattccgttcggatatggattcaattgggtttcttgtcctaactatttttttgaatcattgtcgtggttagcctatgctttactcgtaggtaactggtcagcttggattttcttatttgttagttccggtcaaatgtggctttgggctgttaaaaaacaccagagatacttgaaatctttcggcgatgactacaaaaagttgaaaagaaagatatatattccatttgttatttaa

SEQ ID NO: 6111 - DNA, 747 bp, Candida albicans
atgtcaaatgacgatataatactcccatcagtttcatccttatcgaaactaactataaatgatgtatcaaaatcaggatttggatacaatccgtccataggaccaatatcaaatactattaccctagaatcttcactggtattattaaataaacgtacaatatcattaacaccaacatcatctgactccatttatgatagaaatattatcacgaaaaagccacacgaaatcaacttatcttcgttatcatttttgttttgtgagattattagttgggcacactctaattccaaaggcattcaagatttagaaaatcgtttaaacggattaggttatcaaataggtcaacgatatctcgaattgtgtaaaataagagaaggttttaaaaacagtaaacgagagattagacttttggaaatgttacaatttattcatggtccgttctggaaattgatttttggtaaaactgctaatgaattagaaaaatcgcaagatttgcccaatgaatatatgattgtggagaatgtgccattattaaatagatttattagtatacctaaggagtatggcgacttaaattgttcagcatttgttgcgggtataattgagggagcacttgataatagtggattcaatgccgatgttacagcacacacggtcgctacagatgcaaatccattaagaacagtatttttgatcaagtttgacgattctgttttaattagagagagtttgagatttggataa

SEQ ID NO: 6112 - DNA, 393 bp, Candida albicans
atgaaattcctaactactaattttgtcaaatgtgccgtgaaaagttgtcaatcatcattagattctttcccattaaaatatgaagaatgtcaattagttcaagaagaacaagattataatccagaatttattgttcatatgttagatagattagattggaatgctataatacaagttgccaaagatttaggaaatgaatcattaccaccaactaagccagaagatttagatccaattatggaagataatcaagctatattaaaagatttacatactttattggtagaaacacaaatcattgaagggaaaatgatttgtaaaaattgtcaacatatttattacattaaaaattctatacctaatttccttttaccacctcatttagccaattag

SEQ ID NO: 6113 - DNA, 1341 bp, Candida albicans
atgaagagagcttttggtgataactctaagcctggtgttaaaaaagcaaagcttcaccaagataaagaagctgttcacaataatgaaaacaacgataagactggacttgatgtagaaatacatccgttattaaaaaatataggattaacaaacattcctaaattaccgaaagaccataatccactacgacaatccaaccaaaaatggtttgatccacttgcattaaatccatatctcgatcaaagtgatatggttattaataataaaaaatctagacatattccacccccgttaaagtttatctcacagggaaagtatgtggcccagggggagaaattacgagagaaattgaaagttgaacacgaacaaactcgagaattggaagcaattaaacaacaaggattaataccagatgagaccattggggaacaattgtatcaacttgaagtgcaaccattgattgaatggtgggatcgtccatatttgcgtgataacaattatatgaacattaacgacgaatctcgtaaagtccttgatgatgaaacccaacctataacgtcatatatacaacatcctgtattgatcaatcccatttgggagaccaaggattcaaactctccaatacaaccggtatatttaacgaaaaaagagcagaaaagaattagaaaaaatgaaagacaacttaaacaacaagagaaacaggacagaattaaattagggttagatccaccgccaccacctaaagttaaattatctaatttaatgaatgtattgaccaatgaatcgattaaagatccaactgcagttgaaaatagagtgaaaagagaaattcaacaacgtgttgataaacatttggcacaaaatgaagctcgaaaattgaccaaggaacagaagcatgaaaaattatggaacaaacaagaaaaagatttggccaatggtattcatactacagtttacaaaattgacaagttagttaatcctaaacatttgtttaaactcaatatcagtgctcaagaagagaatttggtaggagtttgtttgaaaaatcctaaatttaatttagttatcgtcgaaggcggagaaaaatcaattggacattataagaaattaatgatgaaaagaatcaaatggacagaaaatgtatcacaatcagcaactaatgattcaattgacgatttatccaataataaatgttcccttgtatgggagggctcattgccagatgtgcattttcagaaatggagtattatgtattctagagatgatgaagaagccctcacggcattaaagaagtttgatcttgagaattattggcgattagcaagctccttgaaagaatag

SEQ ID NO: 6114 - DNA, 2838 bp, Candida albicans
atgacaaaattagattctaaatatgggaaaattttaaaagataaatatgatgggaaatttattgatgaatggaatcaaattttgaatgatgataacaacaacaacaacaacaataccaccaacgaccacgcgttgagtgctgttgatttggccgttacggtttctcaagcattagcagttaaagattctgaagagtttaataataccaagattgcatctaatgccagtgtagttatgatggatacatttgttaatgatatgatgattattgttgatgatgagaaaaaaatcaccaatagtcaattgactgatcaaattgaagataaaattgaaaataataaatggtatttaaaaactaaattagggaaaaatttattacaatcaattaaagattttgatccagaatatcttgaatattgttattcaccgattattcaaagtggtggtgattatgatttaaaaccaagtgctgtttccactgataaaccattaattggtgaaggggtcattttatcatcaattggtttaagatataaatcttattgttctaatattgccagaacatttttaattgatccaactagtgaaatggaaactaattatgatttcttattacaattacaaaaatatattgttgataatttattgaaagatggtgtcccggctaataaagtttatcaagacacgatagactatattaaaaaggaaagaccagatttagttaatcatttcacgaaaaactgtggttggttattaggtatggaatttagagatctgacatttattttaaatgctaaaactactgatagaaaattgactactgggcaaatcatttctttaactattggattcaataatttatcaaatgataaaaatgataaaaatgataaaaatgataataagacaaatcatcaaaaaaataaacaaacttatgctttattattgactgacacaattaaaattactgatgattcatcaatcttattaaccaattattcaaaagatagagctgccattagtttctccttcaatgatgataatgagacccagaaggaaaataataataacaataataaacgaccaggattatcccagacatcaaacaccacagccttgaagttagagtctacagaaaatactgctattcttaaatcgaaattacgtcatgaaaatactaatgctgatgatgccaattctgaaaaattaagacaagaaattcaaataaaattacatgaaaaaagattacaagaaggattagcaagattttcaaaagctgatgccactgatgctgatgattttaaaccaatttttaaaaaatatgaatcttatgttagagaatcacaaatccctaatagtgttaatgatttaaaaattcatattgattataaaaatcaaacaataattttaccaatttctggtcgtcccgttccatttcatatcaattcttataagagtggatcacaaaatgaagaaggagatttcacttatcttcgattaaattttaattcaccaggtgctggtgggaatgtcaccaaaaaacaagaattaccttatgaagattcccctgataattcatttttaagatcaattactattcggtcaagagatcgtcaaagaatggttgatgtttataaagccattcaagatttgaaaaaagattctgttaaacgagaacaagaaaagaaacaaatggctgatgttatcactcaagctaatttaattgaattaaaaggttcaagagttaaaaaattaaataatgtatttattagaccaacacctgatacgaaaaaaattggaggagttttacaaattcatgaaaatgggttaagatatcaatcacaaccacaatcacaatcaaattttaaaaatgatcaaagagttgatgtattattttccaatattaaacatttatttttccaaccttgtaaagatgaattaattgttttaattcattgtcatttgaaaaatccaatcatgattggtaaaaggaaaacttttgatgttcaattttatcgtgaagctagtgatatggcatttgatgaaactggtggtcgtaaacggaaatatcgttatggagatgaagatgaattacaagaagaacaagaagaacgaagaaggaaagccctcttggataaagaatttaaaagatttgctgaattaattgctgattcttctcatggtatggttgatttagatattacattccgagaattaggattccaaggggtaccatttagatcctcagtattatgtgttcctacaagagattgtcttgttcaattaattgatccaccttatttagtcgtcacattagaagaaattgaaattgctcatttagaaagagttcaatttgggttaaaaaatttcgatttagtgtttgttttcaaagattttaataaacccgtggttcatattaatactatccccgtggaattattagaagatgttaaatcttggttaactgatgttgatattcctataagtgaaggacaaatgaatttaaattgggtacaaattatgaaaactgtattggcagatccttatcaatttttcattgatggtggttgggcatttttaactggtcaaggtgaaagtgatgaagaagaagaaagtgatgaagaaagtgatttccgtgttagtgatgaagatcctcaagatgaagatgaagaaagtgatgattatgctagtgaagaagaaagtgatgattattctggaagtgatgatgatggtagtggtggtggtgatgatgatgatgatgatgattcagaaagtggagaagattgggatgcattagaaagaaaagctgctaaagccgatagaaattctggttttgattaa

SEQ ID NO: 6115 - DNA, 891 bp, Candida albicans
atgggtactagtacaagtgaagcattgaagaacatcaaaaacaaacagcgaagacagaaagtttttgcagaaataaaacatgaaaagaataaacaacgtcataagcaaagagccgaaagagctaaggaagaaagagaaaaccccgaattaagagaggaaagaatagcagctaatatcccagatactatagatagcaaacgtatttatgatgagactatagctgctgaagttgaaggagatgacgagtttcagtcatatttcactaatttgttggaagaaccaaagattttgttgacaacaagtgccaatgctaaaaaaccggcctatgaatttgcagacatgatcatggactttttaccgaatgtgacatttatcaaaaggaagaaggaatatacaatgcaagatatggccaaatattgctcgaatagagacttcactgcattgcttgtcatcaacgaagacaagaagaaggtcaatggtataacgctcatcaatttacctgaagggccaacattttatttttcgattacatcaatagttgatgggaaaagaattaagggacacgggaaagctggtgattatttacctgagattgtattgaataatttcaattccagattgggtaaaactgtgggaagactatttcaaagtattttccctcataaacctgaacttcaaggaagacaagtgattactttgcacaatcaacgtgattatatttttttcagaagacatagatatattttcagaaatgaggaaaaggttggattgcaggaattgggtccgcagtttacattaaagctaagaagaatgcaaaagggagtacgtggtgatgttgtttgggaacacagaccagatatggaaagagataagaagaagttttatttataa

SEQ ID NO: 6116 - DNA, 426 bp, Candida albicans
atggctaaaggtaaaggcaaaggcaaaggcaaaggcaaagataaaggaaagtctgtccccaaccgggataattatgcaagaatatcatatttgtatcaaattagtaatcaattttacctagcccatccagagtaccaagccttatctagaggatataacagaaacttggatctaattgccaaaaaaaccgtgataaaactatcaccacacataaaaaggacattatgcaagaaatgcaatactatgcttattcctggcttgactatgtcaatgtatattgagaatttatcgaaacaaaagtcacagcataatgatgtatttgttaacaagtgtttaaattgtgggaaatgcaaacgattccccgttggaaaagatagaaactacattttatttaccgataaacagaatgaaaacataccaacctaa

SEQ ID NO: 6117 - DNA, 2310 bp, Candida albicans
atgtcaataaatattgttttggaagagattaaaggtactctttcttcaattatccctttattatcaattttacataatgataaacaaattttatctagcatcaccaaaactgaattaaatcatcttatttcaagaacattaaatttagttagatcatcagatgtttataataaatggtgtggaatcaatttaattagagttatagtagaagaatattctatattagctagtgaaggtaataatttaatgaatagtttattacaagttttagaagcttatcaacaacaacaacatcatcatcatcatcaaactactattgatttaaaaatattgactagttgtattgaaacaattaattatatgggggatttaattagaggtaaacctactttaactagagaaatattaacaccaaaattgaattcgatcattggttattatttccaatatttacattttgctccattattaattttaaattcattacaaacattattaaaattccatccaacgacatttagaccatttggtaataaattgaaaactaaattaattaatttaattgatggtggtggtggtgaagaatttataaattatcctcaagatttacaattatcaatttataatacattagctatgcttccaattattgaaaaaattgaaccagaaacaaaatggtataatgatgtgattaatattcttggagaaattaatggattaattcaaatttatcaagaatttttgaattttaaagatgatcaagatttatctaatttgattcaaaaattacctaatcgaccaacaacaacaacaaccactactaaactattaactgatttatcaattgattttaataaacctcaaaccattttatctatttctaatcatttaaatattcttatgggtgttttaaaaagttatttgacggtggaaacttcatttacagtgaaattacctcttggattgattttaacaacttgtgaattaatatgttcaattaatacaaaatttttatcatttaaaggagatattcgtgatgaaacaatcaagaaattaatcaaatttagtttaattgaaaattataaaaccacactaggagttttaattgaattaattgaattatataaagggtcattaattcctcatttaactacaatttggtcatttttagaaacattaattccatttcaaaatcaaaataaaagaattgtcaatgaagaaattattgaatcagaatcattatacgttgaaatattacaatttatgaaacaaagtttatctttattaggtaatgtttctgaaaatactcaattattaagatttgttgatatggcattaatattagttgaaccaagaatcaatccaactaccaccaccaccaccaccaacaacaacaacaacaacaacaatactaaacagactaacgtccaacaaggtaaaaaacaaaagaaaaggaaaaatacttcatcagtggcattatcagatatattatctcatgaacatttattcatgaccaatattcctactattacaatcactaccgttcgatcatttattaatcaaatcattacaaaaattatattaccaccaactcaacattataaaatcatgagatatttaataattgaatcaattcatgctaaatattataatttatatcataatgttccaattgaattgaaaaaattattaattaatgccgttttatatcctggttatgataaaattagtattttaccaattatatcaacgatattatcagatgatccattattaggagttttcaataatccaaaattccctccattaccaaaatatattaatttagttaataacattgaggaagaggaacaaaaagaggaacaagaagaagatgcgattattgaggatgaagtggaagaacctattaaagaagagttaacaacaccattgaaaaagagaaaattggatattgaatcaaatgaagaaactgataataataatattatccctgttgaagatcaatctaagattttcactgccactaaagttgaaaaattgacaacaacaacaacatcatcaattgagaataatcctgttgtgattgaagaattaacatcttctaaagaaattgttgttgaatcaccagttgatgaaccaactaaagttgataacataataccaactaccactactactactactacaacaacttctttaacatcaaatactgctaatgcaaatgatgataatgataatgatgatgatgatgaatcttctgattttgaaatgcctgaaatcaatcttgatcaagattctgatgatgaatga

SEQ ID NO: 6118 - DNA, 3795 bp, Candida albicans
atggccaatccagttaagattggatactatgatccatttggcatatatccattgattaaagatgaactcaacaaaatatctcctatactgagtttacacataaggtttcatccttcacaacctttgaaaacaattcatgatttgtcacttgaattcacagaagagattcccaaaaagtcggagtcctctactctggagaattacaatgtttacaccagactaatgcttattaagatagaatcattggacaagtatcgtagccaagtgagaccgttaatcaaagaatggttgaagaatcttgtttttaatgaaaaagtgaatggctcttcaccatcatggatgattctactatatgtaccctccgatgccaaggataaacagtcaacgattattaaaatgtctcactatgacaaactattgaaggattttagtaatgaaggaggtaaggaattggcagctctatttgccgaatctacttcgcctactgcatctgtcggtgctcagaacagcaaatcaactgggtactgttttaaattcaaacagcatgaatttgaattgaacgaatttcttgttcaaattaaaaacctattggggtttacatttaaccaaaagtatcatttgaatctggatttgataacgacaagtggcgatcacgaaaacaattcgttgacgaaatatgtggcaacttataacttagccgaattgttctatgatatgaagctatttaatgattgtatcaactttttcaatcggttatcagagcaattaaacaccttggttgagaataatccaaatttatttatatataaagttgacttaccagccaaagttttctcgaataaatttgatttcaaaaagttttataacaataaatgccaacatatgcatgacgtcaactcgtttaccaatgtgaatttatttgaattgaaatgctttatatttttcagacaagcatccacgcttgaaatgttagttaacaaaaacttgaacaattccatctcattagcagaattacaaatttccaagcttttacgaaatttggtactatttttaaatgacttgttacaggtatttcaaaacgagcaagctttaatagaatttgagtactcgataatcgagtatttcttgaatttagatatagtcaataaacttatcgagcaagctacaaaactttatgaagctgaaccagcaaataacaacaattcatatcaactaaaaagattgtttgagtcaagaggagaactcaagttactgcagagatctagtttgatcaaattggcacgtgaaaatagcatcgaaattaaaggtttggatcaggtttttgaggatgtctctcttgacgaagaggaaggaccaaaacaatctaaagattctacagaacaagtcaaactagatttaaagcacccaaaactattacaggcaatacaaagtaaggattcattcgttgatgagtttactaaactaactgaaggaatacttgaagattttatgggctgtgatagatcaaaaactatagatgtattatccatagatttagccatattaaactacgagaaaggtgattatagtgaatgtttacaaatcttacacgactcatacgatttctttattcagaatggatggaactatttaggtggcatattattagaaatctattatggatgtatggagaaaactcaatctaccaattttgaagaaatattgagtacttgcttaaaattattgtcatgtttagttgctaatcatactgatatcaattctttcagattgattaataacaagttacaaattaaaaaattgtttgacagaattgaagtctatgcaaataagttagatcccaccaagaaattcgaaagatcgttgaaccagtttttcaaaaccgacatacttccgtatataagtgccgatgaatccacatcgagggataaatatttgatccgattgaaacttaagaaccccttctccttgggatttgtcttcaaacatgttgaattgattatggtggacgaagaaggatcagaaatagtctttcatgctgagaatgttgagatttcagacaagatagacaacacaattcaattatcaaccaataattttatattggggtcgttctcaccatatcgtttgacaattcagttctataatagtttatttttggtattagactatggagagaaggaattacaaatgaatcatgcttcttttttaagtgatacagtgattgaacataacggtaataataatgacgtgtttgtttatgatggtttgactccaatgtctgtatttaaaccaagacacgagaaaacacttttggcgtatcagaatatcaataaattgactgcccagttttgttgtgccaatgacttgaaattgggttccacagaagtagttttaaagatcaaaaatggaagcaatcctatccacgatgttagaataaatttgttttccaccacagagggactaacagtagtcgacccggatttgaaagtcagcaaacttgattcacatgaaagtcaaacttttttaatcccttacaatttcgtcaggtcagttaataaaatcattaatatgagagcaaagattgaatacaaagttgataatgaggagcaatacagtttccaagtttcctataacatagacactgcattaactatatcagttactgtccaagacatattcaaacgggattttatatattcaaagtttcaagtgggcacatccaatcccaagtaccccattagaatcatcaacaatgatctaaccaccgagtcaatctatgaaataatcaaaccaagtaaattcccttcgtatgatattatcgcatttggcgaacaacccagtaatttcttttacaaaatcaagcccaaaagcaacaaagtgtatctcaacgatactttaagcttgaaagttgactacaccaatttgcaagaagagtgtgaagagtatgtttctcaagagataatacaccaattggaacgcatcaaatcggtcaagtattggtatttgattaaggatgtcattgtcagtaaattaacatttgatctaaatggttttgcagtatacaagacgattagattcttgaatggattagaattgaatttactagcagagagaattattttgcaatatgtggaaagctcagtggatcagaagaatttggtcaaattaatgctgaatttacttgtgaatcataactttgaaacacccatagattcatatgaatacaataatgttcttcatttacacatttcagttccagttcctgttttgaagtatttgcaaatagttgaatatgagtatgacaaaaaacagtacactgttggagaacctatcaatgtcaatttgaaaatcaatacagtaacaagatggtgccccaaagaccgagatcgtgaatttgacgacagtgaacatgaatcccaacctcttgctgtgtcgtcgccccaaagaaataagaggaaaaatagcgataacaatagtgacaattccatattaattaccaacagggatcagtttcaattagtgatacaacaagacgataattggttaatgtcagggttcaagcgttttacatttaatggtgggcaggaaacgaccaaacaattgactttaattccactaactgttggtaagataccgttacctcaagtgtcaatcaaagaattgacagatggtgtaaatcttagcattgacgatgaagaggatgatgacagtgatgatatagatatcgagtttattaacggactggaaactattttagtaataccagaggtaaatagtattactttttcattctag

SEQ ID NO: 6119 - DNA, 6114 bp, Candida albicans
  misc_feature (299)..(399): n=g, a, t or c
  misc_feature (5871)..(5871): n=g, a, t or c
atgtcaactcatagacctttccaattaactcatggttcaattgaacataccttattggtaccaaatgacttattttttaactattcacaattaaaagatgaatttataaagacgttgcctgagccaactgaaggttttgctggtgatgacgaaccatctagtcctgctgaattatatggtaaatttattgggtttattagtaatgcccaattcccccaaattgtcgaattatcattgaaagatttcgaatcacgctttttagacaacaacaatgacaatattcattcgtttgccgttaaattgttagatgacgagacatatccaactactattgcaaaagttaaggaaaatattgttaagaattactacaaagctgtcaaatctattaacaaagtatantccaacttattgtaccattgcaaacacgatgctaagttagttgctatatttggtggtcaaggtaacaccgacgactactttgaagaattgcgtgaattgtacacgttataccaaggcttaattgaagacctccttgtgagcattgctgaaaaattgaaccaattgcacccatcatttgataaaatctatactcaaggtttgaatatcttgtcttggttgaaacacccagaaaccactcctgaccaggattatttgttatcggtgccagtaagttgtccagtgatttgtgttatccaattgtgtcactacacgattacttgtaaagtacttggtttgacaccaggtgaatttagaaactcgttgaaatggtctactggtcattcacaaggtttggttactgccgttaccattgctgcgtccgattcctgggattcattcttgaagaattctttgactgctgtatccttattgcttttcattggttctagatgtttgagcacctacccaagaacttcattgccacctaccatgttgcaagattcattggacaacggtgaaggtagaccatctccaatgttgtcagttagagatttgtcgatcaaacaagttgaaaaatttattgaacaaaccaactcacatttaccaagggaaaaacacattgccatcagtttaatcaatggtgctagaaacttggttctttccggtccaccagaatcactttatgggttcaatttgaatttaagaaaccaaaaggccccaatgggtttagaccaatcacgtgtcccattcagtgaacgtaaattgaaatgctccaacagattcttaccaatatttgctccattccactcccatttgttagctgatgctactgaattgattttggacgatgttaaggaacatggtttgtcttttgaaggattaaagattccagtgtatgacacatttgacggttccgacttccaagcactcaaggaaccaataattgaccgtgttgtcaagttgattactgaattgccagttcattgggaagaggccaccaaccacaaagctacccatattttagatttcggaccaggtggtgtttctggattgggtgttttgactcacagaaacaaagaaggtactggtgctagaatcattcttgctggtactcttgactccaaccctattgacgatgagtatggtttcaaacatgaaattttccaaacttcagccgataaagccattaaatgggccccagactggttgaaagagttgagaccaactttggtcaagaactctgaaggcaagatttatgtcaagaccaagttttcgcaattgttaggtagagctcctttaatggttgctggtatgactccaaccactgtcaataccgatattgttagtgcttctttgaatgctggttaccacattgaattggctggtggtggttatttctcaccggttatgatgaccagagctatcgacgatattgtttccagaatcaagcctggttacggtttagggatcaacttgatttatgtcaacccatttatgttgcaatggggtattccattgattaaagatttgagagaaaaaggttacccaatccaatcattgactattggtgctggtgttccatctattgaagttgccactgaatatattgaggacttgggtttgactcacttgggtttgaaaccgggttcagttgatgccattagtcaagtcattgctattgccaaagcccatccaaccttcccaattgttttgcaatggactggtggtagaggtggtggtcaccattcctttgaagatttccatcaaccaattattcagatgtactccaagatcagaagatgttcaaacattgttttggttgctggttccggttttggttctgatgaagacacctatccttacttgagtggttactggtctgaaaaattcaattatccaccaatgccttttgatggggttttgtttggttcaagggtgatgacctctaaggaatctcacacttcgttggcagctaagaaattgattgttgaatgtaaaggtgttccagaccaacaatgggaacaaacctacaagaaaccagcaggtggtattatcactgttagatcggaaatgggagaacctatccataagatcgccactagaggtgttatgttctggaaggaattggacgacactattttcaatttgccaaagaataaattgttagatgccttgaacaagaagagagatcatattatcaaaaagttgaacaatgatttccaaaaaccatggtttggtaagaatgccaatggtgtttgtgacttgcaagaaatgacttataaggaagttgccaatagattggttgaattgatgtatgtcaagaaatcccacagatggattgatgtttcgttgagaaacatgtatggtgactttttgagaagagttgaagaaagatttacaagcagcgctggtacagtttcattgttgcaaaactttaaccaattaaacgaaccagaacaatttactgctgacttctttgtgaaattccctcaagctggtaaacaattaatttctgaagaagattgtgattactttttgatgttggctgccagaccaggacaaaaaccagtgccatttgttccggtgttggatgaaaggttcgaattctttttcaaaaaagattcactttggcaatctgaagatttggaaagtgttgttgacgaagatgttcaaagaacctgtattttgcatggtcctgttgcttcacaatatactagcaaggttgatgaaccaattggcgatatcttgaactcaatccatgaaggtcatattgccagattgatcaaagaagaatatgcaggtgatgaatccaaaattcctgttgttgaatactttggtggtaagaaacctgcaagtgtatcagctacatctgtcaatgttactgacggtaaccaagttgtttatgaaattgactccgaactcccaaacaaacaagagtggttagatttattagctggaactgaattaaattggttacaagcatttatttccactgatagaattgttcaaggatcaaaacatgtttccaacccattgcatgatatcttgactcctgctaaacactccaaggttactattgacaagaaaaccaagaaattgactgcttttgaaaacattaaaggtgacttgttaccagttgttgagattgaattggtcaagccaaacactatccagttgtctttgattgaacatagaactgctgatgccaacccagttgcattaccatttttgtacaaatacaatcctgctgatgggtttgctccaatcttggaaatcatggaagatagaaacgaaagaattaaagaattttactggaaattgtggtttggatcttctgtgccatattctaacgatatcaatgttgaaaaagctatcttgggagatgaaattaccatttcaagccaaactattagtgagttcacccatgccatcggtaacaagtgtgacgcatttgttgatagacctggtaaggctactttagctccaatggattttgctattgttattggatggaaggctattattaaagccattttccctaagagcgttgatggtgacttgttgaagttggtccatttatccaatggttacaagatgattacaggtgctgctccattaaagaaaggtgatgttgtttctaccaaagctgaaatcaaagctgttttgaaccagccaagtgggaagctagttgaagttgttggtaccatttaccgtgaaggtaacccagttatggaagttacttctcaattcttgtaccgtggtgaatacaacgactactgcaacacattccaaaaagttactgaaaccccagttcaagttgcattcaagtcagccaaggatcttgctgtgttgagatctaaagaatgggtcccatttggaaaaggatgttcagtttgtgttttgacttttagatgtgaatccacctacaaattcaagtctgctaacgtttactcatccatcaaaactactggtcaggttcttttggaattgcctaccaaagaagttattcaagttggatctgttgactatgaagctggtacctcatatggtaatccagttaccgattacttgtccagaaacggtaaaacgattgaagagtctgttatttttgaaaatgccattcctttgtcttctggtgaagagttgacttcaaaagctcctgaaaccaacgagccatatgctattgtgtctggtgattacaatccaattcacgtttcaagagtttttgctgcttatgctaaattgcaaggtactatcactcatggactgtactcgtatgcttcgaccagagcattgattgaagaatgggctgccaacaatgttgccgcaagagttagagaattcaagtgtgatttcgttggtatggtattgccaaatgatactttgcaaactaccatggaacatgttggtatgatcaatggacgtaagatcatcaaggttgaaactagaaatgttgaaactgagcttccagttttgattggggaagctgaaattgaacaaccaacaacaacctatgttttcactggtcaaggttctcaagaacaaggtatgggtatggagttgtacaactcttctgaggttgctcgtgaagtttgggacaaagctgacagacactttgtcaataactatggtttctctattttggatattgttcaaaacaatccaaatgaattgactatccactttggcggtgccaaaggtagagctattagagacaactatattggtatgatgtttgaaactattggtgaagatggtgctttgaagtcggaaaagattttcaaggatatcgatgagactactacttcttacacatttgtttcaccaactggtttgttatcagcaactcaattcacccaacctgcattgactttaatggagaaagctgcttatgaagatatcaaatctaagggtttgattccatctgacatcatgtttgctggtcactctcttggtgaatattctgcattgtcgtcgttggctaatgtcatgccaattgagtctttggttgatgttgtgttttacagaggtatgactatgcaagttgctgttccaagagatgaattgggtagatccaattacggtatggtggctgtcaacccaagcagagttagtgccacatttgacgatagtgccttgagatttgttgttgacgaagttgctaacaagactaaatggttattggaaattgtcaactacaatgtcgaaaaccaacagtatgttgctgctggtgacttgagagcattagatactttgaccaatgttttgaatgtgttgaagattaacaagattgatattgtcaagttgcaagaacaaatgagcattgaaaaagttaaggaacacttgtacgaaattgttgacgaattgctgccaagtcgttggccaaaccgcaacctattgacttggaaagaggatttgctgtcattccattgnaagggtatttctgttccattccattcttcgtacttgatgtctggtgttaaaccattccaaagattcttgtgcaagaagattccaaaatcgtccgtcaagcctcaagatttgattggtaaatatattcctaacttgactgccaaaccatttgaattgaccaaagagtatttccaatcagtttatgatttgactaaatcggaaaaaatcaagagtattttagataactgggaacaatacgaataa

SEQ ID NO: 6120 - DNA, 3780 bp, Candida albicans
atggatataccaccaaaaccaactcttaaggcaattaagaaatttagaactttggatgaaataaaatatgccatgaaacatgttttccaagatgctcaattaggtttagcaggacatagaaaattagtggtaattttgaaaaatgtatttaaaaaagccattgaattaaatcaaattaatttctttgccatgtgttttactaaattgttatctaaagtattacctttgaaaagaggagttttggcaggtgatagaatagtcaaattttgttatctgtttgttaatggtcttgtaaaagatgccaatgaagaaaaacgttccaaagaagaagaaaaagaagaaaaagacaaagacaaagacaaagatacgaatgaaagtgataaaaatgaagaagatcaggaagatcaagaaggagaaggagatcaagaaactccaatttcggaattcatatcatatttgataaaatatttattgagtgggatagaggctaaagataaactggttcgttatcgtgttgtacaaacattagcatacttggttgaattcttgaccgagatacacgagaataatacattggaagcgttatatactttattaagtaataggctacaagataaagagctgtcgatacgtattcaagctgttgtggcattatcacattttcaattatttgaatttagtattgaaggtgatactggagaatttgaggatgaattaatatcaagtaaccaaattcagaataaattgataaattccattcaaaatgatgatagtccagaagtcagacgtgcagcattaatgaatttggttaaaacacaagatacaataccgattttacttgagcgagccagagattccaattctattaatagaagattggtttattctaaaatagctcgtgaattaataactgatttggatgatcttgaatttgaagatagggaatttttattaaaatgggggttaaatgatcgtgatgaaactgttaaagcagccgccactaaaatgcttaccatttattggtatcaatctgtcaatgaagatttattagaattaattgatcaattaaatgtcaagagtgctatagctgaacaggccatattagcattttttaaaaataaaccagaagttcttgaaactattaaaattgatgaatcatattggaaaaatctaactacagaaaaggcattcttgatgaggacgttttatcaatattgtaatgagaatcaattacatgctttaatggatgccaatttccctgaattacttgatttgtcaataacattagaaaagtatttgtcagtgaggttgaaaacaataaatgaaaatgaaaatttaattaagacatgggaaacttataatgccaagattgacgaattagataatcaaatatttagtcttgaaaaccagatttccagaataaatactgatgccgataatttccgtaaaagtttatctaacattgaagaagatattattgaaatcaatattgctaaggatttgttcaaaaagagaattaaacaattgaaaaacaacagtgggaatctagaagatttgattactgaagaaaatcaagagattgctgatcaaatcaaggatttcctgatggaagatttgcaacaacaattggaagatatcaataaaaatcttgatgaaattgaacatcaaccagaagatataacggctaaattagaagaacttcaaacaaaatatgattcttgtattagggcgcttgaacccactagtgaattgaaaattcagactgttcaaatctttgaacaagaacatgaaaatgattgtatcccctttgtagatgctttgaaagaattagaattcattattaatcaattattattaattgttaaagattttgattatggagatgaaatggcaagaagaaaattgttacatataataagaatgacattaactgaagataaattacctgatgggttaatatcagtggcacttagagtattacgagcactttctataaatgaaaaagattttgtttccatggcggtagaaataattactgatattcgtgattctcgagatgatgaagagttccattctgctgccgctacatttgatgatgatgatgatgatattttgggaaatggtgatgatgaatctcaacaatcatcatcactcagtgcagtaacaaagaagcgaagaattgaaccagatatgccaccagatgatattgtgttaagatgtcttaccatgacacaatatgtattggaagtaattactcatagtttggatgatcatctttcattgagttctatttacagtggtattgtcaattatgctattcagaatgaatcgaaaaagaaattatatcttgctgggttaacttgtttaggactttattctttaattgattccaaaattgccagaattgcaactacaacattattactggcaatgagaagtaatggtgaagaagtgaaagagattggaatgaaagctattgtggatatattggcaatttatggtatgagtattcttgataaatcatctaaatacaaatattcaagaatgtttttcaaagttttaaattcatttgatgcaccaaaattacaatgcattgtcgctgaaggattatgcaaattgtttttagccgatattttgtacaagactgacaaacggagtttatttggaaatgctattcaaggtggtggtggtggtggtggtggtggtaatgatgatccaactaccaccaatgacgatgaaactgaagaagaaacagatcgagagcatgaaaagcatttatttgaagcgattgtacttatttatttcaaccccaacaccaaatcaaatcaagaattacaacaaattttgtcattttgtattccagtttatgccttttctcatataaatcatcaaatcaatttagctgcagttagtggtgatgttatttatcgacttttcactgaaacagaaacagaattatcaccaagtgttataatccctcaattaatatcatggtgtgatcctcgaaatttagttaaattatcgaatgaggaaataaatcaagcaacatcacatttatggcaatgtgtttatttattacaagtggttgaacaagtagatgctcgtaatgttaaaagatgcatcattaacaatttgaataaatttcatataacggaagaattagaatcaaatcaattacaagctttaattaaagctcttgatgctacagttgaattatttactaataatgaagataaccctaattttatcttggataaaccaacaaagaagaattttgatacttttattgaatcaataaagaataaattggaaattgctcaaaaaagagaagaaaatgaactgattaaaagtggtacaaattcaatattacatgaattagatgatttagatattggacctggagagagtagtcaaatatctataaaatcagaaacaaaaagaagagatctggatcgatctctgcaagttagtaaaaccacatcaccagaaacttcagaaaatgaagatgaagaggatgataatgaggaggaggagcaagagaagaagaaaagttttactgatggaaaaaataaacttgaactaaaggcagataagtcaatcacatttaaagctgaagacaagagggaagggtcagttgaaatagatcatggtcaagaacaagttctagttgaatcaaagaaagccattgatagtaatgttgaagattctttaaaagatatagataagtttttagaagaagcagatgatgttgattatggtgatatttcaatggatgattga

SEQ ID NO: 6121 - DNA, 3363 bp, Candida albicans
atggattaccaagatctactacataaaataataaaggagttccactcactcaaagagttcaaaccatgggatagcagtgttttgtatgagacgttacttcgatcagtattaactactttgatcgaacttttgggcatagacaatccacccagttatctacacctcaccaccaacaatgatagtataggtgatttgaaaataaaatactatggaaatgcattaagcaagtcaatcaacggtcatagcatgttgcaatatcttgaatcaaagcatgtatcgatattacaggccgtggttgagattattaatacgcgatcatatagaatcaaagagtcttattctgctgttttcaaagacgtttctcatttatttgaaaaactactaaaggaaagatatgaagctgaatctaatctagaggattatatattgcagtgcttgatgtacgagacccaattttaccaaggaattgttgataatgttttaactgccgatgacaccgaaaaattggctagttttttggggacacgactatctgaagaagattcgatgtttagctatagggatatagattatccactagagttaaacattaataatgaatctcttgaaaagatatataaaattttcttaggagtcattggcaccaaaagattcgatatcaaggaggttgcgtctgctgttgttggtgtgtataaacgacaccagagaatagatcattttgaaaagttggattcagatgagattttgggaaagtttttcagaaatatattgccacaactgttccagagtgtgacaaataaggttttccgggaatttcacaaagaggtagatgacccaccatcggacgtgctagaccagctagataatattgttgatgactttattgcggttggaattgaaggggtagatttgggctttccggctttgttcagacactacataaaattcatgaacgaaatttttcccactgtggtcgaggatgctgaccgcgattttgttgcaagaattaatagtttaattgctcaagtcttggagtttaaagacgatgaaaaatcctgtgatatcaatcaagtggtatctgaatttgtttcattacaaagtttgctacttaagaataactatctttcaccatctacattattgatgcgtgcaagtactcacgattactataaaaatttacagatcgtgaaaataacctttgatggatggaatgagaattcaaagaggatattgaaattggagaacagcggctttttacaaagcaagacattgccaaagtatttaaaattatggtactcaaaaagtatgaagttgaatgaattatgtaaccgggtagatgaattttataatggagaactttgtcggaaagtttggcattgttggaggtcacaacaaaatgtctataatctcaaaatggaggttgctgacaaacgtctcctaaatcaatattatatcaaatggcggaaaaaagagaaggatatgaaagccaatcttactatagctgttgaatttgatcattttcatttattggataaaagctttaagatattgaaagggtacttcaacttggccaaaaacagtgatgtcctcgcaatgtctctatttcagtcatttgaggagaatcgcgacagccgtatcaagttgaagtattttcaatactggaatctaaaaatatctgatagagtacacggcttgactatgaaattagagaagtttcaccaagttaaggacaaatttgtattaggaaattattttgaaacatggtattataaacataatctcgttgaaaagtctaacaatttcgtttctgctaaagatttgcagttattggcgaaaacttttaccaatacatggctaaagaaattcttgctatacaagaaagcattcaaaattgaagaagagcttggcgctgatttaaaaaggaaaacttttgatagatggaaggaggctgtccaacttgaagtcaaggcaaaggagtttcacgagcgacatcttctagagactgcatttcatgaatggaagttgaaactgattttgataagtaacagggcttcatttgatcatattttggtacagcgttgctttcaaacttggtccgtggaaataaaacttcgagaactacagcaaaaacaagatactcgtttggtagtgaacatttttcaaaaatggagaaccaggcaactcgagctagcaaaacttgacgaaaagtctcaggcattttatgaatcaaatatgaaacatttggtagtgcaaaaatggaatgtcgaaaacagtaatattggactattagagaaacgagcagatcgatttttcattcgaagatttttcatccagaaatggcaatcaaaaatgacaaagtatgaggacatcactgtttatcacttggaagatgaaattgccacaaaattagcctacaaagtatggaggcagagatattttgaaaactacgaagaaaagttggataacttacttgaaacaatggataccagtgcagcagatactgtacgctgttcgcgatatttcggtctatggcgggccaaattgcagaccgtgaagcaaattgaagaacgcgtatctacgtctgtagcacctagtgttgcaatacattttaaaaactggcacgtcaagagccagcagaagcaagagttattggaaaatgccttgcagtttgaagaaataaacttgtcgcgttttcttctcatttggtttcagcgtctacaagaagtgagtcagttggaagatcaggcagaggacttattggctcaaactaatttcaatttactacgtaatgctgttcataaatggtctatgctctacaacaaaaacatcaagcgacataaacaattgtgtgaggattttatagcaagaaaagagacggcaaaagtcagatctatttttgatttatggctatacaagatcaaagaaatcgaagccaataccaccatcataagcaatccttcacctctttccaaaagatttcagcatcaaagagagatgggcttgacccctcaaaagaaaaactctcctaccaaagtttttacccccaccacttccaaagatccgagtccaactaaactccaagaaactacccaaagaatgagaaaccagaacattagtgctttgagggagcattttggaagggcacgggcatcgtctacacctaaaaagttatctcctgtccggctctcgtatactaatattccttccaatcttcggccgcaactgccaccaaaattcgatgattcagatattgctactgccaagagtttgggtcgtatcagacccatggtgtttccaatagatgatcaagcaaatttttcacctatggatagaacaaaattacaatctagaaatgctatgtag

SEQ ID NO: 6122 - DNA, 2526 bp, Candida albicans
atggcacccaaagactctgctagtattgatgttggatatcccatcatgggaatcaaattcctcaacaacaagactattcttgtagctggtggtggaggagaaggtaacaatgggattcctaataagattactgcaatcaaatccagctttaaggtgaaagatcccaatagaaaattgcaacggtttagagaaatcacgttgccttcaaatgaagattcgccacaatgtatagacaccgctaaattagttggcgaaaacaagtttaatgtggtacttggttgcaaccagagttcacaattgatcaagtccatgaatatccacaataatatcagaaagtatgaatataccaatgaagagcatttgcgatttgtagatgctgcccaattcgaagcagagattaatggagacgcagacgactacccaaagattgtgagattggcacaaaacaacaatgtgggttgttttataacatcaaccgttccatcttcaatttatattttcaatccggaaactttggagttgaattataaatttatacctgacaagagtatcgaaataaaagattttgtgttgagtccacatgatgggaattcattgtgttatattacatcaaattcgattaatgttgttgcaacaaataacaccagtaatgttgagttgtcgtccgtttctataccaaatttggataaacaattaaagggctacgtgttgtccaaagttagatatatcaatagtgatgaattattacttgcggcaacatttgttggtaaaaagggtgcggtcttgttgagactaaatattccaaataagaaaatcatccaaacacaagtgatctctaaaaaaggcgtgattgtgtcgatggatgtttctcccaccaaagtagctgtggccaccaacgacttggcattaacattgatcaatttgtcaaacttaaaagtgttaaaagctttcaaaaacttacatccttgggcaattacaagtgtgagcttttctccatccggagacaaagtagctagtgccctggcaagtgggactttagttgtttctaaaatttcctcgataggcagatcaggtggctctggttggtttttgctggtgttacttgctttagtttttggtattgttgctattcttgcagctgtatttcctgactttgttactcaattgactggtcaatcgtcattgatcgattacaaatcttttgattttgctgttccagtttcgattgtggctgaaaggtactcatctattgtttcccaattcttggatactaaatccactacagtttcaagcgtcgaatctaaaattttggataatacaccaagcgctgaaattccaaccactgagtctacatttttgcagtctgtcgatcatcaagatccaattattgattcctccaaggttgaatctgcagatgtggaaaccaccgttattgaggttgtcgttgaggagaccacggttgtggagaactcttctgttgaaacctccattattccatccgaggtcagagaagcacatactgaaaagtcatcatctattgaagaatcacatgttccatcaacttttattgaatcagatgttgtgtcttcgacagaaacatcctcttctgttgaatctttggtggaatcacctgttgttgaatcttcagaggaagaaactccaattgttgaatcttcacccgtacagcctcctattatcgaagaatcatcttctttcgaattagaattcctggagtcaactactgagactcaagttgttcaatcatctattattgaatctgttgaggaagaatcgtcacttgaaggaactacgatcatagaatcgcaatctgtggaaccacctgttgttgaatcttccctgagtgagatatcatctgttgaatcattttcttcagaacctgcgaatgtggagtcatcatctactgcatcttccgtcttagaatcttcatctgttcaagcttcatatattgaatctccatcggttgaatcattgcctgttgaatccatatctgtcgaatctccatccactgaatcaccaactgctgagtctatgtctgttggtgtttcatctactgaggtttcatctagcgagtctccatctactgatccatcttctgagtctccatcccctgatgtttcaactgttgaatcagctagggtcgagtcctcttctgttgaaaatccatctgtcgaaacttcatctgttgaaaccccttctactgaaaccccttctactgaaactccacttactgaaacttcatctactgaaccatcatccgctgaaattcccgctgttgaatctattagtctggaatctttatctgttgaaactccgtctatagaagtatcatcagcagaatctcattctgttgaacccaatgtcactgagtctttgtctgttcaaagctcaactgctgaatccgataccgctccttcatcaatcacatcggcaagtaccaagaaagcaagagtaaaaagaacaattaccaaaaaggttactagaactatcaaaaaagatgaattgtaa

SEQ ID NO: 6123 - DNA, 2061 bp, Candida albicans
atgtcgttatcaggaatggaagaatttgaaactgttcttaaagagatttcaactttaccagcaccaggtgtatctggtactcgtattaaaagattgactgatattgctgtcaaagaaatgaatgcggaaaacgagccaaagttaatttctattttgtattctcaatgtaaagcaaattcatcaactaataagttgggaacattatatgttgttgactccatagtccgaaaatttatcgaggaagccaataagaaaaatgaagctttagtgcctagtgcgcctgaaggaacatacgcatctgctgttttcaaaataaatgaactagtcgaatcgttagttgatgatgcgatggaattactgattaatccttctataaacataaaaattggcaaattgattgacatttgggctagactggaaactttctcgcctgaagtcattcagaacattagatacaaacattttaaatctactaccccacctggttcgcctccaaaggcaagtattgctctagttaaaccagatgcaacagaaggtacaaaagagtcgagcagtattttgctggcgttggcttctttggcaaaagccagtgggtcaaataatgaaacaccacctagctcccaatcctcttcaaccaacaacaacagcaacaacagcaacagcaacagcaacgaaagtggatccaatgccactaatattttgtctcagttgtctgctcttggtggtaatagtagtaatactggtagtgcttcttcacaaccaccaagtcaacaacaatactcttcttaccctcaaggtggtgggcaagcaggtaatgatgatcttcttaatatgctacaacaaatgcaaggtggtggtacacctacaggagcttcaccagcgtcaccagttgttggttctaacgaagctagaggaggtccaactgctgaatttgatagaagacgtggtcgcgacaatgaatatggctctcaatatggtagaagaaatagatcaagatcacctaagcgtggatcaaacacttgggtgagatcacctccaagttcatcggtgcaagctcttcaacagaatatgcaaaatttgagacaacagaagcaagtaaatcatggatatccacaaaatacaaatggacaagttgatcaagggtttgttccaccaaatgctatgggtggtgaattaaatttaccgggaactccacattatcgtccaagaacagtgcaatttgactccactattccacaaggcactgtaaaagtgttatctagaacattatttttaggaggtgttccaagaaatatggatgaaaggtctttagctcaagtgttacgaccatacgctgaaattcaatcggttattttgaacagtgagaaaaaacacgcttttgttaaagtctattctaggagagaagccgaacaagttattacttcgtttaacaaagatggtgctttgccattgagaacaagatggggagttggtttcggaccaagagattgctgtaattatcaacacggtatatcgattattccaattcaaagattaactgaagctgataaaaactggattgttcatgctcaatggggtggtactgggggtcagccaatactgagtggtatggttgttgatgaaccagatattgaaattggctcagggttatcatccaaggcgatgtcgaaaaagatgccaactaattctgctagaaatggtcctaagtcaaatagaccgggcgaaccagatgaagaatacgtgaagactacattgataccccaaggagatattcaaatgactcacggtgctcaacctcagtttaatacgtatctgcaatcgtcagtcaatcctttgcaagggttatttggaaataatccacaacaacaacaacaaccaccaccaccaccacaaccaccacaaccacaacaacctcctatgcaatttcctgcagggttccctcaaatgcctcctcaacaacctggtcagcctggtatgaataataatgaagcaatggcaatgcttgctgcaatgatgcaaactatgcaacagcaacaacagcaacaacacccacctcaataa

SEQ ID NO: 6124 - DNA, 2520 bp, Candida albicans
atgccgagtgctatatcagaatggtcattatccatggccacaggaggtaaaccattatatttaccttgttcacaaacaactgcatctgtctattctcaagatggtcgatatgtgatcattgcattaactcatcaattgagagtatatttcatttcaacccgacaatgtattaaaactattgatttggatttacatgacttagctgatttgaaaatagatgttactaatggaaatcaagtgttattatttaaaacttctggagaaatattaactgtgaattggaaagataaagtttctcaaccaataatatctaccattgatataaataaaactcaatcgggtacatcattgccgttattatcagtcatatcagttaaacatttattttttattattgtaactggtagaaaagaaaagaaaaaggggactccacatactcgttatataaattattttgatagaaatctggaatcacttgttccaataattgaagttgccaattcaataaatttcgcaacttctttggataatacaaaaattgcattcattaccagtggtaacgaaatagacttgtttgatttatcagggatattcaatgtcgacagtattgaaaatttgtcagataacgatatcgtcaaagaaactattccatttgtgtatcgatcaccggtgacatcaatagccgtgtccaacgattctatgattgctatcggtacatctgctggtccaattcaaatagtctatggtgggttgaccactccaaaacctcaacgagttttgaaatggcatcttgatcaagtcaaaggattaatgttcactgctgataacaattatttactttctggtggtatggaaaaagtattagtattctggcaattggatactgaaaagatacagtttttgccaagattgaatggggtgattgataagatttctattgataattataagaatgattatatttctttacagttgaatgttgatcctttggacaataattatgaaatcttggtgttatcagcagttgatttagtttctcgtttgtctgtcaatactgtaagacctaaatttgcttataatattgccaccaccctttctaaaacgaaaaagaaattcattaaaagctcatctgattttgataaattcaagattagatacgattacaccagtcagtttgaaatccatccaaagactaaaagtatgtattttcccaatggagctttgattcaatcatttgatttattcaaaaatgaacagaatttcattcagcatggtgctccagtattgggtgtgggtaaagtcagatcagaaactaaattattggatcctttggttacattattgaaattcactcatgatggagaatggatgtgtacatttgatgaattcaccaacactgaagttgacagtttattattgaaaaatgaaaaacaatatgcattgaaattttggaaatatgttggccataaagagaatgcaaccagtggaattaataataacaataagactggtcattgggaattgactacaaagattattgatcctcatggaactaatcctattttagccatgatcccagctccaacttcttatttcaatggattggcattcttaactgccgatgataaaggtggtttgagaatttggagacctagtgtacccaaagaacaatataaaaccacttcagcaaggtctcagcaaactgcatggacacttagaaaatccagggctccaagtgcattgtcatcagatgccgttgctttaagttggtctgatgacaattcattgattttccttgcccatgaatgttccattcttaccattgattctaagagctttgaagaaattcctgatttcaaaattccttcattatcaggatcaagagtaagatcattaaacatggtcaataataatcttatagtgttatctaaaaccagaatatcatcatttgatttaatcacgggggaattgactagtttggtagccaaagtgaacaccaccattggtgctaagaatttaattgctattgatccaattaaaagattaatatgtttggcattaaattattattctgaagaaaacaataccctttccataaaatccaaaatcttaatttttaaaccaaatcaattaaaacctatttgtgttcaattgcatgagcaaggtgtttcatcgattcgttatttcaactcatcatttgtatttgttgatttggattgtcgagtcggtacaatttacagtaatgaggaaataactgaaacaattgaacttggtttaactcaagaaatcaacaatatgctaatagctgcacaagctactgctgatgtaataaacgatagaaatgtaaagactacagttggacatcaaaatggaaacaaggaaggagaaatggatatagacaacagtatggcatatgctgcaaaagtggttgatcttcacactttccaaccaatatttcaaaatattgaaggtgtacaagttgaatcattatttgaacgtatagttaacgtacttaaatag

SEQ ID NO: 6125 - DNA, 2238 bp, Candida albicans
atggctaaacgaaaaagtaaacaacaagatttagaaaaaaagaagaaacttaaacaaagtcaagatgaacaattatctacgggattgttcaataatgttggacagggacaacaccaaggggatgatgacgatgaagaaggtgatgaaatagattgggataatcaagagatggattatgaattaataccaaggaaaatcaccaccaagaaaacaattgaagcattaccaattaaaaaatccgacgggactatagaaagagttgttagagaagttgaagaagaagaagaggaagaggaagaggaagagcctgaagaagagcctgaattagaaaatgatgttgaaaatgaaccatcaaaacaagaaaacaaagaaaataaagaggagggggatattgataccgacgacacattaacaccacaagaaaagttaattcaaacaaaagaagaaattgcagaattaggatcaaaattaattgaagatcctgaagaaaatatagtttgtcttactagattaagaaaaatgtctgaatcgaaaaatttcatgacatctcaattatcaatattagcattaataccaatttttaaatctcttgctccatcttataagataagaccattaactgatactgaaaaaagagaaaaagttagtcgtgaaatagctaaattaagaaattttgaacaaaatttagtgataaattataaagcttacattgaattattaacaaaatatctgaaaatatcatattcaaattctatgaataataataaaatcactagtgatcaattgaaacgaggcaatattgctttaaaagcagccactgaactttgtttaagttcattaagacattttaatttccgagaagaattatttactattattattaaacgattaaataaaaaacctcaacatcaacaagattatccaatatttataaaatctttaagagttttagaaactttattaaaagatgatgctgaacatggagatattacttttgatataataaaaatcatgacaaaatcaattaaagataaaaaattccgagttgatgaatcagttgttaatgtttttttatcaatttcattattagaagattatgatcctaataataataataataataaagatgatcatcacaacaccactttaaaaccaaaattaaaaaaaaaggatcgaattcatttatctaaaaaagaacggaaagctcgtaaagaaagaaaagaaattgaagaagaaatacaaaaggctgaacaagccatcactgttgaacaacgagaaaaatatcaagctcaagtattaaaaatggtattaactttatatctagaaatattaaaagcagggtcgtctagttcacaattaattgatggtgatggtaaaaaaactaaaaatgatgctagtttgttaatgggggcggttttagaaggattatcaagatttggtcaaatgtcaaatttagatttattaggtgattttttggaagtattaagagaaattatgaccgatatcattgaagaacataaacaaagtggtgataatgataatgataatgataatgatgatgaaagtggggggatgtatagtgggaatgaattaagaacaatattattatgtattgccacatcattttcattagtattaaatcataattctatggggaaattacctatggcaatagatttaagtaaatttgtttccacattatatattattttaaccgatttggcattagatcctgatttagaatttagtcataaaacattaagattagctgatccattatcatcatcatcattatcaaatgaattagagaataataaaccagcagttaatgtttcaactaaagcagaattattattaagatgtcttgattttatttttttccgatcgaaaaatggtactatacctcgagcaacagcatttattaaacgattatatatattaacattacaaacaccagagaaaactagtttggccaatttgaaatttattggtaaattaatgaatagatatggtgaaaatattaaaggattatggaacaccgaagaaagaattagtggtgaaggaaattatattttaggaattgaacgacaaaataaagataaagatgttgaattagaacgaagtaatagtggtgcagcaacattatgggaaaatgtattattagataaacattattcaataatgattaaagatggttcaaggtcgttaatgaaaaatagtaaagccaacaccaattga

SEQ ID NO: 6126 - DNA, 2397 bp, Candida albicans
atgccacccataggatcatctgatcaattcattcaccaaattacacagcaatttgtgtttcaacgtttatggactggaaatgcaacaaccccagaattagcaccagcttcaaccccctacaatcgattggtatgccgtaataataccgatttattctatgcaactggcaatattgttcgatgctgcacaattagtcccaatcataaaaactacaagctatttaaggttgagaatcaattctatgaagtagcttctttgttgatgaataaatcgggtaccttgttagcgatcatcggagaagagcagatcgatgttgtgtcattacccaccaatgttatgaaaagtagtggtatttatgttgatggtgcatcgttcaagattaagaatttaagaggtaaggtaagaaaatgtgtttggcaaacagttgcggcaaatgattcaacattagtagtgttgactgataattcacagattcaagcttatgatttgacaaaatctttagaggtccctgtgattgatgttgatttgaaaagatatgccaactttgcaaatgaggaagccatttctattgcatttgggtcgtctaaaaatttagctggtggattgactttgtatgtctcaacattgtcaaacatctatgctatttatccattcagtgcaaaatttggtaatttggccaccactaaagaagcaattgatatagctttggaagatacaaaagcagctatggagttgattcaggaaaaataccctgtaaacttattagacacggcaactagtactttgaataaagcagctatccgacaatttgagtattacctgcatttcaaatcccagttaagtggcgcgttaccaataattaaggaagtaagagacactcatacaaataatccatacgagctttttgttgttagtcagaccttaagtgattggactggttacagcttacaaggtcccctcatttcaagtaatgctggtataaaggatttagcttcaattggtgacaatgatttagttagtatacttgctagtatcgatgctaatgctacagttacttactatgctcaacttgcacccatgttgatgaagtacaacataatgagtatagcaagtgaaggtgcaccaagtgaatcaagccaaacagtttgcaaaccaaagtatgttaaaccaaaaagaggatttggtttcatagacaactctgaggaagaggagaaagcattggtaaaactgaaacaatcccaggaaagcttttggaaagaagaattgacaagcttggatcttttgcaaagggacaagcttccagttgatgaaaatgatgatgctactggcttcccaactttctttggagaaattgattctaatagattcagtgtttgtgtgaattccaacaaattggttttagttgattgttcttgggtgaagacttttgtagacgatcttaaagaagacaaaatagattccgtgtcgatcacagcaaattatggtattacctccacagaaaaagaacccatcacggcatttgcatatataaaagacgatgtcacttctactggagaatacttgactgtttgcagaagtaaacttgtcaatgacatggaagttatccagattgtggataaggcagtgagcgatcaggaagaagccacaagcactttactattgacagaagagccatataaggaattaccattaacatacattccatctaaacctttcagtgagttggaagaagaattagaaagtttggggaagatcaatattggcgctgatgttaaaggcaatgaggatttgaatagtttgactgttgatagtctttcaagtttgaactctttatctgtgaggacaattcaagttgcatcctcctatacaatatttggtattaaattgcaatcaagaattttagccaatttggattctttgaaggaacaattacatatacttgaaaaggttaagaatgagtatgatggagatcaaaaagaccacacagaaaaattggaaaagttgacagagaaacaagcaaaattagatgaacgtatgataaaattacagcaaaagatatttgatggtttgaataagttcaagcaagacaagacgttgccaatatctgaggcagaaagaaattggttcaaagaaatcaactctatcaatgcattagtgaattcttctacagataatgaagtcgggttgacaaaaaagattgagaatttatcgttacaagttcgttccattattgaagatagtggaaaggagaagaaaccaaaattgactgctgtggaacagttagaattggaaaaacgattaagcaaattaaagaactggttacagcgtgaagacaagtctattgaaattttaaaagacaaacttactaattcattaaaattaataggtgacaaatag

SEQ ID NO: 6127 - DNA, 3813 bp, Candida albicans
  misc_feature (1020)..(1020): n=g, a, t or c
atgaatcaacatcaggatcaatcatcaatgcctaatggcaaacaacagcatgaggtgacggaactgtcatctccaccggaaatacctcatataaccgccaatatgattccattatcaaatataattaaatactatacacaagaagcatacaaacaattaactaccgccattgagaatttatcaatgaatgtgaatgaagaatcagatatcaaacgtaaaaagtatttcttgaatgttattattaatttacgacaagatttcattaaagtttacacattgattaaatgggcaagtatatctaaagatgtttccaaatttattgatttattaaattggttcagaatccaagaatttcattttgaaaatttaatttttcaattaaatgctttaactgggtataattcagcaaaattacccaatagtgatatcataacggcattagaagtgctatatcacggcagaccaaaattgccatcttacaactatatcaaatcggataatttgagtccacagaaaattttagaaacgttaaatgatttgaatttggtattaatgacaagatttgctcttatggataatatacctaaacgatttgattacgaaattaaagatggacgtgcgtatattcgagttagcaatgaatttgaagtaagtatcaccgttggtaatgatttgattattgacaatcccgaagaatattataaatcgccgttttatttcattgattttaagtttttatttggcgctaatccagaatctgggttaatcacttttaatgatgataaaatttcaactaaattaccaacgagtctgcataagaaattggaaaaactagtgaatcaaacattattgacgcgtggattacaaggattatacgaattattacataaatattccaattcatttaaaatttatcttcttgccaaacaatttcaaactttattaattaattctcgatggagaggtaatttccaaattaattatcaaactaataaatcattgatagtcataaattattgntctcaacattacttatcgagaaattggaattcatttattgaattaggtattgatactcattctaatttgaattatcgttggtttaaaaatggtcagtattgttttggtgatcaaggaaataatgaattggataaaattttccatcttcaaagaagaaatagcaacaatggtgtgacaacatcttcgaacaccatttcgactagcgccatgattgccggaattagaagatcaacagaattatccaatgaaacagctatagtggatgacaatgacaatgataataatgatactaacaataccggtgaaactgaaaatgaggatttaaatgttgatttgattttgaatgttgttgttaaccaacatgccaaatccataatgtcagaaatttattcacaattattgactcgattttccgaaactgatgtatcgatggtcagtcctcatcaattgttattgcaaatatctcctaagaaatctacagtttttgcaataaaccctttaactggatttttctattttattgatccaactccaattcaaacgtatatcactaagaagatcaattcaccaccaccaccaacactatcacaagttagcattaaacaatcatttataccggagagtgatatgattagctatgtgattgatcaaattattcaattgagattagaagttttcaataaggaagtcaatactaaattggctacgactgcatggatcaataatggtattatcaaattaagcgaccatgaattgagtaaattaactcaatttttaatccaaaacgaagaacaggaaggtgatgataatgaagaagacagtagtactaatacaagacttgactcagtactccagagtttcaaagtgcaattttatcgtcgtaaaaactggccaagttcatggtttttaattaatatgattagtggggttaccactaaaagtttttggtgggtagcaagaattaaatcaattagtggagattggaagattcaatgggcacaaattattaagtttcatggagataatgccaagcaagaattgtcgccaaatgaaagcaaagtatttgacaaaccaaaaagaactgttgattgtagtattgaatctgaacaattgaattttgaatttttcaaaacattatccacattatcatcgaatttgattcttgaccacatgatattagaagagttacaagtgagaagtatcaaatttattaaacttgattgggaaactattgatgacaataagatattcctgaaattcaaacaaaaccatgatatatcgttgaaaaggaaaaattcccacaatatcaatattgatgttaatgttgatgttgcggataatactagtaccaccaccaatactaaatatattcgagcacccaaattgaaatatgaatctatgtttttgatttacaatgataaattgttaccaatttataattcagcgacgattttatttttaaaaattgaacttgttgaatcgaataagatgtatttaaaattatttggtaatttacgaaatttacagatcaaaaacacatcggaagatatacagaaattgcatttaaacattgatgaagctaatcaatattttgagattgataatacagttgatttatcgactgttattaatgaacccaaaacattattattgaatttgattttcaatacattgaataaattgaattccttaattaaaatattggatcaattgaacaagagcaatgttacagttttagacaattctatggataacattactattaatattaaggacaaatataatgataataatgataaattaattattattaaattaccagaacaagctactgattcaattcaattgttgatgaagaatggctctactactactactgatgaaattgatttgagaaacaacaatattttggaatttgaattgattttgaaatttttgaatcaatatttacgagagagtcaactgaataatcataatcgtcaacaaatcagcatcatcaaaataatccaatatttgacagaaattaatccaattttacaatcaacaaaggctattaatcaacaattagcagaacttaaacggataaatagtaccaacaacaacaacaataatgctaaaagaaggagtattcttaaattatcaaatggattatataaattatatttcaatttaaacattattagtttgactcatttacaattggtttttttcatgaattcaaatactggatcaaatttgaaaaagattcaaagagataaaattatgatcaatttgagtttgattaaatttgatagattttctaaaccaaatggaaattttcaagatagtactaatggtcatttaattaaaatatcattcaaagatagtttgataaatgaaaatttaaaatttaaaaatttatttgaaattatctttaaaaatattaatgaattgttaatcaccaaatcaaaacaaattaaatcattaaaccaaactgagaagcaacaacaacaaccattaaagcaagaggataatagtgacagtgccataattaaaaaagaatcgcaatcaattgaagatgatttacttgattttggtgaatatgataatgatattaagcctcaacaacaagaaccacaacaaaatgaaaaagaaaattcaaagactacatcaaaagaaaatgaaacagttagacctgatgatatattgattaaattaaattatgactatttattatcaatgaataatttacaattaatgataaatgaaatcacaaaaagttgttttcaatatttacaacaacagcaagagtaa

SEQ ID NO: 6128 - DNA, 1989 bp, Candida albicans
atgacaacgtttagtagggagttcacaaaggtgtatgattaccaagcacttttcaacaaagttttgaacaaacgtttgagatttgtgcttaatatcaatctaatattgtccttcattctagcattagtgtacgaatttatgcccatggcgaattcaaattcagatacaaatcattcgatttggcaaagcattcctgtattaatatgtgtcaaagttccaaccattttttttactttaagtgtaattcgtcaagtccgtaaacagtttttgattgttgaatattctcatcataaaacattgggagcacaaatttattattcaattttatccttccaatttttgatcaattggttggggtatttgatatctagctggctaatattcggagtggtgataattttcaccctgaaattgaaatttaacttgtcagattactatatattatctaaagagtatcgtcaacatccaataattaatgatcaatgggtttactattggtataatcctgttttcatttcatttttttacacttgcaatcaattgattttccaaagacaacgtttaaattttgaaattggtaatatcagaaataaacctcaaaattatttatttaagcacctccctattttgttgggtaattctttgggtttgaatttatttgtgatatcgttgactcctataacttattggttagttaagtattatatttataagagtttcattttgatcatattgattttcagattggatagtgatattattcctaataataacactagttggataacatatttacagttgagttatttgtcgtttttcattattttaagctgggaagttgtcaatcatgttttcaatgtatatgcgactattgggtgtcttgatggcaacaaaccaatttcgagctacagtactgatccactaaattgtttattatctgggttacgtgacgtggaccctaactatcaattgagtagattgactgctttccaagaattggcatatttagcaactagctcagataaggaggcgctcaaattacgtttcaaaattttcagttttcgttctaagaaattgaacgcctggacttcattattggaagagtgtgcattggtaatcaaggaaactacagatagaatcaattatagaagcacaagtgatttgaatgcattaaaaagtttagagatttctggacttaaaggcaatatcaataactaccgtgatagtaaacaaaattcagacaatttatttgggaactcgtttattaacactagtcctgttgacaaaaagtcactggaactaattaagaaatatcaagccaatacatctaccactgctgagggaaaaaagaaatccaataaagtacaagaactcattggactgattcaacattttgcctcacagttttttggaaattttcaaaaaacaattggtgacgccaatcaattacaagaaaaatttgcaaaactgtttaacttcaaacactatttgcaaatttatcagaattataaagataaattcttacaaacctatattgggatatttttcagaatcactataaaaagagacaatgaatcaagaataatcaaccccatcaatttctgcaactcaattattgctatatcaaacttgttacaatattcaattgaagaggataagtacgatatcattagtaatgatgacgtttgtaaagttctaaatttacttgagaaaccaattagagccacaacaaactatattgattatttaccagcatcggtttatgtgccgcaaaattctcaacctaaaaagcatagttgcttgatggggaaattacacgatttatctatgcatgagttttatgaaatctgtattcgatttaatgggaaattaaatgatttgatattgacaccaagaacttataaattggttaaatgggtaattgataaggaaattgctattcagcaagaaattcaaaaacaaaaacatcagaagctaaatttaaagtaa

SEQ ID NO: 6129 - DNA, 4122 bp, Candida albicans
atgaggagattaaagattgggattcgaccccaattaatcataattgtttgttttgcatcgttgttttcattattgattttgggtattgtaacaggaatatattttagtgccaatttaaaaaacctacgattagaaagactactagttatatcccaattaaaaagaactcaagtacaacaagcaatacaatatattgcctatcaagtgatgacagtatcggaagtagattcattaacggttccattatcaaattatcgagctggtaataattccaaagcagttttcctggaagcacaaaattatttacaacaatatgtccttaccactgattcatttactgcagctagattatatgatttggatttacaagttgtagcatctagttttgataatatgactttaatttctgaaagtgctcaagatgtggtttatcctttacaaccaaatagatcaatgcctccggtattaggtactccactgggattatattttactggtcccattgccaataattcggataattttaattcaaggtattttatggggatcaccgtaccggtgctatcgaatagttcgattattttactgcagccatcaatttcagggtatctcaccattgtagcagcagcagaatccattcgttcagcattaaattctactagtgaagatgattatcaagctatggcagtacaaccagtatatggagatcctcaaaaggggatagataatctactgcaaaatgcttataatggagacaatgaagttattggattcaaattagttttcccagtggaaaatagtttattagaagctggtaccatatataatatcaattcatcttcatcgatgaaaactgcattagcatcaaattccggtacagcaactggcgtcaaatcattttttggtaaaaaagttgccattggattttcaagaataagtgttcaagataatttaaattggtcaattgttattgttcaatctaattctgttttcaatgggcccgctaataaactacgaaaaataactataggcgttgtcattggaattggagcattcatgtgttttgttacattcccgttggcagtttggtttatacggccgattacaaaattaaaagaggccacagaagccattaccaaatacaaaaaggaaaaattaaatagtgtcaacagtaatagccccacttctggttctggttctggttctggatctggttctggatcaagagctaattcagattcttcagcagaccaatcactactgttagatacggggaaacgaaatagtataaattcgtcatcattttcatcaagttattctacggggataagactaccggcaagaataccaagatcgaaaaaaatatttaaagatgaattgactgaattatcagaagcatttaatattatgacagaagaattagataaacaatatactcatttagaggatcgagtgaaattacgtacaaaagaattggaagcatctaaaattcaagccgaagcagctaatgaagctaaaactgttttcattgctaatatatctcatgaattacgtacacccttaaatggtatattaggtatgacctcaattgccatggaagaagaagatcctaatgtaattcatgattcattaaagttaattcatcgatctggagaattattattacatattttaactgaattattaacatattctaaaaatactttaaatcgatcaaaattagaaaaatctaatttccaaattttagaaattgtttatcaagttcgatcaatttttaataaattagctcatgatcaaagagttaattttaaaattttagtgaaaccaaatattttccgaaaattaatcatttatggagattctaatcgaattattcaaattgttatgaatttagtatctaattcattaaaatttactcctgtggatggatcagtatcggtttcatttaaattgttaggtgaatatgatcatgaaaggtctaaaaaattggattataaaaaagtttgtattttgaatgattctagtagtagtacagtagcagtgccacctccaacacctccatcagatactaaacctaacccaaaacctaaatccacacctacacctaaaccagatcccacaagactgcatttggttgatcataataatagactggccaatactacatcaccattaacacctgtacggaaaccaacaaatcaaaccaaaaataagagtattaccaataatgtaactaaacagaatatgaaaatcagaaagaaaaagaaaaccaacaaaaacctccacaacaacaacaataacaacaaaaatgataatagtgattttcttatgaatagaagattaagcggttcccataaatttaaatataccaatgacgaagaattaagtcctacagcaatagaaaaaaatattgataaatatttaacttcatctgctgatagtgataatattagtgtaactacgttatcaactgtacaatatgaaaccaccatatttgaatcacaatttaaatcaaaaccattacctgctttgcccgtagatgcaaaaccacaagtatcgggaaaaatagatgagaatgacgttaatgacgaagaccctagtggtggcagtattaaggatgatgatagcgaggataccataaatgaaaagcaaggtattctgtcatcgccttcttcttcttcttcctccaatgaaaagcaagagaatctgcctcggtcaaatgattctacaacggtgactgttacacgaccacgtcataatatgatgcctctggctcaagatttcaaaagttatccaacatttgataaaaaaccagaatatgattctaatatgtctaataatgaaattgttaaaaataatcgagtatatagaattcgaaatatgtatcaaccaaaagtttgggtaattcagattgaagttacagatacagggccaggtattgaacccgcattacaagaaaaagtatttgaaccatttgttcaaggtgatcaaacattatcaagaagttatggtggtacgggattaggattaagtatatgtcgacaattagccacaatgatgcatggaactttaactttaaaatcaaccattggtaaaggttcaactttcacattaactttaccattaccacaaactggagaaattatggtacctcctgaagatatggcagaattttgtgaagatgaatttaacccagcagcaaaaattaatagaaaagttgcatttgaagatggtgatattgatactgagtcacaacaacaagaaaatccctcatcagaagaagatacgcaaggggatcgaaacgttcaatcatccacttcatcgtcaccaccaaattcttcatccactgattcagcattacctgcttcagactcgtctgatattggaggtaccaataaatctaaaacaacaagtcatggcaacaataaaaatatcaatgcaaagaaacgaatcataacaaattcttctgcatcttcaactaagggtaccaagagacacaccaataatgatggtggtggtggtgttaatggtaatcatagtgatgataataaagaccttacccttacaattgataaaccactgttatttactcgaggatcaactggtactgccaattccggtaccacttcatctcattccgataaaaaaatactttatccaacacctacaactactacaacaacaacaacaacaacagaccatactactgtattggatgatatatcacatttgagagttttagtagctgaagataatctggtgaatcaagaagttatttcacggatgttaaaacaaggaggaataactaatcttactatggcatgtaatggagctaaagccattgattttgttaaagaatcaattgaaaataatgaaaattttgatttaatatttatggatgttcaaatgcctgaagttgatggattaaaagctacaaaaatgattagaaaaaatttacaatataataaaccaattattgccttaacagcatttgctgatgaaagtaatgttaaagaatgtttgaattctggtatgagtggatttattacaaaaccaattagtaaaactaatataaagaaagttcttgttgaatttttatcaaatgaagtcgttacttcataa

SEQ ID NO: 6130 - DNA, 1314 bp, Candida albicans
atgtcacgacaagattggttcaatggtccagtatgcgggactgataattgtcgatcacgactttatcgaaatcaggatgggttgacaatatgtcaatttggacatgtgttggaaggggcggtggagtacaatgatgatccagacgcaggtgggatagttcaaactagaagattgaatacaatttcctttgatgaaagagggcatttgtcaagtgccgtggtttccaattcacaaaccatcaaaacaaaactgaatcgattatatggtgaagatgccatggccttgtattatagatgtttgcaaattttattgaaaaaggaattgaaaatttttattgacttatttttcagtgaaggtataagacatgatttgacgttgattgtgaaaaataattgggtgaaattattatcgactgatgaactacaagaaaaccatccgaaacgacaagtcatagacacgctagatttgatttgcatgatttatatttcggcccttcagctacaagcataccccatctacattccagatttgatagataatataaagttaaacacaattccatatataagaacactccatttaattcctaagcacatgctagatcaattgcctactgtgtatcataatagattgcaaccttattctttaccagagaacagtcagatctataaacgtttacaaacaactgggtggagaactgttggagcaactttaagaataccgacaagcttttatttcccgtttatattccgaatattatctgaacatttcttattggttaacgcagttgatttatttgtgtctgcatttaacgtactaaaatctaccccgtcctttgaaattaattttcgaatcaaaaagtttattcaaaagtttccagagatttatatttcttctgtattgataatactaatcagggaaaattttcgtagtaacgacaatttaaagccatggttatatgaattgaacaaatatgaattaaacaacgagtacaattcgggcggtacgtcattactaaattggtcggacgataaggtggataaatactgtgactggatatatgataaccttataccaaagaaagctaagttgaacgatgacaatacagaagctttgaatactatggaaaagaggttgttccagatctttagcctagacaatgatatagagaacacagcacccgaaacaaatgaaactccaatgtacttagccttaagaagtataatgaatggctctgaattgaaggaaagtggtggtttacaagaattggatacgaaacttgatgcaaagttatcaaatatattgggtctttaa

SEQ ID NO: 6131 - DNA, 2466 bp, Candida albicans
atgagtagatctcaaatagttgcgttattgaaggagcaacttgataccattaaacagaagaaatcaatcaaactaaactccttaccatctaccaccaaaccgtcagaattgatagatacaatatatgagtttttaactagttttgatccgtctttggagttagagaaattggcaatacaaaacagccaactcattgaactaccatcaaacttccacaaaattgcatcgtctataaagtatttggatttacaccagaattcaatttcgtatattcctcaagattttttttatgggtttgatagtttggagatcttggatttagcatccaatgacttggagttcttgcctgactcgttgtcttctgttaccacgttgaaggtaatttctatcaaagataacagtttcaagtacatatcgccacagcttggagaattaccaaatttgaacttaatcgaagtgtcagggaatccatcactacttccttcgaacgacataattcgagcattccagcaacaaaaacctgatctagattgggtgggagagttgaagaattatttggtcgccaatagaatgctcattaatctgaaaattcaagaggccatggaaaagtcgtcgcaaaaacgacaacaagtaccaaaagattcgacaccagaaacgtctcaaaccacgagtgatccagtaatagcgagaagtaaatccggatctatatcgacctcgttttcatcaaaggcatcacggagaatggggttgattatcaagaaatcagacgaaaacagtgacggatcctccaaagaagatgccaataatagtttaatctctggggctgtaccggatcatgtaaccacagaaggcattcctcatgttgactcaccaacagacatctccttccagttgccaaagtcgccacctacatctacaccaggaacaaccacaccgtcaacacaaactgcacctgctacgacatctactaataagaaccttggcgtgacactgacatcatcggcacgaggacgttcaaacacttttaaagagatcgatcggatgcttgaaaaaagcgaaagtgtcgatactgaacgtaaatccaatgcttatttcaaacgtttgtccaccttgcaagaacttcctggtgatgagttatcggagtattctcaacccaaaaaacccgcagcagagggcaaacaagcttctggaaatgtgtcaaaatctaataacaccgctgccagcgaaaattccccagccaaacctcaacagcaaagtaaattgcacatcaatccagtcattattagagtatctcgtaaaatccttttttcatttagtgaactacattcatccattcgtagattcacttcgttttgctcagataaaaaagtcacgatgaaaatggtgtcatacctttatagcacaaaatctaacattgattctttagtggagaatcttgaaatcatggaagaatccggcgacaattcagaacaaatagtgcaagctttacacaattgcataggctcgttcaaatcgattatgaagcttctccatgagaatatccagtcttttgttggaaatatagaggtttgctttataagaatggtctatttatctgtgtttggatcgttgaatgaactacaaaatgcttacttgttgttgtgtcctaaagcaagtgcaaagtcttcttcaactgaaatgaaacagaagctttccatcaatactactacggatgcagatgaaaagttgtacagtacaattgaactggctactagcagcacacagacaatattttccgagttgaataaaacaatcaataaaggtgcaacagctagtgccaacggaggggtagttcacccaacagtcgcttccaagataaaagaactagccaaggtgtgtgcagcatcactagacattataaaaagactcaatacaaagctaataactatcagaaataatccatcggtcaccacgaaaaagttgtttgctgaggatattaatcaatttatcaaaactgttgtccagactttagctgcagttaaggcaatagttaaagatatacctattctcgacgacattcgtgcatcaatgtccaatttgacaaagactgcaaaggaggtgacatactttttagaggtttcgtcgtacaaatcattgcttccggactcttcgtccactggtgtctctcaacaaccacaattgatctcagtccctagtgtatcaaacttgtttacaccagtagctgcacatgcaccttccttacccactagcggaggacaagcagctagcaatggaccaaccccaatacgcaatccttcaacaaattcctccataactacgacaacattagtgcttcctccattaaacttacaagaaagtgctccgttgactgctccggtacaatcttctggtcaaatgtttgcaaaacacggacttaatccatttgatgggttgattatggcaagaaataatgataatcaaggttag

SEQ ID NO: 6132 - DNA, 1911 bp, Candida albicans
atgccaccaaagagaaagttaagtcaatcttcagctgagtcctcgccagtgaaaaaatccactgaagagtctcaaaatgtagctgtcacacattcaccacaagaatacctagactttttcacgtcaactttggatatggtgtttaatttgagagatggcgatgaagaattggcacctccatttatcaagctaccatctaagaaattctatccggattactaccatctcataaagcaacctatatcattaaatgaaataggaaagcgaattaaaactagatattctggtacttcatcgagagagtttcttaatgactttgaattgttgttagaaaatgcgagcacctataattctccggattcttggattgttgaaagtgctagaaaaattgtaaattttgttgagggtcaagttgaggaatttgagagcacttcttcaaccaatttatcaacaaataaagcagccgatgacaccaagaaaccaaggataaaattaaagctcaaactgataaaaaaacaaacagagacagaaacggggccagagtttgggtcattagtaaaagttagaaaagaagaaccattaatcacctttggcaggttggcagaattttgtataaatatattgaatgatgtcataaatcataagttcccaaatcagggagttttgagtggcccctttttggaagaagtcgatacggaggtttacaccgattatttggactatgttaccaaaccaatgtctctcaacacgattttatcgaatttggagaagaaaaaactattgagtcctaaatttccattattagacaacttgaaaaagtttcatgacaccactacattgattttctccaacgcaaaggcttacaacaatgaggattcacaaatttatcaagatgcggttattttggaagagtattttaatgaacaatataacaaattaaaatccagaatcgaactggaagcagataaattgcatccatcgacaccaaaactaaaacttaaccttggtagaattggtccctctgtagcagaacctcaattgaagaaaaagagaaagagatccatcaagcaagaattcccagaagaacaaattcacgaagaagaagaagacatcgacataactcaatcagagcccaccaatgcggatacacaagatattgatgagccagctgattctaaagagctcgacacatctaaatcacgggaagtcgttactgagcgaaacgcccctaataccatgggtaagactttgccgttactccctgaacagaattcaataattcaagaatcagtgatattttcatcaccggccgtgtcaactaatattaccaagtttgtccaacaaaaatcatcacaaccagcaacaattttgtctagggaccaagaaatcaaaaaatcattatttccaactcaacctggaaacccaattgctacccttttttcctataaagttccagcaaatgggtacactgaccaagcccataccatcgctttaccaaacggagccctgccctttgtatcatttaaagtgtcactacacaatttgttgtaccaactcaaagagccagaattgattgatgatcatggaattttaagtcatcttggtaatgacgatttccaatgtaaactatctgttaatgaggaagaagtttctaatgttgctgattgtttcaaggaagaaaagggggaagatgttgttttaggggtgcaatatgatgtcaaattgagttacggattgaatgttttgtcttttaattgtaaggttgctcctgctttaagtaagaaaatcaaaaacaccttcattgaagaagaggaagtagcaaggagacacacaaggcatcaattgcaacaaatgcaaaaaacatgggatgttgaaacaataactttttatgttgtctgtatctcaggatga

SEQ ID NO: 6133 - DNA, 1455 bp, Candida albicans
  misc_feature (237)..(237): n=g, a, t or c
  misc_feature (348)..(348): n=g, a, t or c
atgccgttgtataaagaagacaattttttaataatatatcctggatccaaacatacattatttttgtttggattatccgatacattatcaccaccccaatttaaaatcccatcaattgtttatcaagattccatcactaaacaatatcaagccactaataatagtgaaaatgctactgaagaaatatatccaattattgaatcgaaaattgttaatttagatggatttcattattgntctaaactctatttacaaagggggattgccaatcatccaaccattaccatgaatcaaatccccatggcattaattactcccaagttaatcatgggcaagacaatcaattgntatattactaaatatgtcattgaatatttagaaatcaccgcatttaatattattgatttgagtctagctgcaacttttggagttggtcaactgacaaattctactgttgtttatgttgatgatgaaaatattcaaattgtccccgttgttggatatcaagcgattaaatttgcagggaaattaattaaaaatgaaggtagtataactatatctcgagaattaaaacaaaatttacctaatttaacatctcaacaaattgaagatttgaaaaattccgatatttttgaagttgtaattgatcaacaaggaatggtattagattatatcaaagatattacaaaaacaaacaatgatgaagataatgaattcgatgttgccaaaatcgtcactgaaaatcaaaatggtatcccagaagccattataagtaatacacctactgaacaacaacaaaaagaacaacaagattcaaataaaccaaataaagaattggaaaaaaattatttcattgattctaaaactcaagaaaaaatttggattggtaaagaaagattttccgggacgaataatcttgttaaattgatctcatcatcgatatattcatcattattatcaattcctgatatcgacaaaagacaagattgttatgataatattatattagttggatcaattttcaaaattccaggattgaaagaagcagtattaattaaattaaatcaagattatttagttaaagaacctaatgctattgatcaatcaattaatgatcctggtgtcaacactgccattttgaaatatcaacaaagcacaaccataaatgattataatgaaggtggtagtggtgataataacaattctaattctaattctaattcaaatcaagttcctaattctatcaaattggtgaaatatcctgattatttcccggaatggaaaaaaccaaaggaaaaaggtggatcttggcatgatgtttatttcttgggtggtcaaatttatagtaaacaaatttattctggtagttctcatcatcatggtaaagaattgtttgttggaagtgatatgtatgaagaaagaggtcctcaaagtatttgggatgccagcatttaa

SEQ ID NO: 6134 - DNA, 2751 bp, Candida albicans
atggattgtttgaagaaatatttatcgcaactattattactagttcctccagggacttttgaagttggatccaatgaaagagtcggatactcaattcttagtattttagaggggaaatcagaacatttatttgaagtgagtgatttcaaagaaatattgcatttgcctcaattacagaatattttacagaaatactcatcgaacaacttaattgatgtcttaaacgaatatgttgaccagttgatagctttactggataagtactttggcaaagatagtgtcatctgtttgcagatattgggtgttgcatgtttgcagtcatttgtccaagcaaattttactggtccaccagtttcgaaaacagcacagtctttgtggttcccaaatgagaataccgaaaacgtacaggctgaagctattaaattgcttagcattgaaggacaacaagcgtacgacttgatgcaagaacctctctttttagtgatgtcagaattgattttcgaaagattgttacaaacacctcctcaattatcccttttcagcagaagcgatccaaccaaactcttggattttgttaccgaagcctccaaagtccaagacccaattactgcttctctttgttggtggaaagtcagaggattgcaagtacatttatcagtagtatcggaaccaccgagcatcatactgtcggtttgtggaataattctcaactcatcattagtgaatgcaattgcaccaccagacttccccgagttgcaaaaactagttcagattcagtttcttttggaagtttctagaattcatattcattcgtcaacagagcacgctgccgtctcaccattaatccaggccaaaaagttgtcggacttccaattgctactttccggagcaaaggcaaaaagaacaaagtttcagaattttttcacatcaaacttgattgtgctagcaaagagtagccaaaacactctctacgaagttgaaacttccaccccagaaagttgtcagttggattctgatttgttattagaaaaaccacaatacgaatctttagaggatcttgagattgaaattgaacaagacactaaaagaataagatatgattcctttttgttacaacaaaataccgctgacgaaaaattgcttcccttagctatgaaacaggaagatattccagcagatttgaaagatcttgacccaaacaaccagccagccttgaataatctcgataacttgcagttgttgttaagactaaccgtgttgaaacaaacatcgccagcaagcgatccattggtagaggaggaactttctgcattggtgggtcgtgttttatacgcaagtgcaggtaaagtgaattggtcgattttttcacgtgccttatgggaacggtctttgctcgaaacaaacaagtctagaactattgaaagaggtatactccaaatgacttctttgattgaagaaatgggaattaagattaaaaccagaattatacccgaatcgatggaggaggacaccagtgccactacagcactgagattgagattcattcatttgctacctcttctaccccaatgggctatggatgccaagcttgcagaaaagtacatgtctttgggagttttacgatcggctatagagatttacgaaagattgcacatgctgtgtgaggcggcattgtgctatgcagcagtggacaacgaaagagaagcagagaatattatactacaacgtcttgcaacccatcctgaggacgctagagccatctcgattttgggtgatatccgacaagatccttcattatgggagaaagcatgggaagttggccattatgcaaaggcaaaggcatctttgtcacactattattattcgccaccaagaaaagatattgacttagcgatcaagcacatgtttgattgtctcacagtcaacccattgagctatgaaaattggtatttctatggatgttgtggtcttgaatcgggtcaatttgaattggcctcagaagcatttacacgatgtgtttctcttgacgattccaactcctatgcgtggtctaatttggccagtgcccttttgaaattggacaagaccaaacctgcgttcaatgctttgaaaaaagccattagaagcggtggcgaaagtcgcaagtcttggagaatttatgaaaactacgttaatgtggctgccaagctccatgaatggaatgatgtattgcaagggtgtcgtgaattgattgagattagaaaaaacgaaggcgataccgccattgacattcctgttttggaaaaactagttgaaattcttgtatccgaagaattccctggtgacggagagagattgtcgcactaccaactgtcttgtattgatttggtttgcaatgtgttgccaaaggtaataacttcatcagcgcgatgctggagaatagttgctagagtcgaattgtggagaaaaagaccatgggcagcattggaatgtcacgaaaaggcatacagagttatggtgcataacccagagttggaatccagtgaaactatttggaacgagattgtcgatgcttgtgaagatttggtgagtgcgtttgaatcactcggtgagttaccggggaaacatggagctggtgacttggtatgtaaagactggaagtacaaggccagaactacggtgaggtcattaatgtctaaaggtaaagatatgtgggaagactctcctggctgggagagactacaaaacatgaagagagatttatctaattaa

SEQ ID NO: 6135 - DNA, 1119 bp, Candida albicans
atgggagttatactgttttatttaataggacaattattatatttaatcagaaagaaatacactactacttatagacaacaacaacaataccaatacaatatggattcaaaacattctacttcttcttcttcttctggctcattagctactagaatttccaattcaggtcctatttctatagcagcctattgtctttcatctattttaatgacagtcaccaataaatatgttttatcgggttttagttttaatttgaattttttcttattagcagtccaatcaattgtttgtattgttactattggttcattaaaatcattaaatatcattacttatagacaattcaataaagatgaagctaaaaaatggtcaccaattgcatttttattagttgctatgatttatacttcttccaaagctttacaatatttaagtatccccgtttatactattttcaaaaatttaaccattattttaattgcttatggtgaagtcatttggtttggtggtaaagttactactatggctttgagttcatttttattaatggttttatcctcggtcattgcttattatggtgataatgctgctgttaaatctcatgatgatgcctttgcattatatttaggatatttttggatgttgaccaattgttttgcttcagctgcttttgttttaattatgagaaaaagaattaaattgactaattttaaagattttgatactatgtattataataatttattatcaattcctattttgttgatttgttcatttatttttgaagattggtctagtgctaatgtttcattgaattcccctgctgataatagagtcacgaccattacggcaatgaatttaaagtggggcttcaacccgttggtatttcttagtgttcggcctgggtgtgttagagtcacttcttctcctacttattctagggttggagcattgaataaattaccaattcccttatcaggattaatattttttgaccctgctgtcaatttttggtcggtttcttctattttcgtgggttttggtgcaggattagtttatgctgttgctaaccaaaaccagcaaaaggagcaatctcaccaattaccaccccctaaatag

SEQ ID NO: 6136 - DNA, 2001 bp, Candida albicans
  misc_feature (668)..(668): n=g, a, t or c
atggctagaaagaagtctgctgccaaaaaggcaagagaagctgctgctgctgctgctgctactgctactaccaccaactcaactgagaatgccaaagatataaaatttgaaaaaccatcattacaaaaattaccccaaaataagaaaactttatcaccttccaaagagtctgatcttgattccgatgaatccttatcatcatcatcatcatcagaggaagaagatgaatatggagatttaattactgaagatgttgaaacggggattaatcaagttttacaaaccattaaaactgatccatcaaaattattagatccaaatgtcaaattttttgaagatcccgaactgattgaatataatgaaacaacaaagaaacataaaccattatatataactgattataatcgtatgcaattattagaaaaagcaaaaggggaaaaacaccatgaagatgaggaaggagaaaatgggtctgttccatttgatgatcaaaaaactattgatggacaaaaatcatttgttacggttcaaaaagaagaaaaagatcaacttttagcagaaattaaaaaggcatttgatgaagatgtcgaggatgatagtgatagtgatagtgatagtgatgagaaagagcaagcagagaacaatgatgacgacgattttttccgtanagaaggaagggaaacgatccaaaatgaagaagataaagaagaaattgctgttggtggtagtggatcaaatttacctgatccaaatcaagatcaacaaggatttttaaatgcttttcttgatctgaaagcatggatacctaaaaagggagataaaataatcaatttagataaaattgatcaaactgatgaagaagaatttgatgatgccgttgaaaaatttgaaaatgcttataatttccgttatgaagatcctaatggaggagcagaaattattagttatgcacgtaatcaagcaacattaagacgactgaaaactaatctgcgtaaaagacaacgtgaaaaacgacaagaattaaaacgtcaagaaaatgaaattgttcaagatttattgaagaaaaagaaaactgctactgttaataaagttatggatcgattaagtaaaattaaacaagccattggcggtgacaacataaatgttgatgataaaactattgaaagagtatttggagattctttattaaatgatgattttgatgatgctgattgggataataaaatggcagaaatttttaatgaacaatattatgaagctgaattggaaaaaccaacttgggatgatgatgatgatgaaattatgggtggtgatataaacagtgatgaagaagacgaagaagaacaagaagaggaagaggaagaaaaagaagaggataatgcatctgaggaaccaccacataaaaaatccaggaaagatttacttaaagctaaaaaatctgccaaaaaagaaaaacaatctcttaaagaaaaagctcaagcaatagtagaagctaatacattaaaattaatggatgaaattgaagaagaaagaggtcgtcaacgagaaaatgaacatggtaaagaaatcaaatttaaatatcgtgaagtatcaccagaaacttttggtttaactactagagatattatattagctgatgataaacaattgaataatttcattagtattaaaaaatttgctccttatcgtcctaaagaattaagattaaaagataaacggaaatataccaagaagaaacatttacaagaatggaaaaaagaaacatttaaaaatttgaaattacctaaagaaattgaacaaaatggaaatgatgataatagtaatgaaatttggattcctaatgaagatggatttgatacaaattattcaaacaagggtaaaaatgataagaaaaagcacaacaagtcaaagtcaaagacaaagacaaagtcaaagacaaagacaaagaagcatgatgataaactggaaaataagaatgatttgaagatatcatcaaaataa

SEQ ID NO: 6137 - DNA, 963 bp, Candida albicans
atggtacaccacaaagtcactattattggatccggtccagctgcccacactgctgctatttacttggccagagcagaaattaaaccaactttatacgaaggtatgttggctaatggtattgctgctggtggtcaattgactactaccactgatattgaaaatttcccaggtttcccaaatggtattggaggatctgaattgatggaaaaaatgaaggaacaatcacaaagatttggtactgaaatcatcactgaaaccatctccaaagttgatttctctaaaagaccttttaaattatggactgaatggaatgaagatgcagaaccaatcactactgatgccgttatcattgctactggtgcctctgccaagagaatgcatttaccaggggaagacacttattggcaacaaggtatttctgcctgtgctgtttgtgacggcgctgttccaattttcagaaacaacccattagctgtgattggtggtggtgattcagcttgtgaagaagccattttcttgaccaaatatgcttctaaagtgtttttattggttagaagagacgttttaagagcttcgacaattatgcaaaagagagttaccaacaatgaaaaaattgaagtattatggaacactgaagctttggaagctaaaggtgatggtaaattattgaaatcattaagaattgtcaacaacaaaaccaaggaagaaaaagatttacaagtcaatgggttattctacgccattggtcacatcccagccaccaagatttttgctgaccaactcaagaccgacgaagctggttacattcaaaccactccaggaacagcttctacttccattgaaggtgtgtttgcagctggtgatgttcaagataaaatttatagacaagccattacttctgctggtagtggatgtatggctgctttggaatgtgaaaaattcatttccgaacaagaagcttag

SEQ ID NO: 6138 - DNA, 2463 bp, Candida albicans
  misc_feature (950)..(950): n=g, a, t or c
atgagcgattcaacgttatctaagatcagtgaattgatcaaattggaagatgatttggccaagataggcagtattagacagcaatttcttaaggagaagtcgtctgttgatgtgaagttgtcgtcgacgacgcaggtgcagattgattcgattatgaagaatttagcgaatttacacaacaccatggagagactcgattcaataaaggggagtattggggaggtgcagcaagtgcatgatagtacgattggggaggtgagggagtacgatacgatcaagaagatgactatggtgaaccagtttttacaccaagtggggagtttgtatgaggatatttctgggttcaagagatttgttgaggcattgaacgaggagatccaaagggagttgcaggggttgcagaatgacttgaagtacccgttaccgaactttgttaggatccaccatgcatatactcaggcaaggaattttgttgactatttggaggtgtactcgacgaggttgtcggacgatttacagtcgattgtgtataaggttgtttcgccaatcaagactacgatcaagttgtttgatgagttgctcaatgaagggatccagagtttgactgaggtgaccaaggaaggcaatttcgagtgttttttcaatattttgggagtggtcacatgggaggagaatgaggatttgaaggtgtcgttgctcaagagtttggatatggtttcggcggaccccaagacggtgaactacaagacgtttcgtggccggagcagaaactatatgaagtttttctttgacaagctgcggacccatctatatgagatatttgatctgtgtgtggagtactatgggaacgacaagatacttgtgtatgacgggttgtactggttagaggatgagatgcggtttgtgtataccacgttggacaagctattttcctgcgaaattggggtgtngagtgcgtttatccaggatgtgtattatacccggttgcacgattttaccatggaccttattaataccgacccgccagccgaagacttgctcaagatcttgctgtatgactcgaaatatggtgcgtttgtgtctgagtttggcgttaagcaaaagtcgataattggcgaagagcttaagaatagtgtgttggacgattatttgaataatattacgaccaaaatgaaggagtggaatgataatttgattcgacaagagacgaaaacatttaccgaaagaccgaatgcgccggacatttaccctattgagctgacgattgaagatttggatgctgataagaatgaggtgcagctcacgatcgaccttaatgtgtatgttatgccagatttcaagattgcgttgacgatgcttaaagagcaggctgatgttgctgcagagtccaagtactcgaggattttggtggaggtaattgagagctggtcagaatgctatgtcaagcgtattgccaattttagggaagtggttgaagacgagatggaccggtacatgtcggtgtttaacaatgaagggtacttgattaaggagagtaaggcgaaacggttgttcaggaagaagccgccggtggttgacattgacagtttgtcgccagaagagcagagcaagctcctgagggaggggttgattgagtacttggcggcgttggcgaactcgttggacattagtgatgatataatgaacgacaaatttgccccgacatacaaagagaaggtgcacaccaactaccatgcacggattggtaaggcgtttgatgttgcgtcggagagttctaacgcgttgatttctgagatattgagtgcaatcaccgacataatcatgaacgatttgacgccggcgttgtgcaagttgtttacgaaaaagtggtatgaagatggacactcgcaaacgggcgagccgacgcttgctaagcttgtggtagagacgattagcgagtatatgggagagatgagacagtactgtgtgtacccggtctaccagttgttgtttgttatttttttggataattttattcctacgtatattagaattggctatgaaaatatcttgcatggcgatgggaaaaagattgatccacaggccaccaaaaagtataaatcgtttagcgaaggtattaccagggatattgaaatcttttttagtggccttgacccgttgtttaccaggaaagatggggaatacttttttgcgtcgcttaatgccattgagttgttgctggtattggggacagttgaagttaacaatatcaaagatgtgtggcagcacgaggtgctacccaagttttatgattgttcggtagagtatattcgtggggtatgtttgtgtcgtaaggatatggataagtcggagaccaagcaattggtgctgcagttgcaggaaattaaggttgagtaccaccaggccgtgcagccgccggacgtgccaatatttacgttgaacgattttgagtttcaggattag

SEQ ID NO: 6139 - DNA, 1788 bp, Candida albicans
atggatgaagtacaaatggaaacggcgagaatacaatctcccaaatcatatttatacactactttagcaaccactcatcttggagaaattgcgtcatgtataatatcaatattaatatctaatgggagattaactgctagagaaattagtaatcgtacgaaaatccctaccaaaaatatcaaatcggctttagtatcattaattcaattgaattgtatatattattggcaagaagaaaaagatcggaaattttattattcattgaaagaaactggattattattatttgtatatagtggagatattattaatcatattaaaagacaatatggagaagatggagcagaaatcattcaaaatatattgattcatggacatgttaaaattgaagattatttaacgcaatttaatcatgataaatcaatgaaaattgatcaagaaaataaatttttgaaattatttaatgataattggttaattaaattacaagattatcatttccattcattagatgatatttggaataaaatttttgaagaatgtttgaaagatacaccaagatcatcagttacttctgaaattaaacgagttgctgaagctcaagctaaagcgaaaataaaattaaatacattattagaatcaggtaccaccggaggaggtgatatctttactgaagtgaatgggatgaaaaaattgaaaccagatttggtggttacattcaatttatcacgatttcaaaaacatttacgaactaatgcatttgtcaatatggttagatcaaaaattggtgtattgacagctattgtttatgatgccgctttaaggtatattgaaaataagagtccacccatggattatccattattggatattccgggactaattaatgatcctaaagatgttaaagaatatattctttctattgaaaataaattggttaatgagaaaaaaatcaccttttcagcaagagacattcaaagacttttacctaaagatatagattttaaaaattctgtcattactccaacttttgccaaaccgaaaagaccacttgaaaatggatcatcgccaactttgaaaaaaatcaaacttgaagatggtattgcttcgtctacttccacttccacttctacttccagctcaacgtcatcaaatggtacttcgattgatttaaacactttggaacaacatttgaaattattacttaatggtaccaatacggcatttgtcaatgaaatatcacctggtaattatactattccattttcacatttaaccaacattttgaaacaaaataattttgaagcattagttaaagctacattaggagattatgcatttagaattttacgatgtgttaaatcaatgaaattatgtgatgaaaaagctatatgtaatggagcattattaaaagaaaaaaccgttagaagtgaactttatcatttaattaaagctaatataattgaaattcaagaagtccctcgtagtgctgatagagcagcttcaaaaactttttatttatttcgacataaatcaaatagtaatttcaattatttgaaaaattgtttaatttatgatatggcagaaattttaaatcgaattcaagattttaaattggaacataaaattttattagaaaaatataaattggtggaaggtcaagaagatcaatatttacttgatcgtgaattaaaattattaaatgatttacaacttcgagaaattaaaaatttggttaaatttcaaagaattaaaagtttatacagtctttatagtttagttgattaa

SEQ ID NO: 6140 - DNA, 972 bp, Candida albicans
atgctaccttttaagaaagccgatagtccatttaaatcaaacccggtatcacgagttggatcttctactcggttgaatcaattgggtaatataaaatcaaatccaactacacctaatgcagcgttatatgtcacttcatcattgaatccactgaaaaatttgcctacaaatgcagctaacgttaaactgagattacaaacacaaaaggatttagatgcatttgagcaattaccaatggtccaaaaagtcaacgaatacgaaagattactcaacgaattatcggaagccgtgtcacaattcaaaaacgatgaactacaagagaaaattggacaaattataacttgtaatgatgttttgaaacaacaaatcgaggacttgaacaaacatagaaactatagctacgaggtagacaagctatcagacagaaataaaatattagaagagaattcaaaatttatattgaaggagttagtgagttatagaaacgaactaaaaaagttaccaaaattacccaaatcggataaaatggttaatcgcaatgttgatgtagatgatattttgaaatatgcttttaaattagccaaatttaccaaggcaccagcaactgtcgccaatatgcctttccaaatacatccaaacaactatgtatggcccgctgaagattcattgagacgcggaatgttagcacaagcatctttacaagcagaagaaataatacgacacgaattgggagagacagataaggaaaactctaatgaagtgaagactgaatccaaagttgatcatgatgacgatgacgacgatgaaatggaagatgttagaatatcgaatgaaaatacaaacgatgaacaaagatctaaaccacctgcggctagtgaacatgacacaagtaagagaaaagaggaacaaaatcaacaaccagtggatcttaacttggacttgtttgatcctgacgacgaatactcagattga

SEQ ID NO: 6141 - DNA, 1359 bp, Candida albicans
atgtctaatcgattggaatcattaaatcctagaaagccagtatcttcatcttcatcttctggatcgaaatcagcggcaaaatttaaaccaaaagtagttcaaagaaagtccaaagaagaacgtgctaaagttgcacctacaatcaaacaagaacctcaaccaagacaaccattacccaatagtaggggccgtggtggcgccagaggaagaggaggacgtaataattatgctggtactcatatggtttcaaatggctttttatctgcaggtgccgtttccataggaaactcaagtggatcaaaattgggtttaacaagtgatatgatatacaatagtaatggtgatttatcatcttcatcaactccagattttatagccaatttcaaatcaaaacaaaagggatctactcctgggggtcaatctgatgaagaggatgaagacgacgatccaacaaaaattaatatgactcagaaatatcgattcaatgaagaggataccgtgttattcccagtacgtccatttagagacgatggaatcactagagcagaaaatgaaattgccacgcctgatgttgaaatcaaacaagagccaaatgatagcacggcagaaagtacaccaatgcctatttcattgactcaaagtcgagaaacaacagttaaaagtgaattaattgaagaaaaaatcgaacaaattaaagaaacaaagtcgaaactcgaaaagaaaattgctcaaggtggtgattcatttgtttcagaagaaactgataaagtcatttctgatcaccaacagatattagatattttaactgggaaatttgataagttatccaccaaaacagaagattcacatcaaaaacaacaaacacaaaaagatgacgtcgatgacattgacgttgaactagaaaatgataagactgaaataaactttgatgatcagtacgtgttatttcaacttccaaagcatttacctacttatactcaaccaccaagtgccgtgaagttggaacccggtgttgaatcagttgaagtagacgagcctgcaactgaagaaaaagaaatttcaaaacttgctacaaataattcaaagctacgtgggaaaataggaaagatcaacattcatcaatcaggcaagatcacaatagatttgggtaatgatattagattaaatgtgactaaaggtgcaccaactgatttcttgcaagaattggctcttattgaaataaaccctccgccaaaaccagaagacaatgaagaagaggatgttcaaatggtggatgatgatggtagatctataacaggaaaagttgtccgtttaggaacagttaacgataaaatcattgctacaccttgtatacagtaa

SEQ ID NO: 6142 - DNA, 2535 bp, Candida albicans
atggaacatccaccagcagctctcagaacattttcaacccaatcaacttcatctttgaattcagtaagtactgtttcgtcttcaagaattgtttctctgggcccagtcaatataaacaatttcaataaaccaagtactcccaaagaccatttattctatcgatgtgaatcactaaaacgaaaactacaaaaaatccctggcatggaaccatttttgaaccaagctttcaatcaggctgaacaactcagtgaacaacaagcattggctttggcacaggaaagaagcaatggaaatggacatagtaatggcaaacgtcatcaatcattagacggtgccatgaatagactttcagttggttctgatagtagttcgatccaaggttcattgacacgaatggccaccaatgcgtcaacgtcatctttaatcagtggtatgccaaacaacaacactttatttacgtttactgcaggggttttaccagctaatattagtgtcgatcctgctacccatctttggaaattgttccaacaaggggcccccttttgtgttcttatcaatcatatccttcctgattcccaaataccagttgtcagttctgatgacttgagaatttgcaaaaaatcagtatatgactttttaattgccgtcaagacgcaattgaattttgatgacgagaatatgttcactatatccaatgttttctccgacaatgcccaagatttaatcaagattattgatgtcattaataaactacttgctgagtactcaaatgctagtgacctgggcggtggtgatgaagatgtaaatatggatgttcaaattaccgatgaaagatcaaaagttttccgagaaattatcgaaacagaaagaaaatatgttcaagacttggaactaatgtgtaaataccgtcaagatctaattgaagccgaaaatttgtcttcagaacaaattcacttgttattcccaaatttaaatgagattattgattttcaaagacgattcctcaatgggttagaatgtaacatcaatgtacctattagatatcaaagaattggatcagtatttattcatgcttctttgggccctttcaatgcttatgaaccttggactataggacaattgacggcgattgatttgatcaacaaagaagctgctaatttgaaaaaatcgtcaagtctacttgatcctgggtttgaacttcaatcgtatatattaaagccgatccaaagattgtgtaaatacccacttttgttgaaagagttaatcaaaacatcaccagaatattcaaaacaggacccccatggcagctcgtcatcgacatcattcaatgaattattggtggctaaaactgcaatgaaagaattggcaaatcaagtcaatgaggcgcaaagacgagcagaaaatatcgaacatttggaaaaactaaaagaaagagtaggtaattggcgtgggtttaatttggatgctcaaggagaactattattccacggacaagttggggttaaagatgctgaaaatgaaaaggaatacgttgcttatctttttgaaaaaatcgtattttttttcacagaaattgatgataacaaaaaatctgataaacaggaaaagaagagcaagttttcgacaagaaagagatcaacttcatcaaatcttagttcatcgactactaatttgttggaatcaataaacaattcccgaaaggataacacattgccattggaattaaagggaagagtttatatatcggagatttataacatttccgcaccaaacactcctggctcaaccctaatcatctcatggtcaggtagaaaggaaagcggctcattcactttgagatatcgtagtgaagaagccagaaaccaatgggaaaagtgtttacgtgatttgaagactaatgaaatgaataaacaaattcataagaagttacgtgattccgacctgtcatttaatactgatgactctgccatatatgattacacgggtattagtacgtcaccagtcaatcaatcaactcaacaacaatactatgatcatcggggctctcacagttcccgccatcactcatcgtcatccactttgagtatgatgaagaataatagagttaaatctggtgatttgagtagaatatcttcaacttcaacaacattagattctttcagtaacaacttgaatgggtcaccaaataccactaatccatctttgacgtcttcagatgccaccaaaacaattccaacatttgacgttgcaattaaattgctttacaaatcgacagaattgtcagagccattgattgtcaatgcacaaattgagtataatgaccttttacagaaaattatctcccagattatcacttcgaatttggtggctgatgatgtcaatattagtcgattgagatataaagacgacgaaggagactttgtgaatttgaattcagatgatgattgggggttagtgcttgatatgttaaccagtgaagacttttaccaaacatcaagcaatgaaaaacgactggtgacagtgtgggtttcttga

SEQ ID NO: 6143 - DNA, 1770 bp, Candida albicans
atggctctcaaattaaaattgaagatgccatcatctagtgcatcaaactctccccagccaccaccaccagagtcacattcaccggaacaaccaaaactaccaaaactcaaaatcaaagcaccatccaagacaccagtttcatcgactccagactcttctatggccttaaaacgaccccaagaagaacagtcgacaggtgaaaaacccaaaaaacttaaactaagtttatccaaaaccaaagagaatggacgtcccaaaggtttgccacgagttagaattaaacctacccgaattcctggggagggatacgattctgaggcacctgatttagaagacgatcctttgattgaacaaggtataataatacgttttttaaatgactcgaatcttgatttcgtacataatgcagtggattccggtgacttgacagggttaaatgtgaaatgggtcaccaaagagaaagctatagttaatgtcaacagtatactttattcagcaagattaattgatttacctactgtaactgaaatattcaaaacagttgatagaaagaatgttttcaagacattagatatctgtcagattttgttagttttacatgttgttgatccggctaaactaaatatagataccgattttgaagttcccgaagaatttctttttaatcatccattttataaatatgtgaagaataatgaaattaaaaagaaacgaatggtactcaaagatggattattacagccatttcaggatgtgtatcgacgattccgtccaaccaaagtggaccatagagtgattttggacatagaatcaaaagtcgatgaattgatcaaacttgataatgaagcagatgagagtcattttgaattattggatagtaaaacagcacaacaatcacgatttggtaccagtgccacgccatcagctgtcaattcccctgtagcaatgaggatggaagggccagaagttgaacctggaaggtttagcaatgtacaagatcatgaaaatgaagaagatgatgaagaagaagacgaagaagattacgacgatgatgatcttcaagatgatgatatggaacttcatttggaacaagaattggaaaaagttttggatggagagttgtctgaaagtgaagtcacaatcccaacactgatggcaggtatattaacaaatgatgtcggtaatggaatatctataatgactaatggagaacagtcagaggatatcgatggagacgaacaggatgatgaagaagaggaagaggaagaagaggaagacggtgatgacgaagaagaagaggaggaggaggaagaagaagaaaatgaagaaggagatagtgaatctggaaaacaacatgttaaactattagaagaagaaatatttgaacttgagaaagcggttgcccatcatcaaaagaatttatctacagcatcgagtaaaatgttacgaatgaagttccaaaatacctacacgtcattgaaagcctctttggatctgaaaaaacgtgatttggccaaattattagatgaacaagaacaacagcaagaacagaaacaaccgaaaactacagtagatgagaaatcacaagaagcagaacatagtgtagaggcagaggcagagatagaagcacaggtagaagcagatgcagaagatggagatgaagatgaagatattgatcaaggtgacgacatgaaccaggagaataataataataatggtgatctggatattgatgaagacaatgctgatgatcttgatgatttgttttaa

SEQ ID NO: 6144 - DNA, 2226 bp, Candida albicans
atgtcagaagaagacgttaataaaagcaatgtgatggtggaatcagtagatttgaaacaagaatctgtgaagaatcaagatgatggtttagatcgtaagacattatttgttcgttcaataccgtttgaagctacatcggaagaattatctgaatttttttcacaatttgtgccagttaaacatgctgtcatagttactgataacgaaagaaaaagtagaggttttggatttgtttcattcactttagatgatgattgtttaacagcattagttgagagtagaaagacaaaattcaaagaccgtcttttaagagttgatgttgccaaaagaagggatagaaaaccacaagaaggtaatgaacgacaagaaaagagtcacgtggagccaattgagaaaagaagagcaagattgattatccgtaatttaccttggtcttgtaaaaaacccgatgagttgaaaaaaatctttagtaaatatggtgctgtttttgatgcatatattcctaagaaaaaaggtggacaaatgtgtgggtttgcctttgttattatgaagaaaaactcagctgctgaaaaggcagtcgaaggttgtcaaggattaaagattgatggtagagaagttgcagtggattttgctgttgaaaaatcgaaatgggagcaaatgaaagatgaagaagtagaggaagaagaagacaatgagagcagtgaggaagaagaagaagcagattccacaaacaaagatgagaatgatgaagaagaagaagataaggatgatgaatcagataatgatgatgctagttcagaattcgatgaattgaatgaagtgaattctgacaaagaattagacagctttgacgaggaaatggaagaaccagagaaaaaggaggagtcactgcatcctaaaaagaaaagtaacagacaagaaccattctccatttttgtgcgtaacattccatacgatgctgataccgaatctttgaaagaacatttcagcacatttggaactgtcaaatatgctttaccagttgtcgacaaagaaaccggattggccaaaggttctgcgtttgtggcatttgctaaagaagacgcttatttggactgtcttgacaatgctccaactgttgcatctacttctatgttgattgcagacgatgtgtctccatcatatgtataccaaggtagaattttgtcgattgcttcagctgttgatagagattcggctagtaaattggctgatagaaactcattaaagagaaaagaagctttgggtaaagcaccaggtgaaaaagataaaagaaacttgtttttattaaacgaaggtagaatcacagaaaattcaaaacttgctcaatatatctcaaaaactgatttagaattgagagaaaaatcatacaaattgagaacccaacaattgaagaaaaatcctactttacatttatcgttgacgagattggcaataagaaacttgcctagagccatgaatgcaaaggcattgaaagccttggggagaaaagctgttgtccaatttgccactgaggtgaaggaaggcaagagacaaccactttcaaaagaagaggtgaatagatctgttaagttcaaacattcaatttacggagctgatgccgaggaagagattgccaaatcaaagaattcaaaacataaaggtgttgttaaacaagccaaagttattatggaagtcaagggatcaggtgaaacaggtcgtagtagaggttatggttttatagaatttagagatcataaagctgctttgatgggattgagatggttaaacgctcatgaggtgtccataccagaaattttagaaggattgacagacgaagaaaagaaactcgctgagttagagggtttaaacaaaagaagactaattgttgaatttgccattgaaaatgctcaagttgtcaagagaagaagggaaaaggaaatgattgctcgtaatcagaataaagataacagcaaaaagagaaaaagagatgataacgaagaagaagacaatggtgatgcggagtctacctcaaagggtaagaaatttggatcatctgataagaaacaaaagaaagctagaaaaggttctcagaagaaaggtaacatgaataaaggagcaccaaaatcagaagagctgcaaaaagaacctacgaacaaatctggtctctcagaaaacgtgaaaaagatcattggtttgaaaagaaagagaagaaagtcaaagaagtaa

SEQ ID NO: 6145 - DNA, 2232 bp, Candida albicans
atggatattcatcgttgtagatttgttgattataccccacatacaatcacatcattagcattttctcataaatccttattaacatcattaccaactgccgatgtccgattagccgttggtagaagtaatggtgacattgaaatttggaatccaagacataattggacacacgaattgacattacccggttcaaaaggtagatctattgaagggttatgttggagttataatgaacaagatccattagaaccaccaagattattttccattggtggatcaacatatattactgaatgggatttatccacggggaggccattgataaattatgattgtaatgccgggataatatggtgtatcgatattaatccacaaaatgatcgattaacggttggatgtgatgatgggtccgttgttattgttgatatttctggaggtagaggatcattggaatatgatttgatttgtcaaagacaagatgccagagtcttgagtgtgaaatgggctaataatgaacatgttattggtggatgtgctgatggtagaattagaagttggagtagtgaaggcgaaaccaagggtagacttgtagctactatgaaagttgataaggctaaaactgaaagtactttggtgtggtctttgacagtattaccaaataagatacaatttgttagtggagattctaccggatctataaaaatttgggatttgactcgttttacattgttacaaacttttaaaatacatgatgctgatgtgttgtgtttagttcatgatgttaaagaagaaaaaattttcagtgctggtgttgatcgtaagattcatcaatttgatttactcaacagtaaaaatagttctaaatggactcatagttttaatcgtttattacattctaatgatgtcagatctttggctatatttgaaaacaaaaactataatttattagttagtggtggtgttgaaagagccatagtggtgcaaaatattgagactttttatgatggtaaatacaagaaattattgattaatcaacaacaatctaatattttgattgttccggattcaaaattagtgattttatggcaagaccaaactataaaaatatggaaagttttacctgatggtaaacatgtattaatgagcaaacttactttatctgctgatgaaaacattactagtgttgatttcaaagacaatttattggtagttgccaaaatgacgtcagtgagattttttgaattaacggagatttctgataataaattcaaaattcaaaagataagagatgataaatttgatagtttggttgaaggagccaaaattgtcaaatttattgatgctaataaagttttaattcttacccctgacgaagagttatacacatttgatattgatagtgacgaagggaaaatagaattaaacggtgagatagaattattagagtctacacaacagcaacaacaacagcaacaacgcaagaatcagcatttgttacgtatcaacaacttggtgcttactccaaataaaaagcaaattataatttcaagattcaatggatcaattgaagtatatcctattgttaatacagaaactgaggcatacgttcttacaaaattatcatcttaccctcatttaattgaatgtgtcaatgatgaaaaacttgttgttattaatgaagaaaacaaaatatttgaatttttcattaatgacaaagatggtcaattattaactccatggtctaaaagaaatagtgaatttttaccaagacaatttatatcattacaagataaacccgaaggaatgtttattcaacagaaacaagagaaattatggatttatggatcaacatggttaagttttttcgatttatcaatgaatattccaatatctaaaatttataagaatacttcgacttccaaaaaaagaaatcatgatggattatcaatgaatgaagaaattggtgaattggaagatgaaactgaagaaattatagaagcctcattaaaacaaagtgaaatagatagattaagacatcagattcaaactgaagataaagacaatcaaaataatgttgataaaactaagaaaccattttggattacagaaaaatatagaccaattatgaaagctgctaattttggtggaaatgatgatattattgttgttgaacgtccatattcttctttacaaacaggtccagcatttgatttaccaaaaattaaagtttaa

SEQ ID NO: 6146 - DNA, 1305 bp, Candida albicans
atgtctgccaatgatgagtattcttctgatgaagaatcatttgatgaatctaccaaatccaaggtccttttaggttttgttgatgcccctataataagtgatggcaaggatcctgaagataatgatcttccaacgattgaagatacctttattggaggacaaccagtgtggttgcatccagattctaaacctgctgaaaaatcattaacttgtgatgtttgtaatgggaaattggctttgtacttacaagcgtttgcacctatagatggcaaattatatgatcgggtgatctatgtatttggatgtaaaaatacaaagagttgctctggtaaaaagggaaccgttaaagtgatcagagggattatcaaggactctgaaactgtcaatagaatcaaaaaggaaaaccaggaagcattgcaaaaggatatggaagctaaattgaagttggagaaacaaaaaaagtttaatgatgaattgacaaaagatttgtttaaaaaaaaagatacaccagaggcatcaaatccatttggtgggaatagcaatccattctcaaatccatttggtctgaaccctttttctaagaaacccgaagaagaaaaagaagaggaaaaggagaaagagaaagagacaagcaaatccaaatcgtatgcagatgttgcctccaaaaatgctccaaagccaaaatcagtgaaaaaattacaagacgatcttcccgagtatcgtggattatttgtctatgttgacaatgaaaaatttaaaaagatacagcatgaccctgaattggaaaaatataaacatttgatagacaaagaagaatacgatgagctggatattctagagaaaccgagttcctctgcatcagcttcaggattagataaccctcaagctagtcagatttcaaacatgttgaatgataagtattttgaaatgttttccaacaccgtcaaacacaatcctggtcaagtcttgagatatgatcttggaggtaaaccattattatacagtggcaaagatgatgttgctaaaaaatttttggcacaaccagcaaacattcctagaccaagtttcaatccgtctagtgaacgtagatttgaattacaattgatgcctaaagcaataatggatttagaagatcttggtaacaatagaaatgtgggaattaatgatatacttaacggaatgtcatggggaactattatagtatgcactgatgaagaagatttcataccagaagaaaattttgatgctaatcaagtcggatatatagaagaatggtgtggggtccaatgggaagaaagtgtataa

SEQ ID NO: 6147 - DNA, 1551 bp, Candida albicans
atgtataaaacttgtagttattttgtagtatgtgatttttttactactgtgcacgacccccagaaaagtaaaaatgcggaaatcccaaaatcaaaacaaaaacagaaacaaaaacaaaaacagaaaatcatcttgataaacgttacccactccataatttatccacttatcgttgcaatgtcacgtcaaagtttttatgctgacccaagctcagctggtcgtcaaatgaaatatagaaaagatttgtttcccttgttggacacaagagagattaccgcgtgtttacttgaatgtgaattcaatgtaactcaagaactaatagtcaagccaaccgctgattttgtcaccaatttatttgaacagtttctcgatacttttatgggaatcccgctaggaacaataagaaagaaagctcggaaaatgtctaggataaatcctttagaatctgatcaggcaaatggcaaaccacaacaatcaccagaagaagagtttaatgataatcaagagaatgacaagacaaaagatacttttctggcattgcagttactcactcttcatagatatcttgcgatttttttttcaacatgtggtattaatgactttgtattgactgatattgcgcgtcctgatggatatagaattcgaaggattttgagtgctgtgatcaatttcattcgatttagagaggatcaatcacctaaatttgatcatttggcaaatgaatgtgaagcaacagctgacaaagttagtgaagttcaagcggaaaatagtgccaccatgcaaaaaatcaatgctatcaaagagaaattggaaatggattcagaaaatgatgaaagtaatagaaagaatttacaatatatcaattcgtacaatcgaaaattggagactaaactaagagaacttaaagtaatgcaagaaaggttaaccaaagagcacgatgattataaacaagaaaaagctttgttggctaaaaaactttacgatatcaatttcctatacaatgaaactcaagaacaagttgcaaatttgaccaaatatgctgaaaccgacttgtcgattttagtgaagataaccgaagatttgagtaatgacttatcatctatgcaaactaattataagaatttggaaaagagttatcaaaatatgggtatcactattgattcaattcaagtcaatgaaatcaatttgaaagatttattgaaattggcagaggatatcactagaaatgtggagaagcgacaaattgagggcaaaattttgaaagataatcaagataatttggatgaattaactaggaaacaaatggaattggaaggacaaatattaattgttcagaaccaattgaataaactgaataaaaagtatcaggatttaatagtacaagctgataaaaaggagtctgctgtcaaattaaagttagaggaaacaaagcaagaatttaatgatattttatccgaaaaggagaaacataatgaggaacatatacgaataatgatcaaaatcggtagagaattcaacaagaactaccgctattgcagatgcatttggtaa

SEQ ID NO: 6148 - DNA, 1098 bp, Candida albicans
atgccccctcctttaaactctaatatcctctacgtgggcaatataccttatgattgggacgagagtacagttgagtctgttgtttgtggatcaggaaatattgtagatgttcgattaggtttcgaccatgttggaaaaaacaaaggtttctgttttgtcgaatacaaaacagtacaagatgcacaaagggctctaccactattacagcaagttgtgatatatcaaaatggacgaaacaagaagctaagggtagagttgtcgaaagaaggatacaaggcccaaaaaataaaacccgatacaagaacaattatgcaactaaaccgttctagattgccagccaatgtgaggttgcctaacgagatgatagcaaatatcccctacgtaagtcaagttccagtcttgccgtccagcggattcagaagcggcaatatgccattcccaattccacagatgccactaccaccaccggctccccctatagttgttggtggtccaattcaacaaatcccatcaaggcttttacaggcatcgaagtttttaccatttgcaccaaattttaaactagaaactgcaaataacataaatgtattgctaagtaaaatccctcctccacagttcattgagttactttctcaaatgaaatctttgctgcaaacggacccgacaatggttcgtaatttttttcaaagccaaccagaaatatccttgagtgttgctcaagcattactattaatggggttcatagataatggtgttattgaagagtctctgaaatctatatcatctacacctcaggttcaaaccgtacaaccaggaattcaatccacattttacatgggcggtcaaataggaggatacaataacaatatgtacataaataatggccaaaattttcaaccgcagcagcaacaacaagctatacctggctccaactggccatatttaccacctcatgttcaacagaagcttgtcaatatgccaccagatcaagcacatttggctgcacaaatattgtcgttgccaccggatagtttacagcaattaccgccacatgaaagacagatagtcgacgcattacgagcccagtatttgtcatga

SEQ ID NO: 6149 - DNA, 1695 bp, Candida albicans
  misc_feature (408)..(408)
  misc_feature (408)..(408): n=g, a, t or c
atgattccagactcaattatatcaaaacaaggacctttgggacacgtctggttagcggcaaactatgacaaaaagttaacaaaacaacaattaatgaacacaagtattgtcaaatcaacagaatacatagccaatcatccagtaatcacaaatgtgtctgtatcccaagaactaccaagtgacttagactcgaccaatacaataacgcttcgattatctgggtcacttttattgggggattgtagaatatactctagaaaggccaaatatttattagacggcgtcaatggtatattataccaattaaaagcttcttttcagttatccagtgggggtcaatttaggcctctgataatattttccatccaggcaatttacctcctgaacaaccctttttcaaaaatttanagaggtttaattagagggccaagtttcctcaaccaatttggtcaacaaaatgatcttgatttttttgacaaaacgggccacctgaaaggttcaggatttagtggcatgttaaatcccaatgctagccaaagtagtagcgcatattcagaatatgataactcaattgaattacctagatatgaggaagaagctgcaccccctggctatactgaagactttgaattagactttgacttgaatttggatgacgataactcaatagagtacgaccgtgatgcatcagtatccatcaacgatagggaaatatctataatctccgatgtacacaaagagcgaactaccggagacatatttgatctaaattttggacagccattagatgatttaaatgatgacgaggccgagaatgaagaggacagacaattgccttcaaactcagaacaccaagaaagatcagctgaatcagatctacaaccacgtcgtgttagacagaaaaggaccagaatcactgaagatggacaaattatcactaacaacagaaaacttgttgttgattcagaagaggcaatggaaggtttggccattcaacagttaaaggacaatcaggaaaagatcttactggggcaagattcggctccgtatataagcttgaatttatccgattttgaaaaattaaagttgattgaagagttggctgttccagtagcaactaaaaaacggaagctttggaacttgaatgcagaattacaatacagatgtgcagaattggctctccaagagcagcagcagcaccaacagtacgaagagaacaatcaacaaaacgatttccatttagatcaaagttttgataatgactcgatggactttgatttgtcattacctgattttgatgaccaacattctgataatttcagtgatgctggtattttagacgatgaagttgacgaagaagatgatactaattacacacacacggcaagagtcacggaacaaattggacaagagttgattgaactattcaaatcatctaatactgttgaatttgaaaagttgattgagacagattcagaaatacatcacagaaatcctgataaattgccgttaggagttgtcagcaaaaacaaggatcgcatcaattctagaaaggaagctactaaatgcttttttgaattattagttctagcaactaataattgcatttctttaggtcaaatcccacaagaaacaacaattgctggagatatcagcatcacttcaagagacagattatttagtcagtttgtatag

SEQ ID NO: 6150 - DNA, 1578 bp, Candida albicans
atgacagacattttggaagcatacaaacaaagcttgtctgagttaacatttaattcacgtccaataattgataatttaactataatagcaaaagagaatccaaatgttgccgatggaatcgttgatttaataactcaacgaatttataaaactattccagaccagaaattatttgcattgtatttactagattctatatgcaaaattattggtaacccttataacatattagctggagatgagatttttaatttatattctcatgtatttcaattagtcaacgagacaattcgtaacaagttggtgaacttgtttgaaacatggaaaataaccaaaacaagaggtaccaatgaccctttatttccgaaagcacaattagataaaatagattcatttttgaagaaggcagggtacccgaaggccaaaacaaactcgggtgtaatgtcccaacaatccctagtgaacgatattaaccaattaattcctattttcgaaaaaaaagtacgaactaacccaaactccaagtcacaagatagacttcgggcattaaatcaattaagatcaatactttctagccaagtgatgaaagctaatgaattacaggctattcaaaatcaactacaaaacattaaggagcaagaactctcatcgtcatcttcttcagcatcaaaaggtggcacccctattcctaccccaggaccaactcctgccactacgccgggaccctcttcgattccacctgtgtctagggtgaacccggcattcatgatattcaatgatttggttctttcagggttggttaaaaaggatcaagaaccaatccctggatctaaaccagtttactcgttggtttttccacaaaccaaatatgtaccatcagcaagtggtctcggctctaatagtactttagaagatttattgttatctagtagttcaatacaaagatctgattatgataaattgaagtttacggaaatggttaaggttagtaaattgtctttcaacaatttgcaagactttattaaaaataataaacctacaacaaaattgcgtgatttgctttatgattcaaaaccatccaaatgttcaatttgtggtaaaagatttgcatctgataaagaaggggcagataaaaagagattacatttagattggcattttagaatcaacaagaagctctctaataaaggcagtaatgttcaatctcgaaattggtatctagatgattatgaatgggttcattttaatgaaaacgatcttttggagtattcgacagatgtaagaataccagatattactcaggaaatggatgaaactatttcaaccgatagccaatacgtgattgttccatcaacagaaacaaatatgaacaataaatgcttaatctgtcgtgagcaaatcaaggctacttataatgatgaaattggagaatggtgctggtacaattgtattagacaacctggagagcctaaaaatagcagaaaaattgtccatgtcacttgttataatgaatccagcaagaagagaccagcggacaatgatgatttgaatcctcatgtcaaacgagaaaagttttag

SEQ ID NO: 6151 - DNA, 855 bp, Candida albicans
atgtccgacttatcagctcaactttcagcttttaagaataagatcaaaagtggaccatcggtgattgttcctagaaaggcaacttttactcaatctccatcatcaccattatcatcatcaaccacaacaacaacactgaagaatgacgccaatgtgaagaagagatcaacgacggattcagtaacccgagtattgaagaaacaaaaggcaaatatgggagaaatgacgggatcacatttatcgacacaattacaccttgctgttgaatatatcaaggaacatgaccaaccaatatcggtggagaagttgcagaattatttatcatttgatatatcacatactttattgccattattgaatgaaattgatcgagtgaaatacgacgaatctaagggtacattggaatatgtttcattgcataatattcgtagtagtgatgatttattggaatttttgagacgtcaaaccacattcaagggcacttccgtaaaagaattaaaagatggttgggctggttgtgttgccgctatagacgaattagaatcacaaggcaaaattttggtgttgcgtaacaagaaggaaaatgctccaagattagtatgggctaataatggtggtgagttgggttatattgacacagaattcaaggatatgtgggatcaagtgaaattgccggaaccagatgtattgtatcagaaattattggatcaaggattgaaacctacgggagctgatcctaatttgatcaaaaagcaaccacaacaaaaggaaaagaaacaaaagaaagcaagaagaggaaagattacaaatacacatatgaaaggtattttgaaggattattctcaattagtttga

SEQ ID NO: 6152 - DNA, 1911 bp, Candida albicans
atgtcaggaccaataatttgttcaaagtttgatcagtcggggaactatttggcaaccggtatggttgctcttgattcccatcaagtcaaagttcaatccataacctcatctcaagcatcgttaaatacatcattcaccttggaaaaatcaaacaaattagtaaatttagcatggatcccatcagattcaatacaattgttagctctttgtttatccaagggaagtattttgatatattctcctcaaacaaatgaaattgttctggaattgattagttctgcaaatgtctcaattttggatttccattactcaacaactactagaactgggtggtcttgcgatatagaaggaaacgtgtacgaatgggatttgaattcttatttgttagttgattctttcaaagtcaatgaatacattgaatctgttgattcgataaatagaatatctacagtaatgttcaattctcaaccgcatttattgcttggttcaaacgcagtctaccttttcaatattaaacaaagagaacttgtgaaaactttcccaggtcatattcaaccagtaaactcgataacagctttaaacaacgacatgtttttaacgagtgctaaaggtgaccgatttgtcaatttgtatcaacttgataaaactgccacaaaggcagtctttgtgggtctgtcctcagtatcgagcttatcagtttctataaaagacgacaagtcagttttggtgattattaatgaagaaggtgatattgagattttcaacaatccattagcagacgccaaatctcaagtttccactcctgtaccgaaaaagaaaagaaagcaagttggtgtttcttcaagatcattcaatgcatcaattaaattatctcgtccagaaccagaaatcaaaagcccacaagatacacatttatttatcaatgctgtttccactgaagataacttgatcacattcacttggttggaaaattcaactatcccattctttgacacccttaaatggattgatgaaaccggttctttgcttcttgaatcagccaaagtattgctaaaatctaaaccaaatttaaaagtcactcaacatttgactaacggtcacgatgtggccgcaccaaaactttatactgaagggcacaccattgtgagtgatggcagtaatatcagagatttggaatttcaagaccatcaagaggatgaagaggacactgaggaatctttggctgaaaaattagagcgattggcaatggatcaaacttcacaacaaaaatcaagaagaaggaaactagaagaggcaagaagtggtgtatctttatcgattgtattaacccaatctttgaaaaataatgatcaagctttattagaaaccgtgttatcgaatcgtgatcctatcactattcaaaacacaatcagtagattagacccttattcatgtgtcacatttttggataaattgagtgagaagattcaacgtcaaccaacaagatttgatcaagtgagtttttggctcaaatggatccttgtgattcatggtccaactatggcttctttgccaaacttgagcatcaaactatctagcttacgtgcagtattaaataagaaagctgaagaattgccaagattattagaattacaaggtagattgaaattaatggatgattctgctgcattgagaaatgagtttagtgctgaagaaatagctgaagatcttgaagaacgaagtgatattgaatacaatgaagaaattgatgatgcaaagtatgttggggtgatcagcgacgacgaaagcatggatgatgtggatgactttgatgatcttgacgatgaagaggaagaggaagaggaagaagaggaagatggtattcctgatgctgcaaatttagatgatagagaagattctgatcttgaataa

SEQ ID NO: 6153 - DNA, 2169 bp, Candida albicans
  misc_feature (2119)..(2119): n=g, a, t or c
atggcgttaaacaaggtacaactaataaaattatattccaatcgattagtgaaatcattggttcctgtggaattcggtgaggcattcatccaaagtataatcaatgacttgcaaaccactttactaaatacttcttctgaagaacaaaatttgtcaataattataaacaagcttaaaatgcaatttttaagtaacaatttaaaaaatgaatgggtcgaatttcaaaacattgttaattcattaagcaaattcaagtcgttggatcagatttgtaattatctcgcatttcttgatgctttaagagatgagaaaccagaagatatattatcaacatcaacagcgagcttgtctcccggtaagcaaaatgtaatgatcaatacggtaaacacagcattgacgttatcacagttaatcgagccttactatgatactttatcggaacaaaccattttaacctacttaccctacacgatgttaggtctggattccaaaatattcaccttcagcaataattatacacgattggagataccgaaagatataaacaacagtttcagctcattgctacgcgaagtttttgagtttgcaatactatataaacaattggcaattgttgttgataggtataaaggaactttagtactggccataaagacagcttacatagcaatactagaggctcaattgaacaaatatgtgaatgatattaacaatatcttcaataataaaccgaattccatattagttgtttacaattccattttcccctggatatctatactacgatttttatatcgagtctcaaacagactaaacagattagatggttatgaatttctcacatttatttatagtttcaccaaccatggagatcccaaaatacggggcattgctgtgactgcattcaccgaggttgtcaaaccgtattataatattgtggaacattggatagtgaaaggggagttgattgataataataacgagtttttcattatctttgatcaagagcagaatgaattcaatagtataattaaattattgcccaaaaaaataccagcctttattaaatcgagtgataaaatatttcagattgggactacattaatttttctaaataaatattgtcgtgaactaaaatgggtaaatcagtataacgtgaaatattctgctatattgttcaataaccatcaaggcttggcatccatgacaacaaatgaaatgatcaaattgattgatctgcaatataatgagatattaacgtttctcacccaaataatccaaggaaacaataaattgttaactcatgtttataatatcaagaggtattattttatggagaccaatgattttattgatgcgattatggtgaaagggaaggacgtttttaatgagtcttctgttaatatttcatcaacctatcttaggaaagtcttacaagacgctatacaaatttcgtcggtgaaaaattttgagtatgttgacagactcgattcgagagtgttgaatccccaacacgggaatttgggctgggaatcgttcaccattgaatacaaaattgatgatcttcccatgagttatttatttgaaggtcaccaacatttacaatatttaaaaatgtttcattttctatggaaattaagacaattgaataatttattaaattggcattttgagatgtttaatgagttgaatcataatgtggtgacgaagttgtcaagcagaaatagaagacctttggcgaaatcattgagcataatcaccagtataagattccattttacccagtttcttaacgaactaatagcttatttgtcttatgatgttattgaagaaaattttcaacagcatattgtaaggaaattgttctataataaaaatgatcaagatctattattgaacaagctgtttatgaatttactggaaattgacccaaataatgatcttcccaaattcaatgtcaatctattaactatcgatgaattagtggaactccatggtacatatattgatagtattatcaatagtagtttattgaatgaaaaattgaaaggcaatgaaacaaatataagttatatcgatcaaatatttgatattttgcagactatcttcaatttcatanatacaagtcaggaattctattccttggtggtactttggaatccaagttag

SEQ ID NO: 6154 - DNA, 1566 bp, Candida albicans
atgtatttatccaaccttggtggacaatctagaaagacgggtatcagacctaaaacaaatttgaaaaccgataaatatggtatggaagacgtggatgactttttcgaagatgacgatgatgataggataaacaagctgaaaggacagaaactgacaatagcattaccgcgaggagaagaagtgtccaactataaatcaaccattagtcaaccatttaataatatcgcacgtaaaatcaatttcaatcaagaagatgacgaaacatttaatttaccatcaacttcatcttcatcagctacggtaaccgcgtcatcagtttcgaataagaaatccccagtgacaactcaacaatcaccgttgcgttctccattaccggagcaagactatgattataatcagtttgatgtggaggaagattatggtgatataactgaagaagataaacaaccatccccacctccaccagtgccaaagacaaagtcaaaagcaaaaacgaaagctaaggcttccactacaaccaataccaataccaaatctactaaagctgcttcttcatttactaaaaaaatggcattaggtaaaaccaaaagactaccgtcgagttttgattcagtaaacacaagtagtgtcaccgaatactatgatgacggcgatgaagataatgatagggattatggtgaatcaccaccaggatttcaattgaagattcacatggttgattcaacctttcaatgttattcacaaccatcaagtaataacaacaagacccgaagaaaaatcattaaagaatcaccattaccatcaccaccaccagataatcctaatggattaaggagatctaaacgtacaagaatcaaaccattagcattttggagaaatgaacgaattatctattctaaggatttagattatgatgatgaacaagataccacgctagctagagatatacataatatcccattacaactgattaaagaagtggtacacataccagataatgaatctgttgataattcaggatcaccaaatactagaacgggagcagctgggtctactaaaacaagactgaatcgaaaacgaacctataaacaaaccaccactactgcccccactgattatgattatgaatcagatccagaaatatctggttcagaatggtttaaagaagataatctactgttggaagttaacgataatggggaatccaaattacgtaaaattgcctataatcataaaggtgggaattatgtgaaacccactgatgataattatttagtggcatcattatttgatgaagataaaagtttttttgctggtgggatgttacaattaccttcggatggatttaaaccaccagttacagtgacgggtagtacatatatgtttaatgtgatgaaaggattgattcaagtgacgttgaatgaaaatatgtttgttgttactaaaggttgtaaagtacaaatccctgaaggtaatgaatattccttaagaaatattggccaaggtgatgcttatttgtttttcgttcaaatcagaaaaccagaagaaatcgataccaattggtaa

SEQ ID NO: 6155 - DNA, 1182 bp, Candida albicans
atggaacaattgacagtagcagaaagatacaaattagctatacaacaatatgacaatttacaaaatatatctgaaagacaagactcggtgtcgtatcaaaaacgattaacgaaacttatttctgaatttaaattaattttacaattagtggaacaattatcattatttagtgataatgaacaaatagaagaaatatctactaaatatattccatttttaaatttatggtattatattggtgaattatatactaaattattaatgaaagatgatgatgattgtgatggtgatgatggtaatattattattaatttaaattataaatttgaaaatttaaaattgggtcaaagatttatattcacatatttagaaaatttaatgaattacgatgatattttaacattggaacaatctaaaaaattaaagattttactcaaaggtgaatcatatcaattaaatcctatgaataaacgtcaagaaaaaattgataattataaattagaacaagaattattgaaaaaattatcaattcttaatcaagaagatcaaaaagaggaggatattaataaatttgatgaagaaattataaggacaatttatttagatcaattgaaatattttattttaaaatcgtttaatttattagaatcgataaatatggaattacaagttttacaacatcgtccaacaaatgatgatctcaattcttcttcgtctacatcttccaacagattagaaacccaagattcaagatcgaaaaacaagagtaaaaaaaatggtggtggtggtgatggtggtgacgacgacgacgacgatgattatggatttacgacaaaattagaatcaataccaaaaatatcatatcaagtttctgatttaataaataaacaagggaagattttacaaccatttacaatcacttctcaacgacaaaaattaaaggaaaaagtatttggtacgggtcaaatactaccttctatgacagttgaagaatatttggattatgaattagctaatgggaaaatgttaaaagatgaagttaaagataataatccagcaaataaagatgataatgatagtgatactgaagattctgaagctgaagaagaaaaaagacgatgggatgattggaaagatgaaaatcctaaaggtgctggtaatatgaaagctaatattggttaa

SEQ ID NO: 6156 - DNA, 1596 bp, Candida albicans
atgagcttcttcggcttacactttcaacttaattcattgacattgaacatttcaaatatggcaaaaaagtctttatcagagcaaatttctagtttatatacaccaaagactgattatgatattgaggatcatgatttagatgtatctaaagacaatggcatttttcagcatcatgacggtggttctgaaaacgaatctgaagacgaggatactggcttaagaaatgagcattatgttgaatcttcaaaatcaaagttgagacaacagaatgaaggtgtgaacttgggggaaaaatacgtgggcaatgtcacaagcagaagcaaattgtatgacgatgaggatgacaaacaaccaacagaagctagctccggagaggagttagatgctgaatcagcggaagaagaagaggatgaagaatctgaagatgtagcagatgatgatgaagatgaccaagagtcagatcgcagtagctcaagtgatgcagagaatgacgaggacgagaacatttcacacaaaagggaattattaaaacaattaatgagcaaagagagaagtcacatcgttaacagattatcccaatcagcaacaaatgatgcattaaaaggttattcaatacaacagcaaaacaaaacttttgaaaaaatcattgatgtgaggttgaaatttcagaaatcggtaacttcaagtaatatgttacctataaatacaagtacatattcagaaaccaaatctgaagatagcgatgaattagtgactaaagccaagaaacaattgtatagtttgttggatcatttattcacacttagaaacgaactagacgaaagtacctcagtcaagacccccaaaaaacgatcatttgctaaatattcggaggttacatctgctgcagatgcacaattgaattcccgtcgtaaccaaatattaaccaagtggtcagctaaagttgccaattcatccggtagaaatgccatgaatgctaataaattcaaaactataaaccaatcttttgaacaacaggttaacaacaacttgtctgacatggatagattaatcaaaagaacaaaattgaaccgaagaaacgtaactcccattggttataccaccaaagaggaggatgatcatgaaaatggcaataaaaacaaatctatcgacgaggacgacgacgatattcccgaagatacttctgttcgtaagaaaacccaaggcttggaaaatgattatatatttgatgacgaagatttctatagagtattgttgaatgatttagtcgacaagaaagtgcaaacaagtgatccaacatcaggtataactatcagtttaagagctgctcaaaagtccaataaattgaaaaataatgttgatacaaaagcatctaaaggtaggaaattgagatatcacgtgcaagaaccaattgctaattttgaaacttcaagaggcagctggagatggaatgatgatcaaattgacgagtttttcgcatctttattgggccaaaaggtcaatatgaatgagatagatgatgaacaagaagaagaacaagagaatgatgataatgatattattccagaggataacggaatccagttgtttggttaa

SEQ ID NO: 6157 - DNA, 3222 bp, Candida albicans
  misc_feature (1932)..(1932): n=g, a, t or c
atgtcatctgaaagcaacggatcggcttccaaaagaaggaaggttttagaaccatcaaagtttagaccagggtttattagaaaagttagggtatggaacttcacaacatattcatacaccgaattcaatctctctccaaccttgaatatgattattggtcccaatgggagcggtaagagtactttggttgcgtctatatgtattgggcttgctggtagcattaacttaattaaacgtaaaaacttgaaatcgatgattaaaacaggtcaagagaaatcgtctgtggaaattaccattgaaaattatgaaggtcactcacctatagtaattaaaagagagtttactgccaaagaatcaaattggacagttaacaacaagcgggccactgaatcaaaaatcaaagatataagaaccaaattcaatatccaactagacaacctttgtcattttttgccgcaagaaagagtagcagaatttgcaggactttccccagagaaattgttgatggagacagaacgtactcttggtgatggccatttgttgatcatgcacgaagatttgattgccaaagataacgaaagtcagcaattgggcaacaagattaaagacattgaagggagattagccaaattacacgaggatagatcaaaattggaagaagaagcacgaaaattagaggagtacgatagaaagtctgaagaagttgataatcaccgtcttttgatcccgtatgcaaaataccaagacttgaaaaaccaaagaactcaccttaaacgattgagagatgaagccaaacacaagcttcgtactttccaagccaactttaaaccattggaaaatgatatcgccaatgctgaaaagtcgattaatgaagaatcagaaaaatattcacatctcaaagactccctcaagctgactctcaatgaaataaaccaacacaaaagtactcaaaaacaagttaccactgaaataagtgaattacgagcaaatttaaagtcttatcaaacaagggcagaacagaaaaagaaagagctagaagaaatcaagaaggagatagcagaattacaagaaaaacagagaggtttacctcaagttgatccagaagaaatgcagaatttatctaccgagctgacaagtaaaagacatgagttgagagacttagaagagcaatttcaagaagtgaacagtcaaagaagcgatataggtagagagttaacacatctcaccgaacaattaaggggagctgaaaagagacttctgactaaagacaaattggatatgttggtgagtgatgccagacagaatgggagatcttatagacttcgtgacgaagctttcgatgtacacaaaagattgcgaaatgaacctgaatacgaagggagatatttcgaggcaccagtgatttcatgtaatgtccccgacataaattatgctgctgctgctgaaaaaatcattgacaacaacacattgtttgcctttactgtcacaaaccagagtgattttgattttctctccaagttctcgcaacaaactaataccaacactcctttgagaatggtgaattcagtagtcaacccaactcacgagtatagcaagcaccaattacgagaattcgggtttgaaggttatttgtcggattatattgttggccctaaagaagttttatcaatgctttacagcacttccaaaattcacactattcctgttagtaaacatcagttatctagtgagcaagtgagaagattaaccaacgtctctgggaatgacagattgccatttacaaagtttgttgcaggtgatacattgtacaatattcaaagatccaaatatggaagtcaacaggcggtttacattacacaaaaaataggcacatcacagtattttggagttcaaggcctatcacaagaagccaaatatgccattaacgcatanatctccaaccttaaggagaagattgagcagaaaaagcgagcctatgagggtcatagaaataatattgatagtttcaatgaacgtttgacggaaattaaacattacattcatgacattaagcggaaacaactggaattacaagagatatcgaaacgtgcaggacaacttcaaaccaagatagagttgaaaaaagaaagagaacagaaattagaaaaggattctaaaagagactattcgctgaaaatccggatgtttgagcaaaagattgatgaaaaatatctagcatctggtgaattatttgcttctttgtcgaattctgttttagagctttgtgaaaaagaaaatcaaatgaagttgaaaaaattggaaatcattggctataaaaataaaaaacttacggctgaaagtttactcgatgaattaggagcaagacaggaaaagttgaaaaatgactacaacagatacaaaagagaatacgatgaaattaaacaaagtgaggcattcaaagaaatcgaaagacaaaacgaagcgtacaccgatgaagaacgttctagacttgctgatttggcccaggtttatgttgaaaatggcactttcacagaagctactattcgtctgaaaatagatttgttggaggacgagttgtcactcttgacaactgccgatagaggatcaatagatgcgttgaaacagaaattacaggatatacagttagctgagacaaacttacctttgcttcaaaccgagaaggaaaggttagacactaggataaaaggtattcaagaagaatacgaaggagagctaacgctgttggttaacaaaatatcgttggcgtttaataagcgattcacaaaagtggctagtgatggacgagttcaattggcgaaactggaacggtttaaagattggaaattacaaattcttgttaaatttagacaggaatcggaattgaaagttttagatcaccaatctcaatccggaggtgagagagcagtttcgacgatttttttcattatgtcgttacaaggtttaactgatgcaccatttagaattgttgatgaaatcaatcaaggtatggatccaaaaaatgaacagatggctcatcgttatttggtccacactgcttgtcaaaatagcaaatctcagtatttcttggtcacgccaaaattgttaaccggtttatactaccatccagatatggtagtgcattgtatttttacaggaccatatatcactgataacgaggagaaacgtgataatagtatgggtatgttagattttgctgtataa

SEQ ID NO: 6158 - DNA, 1728 bp, Candida albicans
atgtttggaagcactaacaatacatcatcaggtggtggtggattatttggatcttctaatactgcctcttcaacgggtggtgggggattatttggagcaaataaaccagcaacaactactactgggtttggatctcaaccacgacagggatcaaacttatttggatcttcatcaaatacaggtggtgggctatttggtaatcaacaacagcaacaacaacaacaggccaatacctctggtggtcttttcggtaataaaccagctacaggtggaggattgtttggagcacaagcaaataacacatcaaacacttctggtggtggattatttggtggacaaacaaacaatactaccaataacactggtggtggcttgtttggcggacaaacaaataacacagccaataatactggcggcgggttatttggaggacaatcaaataccacaggtactaatactggaggaggcttgtttggaggccagcaacaacaacaacaacaacaactgaatactacaactagtggtggtggattatttggcaataaaccagctactggaggaggacttttcggaggttcatctactacagcaaacacagggtccactacttttggatcaaatcaaggaacaactggtggattatttggtaataaacaaccaaatacttccggaggtctttttggaaatactcatcaacaacaaacgcaacaaccgccgcagcaacagcaacagtcttcgggattattttcttccaataccacaaacaatgcccaaccatcgtttagttggagtcaaccaccacaatcatcaaattcatcagctactactggcgatactaatgaaatccaaatcatagccagtgggccatttgggtctaatacaacccaacaagtgaacaataatacttatacctatacaccagcaataaatgatcaattaactaaaatttgggaacaatgggatccaaattcttctaaatgtgcattaaagacttatatctataataaatttagtgatcaagaaatcaatgtattattaaatcaacctcgtcctgctaatgaatcagctgaagattgggaaaatgccatgatcgcaagaccaggacctaattattatcccataaaagtcaactcctttaatgacgttgcacaaagaattgaaacacaattggattatgttgctaaatcaagagttttactcaataatatcaatcaaaatttagataatttgtcatcacaacatgatttagaaaataccacaagaataatgaaagctaaatcaagacatactaaattatcgagaagattattaagattagcaacaattttagctattgtgaaattgaaaggttatccattattaccagaagaagaggaaatctcaaaacaatttgaattattaacatctaaattgaatgacccaaatagttcgattggtaaattgagtgatgtgtttgctagattagccatactaaaagaacgagcagaagaatttaattaccaatgtgaaaattctgtcaatttattaaataatactttgattgaaggtgaagaatctacatcgaaaaagggatcggtaactactgcagcagaacaatctgacagtaacattgaagaagcaattcataaactttcaaaagttttattgaagcaacaaatgggattaaattatttgaatgatattttagaaaaagatattgaagctgttaataagatatctaaaaagtaa

SEQ ID NO: 6159 - DNA, 966 bp, Candida albicans
atgggattcaattacatcaaacttacttatagacatctcctcctaccccccaccgtatacacctatactatggttcaactatcaccagcagaaaagtcatatttatatgattcattaactcaacaaccaataataagacctgatttacgatcaattcatcaatatcgtcctttagttgccaaaacttcatttttaccaggatctaatggatcagctcgtgttagaactgaagatggtagtgaatgtattgttagtgtcaaatcaaaagtagtattgattctggaagaagaagaagaacagcaacaacaaggtcataatctaattgaggtggatattgatattgtgggacatcgtgatgattcaaattatgttgccaatttaaaattccaattaaccaatttattacaacaaaatttcccatttgaagttttgaaattgacaagtaaatatacatttaaactatatatcgactgtattataataagtcattcatgttatccattaagtttgatttcaatagccaattatttagcattgaaaactactagattaccattattgattagtgatgttaatgatgaagaaattgctgaattaccaacatttagcgatgattgggaaaatgctaaattaatccaagattatcatttaaatgctaatactagaaagggtggatcatcaacgaaatttcaaccaccaatttttataacaattggagtcattgggaaaaatttaattttggatccatcatttgaagaagaacaagttttagaaaatgggttaattataagtttttataataataaagtcattacaccaatatcaaatactaattttgctgtcaattccaataattcaaattttaaaggattggatcaatcattattgattcaatcattaacattatgcaataaatattgcccgaatattataagagcattagatagtttaatagaagaagataat

SEQ ID NO: 6160 - DNA, 1098 bp, Candida albicans
atggctaaaacaagatctaaatctgctgctactgctgctgcaacttctcctaaggcttctccaactgcagctaaagtaactaaaaataaagttaccaaaccatcaacagcatcaccatcaaaaaccaccaagactaaagcagtaaaaaaaactaccaccaaaaaggccacacctaagaaagaagaggaggaaaaaaaagaagtacatgtggaaactgttacaaaggattcaagtttgattcctgaagaaatcaccgaaaaggcaattagtgaattgaaaaaatatatatctagacaatcccaacaacaacaagaaacagaaaatgatgaatctaaaaaatcgaaattgtttgatgaagatgaggatgatgaagacaataaacaaaatgaatcattctacttgaccatagattctaaaaaattctggtcttctaaacctcaattcaaaccaaaatcattcaaattgaccaaaccattatatgataataaccagaccaccacaactactagcaacagtaataatgatataaatgttgataacaatatatgtttaattattcgtgataaattagttaaatcaattgatgaattaaatgaattagaaaataatcaatcattatcacaaattactcaaataattccattgaattcaattaaaactgaatataaatcatttgaaaaaaaacgagaattatatcaccaatttaaaatttttttagtcgatgaagctatattaaatattatgccaaatactttaggtaaagtattttattcaaaaggttcatccaatgataaaatccctatccccattaaagttacatctactactacagggtcacaaaccaatggtaaacaattatcaatagttactttaactaatcaattaaataaagtattgaataatacttattatttaccaccaattggtaataatattactattaaaattgggaaattgaaatttgataataatgatttaattgctaatattaatgatgttgtgaaaaatttagatttagatactattaaatcaattcatgtgaaaacttcaacttctccagcaatcccattgttttatacaaaatcgctttcacaataa

SEQ ID NO: 6161 - DNA, 1476 bp, Candida albicans
  misc_feature (947)..(947): n=g, a, t or c
atgtctaaagaagaatccaaagttattaaatctgcattaaaaggaagtgattccacaacaacaattaccactagttcttcttcttcttcttcttcttcatcatcatcaattcaatttagaatatttgttggatcttatgaacataatttattatgtttatcagtaatattagatccatcaaacattaaagacccaattttccaaccaattttccatttccaagctcattcattatctataaaatcaatggatttagctaaaagatatttagttactggatcaaatgatgaacatattagaatttatgatttacaaaaaagaaaagaattaggaactttattgagtcataatgggactattactagtttgaaattttccactgaagtctccacagaaaatcctcaaaatgaagacattagcagtcgtggtagtagcacttccagtagcagtacttccggttattcacaaaaaacggggaaatggttattatcaggatctgaagatgggaaaattataatttggagaactaaagattgggaaacttttggtatcttaaaaggtcatacgggtaaaattaatgatttagccattcatccaagtggtagagttgctatactggtttcacaagatcaaactattagattatggaatttaatgaccgctaaaaaagctgccattttaaaaataaaggggaaagatcatttaggtcaagtgggagattttgttaaatggtcaccagattctaaaggatcattttttttaattggaatgttaaatcaaatattaatttataaaacttcaacggctaaaattattaaaaaaattaaaatatcaccaactttaatgtgtatggagattttaaaatttaataataaaaattggttagttgtcgggttaagtaatggtgttattgaattttatgattttaatgaaaaagtattagcggngataaatgaagaaaccaccacaacaactactactactacatctgatgttgatgatgaagaaaaagaagaagataaagtgtgggattctaaacctgaacaattgatagctgattttacattaagaggtcatactaatcgtattaaaggaatatcatttattcaagataattcagaaactcatgatataccatatttagtatcagtttcatctgatggaagaattgttatttggaatttattattaaaagatcaaattgctgtttatgatactggtgaaagattaaattgtgtggttacaagtcctgaaggtattgaaaaactggatactatgaaaagaagatttacttcattaagtcaaatcactggaaagggagaaattgataataatgatatccctagtgaatctgaatatgaaactgatggtgaagaaattaaaaatataatgcaaggtgaaaagaataaaaagggtaagaaatcaaaaaagaataatattaaaaagaaaaggaaagttagtgtaacattagaataa

SEQ ID NO: 6162 - DNA, 3048 bp, Candida albicans
  misc_feature (2502)..(2502): n=g, a, t or c
atgcaacaagacgatgattctttaaccaatcgatcgtcacctccaatggcatcaaaagattcacgattacaaccaccaactagaacaagaataagacaacaaaaattaaaatatacatttattggttatattattgtattaatatttcttgccattactcaatttattggtgttggatttttcaaagaaggttttttactttcacgtaccgtattaccaaatatttccaattgttcacaacaaattgattgtatgacacccagatttgaaaaagctatactattggttattgatgctctaagatttgattttgtgataccaataccggggtcaaatgaatattatcataataatttccccattttatatgatttagcatcatcttcacaaaataatgccatattattgaaatttattgctgatccacctacaactacattacaacgcttaaaagggttaaccacagggtcattaccaacatttattgatgcgggatcaaatttcaatggggatgccattgatgaagataattggttattacaattacataaaataaataaaaccatagcgtttatgggtgatgatacatggaaggcattgtttaatgaatatattcatcctgattttaacttcccttatgattcattaaatgtttgggatttagatactgttgataatggagttattgaacatttatttcctttaatcagtaaagaaaattgtacaaaatgggatttgttagtagggcattttttaggagtggatcatgttggacatcgatttggtccccaacactattctatgaaagataaattaaatcaaatgaatcaagtcatttccaaagtgattgaaaatattgatgataaaaccgtgttaatcgtaatgggagatcatgggatggattcaacgggtaatcatggaggtgatgcccctgatgaattagaaagtacattatttatgtatgctaaaaataagaaatttttgaaaaaagatcaatcattttataatattagcggattgggtgaaaattatcgatcagttaatcaaattgatttagtgcccacaatctcattgttattagggttacctataccttataataatcttggattccccattgatgaagcatttgggaatgtagatgaattatcagtggcatcacaaaagacaatcaatcaaataaaggcatttagagatgatacacctaatttatcaggatcattaattgaacaatatcaatcatacgcaaccaactattctagatttggtgggaaatccaagaagcattattggcaattaattgaacaagccaaacaatatcaatcattatctttagaacaatgtaaaacattatgggcaagatttgatttaagattcattggtattgggattggtattcttttccttgcattgacatttatgataacttatgcaagatcaatacctgctgtacgagtactgacaatgtcatttgaatttattggatcagtggtggcgatgacaataatgggattggttttaagtttttcaatttatattgtattaaaaccaggagatttcaccttgaaaatttgtttggctattggggccgccttgggtatggtgattggattttgggctcctataatggatagatttagtgtggggtttatttggcatcaaacagtggattttttcctttataatttcaatagttggtctcttatggggattttatttgtttcttttcattgtttaatatttgcatctaattcatatgttgtttgggaagataaaatggttctgtattttttgataacttttggtgcttgttgtgtttatgcatgttttataaataataaactccctgaaagagcaaaaatattggccattctgcatgccattactttcactatttgtactcgtattgtatcaatggttaatttatgtcgtgaagaacaacgaccatattgtgaaccaaatttcactaatagttggtggtcagtactattgttacattttgctgcgtatttattaccggcatgtatcaaatcattttatatgttatcagattcttatcattcagcagcaccattatggataggtacgggtttgaagtttttgttatttatgaatgccgtttattggacatttgaatatgtttccaatagtgaatatttcaataaattgaatttgattatagggttatcattgataaaatcattgaaattagcaattgctagattggttttatttatttcattgattttagccaatttcagttggtcaagaggtcccttgtgtgttaaattagagttgtcagaggcatcaaatacaattgatattgaagaatccgatgatatgagtcctggcattaataataataataacaacaatagcaacaacaaaacagctactattcttgggtatggaaatgtttatggatcatcttactttttgttggtattaaactttactgtggctataatgttgacaactaaacccctgggtcgttatcaatanagcttactaattgttcagatattatcattattagaaatattagatgttttatcaataagacggaatttaattaccccaattattttcggtttattaggatatcaacattttttcagtacgggacatcaagccactattccatcaattcaatgggaactaggatttatgacaacagaaacaattgttttcccattcactcatttgaatatttttttaaatacttttggaccatttttcattccggcattagctatacctttaataaccatttggaaaattgttccttcatccaaaccaataactttattatcacaaatcattactaatataaccactttaattacttatcatttgtttactggattaagtagtttaatatttgccgctcattttagaagacatttaatggtttggaagatttttgctcccagatttatgttgagtggattattgattattagtttgaatttgtttcttatatttgttgccttatggtttggtacatcaaagattttgacacaaattaatagaatatttggaaagtaa

SEQ ID NO: 6163 - DNA, 1089 bp, Candida albicans
atggattttgaagaagagactaccgtttgcacaatatgtcacgaaaacaagtctaaatatacatgtccggcttgtgaaataaaaacatgttcattgctgtgttacaataaacataaatatgaaagagattgtactgggaaagttgattctaataaatacttgaaccgaaacgagttagcagctgatccagtgcatttgaatagagattacaattttttaaacaatgtggatagaaaaatacatgttggcaaagaagatataataaaactggcgaaaaatgtgtttaaacgtacccgaaatcaatcacaagcctcgggtaacaagagacataagcgtaatgaagaagataacaccgataaacgaataacggcagtgaaaaagatatttttaaatgatcctaatattagcattaaacgggaaaacactttaatagtcctgttacccatcggcatgtcaagatcaaatacaaacaaaacagggtttgacaaaaagttgaattcatttgtgtggactatagaatggataatgttaaacgaacaaggtgaacaagtgacaaaatttataagttatagattaaaggagtcattagttttgcaggactcggtgccaatgaatattatcaataacaaattcaccaaacccgtggaaaaatgctatttaaagttctatttacatgatgtgatacataagggcaaaatgatacgattgaatggtggagacaaaatatccgatgtgttgaaagataaaattgtactcgaatatcccacaatatatgttgctgcaaatgacgagtgtttacaagatagaattatagatagccttcaattggccgaggaggaagaagatgacaccactgactcaagtgaggatgattctagtgactcagagagtgatgatgatgatagtgatagtggtagtgaaaccagtagtattggagacggttcaggtgaagataacgattctgattcggcaccggaagagacatctctgaaactaccacctttttcacagaaattctttgaagcgtcagctgagccaaaaccaataatagaagagataggatctaacaagactgtagaagaaccataa

SEQ ID NO: 6164 - DNA, 1032 bp, Candida albicans
atgatatataatctttataatactgtagaaactagcttggatgatttctggaagcttgttgttgcacgatataatagtcttgtctatcttcttgtgtccaaagtcgcgctcacaagaaaatctttcacaagaataaggatgtcaacagaaaacgtgagtattagcaataattgttgtttgaggtattttgttagcaacatgctgtctgcaccagaacaagatacaaccattccgccaggtactgagagtccgcacacagagcatgtggttgaaaatgaatatcaagacgatgattatgtgagtttagatgaagaagatgaagaacttatatggagggtttttttccaaaaactagaaaagcacaacaagaagagcaacaacaatgactctgagctggacgaatctgaagaatctgaagacactagcgaggaagaggaggaggaaactggggatgaggattttgacgaagatgatttaagtgatctttcggatattgacgaccctgctctagtggccacatataaggctctaatgtctgagaaagtcaacaagaatctttgcgaagaagaacagagaagactattgatatccaattttactgacgatcaaatggagagatttgaagcctatagacgtatgactgtgaataagcctggtgtgaagaaaatatgtaatggtatagtaggccacacaatcccgcaaataattgcagttgttatagcaggtgtttccaaactgtttcttggggaaattatctcaaaagcatttgaaatacaggaacgcaattctaaaggtagacttctaatggacattgaaccaaagaagaaccagaagagagagattatcagtagtttgcaaaggggagaggaaattgaagtagatgaaagagctttgaaatttgagggagatgagatccacccattgcaaccagaacatatacgtgaggcatggagactataccagcttgagaacagtgtattttctggaagtcggaaaagaaaaatgggagacgatggccctttctatgtttaa

SEQ ID NO: 6165 - DNA, 453 bp, Candida albicans
atgagttttagatattcagctgcaggcggcgcccatcaacgagatttaagaacacaattatttagcagtccatcagtgggaatacgtacaccatcgaaaactccaccactgcgaacagcatcaccatacgatccatcaccgaataacaatcaagccaaatataacgaatcattattaaattcattggaactgcagaataatgaagaaatggatactatgggtcaaaaagttgccatgttgaaaaatttaggggaaaaaatgggggtagaaataaataaactgattaaattaaacgatgatataactaatgggtttgaaaaaggaaaaattactttaaagaatacatataataaaatgatagttatgagccaaagagcaggtataacttggaaaatgtggggcatggtatttttgattgtattcctatggtttttctatgtttggttattttaa

SEQ ID NO: 6166 - DNA, 798 bp, Candida albicans
atgccggctgcaattagacctatgaaaaagacggtatccttcagtaaggatgtatcaaataacaacaacaatttagaatctgattctgatactaaacaatcgcctcaatcatatttgacatttatccctcaaattaaaaatagtttattagttgttccatttcataatatatttatacttgttgggatgttttattctgggttaactcaagatttagaaacggtgatgtggaaagggtttcttacaagtatacctatacaagtgatttataattacattatttatatcaatttattaccattaaagaaatcaactagaaatgatcatcaaaataattcaagtggttctgctattaataataataataataataataataacaatgttccacttttgattggatcgagtatatttgttagtattgtattatcattgccattatttgttgtgattattttaatgggggcaccagtttataaatattcattgaaaactttatatttgtctttacatttatctcaattaatttttaatcctttaattatattatccaatttgaatgtcaacaaaattaagagattattcaaacaggatcatttgtacagaattattttccatcatggtatattatctagtgttttgttgactttgggtggttgttggttaggagttatacctattcctttagattgggatagaccatggcaacaatggccaattacattgttagttggaggttatttgggtggggttgtaggtggggttttgtcgttaatagtgaattatttctcccactag

SEQ ID NO: 6167 - DNA, 1203 bp, Candida albicans
atgagtgaccccttagcagattataccaatttgtctcatgacgagattgatccttcatcagcaaatgctgctgagtctgaacaagcagaaccagaacaacaagtatcagagcactacgaacctcaaccagaagaactcacatatgaaaatgacgaaaatgtgcttaattccataaaggtccaaaaaatcaccgatgcggaagcaataggggaagttgtgcgtaagaaagtgattagggattccagaccacagggatacgaacaaggcgactttaatgacaacagtaatgtgacatcaggctctcgaccaggacaccaacaaaccgatgaaatcgatatttctagtatggacccacaacaaagaaagagatttgaattggaagaaagaatgagtgctgccataaaaccatcgaataaaagaagaagaaaggccgatgaagatgaccttgaaagaatgcaagatgataaaattgattatttaaaggatcaaatgattaaagctgccaattctgatgttgaaaagaattctcaaggtcaaattgctactgaaaaattgaaattattgaaagaagtgagcgatattttggcaagagcagatttagccatacctattttagataataatttattggaagcagtaagattgtggttggaaccattaccggatgcttcgatgccagcataccaaatacaaaaagaattgatccatgcattggaaacgttgccaataaagaccgatcacttggttgcctcgggtattggaaaagtattagtgttttaccaacgttctaaaagaactgaacctctgttgaagaaaattgtcgatagattaattggtgattggacaagacccattttgaacaaatctgactcatacaaagacagaactgttcaatttcatgaatataatagaaacaagtttactaataaattgtcaagaggtgttaaaaaaagagaagctaaaaccttatatgaagaaaatgctgaaagaaggaagagggcggctattccaagtacaagaactacggcttataaaattgctcctcaagttgacaagagtttgttgatgagacaacaatctagacatgcaagcaatgatgaaagatttaagagaattaatctgaaattgacgtcaatgtctgtgaaaagaaaggcagccaaaaagggtggtccatcgattgaaggtagagatttggcaatgtaa

SEQ ID NO: 6168 - DNA, 3798 bp, Candida albicans
atggtgaagattagtgaaatagcacgtacttcaacatttgcttggagtctgaaaaatttacccttattagcagccggtacggtagcaggtgcagttgatatcaactttagttcatccgccacgttagagttatgggatatattctcaccaacaaataagacagaaccaatattttccgccacagttgataatagattctatgcattggcctggtcaaaaccgtttgaaggcagaccccagggcttattagctggtgcctttgaaaacgggacagttgagttttgggatgctgatgttttaattaaaacaaaagaccttgctaaggcttctgttcataaatccaataaacacactggtgctgttaaatctttgcagtttaatccaattcaaaatcatgtattggtgactggtggatcaaatggtcaaatttttatttgggataccaaaaccttcagtgaaccatttgccccaggacaagcaatgacaccaatggatgaaatcacattcgtttcttggaacaactcagttagtcatattcttgctagtactggaaatggcggttacacctctatttgggatttaaagacgaaaagagaggttttgcatttatcctacactggtgctggaggtagagctaacttttcatacgtttcctggcacccttcccagtccacaaaattgattactgcaagtgataacgattcctgtccccttatattgacgtgggatttgagaaattccaatgctccagaaaagatcttggaaggtcataaaaagggggttttatccttagattggtgtaagcaagatccaactttgttactttcaagtggtaaggataattcgactttcttgtggaatcctattgaaggtatcaagttaggagagtatccaactacagcaaattgggcatttgaaaccaagtttgccccagctgctcctgatatttttgccactgcatcatttgatggtaaagttgttgttcaaaccattcaagacacctcaccttctgtgtccactaaagtcgcctcaactgacgacaatgaattttggagtgaattatcaactactgagacccagcagccggtatttgaagtcaaacaagcacctaattggcttaaaaatccaagcaacgtttcatttggatttggttcaaaattggtgataatcaatactgactccagtggtaaatccactgtcaaggttgacaaatttgttgccaagggacaagaaaaaaccgaaaaattgtttaaagatttgaaaaatgacaactactcttctctcattcaagataagttagaaggagagaccgttaatgaaaataacaaatctgattgggaggttttgaagcgtctatctgaaacaggtaaagagtcgttgttcgaagatgcaaataatgatgaaaaagaagcaacttctccagaaaccaaaaaagaaaatggggaagatgatttctttgaacatttgggtaatggagaaacagccaaaaaagaagaagtttttgtacctgaaggaaatttcaagattttcacaaataatgaaaacgaggacagtaaaaagttgatcaatttgattttgcgtaacaagactgaggaagctgtttcatcgtgtttggagcaaaagaagcttgtggaagctttagttttggctttggatggctcagatgatgttaaacaacaagtgaagaatgcgtattttaaaaagaacaaggagaataatctttctcgtgtcatttacaatgcctctaccaagaatgttactgaccttgttgcccatgccaacgttgagaattggaaagaagttgctgttggtattagctcatttacaactgactcgtctgaatataacagcaaaatgtcagagttgggtgatcgtatcttgaaagccaaagatggcaaaagaaatgatgctgttgtttgttatttggcaggtggggctttggataaaatttcaaatctctggttgcaagaattgcctgattatgagtctgaattattgagtttgaaatctgaagaaatcacttctccttcagatgcccgtcttcaagccttgaccaactttgttgaaaaagtagcaacctacagatatatcacaaagtcaaccggtgaattctctggaccaatggttgaaccacttgctaaagcaattttagaatttgttaacttggttgctggtagtggagactttgacttggctaataagtttttacagttgttgccaagcgagttttctggaactgaaaaggaaagaatattaaaggcaacctccaaagctgttgaacctgcttctgctgttaagtcatctgctaatgcaaaaattgccaagcctgcttcttcaagcggtcaaactagagcatcaattaatgctgtcccagctccagcttatgctcctcctgttcaagctcctcctgttcaagctcctcaaccaccattagtgcaacagcaacagcaacaacaacagcaacagcaacctaatcgctatggctacgcccaaccaacatacgctggtgcagcaccaaagacaaatccatatgcccgtactaatccatatgctccaagcaacaatatttataaaccagcatctccagttgctactccatctagtttaagtggtactaccagtggtgtacctccacctccaccaaaagcaagttacaagcatgagactgaaggctggaatgatttaccagacacatttaaggccaagacggctgctccacgtagagctgctgctgctgccactcctccggtatctactcctacgcctgtttctgctccagcttttgggtctcctggacaaccaccatctgctccaagtcaaccaggaagtgttggatcagtttcatctgctggttatcctaagaaaacattctcagcaacgaatgttcttccacctccgcctaaaagtatcagtcgttctacctcgagaacaacggttccaacttcttcaaccgttccagcttcaccaaaacccactcctgtctcgaataagtatgcacctgcagttacctcggatgctctgcaacctccatcatcaggatttgcgtctccaacattgaattcatctcctcgtttggctaagaacccttatgcaccaagtgtcacagagcaattaccacctaagatttcgtacgccacacctccagctcatcatttggcaaataatggaccttcaactccttcatatgcgccaccaaagaatccatacgcagttcctccaagcacatcagtttctcatgctggtattgctccaccaccaccagcacctaaattaggctcggctgctcctccaccaccacaaccttttggatcaagcatgtcaatgcctgtacaacctgccttcaatggagttcctcctccaccacctccagttggtcgtgctgtgtcaacccctgcagctgctaaaattgagcaaccgccagcaagagagccagagttgccagtccaatcaaaacatccaaagggggatagaacccatattccggaaaactcgttgccaatttacaattctttgaccaatgtgcttgaggctataaagccgaacataccagagaagtacgctaaacatggtaccgatatggaacaaagactcaatattttgtttgatcatttgaacaatgaagaaatctcaaatggcgttattgagttacttttgaaggttgctactagtttggaatccaaagattttgcaaatgctactgctgtaaaccttcaaattgctactgagcacagtgacgaaattggaaattggcatacaggacttaagcgtctcattactatggcagaggctatgtactaa

SEQ ID NO: 6169 - DNA, 1413 bp, Candida albicans
atgatgcatcggataccactacaactagtaccacatcatcctgctctgggcatcaaagcacgaccaaacgctgctgctgtcccaaccatttcctatcaaccaacagatattattattccaactcaattatatgataaaataggcaatttaggagaatataaaagattgcaagaagcagagaaaaagttggatttgcttattgctagaaagtcattggactttcaagctatacaacaaaaatcaattcatccacacgaatacagaccatctacaggagttttgagaattttcatctacaatacctgtgaaaaccaaccatggcaaaagcagttattacaacaaaagggattaccagttccagaccccactttggcggaatcatcttggacattgcgtatagagggtaaattcattagtgatattcctgatgaacaacagcaaattgatgaaacattcaagtttagctcatttttatcagccatctcggttgatttacttccaaacgaaaattacccgaacattcaagagtctcaatcccacattatagaatggagagatgatggtccaaatgccaataaaccacctgcaagcgttagttttgatggattggatatcaagaggaacggtattttcaatatcaagtcaaaaattgctttgctagtaaagaatcactcaaacagtcttaaactttcagaggaaatgtctagatttgttggtaaacaagaatgttcgcaacaggaattgttatacattatttggcaatatgttttattcaaaggtctattcaaaaaaagcaacgcctacaccgaggtaccagcggttgaaacttccacattgcctaacccagctgatgataaagattctagtgacgatgatttgacattggttgaagcagatgatcttttgtttgaattgttgaaagtgaagacgtttaaatttctggatctttataaattaacccaagcccattttgtgccacgtgaacctattatcgtagattatgaagtgaacaccagaaaatcgacaactttgggtaatgttgttttggatataccagttgaattgccactcaatcttttgaaggcacagaaggaattactagatgttaacaagacagcatttgaaaacttggctaaggcagactccaccattctgcaattagatcaaagaatatctttagcaataatagctttgcagaatgcaaatctgagggaaaagttctatagagagttaagcgatgatccagtgaagtttatagagaactggctcgaaagtcaagcggaaacattgaaagccttaaagagtgatgaagggtacgatgaggaagtcgttagaagagccaagtattttgaagagaatgaacatctcattaaggaaaaaattgaacttttgttaggctcaaataaattttaa

SEQ ID NO: 6170 - DNA, 714 bp, Candida albicans
atggcatcattatatccattaaaatttaacgaaaaacttgcattcttttataatactgttgctgcaacattatggttttgttgtttaggtagatttcttattctacttcccttggtagggagaaaattcttacctggtggaatggctgatttctttcatgtggtttcattactaccgataattgaatcattatttgtgaaatcagtgttaaggaaaaaattcactatcacatcattatgggggattctgaatggattaaaaatggtgtggctatgttatggtgttattttccctcatcccaaaattgccaaacatacttcatattcattattaattacttcttggtgtttacaatatttcattcattacttttattatgcattcaaagtgaaaacaaagagttcatttcattttttgttttggttagaatacaataatttttacttgacttatcctttgggtttggtttctgaaatgattcttttattcttaagtcttgcctttgttgaacaagactcgatatatgattacgttttaagagcagcattcttggcttatattccaatagcatattttgcttggggtcatttgaaatcaagaaagaagaaaagatacaccgaaattatgaataaaagaaatgttagacaagtagcaactttagaaagtactactactagtactaagaatacctctattgaactaagaaatatgtaa

SEQ ID NO: 6171 - DNA, 657 bp, Candida albicans
atgtcttggatatttggaaaatcatcaacaaacaacgacaataacactactaccaccacgaacgatcaatcatcaattaaacaaacattagggtttgatcctaaagaagttgccgatgtcaacaccattatatctacccctggagctatttctgccagtagattacaccctttagctggattagataaaggtattgaatatttagatttagaagaagaacaattaaatactgtcgaaggttctaaaggtttaattccaagtagatcatggactgatgatttatgttatggtactggtgcagtatatttattaggtttgggaattgggggattatatggttttcaacaaggtataaaaacattaccggaatcagctccttcaaaagtcaaattaaatcatattttaaataatattactaaaagaggtccatttttaggtaatagtgctggggtattagctttaacttataatttaattgattctactattgatggtataagagaaaaacatgatgatttaaattctgtcactgctggagcattagccggtgcgttatttaaaagtagtgctggtttgaaaccaatggcttattcttcagtaatgatggctggtgctgctggtatttggtgtggtttaaaaagatttttacaagaataa

SEQ ID NO: 6172 - DNA, 2022 bp, Candida albicans
atgggttcttcagaatataattatgatgagctgggagaaacatggccattctttgtgttggcgttgttatcttttattttgttgccattgaccataaagtacatatctagagtttttacaaataccaatcccaccaaggaaaatcaatccattgttggagcaattcaagaaaacagcgagactttgaaagtgcccaacttgtctgaaatcaaatcgttccaatccaagcaaaagtctctgaaaatattcaataaaacattaatcttcttgcttatcggatggagcattgttatatacgtggcaaagtatgttaccaaggaagctgatttaacagtattatttgatccatacactattttggatgtctcgtttactgctagtgaaagagaaatcaagagtcattatagaaagttatctttgaaatatcatccagataaattacctaaggatttgactgaggaacaaagatctcaagcagaacaagcttatattagattgacttctgcttacaaggcattgactgatgaagttaccagagaaaactttttaaggtacggtcaccctgacggggagcaaccagccacacatggtattgccttgcctcaatttttggtcgaaggaaaatatagttcattagttgttgttttatattttatggtcataggtatcttgttaccatttattgttggaaaatggtggagcaatgtgaagtcacataccaggaaaggtttgcatgttgatactgctgccaactttgttcgtaagtttaccgacagggatcctgcaaaggtcattacaccagatgttattttggattatgttttggaaagtgaagaaattagacaagaattccctaatgcttcacatgcagagttgaaagatttggtgtacaggtatttaaatagacagtttgacagtgatcctaaagtcgagaagaaaaaagttgatctcattgcaagattaccatttttgattaatggattgattgacatagccattgtgttcagactccacgaaacaattttcgccaccgaagatttgaagaagtcaataattcaagctgtcaagccaacagggagataccaagagttattacagttaccatatgtggatccagaaattgtatccaaacaatctatccgaaaattaggtaagcttttcgctatttctaaggatgaagccaagaaagcattgggaatacaaagcgatgaacatttggagcgtgcattgaatgtagctcaacacattccgacacttcgtattattgatgctgagatcaaagtccctggcgaagaagatggtgctgttcatccaaactcacaaggacacatttccattaagtttttggttaaatctcctaaattgaaatcatgtcctgatattgaagatgagagattaaaagatgaagaaactttggaatacatgaagaacccattaattgtcaatgagcaacaaaagaaattgccatattcttatgctccatatttcccgcaaccaatccgtaattcttggagttgctatgttatcggacagaaggaaaacagattgcttgaagacagtaccaactatgtgttggaaaatatagatttgaacaacttggaattactgcaagaagcatggatcaagggaactgatgttagaatcggaacctataaaattcaattacctggagctattggtaacgttgggaactattattatagattggttatgaagaacaatgcatatttcggatgtgacgttgatatacctattgatttagaagttacaccagtatccattggtaagagtcttgcaggattgaaaaagaagtttgacgaagaggacgagtcagaagacagcgaatctgatagtgatatttcagatccagaagaagacagtttagcaggagctatagctgcattaagaggatccgatctcaagaaaaagaaatcatcaaaagatgaagtcgaggaagaaagtgaagatgaagaggtgttcactgatattaatactgatacagaagatgaaggagataattaa

SEQ ID NO: 6173 - DNA, 1020 bp, Candida albicans
atgaagttgtcagattattatatagacaaggaattaatttacaatagtgccatttctgatatatatacggctattgataagtttaataacttaccagtatgtcttaaaatagttgatgaagatttcagtcttccaccacattcaatccatcgagaagttcttatacttaaaactttgaaaccacatccaaacataattgaatattttaatgatcttaaaatttgtgacgatattatattagtcaccaaattgtatcgttatgatttgagtcaattgattgaaattacaaaatattgtaaacgaacaacacgatttatttatggtattaatggtaatcttgttagtaatcaatatacacttgctaatgaaattgaagaaaaagatatcaaattatggttaaaatcaatgagttcaggacttgaatttattcattcacaagggataattcatcgtgatataaaacccattaatattttctttgcccgggatgatataacacaaccgattattggagattttgatattagttatgatttaaaactgccacctaaagatgaaccccctatggcgaaatatattgatgtatctacaggtatttataaagcaccagaattgattcttggtataactaattatgaatatgaaattgatatttggtcattgggtataattttgactggtttatattcagaaaattttcaaagtgttttagtcaaagatgataaagaattgactaatgattctcatgttagtgatttatatttattaaatcaaatatttgaaaatttcggtacacccaatttaactgattttgaagatgaattattttgtgatgaatataataatgaaaacttgcattttaaaaaattcaatttacaaaaatatcctagaaaagattgggatattattttacctcgatgcaatgatgatttcatgaaagaaatttttaccaagatgattagatatgatcgaagtaaaagaataacttctaaagaaatcttacaattaatgttagattga

SEQ ID NO: 6174 - DNA, 816 bp, Candida albicans
atgtggttttctaaaactaactttcccgttgaagggaaaacagcattaattgtgggtgcatcccagggaataggagttaacttagccgaaagattatatgagaaaaactgttcaacaatattagttgcacgaacagaatcaaagctacaacaccaaattcaaaacatcaaagaaaaataccccgagtcttctgccaagatatcatatgcagttgcagatgtgtcaaattatgacgaatgcactagattatggcaaacaatccatcctgctgatccagatatactcttttgttgtgctggttcgtcaatacccaaattgtttcaagatttaactaaagtagacattgaactggggatagacatcaattacaagacagttataaatgtagtccacacaggattcaaacatgctttatctaataacacagataatttggagccacacaatttcaaaaagagaagcgtcgtattgttcagctcagtcgtcagctttttcccctttataggctactcgcaatatgcccccatgaagtctgcaattgaatcattatccattattttacgccgagagttgtcaccatacaactatcgtgtcacatgtgttttccctgggaatttccaaagcgaaggatttgaagaagaacaaaagaccaaacctgatatcaccaagaaaattgagggtcccagcaatcctatccctggagatgaatgtgctaggttgataatagatcaattagacaaaggatatgattcgataactacggattttatcgggtggtttttgggctgttctgttttaggcatttcttcaccatga

SEQ ID NO: 6175 - DNA, 819 bp, Candida albicans
atgtcagattttgaatacgataataacaatactggagcattcggcaatatatcccaaggtggtttcaatactgaacatgctggatcgtctcagcgtcaaacaacaacccaagttagacaaagtttgacacctgtaaccatcaaacaaattaatgatgcaacacaaccagtgccagatggcgagttcaaagtaaataatgtcgaattaaatatgatttcatttgttggtgttgtacgcaatgttgaaaatacgaatgcatctattgcagtaactattgaagatggcactgggtctattgatgttcgtaaatgggtggatgagactatcagctcggccgaagaggactttgaaaagtataatgagatgaaaggtaagtatgtttatgttggtgggtcattgaaacagttcaacaatcgtaaaactgtccagaatgcttctatttctttaataactgacagcaatcaaattgtatatcaccatttgagtgcaattgaacatcatttgaaagctcaaggcattacagcagctgatgctgctagtgctggtgctggacaagcaacaaattccactgccagtgctggtagtggattgtttatggataatccaactagtctctcgaaagatacaggatcacttacggatcaagtgatagccgtattgaaagaagccagcagaaccatgccagatggtgtcccagttgactacgttgctgaaaaattgagtattactaaagaggaaagtcagttccaacttttaaaattgaatgatgaaggtaaagcttatgctggttatgatgacaacagttatcttgtgatttga

SEQ ID NO: 6176 - DNA, 1038 bp, Candida albicans
atgtccaaaatagagccagtcactgaaaaagaagaagaatacgtttccgaatgggatagaagaagatatgttcccaaagcaggtgaacctgaattacctccccaattatcagaattctctaacaagaccacagacgaggttattgaggaattgaatagattgccattttttatgacaaagttagatgaaactgatggagatggcggagaaaatgtaaacttggaagcacttaaaagtttggcatatgaaggtgatcctgacgaaattgcctcaaatttcaaaaatcaggggaataattgttacaaatttaaaaaatacaaagatgcaattatattttatacgaaaggtcttgaagtaaactgtgacgtggacgcaatcaattcagcattatacttgaatcgtgctgcttgtaacttggagttgaaaaattaccgtcggtgcattgaagattgtaagaaagtattaatgcttgatgagaagaatattaaggcttgtttccgttcaggaaaggcattctttgcaattgaaaaatacgatgaagcaatcaaagtgcttgaatacggtctaaatatagaaccagaaaacaaagatttacagaaattattacagcaagttcaaaagaggcaagaaactttagctcaaataaaagctaaaaaggcacaagaagaggaacaagagcggttgaaaaatatcgtgttggagaattctataaaattaagacacattgaaatagtgaagtcctcatctcctccagaagtcttgaagactgccaagatacgattggaagaccccaaagattatcagtcacaattaatattccctgctatgatactataccccaccaccgatgaatttgactttattgcagaaataagcgaattaactactcctttggaattgctagagatggtattaaatagacctagggaatggtttgatgatccaaaacacaaggatttcaatgtcaaaaaattggaatgctttatggaaactgaatctggtgggttgattaaagtgggcaagattattagcagttaa

SEQ ID NO: 6177 - DNA, 831 bp, Candida albicans
atggggttagcaggtacaaagataaagcagagatttggaaatgatcctagaaatacaaactggtctaatgatacctcccgttttgggcatcaatatttagcgaaaatgggttggcaacagggcagtggattagggttggtgtcccatgcattaactacccacgttaaagtttcaattaaagacgataatttggggctaggagccaaattacataaacgtaaagcgaatggagacggtggattagaggaagaaggaactgctggattagatgcgttccaaagaatattgggaagattaaatgggaaagaaaatgtggtcaataaagtattggacaatgttcgtgatgatgatataattaatggtaaatggggtatgagatttgtcaagggagaaactttgctgagtacttgggataaggagagcaaaaaattgatatcttataagaatatagaagatgatgggaaaaaaagcagaaagaggaaagctgatgaaagtgaaactaaggaagacaaaaagacgttgaaaaagcataagaaggaaaagaaagacaaaaaggagaagaaggaaaagaagaaaaagaaggaaaagaaggacaagaaggacaagaaggacaagaaaaacaagaaagacaagaaagacaagaaggacaagaaggacaagaaggacaaaatacgaactggttcagatgaaacactagtatcaaaagaatctagtgctactccgcccccaattgccactcgactttcagctagatcaaagtggattaagcaaaaaagggcatcagtgatggattcaaaagcattaaacgaaattttcatgatcaccaattga

SEQ ID NO: 6178 - DNA, 1278 bp, Candida albicans
atgacttctataccgtctgatataaaactaccgccatctgatgtcaaacaaacaattgataaaacagtaggctatgttattaaaaatggaaaatcttttgaagaacgattattgaaaaataataaaaatgataaattcacttttattaaaccagataatgaatattttccttattataaatggaaattagatacgtcaaagaaaaatcaagggctgactgaaacgtcaactgaaaatcaacaccaagaagaggatataataatagcaaaaccaccagatttaccctttttaatagatttacccattatttcacaacacgatttagatgttattaagataacagcgttatacattgctcaaaatggtgaatcgaaaatcccaaaattattacaacatgaaactaaattgaataatcgagctcaatttgagtttttaaatgaatctcattctttacatgatttatttcaaaaatatattcaacaatataaaatcgtgattgaattgtatcaaaactctcatggcgaaaacgtagaccaagaccaagaatatcttcaattgcgacaattaataaagaaaccacgaggagaatatgatatcttaacccaagcatataatcgggcccaatatataaagcaaaataaagtgattgccaagagagaacaagaagagtccaaagctcgacaattacattatgcactgattgattggcaagatttttcaatagttgctaaagttgattttaatgctattgatgcggttaaagaattgagtatgccgttaaaacgagatgatttgataaaacgatcattggatgccagaagtaaagatattgaattaccaaaagtagcagtggcggcgacaacaacatcaccagtacaagttgaagtaattgataccaagaaccaaggtctgacccaagatcagactgataataatacatctactccatctgcaccaccaatcaagggaatgaaaattaaagctgctggaacttcacgattgaaaaaatcactggaagcaaacacttcaatgacgacgacaaatacgattaaatgccctattacaggtaaactaattccagaaaatgaatttgatacacatataaaaaccttgttacgtgatccaagatataaaaaagaacaagaaaattatatacggaagaatttcagttatgcgtccaatattacaactgatcaagtatatgaaaatattaaacgatttgtgaagaaaagagctaatgttgaagatgaaaacccaaaaaagaaaaagaaagcttag

SEQ ID NO: 6179 - DNA, 1248 bp, Candida albicans
atgtcacaccaacaagaagacgtcgtagacgatactcaagaagaatatatcaatgttaatgaagtggctgaggaagttgcagatgatgatcaagcgccacccgatgaagaagatgaggagatggaattagatgatgagcatgagactttagaaattgacatgtccaacaattcatggacttattttgataaacataccgatagtatatttactattttttcacatcctaaattgccaatggtattgactgggggtggtgacaacacggcatacttatggaccacacacacccaaccaccaagatttgttggcgaaatcactggacataaagagtctgttatatctggagggtttactgcagacggcaagtttgttgttactgcagacatgaatggattaattcaagttttcaaagccacaaaaggaggtgaacagtgggtgaaatttggtgaattggacgaagttgaagaagtgttgtttgttactgtgcatccaacattaccattctttgcctttggtgctaccgatggatctatatgggtctaccaaatagacgaatccagtaaactgctagtgcaaattatgtctgggttctcacacacattagaatgtaatggtgctgtatttatacaaggaaaagatgaaaatgatttgacattggtctctataagtgaagatggtactgtggtgaactggaactgttttacaggacaagtgaattataaattgcaacctcatgatgactttaaaggagttgagagtccgtgggtcacggtcaaagtacatggtaatcttgtggccattggtggcagagatggccagctatcaattgtgaacaatgacactggtaaaatcgttcatactcttaaaacattggataatgtcgacgacattgcagaactctcaattgaggcattgagttggtgtgaaagcaaaaatattaacctcttggcagtgggtttggtttctggtgacgttttattatttgatactcagcaatggagattgagaaagaacttgaaagttgacgatgccatcaccaaattacaatttgttggcgaaacccccattttggtgggaagtagtatggatggtaaaatttacaaatgggacgctagaactggtgaagagttgtttgctggtgtgggacacaacatgggagtattggactttgctattttagatggaggtaaaaagttggttactgctggtgatgaaggtgtttcattggtctttgtacatgaatag

SEQ ID NO: 6180 - DNA, 1272 bp, Candida albicans
atgtcatctactaaacaggatcttccacaagctagggctccaactttaccatccaaaacaacacctgaacaaagatattggagaagttatataactcctcaattaattaaagaaaatcatccgataaccagtattgaattcaatcctacaacacctaatgattttgctattgcctcagcaactaaaattcaagttttttcatctaaaaccagacaagtaataaaaactttctcacgatttaaagatgtagtatattctggtaattatagatatgatgggaaattattagttgctagtgatgcatcaggattagtatcaatatatgatagttatcaaccacgaaatttattagttagcttaactccttcttcccatcctactcatgtggcaaaatttcaccccactattgggaatcaattaatcacggggtcagatgatagaatgttacgagtttatgatatttctcaaacttctaatgggcccattatacaatttgataatattgatcatgaagattatataagaagtgttaatttcatcccgggagattccaatttaatagttactgggtgttatgatggaaatgtaagaatattagatgtaagggatcctcatcgtgttgttgccaaatttgatcaagaaaaccctgttgaagatatattagctgtatcttcaaatactttagttagtgctggtggaccttatgttaaaatttgggatttaaatagaatgagtcaaattcatcaattaaacaattttaataaatcaactacatgcttatcaaatactcataccaatggattaatggtagggtcattagattctaccattaaagtatttgattatacttcaactaattggcaagttcaatttggttggaaatttggtagtggagttttatcatgtggtgtatcaccaattaatcaaaagcattttgttgctggattaacatcaggattaatttctataagaactaaaaaaactgaacctaaagttaaacaaggaattaaaaatgatgtatctggtggttatgctagaatgatgaaaggtagagattatactggtgaagaagaagatcatataattgaaagttcaaaaataataactaataaaactaataaaagtgttaatgaattaatgctgagttataagaaatatcttggtgctagtggttcaattgatgatattaaaccaaatgatttgaaacaagaaattagtcaatgcttaaaagctaaagaaatttgtggtatgttagaacttttaggtgtataa

SEQ ID NO: 6181 - DNA, 1650 bp, Candida albicans
atggcaggagatccatttttatctgacccttctaagaaaagaaaacgtctgaataaattgactagtaaaacaaaacgatctaaatcatcaaccccaaccccaacacctacacctacaccaaatacaaaccatcaagatgacgatatatcaagtggatccgatagtgaaaacggacatgccaatggaacaaatgaaaatgatcatggcgataatgaaagtgaattatcatcagatgaagaatttgctgatgaaaccgttaatgataaacgtagaagattagctaaacaatatttagaaaatttgaaacaaaatgaacatgaattatacgatgaatttgatgctaaagatttagatgatgatatattagcaagaagattacaaaaagacattgctgaaactaaaggatacgtttataaatttgtcggtgataaaataaaggatcaattagatgaagaatatccattagaattaataactacaagaattggttgtaaaaatttaactagtatgacaattaattatccatttttatatactgtttctaaagatatggaaatcattaaatgggatataaatgaaacccacaagaaaccgaaaagaataaaacatactaaaggtggcaataaatatttcgaaataaataccataaatcctcaattaaatcatcattggcaacaaattaattgtatagctgcttcacccgatgggaaatatattgttactggtggatcagattctcgattaattatttggtcaagtgaaaatttaacttgtttaaaagttttaccaacgagatcttcagtgaattcaattgttttcagaagaaatagtgatcaattatttgctgcttgtgctgatttaagaattagaacttattcaattaatcaattcacgcaattggaaatcttatatggacatcaagataatattagtgatatatctgctttggcaaaagaaacttgtgtttcagttggtagtagagataaaactgccatgttttggaaaattgctgaagaatcacgtttaactttccgtggtggtgattcactagaaaagaccaacaaaaagaaaaagaggcactaccaccaggaggaggaggaggcggagaccgagaatgatgaatcgacattctataatgaaggatcaattgatgttgtaagtatgattgatgaatcgcattttgttactgggtcagataatggtaatgttgccttatggtcattagctaaaaagaaaccattaaccacgaaaagattaagtcatggattacaaccacaatttactccaattcaagcaagttcagaatcaaatgaagaattggctttacaacaaattcctaaaccacaaccttattggatcactgctattcatggtgttccttatagtgatattttcattactggatcgtttaatggtactattaaaatatggaaattagaagaaccatcattaagatcatttaaattacttggtgaaattaaacaaaataatttaaatggatgtattgttaaaattgattcagtggagattccaaatactaaaaaattgaaaatttacgtattattaagtaaagaacataaatttggtagatggttaggtaaattacctggagctagaaatgctttagttaatttcacagttaatttatag

SEQ ID NO: 6182 - DNA, 453 bp, Candida albicans
atgccgaaatattactgtgattattgcaagtcatatttgactcatgatacaatgagtgtgaggaaatcacatttacaggggagaaatcatattaaattctattgtgattattacgaagcaaaggcaaaggaaacaaatatatggaatcctctgagtataccctatgaaatcactctagagaagttgaatcgatatagcgatgcgaagaagtcgaatggttcatctgaagataatatggatatcgataaaaaagagaatagtctggatcacaataaaggaaatgtcgttaatcacagtgatgctggcaatgacaacgatgatgacgatgatgagatgatatttttgccacctccgcctaacttgtctggattgcctttgcctccaccagcggtatataacaatcagaaggaatatcaaaaggctatattaagacaaacactaacgaagagctga

SEQ ID NO: 6183 - DNA, 1200 bp, Candida albicans
atgacagaagaggaaaagaaacgtctacaagtattggaaagagatgccgaaactgcttatccatttttagcatcagatgaaaaatcctcaacttttaaaactgctgaagatcttgaaagtggcatcaatccacttgtttccattgcaactactactgaatcacaacaaacactagataatgtgagtagtatcagcaccactaccaatgagaaaccaaaacctaaacctaaaccatgggtacattttgttgctggaggtattggtggtaccgttggtgctgtagtgacatgtccattagatgttgtcaagacaagattacaatcagatgtgtatcattcaatgtataacaagattcctaaatcgggaaatcctataattcaagcatggcaacatttaagtgaaactggatcagtattaagaggaatgtatattaatgaaggtgcatcatcattattcaaaggattaggaccaaatttagttggtgtgataccggcaagatcaataaattttttcacttatggtgctacaaaagaatttttacttgggaatttttcgccaacaaatagcattcaaggtccaagacaagaagaaacttggatacatttagtatcagggataaatgctggatttgtaacgtcaacggcaacaaatccaatttggttaattaaaacaagattacaattggataaatcaaaagggaaaaattataaaaattcttgggattgttttaaacatataattaaacatgaaggtttcactagtttatatcgtggattgagtgcttcttatttaggtgggattgaatctactattcaatgggtattatatgaacaaatgagaatgtttattaataaacgatcattacaaatccatggtaatgatccatctaataaaacaactaaagatcatatactagaatggtcagcaagatcgggtgctgctggtttagccaaatttatggcatctttaatcacttatcctcatgaagtggtaagaacaagattaagacaagcacctttagaatccactggtaaaccaaaatatactggattgattcaatgctttaaattggttattaaagaagaaggatttggtagtatgtatggtggattaactcctcatttattaagaactgtacctaattctataattatgtttggaacttgggaattggtggtaagattattatctgaatggtaa

SEQ ID NO: 6184 - DNA, 2538 bp, Candida albicans
atgtcaagattaattgttaagggacttcccaagtattatactgaagaaaaacttagagaatttttctccaaacaaggagatgtgaccgatgttaaattaatgaagaagagaaatggtgaatccagaaagtttgcattcattggatacaaatcggctgatgcagcagaaagagcagttaaatactttaacaaatcatttatagatacggccagaattgaagttgagtttgcaaagacattctctgatcctactgtgcctctttctttcaaagaaaagagaaaaagagaagagcaaaagcttaaggatgaacaggaaagacttcttgaacaagaacttagagcacaagcaaagaagcaaaagactaagtcgacttcagagatagatgatgaaatcgctagtaatccaaaattaagagaatatatggaggtcatgaaaccctctcatcaagttaaatcatgggctaatgatacaattgcggacggatcaggtggaccatctgtacaagatttagaaaatgctttgaatggtaacaatgagtctccagtagacaaatccaacatcgaggttgtcaataccgtggaagatgctagtgatgacgagtacaatgatttcaaagagctcagtaataaacacggcgaaaatgaagacgaggaagaagaagaagaaatgatgagcttaggagacttaccaactaatgaagaaaataaagacaaaaatgaatctggtgaaaatcttgctgctaatgaaaacatatctgacttggagtggcttaaatctaggagtactcgtattaaagaaaatggtgaagtgccagaaattgtacccgaagtaaaagaagtcaatgaagttactgaagttacgcagcaatcagacaatgaacctgaattgacacctgaagagcaaatagctcaaaaaattgaagaaactggaaggttatttataagaaacatatcttatgaagccagtgaagaagatttcagaagcttgttttcacaatacggggctcttgaagaagtccacattgctatcgataccagaacaggcaagtcgaagggatttctttatgtgcagtttttgaaaaaagaagatgcaacaagagcatatcgatccttagacaagcaaatttttcaaggacggttattgcatatcttgcctgctgataaaaagaaagatcaccgtctagatgaatttgatttgaaaaatttgccattgaagaaacaacgtgagcttaaaaagaaagcacaagctgcaaaaactcagtttagttggaattcactttatatgaatagtgacgctgtattggaatctgttgcatcaaagttgggagtgacaaaatctcagttaattgacccagagaattccagttctgcagtgaaacaagctttagctgaagcccatgtgattggtgatgttagaaaatactttgaggatagaggcgttgatttgacatcgttcgacaagaaagaaagagatgacaaaattatactagtgaaaaatttcccattcggtaccactatcgatgaaataggggagttattttctgcttacggacaattaaaacgtatgttgatgccaccagcaggtacaattgctatcatagaatttcgtgatgcaccaagtgccagggcagcattttccaaacttgcatacaaaagattcaagagtagtatattatatttggaaaaaggtccaaaagacttgtttacccgtgagccaaccaccaacgaggttgctaccattccagagcaacagcaaaatgaacatgcagttgaagctaaaatatctgctaatgaaattttgggcgaatctaaagaggatgacgaaattgaactggtacaaggtccaactgttgctgttttcgtgaaaaacttgaattttgctaccacagtgcaagctttgtccgatcttttcaaacctttgcctggttttgttgttgcaacagtgaagacaaaaccggatccaaagaattcaggcaaaactttaagtatgggttttggatttgttgagtttagaacaaaagaacaggcaaatgttgctatttctactcttgacggtcatgttctcgatggccacaagctacagttgaaattgtctcataaacaaggaaccggtacctctgcttcttcgataaagaagtcaggtaagtcttccaaaatcattatcaagaatttgccatttgaagctaccagaaaggatcttttggagttatttggtgcttttggtcaattgaagtctgttagggttccaaagaaatttgaccagagtgcacgtgggtttgcatttgtggagttcaatctaatgaaagaggcagaaactgctatgagccaattggagggggtacatttacttggaagaagattggtgatgcagtatgctgagcaagatgccgaaaatgctgaagttgaaattgagagaatgacaaagaaggtcaagaaacaagttgccactcaaaacttggctgctgcgagattggcaggaaagggcaagattgaattggaggaaaaggatgaagaagattttgatagagattttcagtag

SEQ ID NO: 6185 - DNA, 1311 bp, Candida albicans
atgaaagttaaaactataagcaggtcttccgacacatatatacctgtgaaaaacactcaagaatcagcattacctcgtaacttgaatccagcattgcatccgtttgaacgtgccagagagtatactcgagcattacaagcaactaaattagaacggatgtttgctcaaccatttattggacaattaggcgatggtcatagagacggagtatattttatagccaagaattaccaagctactaatcaaattgctagtggttcgggtgatggtataatcaaatattggaatttgactgatcgtttagagactgctagttttaaagcccattatggaatggtgagtgggatttgcatatatgctaacaaaatgtatagttgtggggatgataaaacaatcaaaatatggtcagtcaatagtgatgattttgacattaaagtcaatgatgatgttgatgggatatatcgtaatcaacttggtggtgccggtggtggtgatgggaaaaccagtggtggattattgaaaacatttattggcgaacattcattcaaaggtattgatcatcatcgtgatgacgatttgtttgtcactggaggtgccacgatacaattatgggatgtgaatcgatccaaacacatttccgatttatcatggggtgcagataatgtcggtacagttaaattcaaccaaacagaaacaaatataattgccagttcaggatcagataattcaattgtattgtatgatatcagaaccaatacccctgtacataaggtagtcacaagtttgaggaataattgtatcacatggaatccaatggaagcatttaattttgctactgggaatgaagatcataatggatatctttatgatatgagaaatttacaaaagactcttaaagtgtataagggccacgttggggcgatcatggatgttgattttgctccaacaggtcaagaattggtgactgggtcttatgataaaacaataagactatggaagaccttggatggaaggtctaaagacgtttaccataccaaacgtatgcaaaaagtgtttagtgttaaatacagcaccgattcaaagtacattataagtggttcggacgatacaaatttgagagtgtggagatccgatgcttcttcaagatctaacatcaaatctagtagacaaagagctaaattagaataccaagacaaattgaaggaaagatacaagtatatgccagaaattaatagaattgcaagacatcgtcacttacccaaaccagtgaaaaaagctcaagatatgaaaagactttatagtaaaaagtaa

SEQ ID NO: 6186 - DNA, 1584 bp, Candida albicans
atggctcttacaggtaaaatgggatcacatgagagagctggcaccgctcaatatgaaagagcaggactgtacaagaaatccaaaaggcatactaaagataaaaagttgaattcgaaattacaaagaattgacagacagtataaagaggccattcagtcagcagcaggaaccgatttattgttacaagaagaacaggggtttttagaagcagaaaatgatatggaaaaaacgttcaaatttaagcaagatgaaatagcagatgctgtagatagtagtactgccaataagaaatttgaactaaagttaccagaatttggaccatacacaatcgactattctcgtactgggcgtgatttgttattaggaggtaaaaagggacatgttgcttccattgattggaggaaagggaaactaggttgtgaattacatcttaatgaaacagtgcatgcagtaaagtatttacacaatgatcaatactttgctgtagcgcaaaagaaatacacttttatttatgataatcaaggtacagaattgcacagacttaaacagcacatagaggctacgttattagactttttgccctatcattttcttttagtaactgctggtcacacagggttcttgaaataccacgacgtgtcaacaggtcaattagtaagtgaactcagaacgaaattaggtccgactcaagcaatgaaacacaatccatggaatgcagttacatgcttgggtcacggtaatggaactgtaagtatgtgggccccgaatatgccagagccattggtcaaattgcaagttgcaagaggaccaatcagagacttggccatcgatagagaagggaagtatatggcagtagcagccgcagacaaaactttgaaaatttgggatataagaaaattcaaagaggttgataactattactcacaaactccagcatccagcttagacatatctgatacaggcctactctcagtaggttggggtccccatgttaccatctggaaggacattttaaaaggcaaacaccaatctgagccatacatgaatcatttaataccgggatcaaaaattgaaaaggccaagtttgtgccatttgaggatatattaggtgttggtcatgaagaaggtttcaattctattatcgttccaggatcaggtgaagctaactacgatgctcttgaattgaatccttacgaatcagtgaaacaaagacaacaacaagaagtcagatcattgcttgataaattgcctgcagacactatcgctcttgatccaaatgttattggtaccgttgacaaacgcgctagtactgtgagattgaaacccggtgaaatcacagaattggcagataaaacacaacagtctaaggataagatggagattaaagcagaagtgaaagggaaaaattctgctttgagaagacatatgagaaaaaagactcaaaacgtgatagatcaaaggaaattaagaattgaaaagaatttgaagatggaaaaggaagctagacagagaagacgtaatttggaacaaggaatacccgaggagaaggatctcttgggtccagctttagctagatttaaatag

SEQ ID NO: 6187 - DNA, 555 bp, Candida albicans
atgagtttatggggtgtatatacggggccacaaccccctaaaaaaccgttacaagaaatgacacaagaagaacaagcagaagaaggagctcgacaaatgattggattcatgaattcatgtcctggtaaaactgtcatggcaggagtatcagggtttgccttgggtgggtttttcggattatttatggcatctatggcttatgatacacctattggaactgatgctgtgaaacatatatcggaattaccatttaaacaacaaatgaaattacaatttaccgatatggcaaaacgatcatattcatcagcgaaaaattttgggtatattggtatggtttactctggagtcgaatgtaccatcgaaagtttacgagcaaaacatgatatatataatggtgttagtgctggatgtattactggggcaggattagctattaaagctggtcctcaagcagcattagttggttgtgctgggtttgctgcattcagtttggcaattgatatgtatttgaacagtgatgcagcaccaccaccaaagaacgattatgatatataa

SEQ ID NO: 6188 - DNA, 942 bp, Candida albicans
atgtcttttttaaatactatacgtggacttgggagagggtccaagaagaacaagaaggatttagaaccgtcaaataacgccatatattctcattcaaatctatctggcaatggtttgagacgaacacaatcacctaccaagttttccccttcaaaattatcttcaaaaggtgcacaaggctcagctgcatacacgtcttctcctacaaagcgtagcagaacaggacaatctttacaacaccaagatctgcaactgctgcttcaatatcaacaacagctgggaagtgtactgccgctgaagcgttcttccatacagactaccaaaagcacaactgtgaatgctgatccgcctttgtttttatgtgaaccttatgtgaaaactgctttggtcaagggatctttcaagactattgtccagcttccgaaatatgtggattattgtgaatggttggcgttaaacatctttgaacttttcaatcatttaaaccggttctatggagttatccaagaatacgctactcctgaagcatatccaacaatgaatgcgggaccaaacacaaactatttatgggttaactcttctggtcaagctgttaacttaccggcatgccagtatattgagtatgttattacctgggtcaccaacaagttgaatgatcaaagcgtattccctaccaagaatggcggagcatttccacccaattttataaaagactgcaagaacattagcagacaaatgtttagaatttttgctcatatataccacaatcatttcgacaagataatccatttatctttggaggcacactggaactcttttttcgcccattttatatcttttgtcaaagagttcaatttgattgatagaactgaaatggaaccgttgttacctttgatagagaattttgaacaacaaggaaaaatcacccaagcaagcaaatag

SEQ ID NO: 6189 - DNA, 1059 bp, Candida albicans
atgtatggacagatagtaataggacctcctgggtctgggaagtctacttattgccatggaatgtatcagtttatgtcagcaattggaagaaagctgtgcattattaatcttgacccagccaacgaccgattaccttacccctgtgagttggacatacgtgattacatcagtttagaagagataatggaggagttagatttgggtcctaatggaggattaatgtatgcattagaactgttggacaaacagggcatagatttatttattggcaaaattgaacaattaattaacgagggcaactatttgttgtttgattgtcccggacaagttgaattattcacccatcataattccctctatcgaattttcaaaaaactaactcaactcaaacgattgagattatgtgttgtatcattaatcgactgcatttatttaactagcccctcacagtatatatccatattattattaagtttaagaacaatgctacaattagatctacctcacgttaatgttatcagtaaaatagacatgttgaaaaactatggcgaattgccgtttcgattggattactataccgaggctcaagatttacagtatttgactccatatttggagaaggaatctaattcggtattgggacagaactatgtgaggttgacagaactaattggagaattggtagaagatttccatttggtttcttttgaagtattatcagtggagaataaaaagagtatgataagcttaatgagtgttatagataaagccaatggttacagttttggtagtgagattggtggagatacagtttggagtgaagccactagacaaaatggtagtggaaatggaggttaccaagatgtggatattcacgaacgatggatagatcataaagaagagtatgatgccgaggaaagaaagcaagagcaagcatttgcggaaggtctaccacaagaagaagtggacaataagccattgacagaagatgaagaatgggaagcagcattgaaagactgggaagagaagcatgggggagagggtgctatgttgagatga

SEQ ID NO: 6190 - DNA, 651 bp, Candida albicans
atgtttaagaagagggtcataaaggattcacgggtatctaagcgaaagataggtgatataaatgaagccagtgaagatgcacctgatactcaggtaacgaaaaagagtaccctcatcaccaagaagtcagacatacagaaaaaatcggtggtgatgccccgatcatcaccacaaacccctttgtccaaatcttctagtgatgatgctgctgctgtggaggttgtttctcagaaatcgaaaaagggcgaactaaaaccgcttgcagcaaatatcaaaaccaccattatcaccgatttccaaccggacgtgtgtaaagattttcaacaaactgggtactgtgggtatggtgatacgtgtaagtttcttcatgtacgagatgaatctaggcaaaagatccccattaagaaagactgggaaattggtggccaaaaagaagttaaagagaaagaggatatcccatttaaatgtgtcttgtgtaagagtgactataagtcaccaataaagacagagtgtggacacatattttgcaaagcctgtttcttagaccgatataaggctaaaaagaaagggacgtgttttatatgtcacaaggaaactaatggtactatggtaccagtgaatatagacaaattgagcgcaactcaagtttga

SEQ ID NO: 6191 - DNA, 1875 bp, Candida albicans
atgtctagtttacaattatccaagggcgccttgaaacaagtgttttcaaaggaaggtcatgatagtgttcaaattccaatgattcttcaaatcacgaacattaaagcttttgatgtgctgccatctgatctgaagaagttcagaattttggtcaacgatggagtgtactcgacccacgggttaatagatgaatcatgtagtgaatatatcaaaaacaataattgtcaaagatacgcaattgttcaagtcaatgctttttccatttttgccacactgaaacacttttttgtgattaagaactttgaagtcttagcccctactagtgaaaagtctcctaataatattataccaattgatacttattttcttgaacacccagaagaaaattatttaactgtgatgaaaaaatccgagagtcgtgacagagaatctccagtgccaggtgtcaccccacctcttgctcagtcaacaaacagtttcaaatctgaagtaggaggcggtgttgcagctcaatccaaaccagccggtactcatagaaaggtgtctccaattgaaacaatttctccgtatcaaaacaactggacaatcaaagcaagagtttcctacaagggagaccttagaacttggtccaatagcaaaggtgaaggtaaagtgtttggtttcaacttattggatgaatcagatgaaataaaagcttctgcattcaacgaaactgctgaaagggcccacaagttgttagaagaaggcaaggtctattacatttccaaagccagagttgctgcagcaagaaagaagtttaacacattatcgcacccttatgaactcacattcgataaggatactgaaataaccgaatgttttgatgagtcggacgtcccaaaattgaatttcaattttgtcaagttagatcaagtccagaatttggaagccaatgccatcattgatgttcttggtgctttaaaaacggtttttcctccattccaaattacagctaaatctactggtaaagtttttgacagaagaaatatacttgttgtagatgaaactgggtttgggatcgagcttggtttatggaataacactgcaactgattttaatattgaagaaggtactgttgttgctgtcaaaggttgcaaagtgtccgattatgatggaagaacattgagcttgactcaagctggttccataatcccaaatcctggcacacctgaaagtttcaaattgaaaggttggtatgataacattggtatccacgaactgttcaagagtttgaaaattgacaatgctggtagtggaggagacaagatctcgcaaaggatttccattaaccaagccttagaagagcactctggctcaactgaaaagcctgactacttttccataaaggcaagtgtgaccttctgtaaaccagaaaactttgcttatccagcttgtcctaatttagttcaaaatgctgatgctaccaggcctgcacaagtatgtaataagaaattggttttccaggataatgatggtacttggagatgtgaaagatgtgcaaagacatacgaagaaccaacctggcgttacgttttgagctgttctgtcaccgatagtacgggccacatgtgggtaacattgtttaatgatcaagccgaaaagttgcttggcatagatgcaactgaattagtcaagaaaaaagagcaaaaatcagaagtggcaaaccagatcatgaacaacacattattcaaagagtttagtttaagagttaaggccaaacaagagacatataatgatgaattgaaaacaagatacctggctgcaggaataaatgaacttgattatgcaagtgagtcccaatttttgatcaaaaaattggatcaactattaaaataa

SEQ ID NO: 6192 - DNA, 2712 bp, Candida albicans
atgtcaagtccaccagctgcttcctcatctcgtgacaataatcgaagaaggaaaagatcaccttacgatgatgaagacgatgataacaataacaatgatagatcttcaattcatcaaccatcatcaccaccattaggatcatcacctaaccctcatcaacatttaccttcatctccagctataccttttgacacagctttagatgttgacgatgtagaagagattgttcacaatgacatacaagatttgaatccatccgaaccagattcagaagaagaaggggacgatttaatggaaaatttagaacaagattaccgagccaatccagaacaagatcattatgatttaggggatggcaatattgatgatactggtgattacgaagaaatggatgctgctacaagaagaagaatgatcaaccaatggaatcgacgtgatgccattttaaataatgctaatcgttctcgaagaggagcatttttagatgatgacgatgatgaagatgaagacgacgaaggtgaagatagtatgggtcaatttggattaccaattcaaagaagaagaagaagagaacaccacgatgaagatcaagatgatttaatggatgatgtagaaatcgatccattcaatgaagaattgtcattagaaagtttgagtgatgtgaaagctcctagtattactgaatggatattacaaccagcggttagtagatctattgctagagaattgaaatcattctttttggaatataccgatgctaatggtgattccgtttatggtaataaaatgagaacccttggtgaagtcaatgctgaatctcttgaagtgagttataaagatttagctgattcaaaagctatattggcattatttttagctactagtccagaagaaatgctaaagatttttgatatagttgccatggaagctgttgaattacattatccaaattattcacaaattcatcaagaagttcacgttagaatcactgatttccctaatattttgaatttacgtgatttacgtgaaagtaatcttaatcaattggttaaagtttctggggttgtaactagaagaaccggggtttttatacaattgaaatatgtcaaatttgattgtttgaaatgtggagtggttttgggtccatacgttcaagattcgaatactgaagtgaaaatctcattctgtaccaattgtcaaagtaaaggtccttttaaattgaattcagaaaaaactttatatagaaactatcaaagaattactttacaagaagctccaggtactgttccagcgggtagattgccaagacatcgtgaagtcatattattatctgatttagttgatgttgctaaaccaggtgaagatattgaagttactggtatttacaagaataattatgatgggaatttaaatgccaagaatggattcccggtgtttgccacaattttggaagccaattccattagaagaaaagaaagtagtgcatttatgggtggtaataatttagtcaatatgtggacagaagaagaaatacgtgaatttagaaaattatcacacgaaaaaggtattattgataaaatcattgcctcaatggctccatccatatatggtcataaagatattaaaactgccattgcttgctcattatttggtggtgtgcctaaagatgttaatgggaaactttccattagaggtgatattaatgtattattattaggggatccaggtactgctaaatcgcaaatattgaaatatgctgagaaaactgctagtcgtgctgtttttgcaactggtcaaggtgcctcggctgttggtcttacagcatcggttagaaaagacccaatcactcgtgaatggacattagaaggtggggctttggtgcttgcagataaagggacttgtcttattgatgaatttgataagatgaatgatcaagatagaacttctattcatgaagctatggaacaacaaagtatatctatttctaaagctggtatcgtcactaccttacatgccagatgtgctgttatcgctgctgccaatcctaatggaggtcgatacaactctacattaccattaccagaaaatgtcgatttaacatacccaattttatccagatttgatattatgtgtatcgtgcgagatttggtcaatcctgaatctgatgaacgattagctagttttgtcattgattcccatatgagatctcatcccaccaatgaagaggatattttaaatgctaatggtaagggtggctctgacgctcaagacgatgatgaaaatatggaagacgaagatggtgtagatcaaccatcagcggcaagaactagatcagaaagaattgaacaattaaataaacaaaaagaacaagaaatatcacctattccacaagatttattaattaaatatattcaatatgctcgagttaaaattcaaccaaaattacatcaaatgaatatggataaacttgctcgagtatatgctgatttaagaaaagaagccatcactactggttcttatccaattactgttcgtcatttagaaagtattttaagaattgctgaatcctttgccaaaatgagattatcagaatttgttagtcaaaatgatttaaatcgagctattaaagttagtattgatagttttattggtgctcaaaaagtgacagtaaaacaaaaacttagaagtaaatttatgaaatatactttgtaa

SEQ ID NO: 6193 - DNA, 312 bp, Candida albicans
atgttattttttagttttttcaagacattagtcgatcaagaagtgactgtggagttaaagaatgatattgaaatcaaaggtactttaaaatcagtggatcaatttttgaacttgaaattagataatataacttgtacaaatggacaacgatacccttacttaggtgctgtgaagaatttattcataagaggatccaatgtgcgctacgtccatatgaatccaaatagtgttgactgtaccttattacaagatgcatcaaggagaggtatgtttacaaatatattttttagcattataagtgctattaattga

SEQ ID NO: 6194 - DNA, 906 bp, Candida albicans
atggtcgactcaaacttcttcgttgatttcatgatgggtggtgtttccgctgccgtttctaaaaccgctgctgctccaattgaaagagtcaaattgttgattcaaaatcaagatgaaatgatcaaacaaggtagattagaaaaaagatacactggtatcgttgattgtttcaagagaactgctgctgatgaaggtgtcgtttccttctggagaggtaacactgctaacgttatcagatacttcccaactcaagctttgaactttgctttcaaagataaattcaaggccatgtttggttttaaaaaagatgaaaactactggaaatggtttgctggtaacttggcttctggtggtttggctggtgccacctctttggcttttgtctactctttagattacgctagaactagattggctaacgatgctaaatcttctaaaggtgacggtaaaagagaattcaatggtttagttgatgtttacaaaaagactttggcttccgatggtattgctggtttgtacagaggtttcggtccatctgtcattggtattgttgtttacagaggtttatactttggtttgtacgattccttgaaaccagttgtcttggttggtccattggaaggttctttcttggcttctttcttgttaggttgggctgttactactggtgcttctactgcttcttacccattagataccgttagaagaagaatgatgatgacttctggtcaagccgtcaaatacgatggtgccttggactgtttcagaaaagttgtcgccgctgaaggtgtcggttctttgttcaaaggttgtggtgctaacatcttgagaggtgttgccggtgctggtgtcatctccttgtacgatcaattgcaagttatcttgttcggtaagaaattcaaataa

SEQ ID NO: 6195 - DNA, 1995 bp, Candida albicans
atgactgtgacagatgaattcaaaaaacaagtatccaaaacatttggtcccaagacagatttatcagatgatgagtatatcaaattgcagacattgttagatcttttcaataaatcgatggacgatatttttgtagaatgggaatcattcaatatcactgaagtaaaagaagatctagatttgaatttaagtaatttgattagatttcaaggatatttacaaactaaactagccaagaattcaacacctgtatcgaaaaagactagggacaccattggatcgacttctaatagaaaacaattccgaaccgtggacaatcatcatttaactcctcaattgaaaaagagaaaatttgaggataatactcctgaatttaaaactccagcaggaattccagtgtcttctcctacaacggattatgaaacagcaaataatacatttgttggactcaccaccaacggtacccctaccaccaccaccgccaaaactaccccatcaaactctttattagaaacattaaatccacaaattgatgaaattacaattgatcaattacccgagggaaaaacatttagattgagtactaatttcgatgcttctaaattcaaatttcgtaccatgcaaatgaaattattagaaagtgccgatgttttagatgatcaaattgatagaatgataagtttatatcaagatcaaaataaaactgctgatttacaatttggaaacccttgtatgagtactcaatcagatattctatgttgtggaagaattgttcctgataatcctttatacgataaagaaatcttgaacagtacatcattatttttagaaacttcaagaatttccggtattggacaaagaatacctcttgatttaagcaatttatccaattattcatttttcccaggtcaaatcgtcgtattgaaaggtaagaatccttcaggtaaatcgtttattgttgaacaaaacatgccattgcctcaattaggtgcaccagtgacaagttctgaagaattgaaagagttccaaacgttacaaaacaatcaaggattgaaagttttaatagcttcaggtccattcagtaatctgaacaaattgaattatgataaattggataaattagttgatttaatcaatacaaaaatattacctcaagtcgtaattttgaatggtccatttttagatattggcaataaagttgttgaatctggagaaataattattgattctgaccaatcacaaccacaacctaaaaccttagatgatttatttaaagcaattgttacaccagtattgaaaaaaattgattccaaaattcaagttatcttatatccaaatttacgagatacatgtattaaacattgttcttacccccaagattcttttgatagaaagaaattaggattaccaaaaaattttaaagttttccctaatccatctggattttcaattaatgaagttttaattggtaattccaacttggatattttcaaagatttacgagatatttacaaagaagatacagcaattatttccaacaatcgttttgaaagaattgtgaaacacatatttgaacaaagacgttattatccgattttcccaggatcaatcaaaacagaaccaaaacagaagtgtacagatttgcttaatggagcacaaggtgaatatttggatggtattgccgttggcggatcatctttagaaacaccatatttgggtttatcagaattaggagattccttacccgatgttttgatactaccttctgaattgaaatattttgccaaagtgattcaaggagtaattgtaattaatccaggtatatttatcaaaccaagtaaagatctcaatagagaagaaggaagctatgccgttgttaatatccaaccaccaaactttgatgctgaagataatattgaagcaattgatgataccaacacattatactatcacaacgtgaataagcgctctcgtgtagatatatattctagttag

SEQ ID NO: 6196 - DNA, 639 bp, Candida albicans
atgaatatattccgtttctttggagatctttctcatttggctagtatatttattttattatatgctattgaaaccaatcgatccaccaatggattatcattaaaaactcaaattttatacgttgtggtttatttcaccagatatcttgatttattcaccaaattttattccctttataatacatcattaaaacttgttttcattgcatcttccatttataccgtttatgtcatggtttataaatataaaaaacccattcaagaaaatattgataatttcccactaaaatatttgattggaggagctatattggctagtttaattttcactcataaatatagtattggagaaatagtttggtcattttcattatggttagaagcagtatcaattttacctcaattatatattttacaaaaaactggtgaagcagaaaatattactactcattatatttttgctcttggaatttatcgtgctttatatattccaaattggatttatagatattttgctgaaggtcattttgattttgtttctgtattggcaggattattacaaactggtatttattctgatttcttttatatttattacaccaaagtgatgaaaggtaagaaatttgaattgcctgtataa

SEQ ID NO: 6197 - DNA, 882 bp, Candida albicans
atgccagatcctcgttcattgatagctgaagctgaaaagcttcttaaaccacagctgggattttttctgtttctttcaggttcttccgcttccatgagaaaggaagatgcaactgatctttatattcaagcagccaacctgtatcgattaaaaaaagatttcaatttagcaggtgctcaatttgtcaaggcagccgaaatacaagagagtttaggcaatcataatgatactgctaaccatttagtagaagcttacaagtgtttcaaaggagtatcgccaacagacgctatttcgtctttgtcaaaggcaattcacattttcttaacccaaaatggtcagtttagaagagccgcaaacttcaccatggatttagccgagctttatgaatcagttaatgattatgaaaatgccagcaaaagttatgaacaagcaggagattacttcactactgaccatgctgaagcccttgccaacaaggcatttttaaaatgtgcagacttgtatgctttgaatggcaattataaaagagctgtggaattatacgataacatcattaaaaacctgcttgggaattctttatcaagatggagtttgaaggattattttttcaaagtggtcttgtgtgttttgtgtatggacgatgtaattgaagctcacaagagaaaagatcagttccttcaggatgatccaagctggggacaatcaagagaatacaaattagttgaaggcatacttgaaagtattgatcaaggggatgttgaaggtttctcggacaaagtatttgacttcgatcagtttagtaaacttgacaaattgaagacccagttgttgttgaaggtgaagaattcagttgttgcaaaggatgatgatgatttgttgtag

SEQ ID NO: 6198 - DNA, 3267 bp, Candida albicans
atgtcgttacaagaaagcaacaacaatatccctcaaggtgcttttagttttcctaaggaagaagaagcagttatcaaacattgggatgatgtcaatgcttttcaaagaactttagagttgactgaagatttaccgccatttgcgttttttgacggaccaccatttgccactggtactcctcattacgggcacattttggcctctacagtcaaagatattatcccacgttatgccaccatgaacgggtatcatgtggagagaagattcggttgggatacccacggtttgccagtagaacatgaaattgacaaaaagttgaacattacctcgaaagaagatgtttatgccatgggtattgacaagtacaatgctgaatgtcgtgcaattgtgatgagatacgctgatgaatggcgtagaacaatcaagagattggggagatggattgatatggacaacgattacaaaaccttgtaccctgaatttatggaatctgtgtggtgggctttcaaggagttgtttaacaaggatgccgtttatagaggtttgagggtcatgccttattccactgcttgtaccacaccattgtcgaactttgaagcccaacaaaactataaagaagttaacgacccagcacttactatttcgttcccattgcttgataacgaagacacttgtttggttgcttggactaccacgccatggaccttacctgcaaatcttgcgttagcagttaatccaaagtttgagtatgtaaagatttttgatgaggaaaaaaagaaaaactttattcttttggaaagtttgatcagtactttgtacaagaaacctaaatcggccaagttcaaggttgttgagaaaattttgggtaaagatttagttggactcaaatacaagccattgttcaattacttttacgaagatttcaaggatactgggttcagagttattccagccgactatgttaccaacgattctggtactggtattgtccatcaagccccatcctatggtgaagaggatttcaacagtaccaaagccgcaggagtcatcaacgaaaagaagttgccaccaagcattgttgatgattcagggagaatggaatccaatgttcctgaaattgccggaatgtactttaaggatgccgacaaggttattatcaagaaattgctggaagaaggtagactcttggtcaacacccaagtaaagcactcgtacccattctgttggagatcagatactccattgatgtacagaaccgtccctgcatggtttgttagaattggcgaagtcattcctgaaatgttggataatgttgaaaagacaaactgggttccttccaacattaaagataagagattttccaactggattgccaatgccagagactggaacatttccagaaatagatactggggtacaccaattccattatgggtttctgacgattttgaagaaatggtgtgtgttggttctatccaagaattaagggagttgtctggtcgtgatgatattactgatattcaccgtgagagcatcgattctattaccatcccatccaaaaagggtaagggccaattgaagagaattgaagaagtttttgattgttggtttgaatctggttctatgccatatgcatccaaacattatccatttgaaaatgaaaagaagtttttggatgcctttccggcaaatttcatttccgaaggtttagatcaaactagaggttggttctacacattgactgtattgggtacccatttgttcaaaaccgcaccatatcagaatgttattgtcactggtattgtgttggctgctgatggtaaaaagatgtcgaaacgtttgaagaactacccagacccaaccttggtgttggagaaatatggtgccgatgcgttgagattgtacttgatcaatcccccagtgttgagagccgaaacattaaagtttaaggaagaaggggtcaaggaaattgtttccagtgtgttgttgccatggtacaactcctacaagtttttaaaggatgctgctgaccttttcaagaaggataatggcaaagactttgtttacgacaacagtttacattcaaccaacgttatggacagatggttattagcatcaatccaatctttgatcaagtttattcacgaagaaatgactgggtacagattatatactgttgttcctagattgttgcatttcattgacgatttgaccaactggtacattagattcaaccgtcgtagaatcaagggatatgcttccgaagatgttgaagacacccaaaagggtctcaatacattggtcgaagcgttgttgacattgtctagagcaatggctcctttcactccatacttggctgatggaatttaccaaagaatcaaggtatactttaagcaagaagatttggaaaagattgctattaaccctaagaatgttgacttgagatcagtgcatgtcttgagctacccatcagtgagacaagagttgtttgatgaaaagattgaggttgctgttgcaagaatgcaaaaggttattgacatggccagaaacattagagaaaagaagatgatttcattaaagactccattgaatgagttggtggttttgagtgcagatgctgatttgttgaaggacattgattctttgaaaggatacattagtgatgagttgaatgtgagaaatgttgtcatcacatcagacgaagccaagtactgtgttgagtactcgtgtgttgctgattggccagtgttgggtaaaaagttaaagtcagacgccaaaaaagtcaaggcagcattgcctaaagtttcctctgaagaagttcaaagatttgctgagtgtggtaaaatcactgttgatggtattgacttggtgactgaagatttgcaagtgcaaagaggcttgccagcttctaaagccgaagagggccaagagtttagatctcaccaagatgttttgattattttggatgtcaatttgcaccctgaattggaaagtgaaggtttggcaagagagttgattaaccgtatccaaagattgcgtaaaaaggctggtttgaataccactgacgatgttcaagttcaataccgtgtcgtcaaagatactattgatttgccaaagattattaaagacaatgaagagttgttgttgaaatcaaccaaatatccaattgaggaattgaaggaagcacaagatctggctaatgtcattaccgatgaagagcaaacaattaacgatacagtgtttaatttgcgtttattaaaaatttag

SEQ ID NO: 6199 - DNA, 987 bp, Candida albicans
atgtctgattgggtgtctacgtttccaggttataaacaggtgttattaacttgcaagaaaatgcttggtaggattataatgactggtccagtgcctcagcatgtgggtataatcatggacggaaacagaagatacgctaaaacacacaaaatagaaatcaaggaaggtcacagcttggggtttgataccatggcaagcatactagaattattatatgaactgggtgtcaaatgtgccactgtatacgcattttcaatcgaaaacttcaagagactgcagtacgaagtcaaatggttaatggagttagccaaatcaaagtttacacaaataaaccagcatggattgttgtgtgaggagtatggagttaaaatcagaatattaggaaatactaaacttttaccaagagatgtattggaaattctcgaaaagacagaggaaataacgaaaaacaatactcgtgccgtgttgaatgtttgcttcccatatacatcaagagacgaaataacccatctgatcaagtcagtggttgatgaagcgaccaaaggtggtattgacataacagaagaggctattgacaggcacctttatacgaaagatgtaccacccttggatttattagtaagaacatcagggacatttaggctttctgactttcttttatggcaaacagtgtcgccagaatgtgccgttgtgtttgtcgataaattatggccggcattcaagccatgggatatgctcaaaatattgcttaactgggggtttaacaaatacatgtatggtaatccaaatgggtatggggttagtagtaatttggtagtgaaaaccccggtagacggagaattaataaataccccaaaatccaccacaggactcgacaggtacctggaggatgaggagacagaagttagtagtaacaatttggggacagaagaggatacagtgacatcagaggaagaagacagcgaaggtatagtcaaaaagcaatag

SEQ ID NO: 6200 - DNA, 1356 bp, Candida albicans
atgatttcaaatggaaaagacactagtctaaaacaagttgaggctgaggttagcaccaaatcaacttcaattaccccaaccaaaaatgaattgtccaattctacctctaaaccaaccccatcaaatgacaagagtaccgaacaaactaaagaacagctagtggttaatgaaaaggaaaagaaaaagcaagcatttgtcactagaacaatttggacatttgttatgattggtgggttcttcgccatattagcatcaggtcatctagcattaattattatggtttcagttttccaaatgttaacattcaaagaagttatagcattgacatctgaaccagcaagagataaaaaaatcccttggaacagatcattgaattggtatttcttgggtacgacctggtattatttagatttcccggcattgtttgattttttccaagaatcagtttattcaagcaaatttttgacattattagtgaaaaaccataaatttatcagttattcattgtatattgctgggtttgtattttttgtttggacattgaaaaaaggatactatagatttcaatttgcacaattgtgtgtgactcatatgacattattattggtagttttccaagctcatttgattattgataatatattacagggtataatttggttctttttgccagctacattagtgattgttaatgatatttttgcctatttatgtggaatcacattcggtagaacccaattgattgaaataagtccaaagaaaaccgtcgaagggtttgttggtgcttggatatgtactggtattgctggggtcattgcatcacatatattatccaaatcagattatatgatttgtccagcagagaatttgtcaactcatttatacaatttccctcattgtgacttgaatcctatttatatacctcaagtatatcaacttccagctaatattgtggagcttactggacacgagctcattacttttaaaccattctatttccatgcagcaattttagccacttttgcttcattgattgctccatttggtggattcttcgctagtggattaaaacgtgcatttggtatcaaagatttcggtgatactattcctggacatggcggtataactgatagatttgattgtcagtttttaatgggatcattcacatacttgtattatcatacttttgtctccaatcaaaacgttaatttaggtcatgttatacaattggccataatgaacttatctgtaccacaattacttcaattaatcaagagtttgttgaaatatttgaaccgtgaagaagtacttacttctgaacaattgctgcgtatttttgatatattggaaaattga

SEQ ID NO: 6201 - DNA, 2391 bp, Candida albicans
  misc_feature (1147)..(1147): n=g, a, t or c
atgatcatggaaaagctcggatttcataaagtatcgaatagtccatcatcaccaagtcaacctaaaatcactcataatcgaccaatccctcatcctcaatcaccaccattaccacaacgaccattgagtgaaccattaaagaagcaattattggtcgacaattctcctgggaacgatgttgtcattgccaattgtgttgctgtcaatgctcaagattttcaaaatatccctgatagagctccagttattttagatggagtctttgtttattctattgccaaagatgatcgagttcgtcctggaactattggattagccggtaatatgagaacatggggtaaatggtcattaggtcaaccagtgaatgttgaaaattataatattttccataatggacaacaacaacaatatcttggggccattgatttactgattgattttagagctaaagctagagctaatctgaatccaattaatcatgatgaattggtggctttatttttgaaaaattatgaaaatcaaattttacaacctactcaagtcatttatatggaatatacagggatttattttcaaattagagtaaacaatgttcaaattattgatgttaatactaaagatcaattaccaagtttcaaagattccgacgatataaataccaaagggatcttgatcaaatctactgatgttgggttttatccatatgaaggatcaattattaatttgactaaaccgaaaactttaaaacaaagaatgtttggtggatcaactcctcatcgtactagtcgtagaaaacaaattattaaccctgattttaaattagaagatttaggtattggtgggttagatgctgaatttcaagatattttccgtcgtgccttcaattcaagaattttaccaccagaattagcagaaaaattggattataaacattgtaaagggttattattatacggacctccaggtactggtaaaacgctgattgctcgtaaattatcgaaaatgcttaatggtaaagaacctaaaattgtcaatggtccagaaatgttgagtaaatatgttggtgcatcagaagaaaatattcgtaatttgtttaaagatgctgaagcagaatataaattaaaaggtgaagattcagatttacatngtattattttcgatgaattggattcggtatttaaacaaagaggatcagggaaatccgatggtactggtgttggtgataatgttgtcaatcaattattatcgaaaatggatggtgttgatcaattgaataatattttggtgattggtatgactaatcgtttggatttgatcgatacagctttattaagacctggtagatttgaaattcaaattgaaatttccttacctgatgaaaaaggtagaaaagatatttttttgattcataccaaaaaattgactgaaaatggtatattaagttctgatgttaattttgatgaattaagtactcttactaaaaatttcactggggcagaaattgaagggttatgtaattcagctaagtcatatgccatttcgcgtcatactaaaaagggtgcattagcacaaattgatccggaatcaattgccaagatgaaaattactcgtgatgattttcttttagcccttaatgatattcgtccagcatttggtactgatgaagaagatttatcacaacaagctcaacatggtattatacaatttaatcaaactatcagaaacatttttgagaaaggtcaatcaattattgatgttgttagatcaagtgaaactgaacatttaagaagtatattattatatggtcctccaggggttggtaaactttccattgctactacattagcattgaattctgatttcccctttattaaaatgttatctgcagaaactttagttggtatgggagaatttcgtaagattcaagaaattgataatgtattccgagatgttcataaatcacctttaaatgtattggtgattgataaaattgaaaacattattaattataaccctattggtccaagattttccaatgatatcttacaagtattgatggtttatttgacgaaaaaacctccaaagggaagaagattattaattattggtactacttcacaatatcaagttttcaaacacatgaatttaattgatagtttcaatgatgccattgctgtcccaccaattaaacatattgaagaagttggtaaagtgttggataaattaggttttatgaataaatcagaacgtgaagagattttatcacaattgtctcgttatgatataaacattggtatcaaaagtttaattgatgtattaatggttagtaagtactcacgtgacactgtcgatgaagttgttaataacattgtagagaaaatgagtggataa

SEQ ID NO: 6202 - DNA, 330 bp, Candida albicans
atgtcggtatttttaggaagctcagcccaattttctcaagctaccatagatccagaaaagataaaattggccgatatacaattcctggccatggcttttacttttaataaattattaagaagatgtgaacaaaaatgtttattacgtgaatatggtgaaggtgaattaactaaaggtgaacaagaatgtatagatcgttgtgtatcaaaatatgttaaagctaatgtgattattggagaacatttacaaaaacaacgattggatccttttaattcgatgccagaatatcgaaaagttcaagatatcttggcgagttctgtgaaatcgtga

SEQ ID NO: 6203 - DNA, 309 bp, Candida albicans
atgactaaaccaagatttttaacagatatagaaagagcaaaagtgttggaatttcaagatatgatccattacagtcccagatacagtgatgattcatacgagtatagacatgtgatgttacccaagaatatgttgaaagcaattcctcacgattactttaatcaagaaacaggtactttgaggatattgacagaagaagaatggagagggttaggaatcacacaatctttgggttgggcccattacgaaactcatgctccagagcctcatatattattattcaagagacccttaaatcccgggcaataa

SEQ ID NO: 6204 - DNA, 2304 bp, Candida albicans
atggcaaaacaaggaaagaataaggtttcaaaaccaagaaaaccacctactttgaagcaaaaactcaaaaaggaatcaaaagtggtgaaagctaaagatttacaatggaaaccagttgagatcccagacaatttgggtgattatgaaggattctatggattagaggaaatagacggagttgatgtccaaatagttaacgggaaaaccgagtttatagtacgtgataacggtaaagtggaaaataaatcaaaaaaagaagagacaaatgaaaacggcgaaaacaacatggatgttgaagataatgaaacaccagaagttgaagacgagaagccaactgaacaagaagaagaagaagaagaagaatttgctggttttgaagatgatgacaataatcaagaagatgccaatactagtgaaagagtgtccaacaatgataaagacgacaagttagcagaatcaaatgatgaattgaatgctgtatcatttgccaaccttgatttacctttaccagacgataacgagataaacttaccaaattggcaagaaggagatttgggatcatctattagtgcttatacactttatgggttatcccagttggacttcaaaaaaccaacaccaattcaaaaagaaactattccaattgcattactgggaaaagatgtcattggtaaggcaacaactgggtcaggtaaaacattagcatatgggatcccaattttggaaaagtatattcaatctttgaacttgatcaaacaaaataataaagataagaaaattaaccatccgacagggattatctttgctcctacaagagagttggctcaccaagttgttgaccatttaaataaattggcaaaatattcaccattgtccaccaggggaattgtgagtataactggaggtctttccatacaaaagcagcaacgattgttgcgtcatggtcctggaataattgttgcaacaccgggaagaatgttagaattggttcaaggagactccgaattggctaaaagacttgcgtccaccgacataatagtattggatgaagcagatagattgttacaagatggtcattttgatgaattcgagaaaatattagaattgtttggtaagaatagaccgaaaagcaaatccattgaatggaaatggcagactttggtcttcagtgccacattctcgagagatttgtttcgaaaattagatagacatcaaaagggtaaaagtagttcattgatgggaaatgatgagattgtccagttgttaaatgagaagttgaaattcaaagacaaaaaacctactcttgttgatgccaatccaaaggaaattgtttcagggcaaatcacagaggcattggttgaatgtggccctacagagcgtgacttatacttgtactactttttgttaatgtacaagggatcgactctagtatttgctaactcaatagactccgtcaagagattggttccattgctaaacaatcttaacataccagcattctcaatacattcatcaatgattcaaaaacaaagattgagggcattagagaaatttaaggaagcaagccaaaagaacgaagtagctgtattagttgcttcggatgtagctgcaagagggttagatataccaaacatcgaccatgttgtccattaccatttgcctaggtctgctgatgtatacattcatcgatccggaagaactgctagagcaggaaaagaaggtgtatctgctatgttttgttcacctcaggaggcttcaggacctttgagaaagttacgtcgtttagtagctggcaactctaacaaagaatcgagattaaatatgcataacgatgtcaagttgcttccaatagaaatggatttagtgtcacaaatcaaacctagagtggaaatctcatccaagttagcggatgcaagtatttcatctaccgcaacaagaaaagaagattcttgggtaaaacaagcagccgaagatttgggattggacgatttatctgggcttgaggattttgaagacgatatcattaagaagcagcgtaagagaaaagaagggaagatgttgtctaaagacgaaaccaaggcattgaaatatgaattaaagactcttttggctaatccaatcaagaagaatacccgtaaatcttacatcacaagcggtctccagaatttggctcatcaaatggttactggtgctcatcacgatgatgtcttgggtcacgagaaagtcaatgcattaagtgatttaaaaggttcaaagaataaaaacaaaaaaatagaaaagaagagaatttccaaaaagaagtag

SEQ ID NO: 6205 - DNA, 1311 bp, Candida albicans
atgtctgaaacagaagctgaaaagaatattgaaatatggaaggtcaagaagttgatcaagtctttggaaatggctagaggtaatggtacttccatgatttctttggttataccaccaaaaggtcaaatttcattgatccaaaaaatgttgacagaagaatacggtaccgcctcgaacattaagtcaagagtcaatagattgtctgtcttatcagcaattacttctacacaacaaaaattaaagttgtataacagtgttccaagaaacgggttagttgtttattgtggtgatgtcataactgatgaaggtaaagaaaagaagttgaacatagattttgaacctttcaagccaataaacacatctctttatttgtgtgacaacaaattccacgttgaggctttgaatgaattgttggaaaacgacgatagatttggtttcattattatggatggtaatggtgcattgtttggtgctgtcagtggtaacactagagaagtcttgcacaaattcacagtggatttaccaaaaaagcatggtagaggtggtcaatctgctgttcgtttctctcgtttaagagaggaaaagagacacaattatgtcagaaaagttgctgaagttgcagtacaaaatttcattactgctgataaggtgaatgtcaagggtttgatcttggctggttctgcagactttaagaatgaattgtcaaaatctgatttgtttgataatagattgcaagcaaaagtcattaaaattgttgatatttcatatggtggagaaaatggtttcaatcaggctattgaattgtctgctgaaactttggctaatgtcaaatttgtccaagaaaagaaattattagaagcatattttgaggaaatcagtcaagacactgggaaattctgttatggtatcgaagatactttgaaggctttagatttggggtcttgtgaaaagatcattgtttacgagaatttaaacaccatcagatacacattaaaagatattgaaggagaagaagttgttgcacatgttaatccagaattgcctgataaatcatggcagttggacaaaaagacaggaacagaaatggaaattgtcaaggaagaatcattcttggaatggttggctgaaaactataaaaattacggtgctgaattagagtttgttaccgataagtcatctgaaggtgcccaattcgtacaaggtttcggtggtattggtgctatattgagatacaaggttaattttgaacaattggcagatgaatcgagtgaggacgaatattatgatgatgacgatgacagttttatttag

SEQ ID NO: 6206 - DNA, 954 bp, Candida albicans
atggtagagttatctgattatcaacgtcaagaaaaagtcggagaaggtacttatggggttgtttataaagcattagataccaagcacaataatagagttgttgcattaaagaaaattcgattagaatcagaagatgaaggtgtacctagtaccgccattagagaaatctcgttattaaaagaaatgaaagatgataatatcgttcgattatatgatattattcattcagattctcataaattatatttagtatttgaatttttggatttagatttaaagaaatatatggaaagtattcctcaaggagttggactaggggctaatatgataaaaagatttatgaatcaattaattcgaggtattaaacattgtcattctcatcgagttttacatcgtgatttaaaaccacaaaatttattgattgataaagaagggaatttaaaattagcagattttggattagctcgagcatttggagttccattaagagcatatactcatgaagttgtcactttatggtatcgagctcccgaaatcttgttaggagggaaacaatattccactggggtagatatgtggtctgttggatgtatatttgctgaaatgtgtaataggaaaccattatttcctggtgattcagaaattgatgaaattttccgaattttccgaattttaggaacacctaatgaagaaatttggcctgatgttaattatttaccagattttaaatcaagtttccctcaatggaaaaagaaacctttgagtgaagcagttccaagtttggatgctaatggaattgatcttttggatcaaatgttggtgtatgatccaagtagaagaataagtgctaaacgagctttaattcatccttattttaatgataatgatgatcgtgatcataacaattataatgaagataatattgggattgacaaacaccaaaacatgcaataa

SEQ ID NO: 6207 - DNA, 1653 bp, Candida albicans
atggcctcctttaaattagctaccgatttaccagaatggaaaaaattggaagaaacttacaaatccgtcggtgagaaattcagtgtcagagatgcattcgccaaagacccaaaaagatttgaagagttctcctggatctacaaaaactacgatgactccaaaatcttattcgacttctccaagaacttggttaacaaagaaatccttgatcaattggttactttggctaaagaagccggtgttgaaaaattgagagacgccatgttcgctggtgaccacatcaacacaaccgaagatagagctgtttaccacgttgctttaagaaaccgtgctttgagaaagatgccagttgatgggaaagataccgctcaagaagttgacgatgtcttgaaacacatgaaagaattcagtgactcaattagagacggttcttggactggttacactggcaaatccattactgatgttgttaacattggtattggtggttctgatttgggtcctgttatggtcactgaagctttgaaagcttacagtaaaccaggtttgaatgtccactttatttctaacattgacggtactcatactgctgaaactttaaaaaacttgaacccagaaactactttgtttttgattgcttccaaaacattcactactgctgaaaccatcaccaatgctacttcagccaaaaactggttcttggctactgccaaggattctaaacacattgccaaacatttcgctgctttatccaccaacgaaaaggaagttgttgcctttggtatcgatgctaaaaacatgtttggatttgaaagttgggttggtggccgttactcagtttggtctgccattggtttatcagtcgccatttacattggtttcgaaaactttaatgatttcttgaaaggtgctgaagccatggatcaacactttttgaccactccattagaaaacaacattccagttattggaggtttattgtctgtctggtacaacaacttctttggtgctcaaacccatttagttgtcccatttgatcaatatttgcacagattccctgcttacttgcaacaattgtccatggaatccaatggtaaatctgttactagagccaatgttttcaccaactatcaaactggtactatcttgtttggtgaaccagccactaacgctcaacattcattcttccaattggttcaccaaggtactaaattgattccagctgatttcattttggctgcccaatctcataatccaattgaaaagaacttgcaccaaagaatgttggcttccaacttctttgcccaatctgaagctttgatggttggtaaagatgaagccaaagttaaagctgaaggtgccactggtggtttagttcctcacaaggaattctctggtaacagaccaactacttctattttggctcaaaagattacccctgctactttgggttctttgattgcttactacgaacatcttactttcactgaaggtgctatttggaacatcaactcctttgatcaatggggtgttgaattgggtaaagttttggccaaggtcattggtaaagaattggatgacaagaaagctgttgctacccatgatgcttctacaaatggtttgattaaccaattcaaagaatgggaagaataa

SEQ ID NO: 6208 - DNA, 2394 bp, Candida albicans
atggtggatgaaagtaagcaattgcaaggtaataaagatggtgacaaacaccaaacacaggaactgaccaatactagtgggaactctcaaccatcggcaccaacaccagcacaggttccttctgtacaacaacaacaacaacagaaatcatcaacacaaaatcaacaatcaacaacaggatctgcacgttcttcacagggtagatccaatcaaccacaatattcacaggctgatttgaatagaatcgttttagagtatttaaataaaaaaggatatcacagaactgaagcccaacttagacttgagagctccaacatcccgacaccagcagtaccccttgcaacaccagccaccacagaattggcttctgtcaatgaaattggagacaataaagatttaaaagagaaattgacaaaagctgaacaggaattaaaggagttacgagacaaacaatcaaaaattgagaaagagttacgagaggcaaaggatcgtgaagttaaaataagtaaagaaaaagagttgaaacagttgaaagagttggaaaagaagacgaaaagggaaagtgacccagagatctattttactgcttattctatgttaagaagatgggttggatcatctttggatttgtataagccagagttatctcgagtgttatacccgttgtacattcattgttttttggaattgatatctaaagggttttcaagtgaggctaaattatttttcgataaattcagatcagatcatttggttttgcacggtattgaagttgaaaagtttgctggtttgtcattaccagaacatttagaagaaaatgatttggctgttgcttatagaaaatacaaatatagaattttggtatccaaaacttctttgaatttgttgatatattttctccatgaaaacgaagcagttggaggtggtattttgattcgtattataaatcaatacttggaccctgtgatttcaactaatagaccagacaaaatagatcaagaaggtgaagccaatccagaagaaggaatatcagaatacgtgactgatactaatgaagtgaaaaaattcaacgaacaaaatgtcaaattgggaaagttaccaatagatcctgatgttgccaaggaggttgaagcagaattgaagattaaagacgaaaaaatcgagccagtcaacaacaaaacattaactaaagaatttcaagatatgacaaagccagaccaggatctgcctgttagagaatcattgcctcttccattgaaggatgcaaatgatataaaaaagatgattatacaggttgaggattctcgatcaaagatcaagttaggtgcaatacaagcaagtttaccgtcagtttgtatgtacacatttcacaacactaacaataatatgacatgtattgaattcaatgacgattcgactttagtggcagcaggattccaagacagttacatcaagttgtggagtcttgatgggaaacctttgaaatcggtattgaaaagagatcgtcacaaaccacaagaaaataccagaaaactcattggtcacagtggaccagtttatggagtatcgttctcaccagataataaatatctcttgtcatgttcagaagataagacagtaagattatggtcattagatacatacactgcattggtttcttacaagggtcatacccagcctgtttgggatgtcaaattttcaccattgggacattattttgttactgcatcgcacgatcaaacagcaaggttatgggctactgatcacatctatccattgcgtatatttgctggacatatcaatgatgtcgattgtgttgaattccatccaaactccaattacgtttttactggctcaagtgataagacttgtcgtatgtgggatgtacatactggtaattgtgtacgtgtattcttgggtcataccaattctgtgaattgtctagcagtatctcctgatggtagatggttggcaagtggaggtgaagacggaattatttgtgtatgggatattggttctggaaggcggttaaagagtatgagaggacatgccagggcttcattatactcccttgcattttctcgagatggcactgttttggtcagtgggtgtgctgataatagtgtgagagtatgggatgtcaaaaagaatacaaatgatgctggacctgaacctgaagcgttcaacaataatgtcaatggcaacgaaaccaactctgatgggacactgtcaacgcaacaacagcaacagccacaacaacagcagcaaagcaaaaaggaatcaattgctactagcgaccatatgaatgcgtttttcactaaaaagactcctgtatacaaagttcaatttactcgaagaaatttatgtcttgcagctggtgccttccaaggatga

SEQ ID NO: 6209 - DNA, 2430 bp, Candida albicans
atgaaaaaaaaaaggaaattgatttttactcttcttaacattttatttttattttttttacaatcgttaagcaataatcacaacatgtcaaccactacggcagctgtgcttcctacagtccaattacaagtcaattacaatgaagtcaaaaccattgccaaagactttataaccaaattcaaagatagcatgatcgatattgatgatgaaatcaatcaaacccacgaaggtaaatatatgaatattttacaacaagtcgccaatagacagaaaaccagtataaatattgaatttgatgacttgaaattattcttaactaattatgatccagattcatccaacacctaccaagaagcacgtcgtttattgccaaccatgttgaccaatactcgtcatttcgtcgaattgttcagtcaagtgattgatgaccttatgccagaaccaacagaagaaataagttaccgtgatgatgtgttggatgttatattgcatcagagaagattacgtaatgctagattgcaacaagaaagtaacgaagagttcaatcaattaagagatggtttcactcaacctgattctgctgctgcaaatgttggtgggcaggaagataatattgccaacccgactgatgccaatttattcccagcaaaacttacaagaagatactgtttgtattttgttcccttgagcaatgccaaggctttatcggtgagacaaacaaaggggaaatttgttggtcatttcataactgttagaggtattgttactagagtttccgatgtcaagccaagtgcattggtcattgcttatacctgtgataaatgtggttacgaaattttccaagaagtcaactccaaaacattcactccattaaccgaatgtaattcaccatcatgtgttaatgataacaataagggtcaattattcatgtccacccgtgcatcaaagttctctgctttccaagaagttaaaatccaagaattatcaagtcaagtccctgttggacatattccaagaagtttaactgtccatgttaatggtgatttggtcagatcaatgaatcctggtgataccgttgatttatctggaatattcatgccaagtccatacactggatatcgtgcattgaaagctgggttgttgactgaaacctatttagaagctcagcatgttaaacagcacaaaaagcaatatgattcaatgacattatcgagtcaagcacaagacaaaatcgacgagcttttacttcaaggtgatgtttacaataagttggccaaatccattgctccggaaatttatggtcacttggatgttaagaaaattttattattgttattatgtggtggtgtcaccaaagaaatcggtgatgggttgaaaattagaggtgatattaatgtttgtcttatgggtgatccgggggttgctaaatcccaattattgaaagccattggtaagattgctccaagatcggtctatactactggtagaggttcttctggtgtagggttgacggcagctgttatgagagatccaattactgatgaaatggtgttggaaggtggggctttggtgttggccgataacggtatttgttgtattgatgaatttgataaaatggacgaaagcgacagaacggcgattcatgaagttatggaacaacaaaccatctctattgccaaagctggtatcactactactttgaatgccagaacttcgatcttggcagcagccaatccattatatggtagatataatccaagattgtctccacatgaaaatatcaatttaccagcagctttgttgtcacgttttgatattatgtttttaattttggatcaaccaagtcgtgaaaatgacgaaaaattagcccagcatgtggcctatgttcatatgcacaacaaacaaccagacatggatttcactccagttgattttaacaccattagagaatatatttctcgagcaaaaacttttaaaccagtggtggctaaagaagttggtgaatatgtcgtgcaagaatatgttaaaatgagaaaagaatcacacagaaacgaaggatcaacgaaaaagtttagtcatgtcacaccaagaagtttattggcaattttaagattggcacaagcatcagcaagattgagatttgacaaccaagttagattggatgatgttgatgaagccattagattaattgaagtgagtaagagttcttataaagaaagagaagttgaagatgaaagttcaaccaccaagatctacaacattatcaaatcaattgtcacccaagatggtggtgatcgagttgcattagatcaaatcaaagatagagtcattgctaaaggtttcacattggagcaatttgaacattgtataatggaatatgatggaatctggcaagtggttgatgatggagagaatcttttaatattgtaa

SEQ ID NO: 6210 - DNA, 1155 bp, Candida albicans
atgtccaaagttcctgctatttatcaattgggtcatttaccaattaaagatcatgtattttctccagatcgttcaatcttagccattaccaagggcaatgatgttgaagtttatcaaatctccccatctaatctttcatcgaaaccacaattgattgcggtattaaaagatcatgataaaactgtcacctcagttgatatttcaccagatggatccaaaattttaacctgttctcaagatagaaatgcattggtttgggaatacgctaatggagaatacaaaccaacattagttttattaagaattaatcgtgctgccaccgtttgtagatggtcaccagatggatctaaatttgctgttggttcaagtgacagaattattgctgtttgttactatgaagaagaaaatgattggtgggtttctaaacatttgaagaaacctttgaaattaacaatcactactatcgattggcatccaaatggtgtgttgttagcttgtggttcaactgatggtcatgtcagagtgttttctggctatattaaaggtattgatgctaaaccagacccatcagtttggggtataaaattaccatttcaaactttgtgtggtgattataccaatgaaaccaatgcttggatccatggagttaaatttagtccagacggtaatgcgttggcttatgtttctcatgattcttcagtagggtttgtttatcctcaaggtgaaggattaccaccaagagctattttcaatgtgaatacagataatttaccattcaaaagtgtagtttggttgaatgatcaacaagtttgtgctggtggtttcacttgtaacttggttgttttccaaggggatgaaaatggttggcaacaagcttatcaggtagaagaacaaaaggatttaacaaaagaagtccctcattctaaacttggtgaaggtgatgacgacgatgaagagatttcatctcatcaagcattgaatatgttcaaacaaatggatttgaaaggaagagtcagtaaacctagtgctggtggtaaacctgccaaggctttaaatactattcaccaaaataccatcaacagtattagaaactttgatcaaggtagagtatccacttcaggaattgatggtaaagttgttatcttcaatgtatag

SEQ ID NO: 6211 - DNA, 1425 bp, Candida albicans
atgtctaccgattcgtacactccctcacaagagcctggttcaaagcgtttaaagacgggcgaatctgtatttgcaagaagaggagtatcgccaagtactggtggagtggcatcagcctacggtaatgagagtgagaaaaagccatcgtggttacaaaccaacaaaagtgatattgatgggaagtacgataaatatggagagagaagaaatgcccatactacaacaagagactcaagacttgataggttaaagcgagttcgtcaaaagctggctgagcgggaagatgttggtcatgaaggagacgaaggagacgaggatgagggtatattaccttatattcatttacaagcggccaaccctgccatcattcacaacgagaaacaggaaaactatcgtacgtttcagagtaggatatcgaatagagagaatagagacatcaatagtattgtgagggcacactataatcagcgaacacaacaagcaaaacagcaaggatcccgagtcaattcgccaatttacaaaatgaggaatttcaacaatgccattaaatacatattgttgggtaattgggccaaacataatccagaggaattggatttgttttcttttttggatttatgttgtggcaaaggtggggatttgaacaaatgccaatttattggcattgatcaatatattggcattgacattgctgatttatcggtcaaagaagcatttgaacggtacacaaaacaaaaggcgaggttcagacactctaatcagaattctaatcggtatacttttgaggcgtgttttgccacaggggattgtttcacccaatttgtgcctgatatcctagagccaaatttccctggaattatagaacgtgcatttcccgtggatattgtttccgcccagttttcgttgcattattcttttgaaagtgaagaaaaggtacgtacattgttgaccaacgtcacaaggtcgttgcgttcaggaggcacttttattggcacaattccttcctctgatttcataaaggcaaaaatagttgacaaacatttgcaacgagatgaaaaggggaaagcgaagtttggtaatagtttgtattcggtgacgtttgaaaaagatcctccagaagatggcgtattccgtcctgcgtttgggaacaagtacaattattggttgaaagatgccgttgacaatgttcctgagtatgtggttccgtttgaaacattgagatcattgtgtgaagagtacgatttggttttgaagtataaaaagagttttacagatatattcaaccaggagattccaaagtattttagtaaattgaataaaaatctaattgatggaatgaaacgaagtgatggcaagtacggtgctgaaggcgacgaaaaggaagcagtggcattttacataggatttgtatttgagaaggtatag

SEQ ID NO: 6212 - DNA, 2655 bp, Candida albicans
atgagtattgataatcaagcactgactgctttgaaaaatagtggtcaagaagttaaaaataatactaaccaaacaagtgaattatcgaaagaagaaaagttaagaaagcgtagggaacagttagaattatggaggcaaaaaaagcaacaacagcaacaagaacaagaagaggtacagaataaggccaagaaaacagaagatagtaccaacaatactagtactgaagaagttaaaaagtcccgtcaacaaagaatagaagaatggaaacgagcaagattacaaaaacaacaggcaaccaaagagaaaaccacaactattacaattaagaaaaaagttcatctgcaaacaactagaccaactcttaaacgaaatttagattttggagatgatgaagatgataggaaaaattcacatagacctgtctttaaaaaaccaagtttagagtatgatgaaatactggaacatcaaaacgataaagagtctgaagatgaactagatgtttttcttgcctcaattcgtgagtctgaattgaagtctgataatacaaaagccgaaaaagctattgaaagtataccggaaggagatgtggagaacgagaaagagaatgatgactatggcggcgacggcgatgaggaggatgaactggacgaagaatcaagattacaagatttaatttctacaaaattgacaaaacttcaaaacaaaggtaaagaattacagtcaattgaccattcacaagaaaattaccaagagtttcgtaaagttttctatcgtgaagcttatgaattactggctctactggatgaacaggtagaactaattagacaagatcttgataatataaaagtaaaaggtacagatgtaccgcgaccaatactaaaatggagtcatttagcattaccaacgaatctatcgtcggttattcatgataaattaaagtttgagaaaccatctgcaattcaaagtcaagcattgcccacaattttgtctggtcgtgatgtgatcggaattgccaaaacagggtcagggaaaacattatcttatgtattaccaatgcttagacatatacaggatcaacagtttctgaaagataaccaaggtcccattggtctaatattaagtcctactcgtgagttggcgttacaaattgaaaaagaaatattaaactttaccaaaaggaataataatctaagggtatgttgttgttatgggggtagctccattgaaaatcaaattaacgagttgaaaaaaggggttgaaataatcgtcggtactccaggtcgagtcattgatttgttggcagctaattctggaagagtcctaaacctcaagagatgtacatttgtggtattagatgaagccgatagaatgtttgatttgggatttgagccacaagtcaataaaatattaacgcaaatcagaccggatagacaaacggtattattttcggcgacattcccaaggaaaatggaaacgttggccaaacagattttaacggatccggttgtaataattgtgggtggtatcagtgtggttgctcctgaaattaaacaagaagttgttttgtttgagacttcagctgaagagcaggataaatacaaacaacagcgtgtggagaagttgcatgatatattagcaaattatcaaatagaacatcctgactctaagattctagtatttactgaaaagcagaatgatgctgatgagttagttgctaatttattatcaaacagatatcctgctagtgctattcatggtggcaaggatcaaatggatagaaagtatgccattaaagaatttgctagtatggacagtggaattaatattttgattgccacttctatagctgccaggggattagatgtaagaaatcttgggttggttattaattttgacccaccaaatcatatggaagattacgttcatcgagttggtcgaacaggcagagctggtgcaaagggaaacgctataacgtttgttagttctagtcaaccaaaagaggttttcaatttagtaaaggcattaaaattgagtcattctgatattgatcctaaactagaagaaatagctaacaagtttgtcaccaaagttaaagcaggtaaagaaaagattagttccggttttggtggcaaaggcttagataatttacaagaagttagagataacaagttgaaattagaaaaacaaagatttggtgatcaacaaccacaacgccaacaagaggaaacggagacgaaaaaactgaatgatgaacctgttccagatatcgctttacctgaattcaatatcattgaaggtaacactccagaaacttcgggtccagacaaatgtaaattttattgtcgaattgttattaatgatttacctcaaaaagtgagatggaatatagtacaacgagagagtttatccaagatcattgatgagtcaagaacctctataacaacaagaggtcagtactatccaccaggttcaaaaccattatccaatgatcaagaaagaaatggcagtttagcaaaattgtatttgttagttgaggggttgactttgcaatcagttaccgaggctattacgttgatcaaaaaaaaaatgttggaaagtttggatattttgaaccaaagagaaaacttacaaccaacaggaagatatgttgtatga

SEQ ID NO: 6213 - DNA, 348 bp, Candida albicans
atgcaacccaagtcaatatcattgttgcaaaaaattgattctataattgagacaataatagtaaaatttaccaatatatttgagaacctacaagatgcaaataaaaccactgagatattatcaatggaaagtttggctatggaaaataattgtattcaaattatccgattatgtcaagatttaattagtatttcacgtaatcttaaagaaatttgggtattaaatagcatcaaagtgacacaagagaaatttgaatggaaacaagaggaaatagatatcatgtttacacaatttaatttgttaactgataaaatcgctgaatttgaaactgacatgaacaaagaataa

SEQ ID NO: 6214 - DNA, 453 bp, Candida albicans
atgtcttcatcttattatttctccattattggaactaaagataatcctttgtatgaattagaattttcttcgtttaaaagtgccaacatttccacaactgataatgtgccaggaaaatcgcaattcccccaatcaacgaaagaattactcccgtttattgccaactcatctttagatcttattgatgaccaagcattcaccactaatgtattgaacttgggcaaaatagatcaattctatggcttatctataaatgcatatgttctacaaagtcaagttaaatttattctttgttacaactcaaaggaggaaagcacaatcaaacagtttttccaagaagttaatgagttatatacaaagtgtttaatgaaccctttctacaatgtcgatgatgcgattgtatccccagatttcgatttgaaaatcaaacagttggctagaaagtatttataa

SEQ ID NO: 6215 - DNA, 1506 bp, Candida albicans
atgacatacagtatacgaactgtgacaaactatttaaacagtttggcaccacgatttcttttgctgaagggagacattgaaattttggaaagtccgataaccttttataaaaccttactatttaagatcagtaattcaaaacaccggatatttttatcgtcattatatatcggcaaaactcaacacgaattaatacaatgtattgatgatgcaatggctaagaatgccgacttgaaagtttatgtattgactgatgcattacgaggtacaagagaagctccagataattgttcggcattgcttttggccagtttgcaaaaaaaatatggccaacgaattgatatccgcatgtttcatactccacacctttcagggatcacaaagtttttagctccaaaaagaataaatgaagggtttggtcttcagcatatgaagttatatggattcgatgaccaaattatactaagtggggcaaacttgtctgaagattatttcaccaaccgtcaagatcgttattacctctttaacaacaagcctttaactgattattactttaagatccacaccgccatatcttcactttcttacagaattatgcatactgacaagttgaaacaaggattcaaactaacttggccaacttccaatgctacttgcgaacctcatttgaatatcgagcgattcattagcgactcttcctacctattgacaccattattaaagcagcaacaattgaatgcttttgaggaatttgatgaaaatgaggaatatgatactatagtttatccagtttctcaatttacaccattgttccctcacaatcaagatcagctgactgaaaaaccagcaattttgcgattgttatcgtatgcagactctctcaagacaaaatggtggttcactgccggatatttcaatatgctaccagaataccaacagcggttgttgaatggtaaatctcaagggacagttatcacggcatctccaaaagccaactcgttttataaatcacctggtgtttcttattacttaccacaagcatatcttttatttgctaagcaatttttacaaaaagtgagagatctaggaaaatctgctcttataactgtttatgaatggcaaaagggaatagtgaacactccaggtggatggtcgtatcatgcaaaggggttatggataaccgcccctggggaagatgaaccaagtattaccgtcattggatcttctaattataccaagcgtgcatactcgtgcgatttggaaagcaatgccattattatcaccaaagataaagacttgaaaatgaaaatgaaacacgaaattgataatttgatggaaaatgtgcatgaattgaaattagaagatttcagtccaaaattagaatcacaagttaatggagatgcagagacagaatcagtggatgaacctaaatattcagtagaagaagatagaaagattagttacggggttcatttggctgttaagttgcttggtggaagactctag

SEQ ID NO: 6216 - DNA, 1467 bp, Candida albicans
atgtataaatcaattttcaaaacgactggcaggttggggaaaacagtttctagtcgtaactttgttactacattacctaaaccattggccaccagctcatcgccagcaacaaatgccccaaataaaacatcaaaccccaaaacaggggaattacatgtatcaactccagtagacacagcaaagatttccatcgagccacctgaaggatcgagcatatcattaaaatctgcttctcgtgatgcatcattgtttggaacccgtccgatttatttggatgttcaagccacaactcctgtagatccaagagttttagataagatgcttgaattctacactggattatatggtaacccacattcttcaacccatgcatatggatgggaaaccgacaaggaagttgaaaaggcaagaacctatattgctgatgtgataaacgctgatccaaaggagatcatattcaccagtggtgccacagaaactaataacatggcaattaaaggtgtgccacgtttctacaaaaagacaaagaaacatatcatcacgactcaaactgaacacaaatgtgttttagatagtgccagacatatgcaagatgaagggtttgaagttacatatttacctgttagttcagaagggttaatcaacttggatgatttgaagaaagcaattagaaaggatactgtgttagtttctattatggccgtcaataatgaaattggtgtcatccaacctttgaaagaaattggtaaaatatgtcgtgaaaataaagtgtttttccacactgatgctgctcaggcgtatggtaagattcctattgatgttaacgagatgaatattgacttgttgtctatttcttcccataaaatctatggtccaaaaggtattggtgcctgttatgttagaagaagaccaagagtgagattggatccaatcattactggtggtggtcaagaaagaggtttgcgttcaggtactttagctcctccattagttgctgggtttggtgaagcagcaagattaatgaagcaagaatcgctgtttgacaaaagacacattgagaaattatcctctaagttgaaaaatggattgttgtcaattccatctacccaattcaacggttgtaacgacgccaaatctcaataccctggttgcgtgaatgtatcttttgcttacattgaaggtgaatcgttgttaatggccttgaaagatattgctttgagttctgggtcagcatgtacttcggcatctttggaaccatcatatgttttgcatgcattgggagctgatgatgccttagctcattcttcaattagatttggtattggtagatttacaactgaagccgaagtcgactatgtcattcaagcaattaatgaaagagttgactttttaagaaaaatgtccccgttatgggaaatggttcaagaaggtattgatttgaatacaattgaatggagtggtcattag

SEQ ID NO: 6217 - DNA, 2550 bp, Candida albicans
  misc_feature (419)..(419): n=g, a, t or c
atggatatacatcacaagttacatagtaaaggtcgtttagatagatattattatcttgccaaagaaaaagggtatagagcacgttcatcatttaaaatcattcaaattaatgaaaaatatggccattttttagaaaaatccaaagttgtcattgatttatgtgctgcaccaggttcatggtgtcaagtagcatcacaattatgtccgattaattcattaattattggagttgatattgttcctattaaaccattacctaatgtaatcacatttcaatctgatattactactgaagattgtcgaagtcgattacgaggtcatatgaaaacttggaaagccgatactgtattacatgatggtgcacctaatgttggtcttggttgggttcaagatgcttttacacaatctcaattaacttnacaagcattgaaattggcggttgagaatttaactgctggtgggacatttgtcaccaagattttccgatcaagagattataataatttaatgtgggtattccaacaattatttgaaaaagttgaagctactaaaccaccagcatcacgtaatgtatcagcagaaatttttgttgtttgtaaaggatttaaagctcctaaaaaattagatcctcgattattagatccaaaagaagttttcgaagaattgggtggtggtaacgaaagtaaacaaaataatgaagctaaaatttttaatcctgagaaatttagtagtcaaagacaaagacaaggttatcaagaaggtgattatacattatttcataccatgcctataatggattttattaaacaagatgatcctataaatcaattaggatctttaaataaatttgacttaccagcaccaaaagatgacgataatgatgacgatgaccatgaccatgaccacgaatggaaaatcttgagtaaacttaaattatgtacaccagaattattagaatgtatcaaagatttaaaagttttgggaagaaaagaatttaaaatgattcttaaatttagaaaacaagccagagatattcttggtatagataaagatgaagaagaagaagaagaaaatccaaaaattgaggttgaaccattgactgaagaacaaaaaattgatcaagaattacaagatttaattaataaacaaaaacaaaaggctaaacgattgaaaaaaaatgctaatgaattaaaacaaaaagaaattattagaaatcaaatgaatatgttaactgatatgaatattggtatagaagcagcccaaattggtgcagattcattatttaatttgaaaacggcggaaaaaaccggtcaattggataaattagctaaaggtaaaaagaaaatgatttttaatgatgaagaacttgccaaagataatgaaattcatatcgacgaagaagagataaatgataacgataaagattctgctgatgaattggatgaattggaaaatcaattggatgatatgtatcatcaatatcaagctagaaaagctgaaagagatgccaattatcgtgccaaacaagctcgtggtgatgccgacgatgaagcatggaatggtattgaagaagataatgatgatgttgagtctggaaaagattatgaaatggaatctgaatctgatgatgatgatgatgaacatataagacttatagctgagaaaaagtcaaatggatcattgtctagaactgctcgtaatttttttgcatccgattcgatttttaatgaattaagtgatgatgttattttagaagaaattgaaaataaaaccaaaggcagtaatgggaaaatggtcgaatcaatacaagaacaagttgccaacgacaacaacgaaaatgatgacggtgacaacgacgacaacgatgaagaagaaagtgattttgaaattgtacctaatcaaaaatcagacgatgatgatgatgatgaatcaatgaattctgatgatgatgaagtgtcgactactactaaatccactacacatcaacaaaaagtcgatcttgctacagttgaagccatgacattagctcatcaagttgcattaggacaaaaaaacaaatatgatttaattgatgaaggaatcaatagatattcattcagagataaagataatttacctgattggtttattgatgatgaaaaaaaacattccaaattaattaaacccatcactaaagaagcagcaattgccattaaagaaaaacaaaaacaattaaatgctcgaccaattaaaaaagttttagaagctcaaagtcgtaaaaaattacgagcccttaaaagattagaaaaaattaaaaagaaatctgatttaattaatgaagattcagggaaatctgaaagagataaagctgatgaaatttcaaaattaatgaaaaaattgaataaaaaacaaaaacaaaaacctaaaactaccgtggtggtggctcgtggatctaatagaggacttagtggtagacctaaaggagttaaaggtaaatataaaatggttgatggtgttatgaagaatgaacaacgtgcattaaagagaatagccaaaaagtacaagaagtag

SEQ ID NO: 6218 - DNA, 1254 bp, Candida albicans
atgtcattatctaacaaattatcagtcaaagacttagacgttgctggaaagagagtctttatcagagttgacttcaacgtcccattggacggtaagactatcaccaacaaccaaagaattgttgctgctttgccaaccatcaaatacgttgaagaacataaaccaaaatacattgtcttggcttcccacttgggtagaccaaacggtgaaagaaacgacaaatactcattagctccagttgctactgaattggaaaaattgttgggtcaaaaagtcaccttcttgaacgattgtgttggtccagaagtcaccaaggctgttgaaaacgccaaagatggtgaaatctttttgttggaaaacttgagataccacattgaagaagaaggttcttccaaagacaaggatggtaagaaagtcaaggctgatccagaagccgttaagaaattcagacaagaattgacttcattggctgatgtctacattaacgatgcctttggtactgctcacagagcccactcctctatggttggtctcgaagttccacaaagagctgctggtttcttaatgtccaaagaattggaatactttgctaaggctttggaaaacccagaaagaccattcttggccattttgggtggtgctaaagtttctgacaagattcaattgattgacaacttgttggacaaggttgatatgttgattgttggtggtggtatggccttcactttcaagaaaatcttgaacaaaatgccaattggtgattctcttttcgatgaagccggtgctaaaaacgttgaacacttggttgaaaaagctaagaaaaacaatgttgaattgatcttgccagttgattttgtcactgctgataaattcgacaaagatgccaaaacttcttctgctactgatgctgaaggtattccagacaactggatgggtttggactgtggtccaaaatctgtcgaattgttccaacaagctgttgccaaagctaagaccattgtttggaacggtccaccaggtgttttcgaatttgaaaaattcgccaacggtactaaatccttattggatgctgctgtcaaatctgctgaaaatggtaacattgttatcattggtggtggtgatactgctactgttgctaagaaatacggtgtcgttgaaaaattatcgcacgtttctactggtggtggtgcttcattggaattattagaaggtaaagacttgccaggtgtagttgctctttccaacaaaaactaa

SEQ ID NO: 6219 - DNA, 2769 bp, Candida albicans
atgaagtcagattttaaattttctaatttattagggacagtttatagaaagggaaatttagtgttcaatcaagatggaacaaaactattatcgccagtagggaatagagtttcgtgctttgatttaatcaaatctcaatcatttacattcgattaccaacatcgtaagaatgttcaatgtattgccttaaacaatcaaaacactttaatgatttccatagatgaagatggtagagcaattcttgttaattttgtatcccgtgttgtattacatcatttcaatttcaaatctaaagtaaatgacattaaattcagtccttgtggtaaatattttgccattgctatagatagattcattcaagtatggaagactcctgatttgactgaagatagacaatttgctccgtttgttagacacagaatttatctgggacatttcgatgaagttttgaatatatcttggtcattggattcaagattttttataagtaccagtaaagatatgactgccaagattttttcgttgaatagtgatgaaaaggatgttgcaatgactttttcgggacatcgtgattatgtgataaatgcatttttcagtcatgatcaagaaatcatttatactgttagtaaagatggtgcattgtttaaatgggaatatactgaacgtcctaaaccagaaaacgaagacagtgatagtgaagatgatgcaactgataagccaatgagttggagaattactgcaaagaatttcttctacgctgatgggaaattaaaatgtgcttgtttccacccacaatcaaaattgttggttgtaggatttacaaatggtgaatttagactttatgaaattgaagattttaaccttattcaactgttaagtatgggtcaaaatgccgtcaatactgtaaatatcaataaaaccggcgaatggttagcctttggatcggcaaaattaggacagttgttggtttatgaatggcaatcagagtcatatatattgaaacaacaaggccattttgattccatgaacacattgtgttattctcctgatgggtcacgtctagtgactgggtctgacgatgggaaaattaaaatttgggatgttcgatcagggttctgtttaatgacatttacagaacatacatctgctgtcactcaagttcaatttgccaaacgtggtcaagtgttattttcaagttcattagatggtactattagagcatgggatttaatcagattcaggaattttaaaacttttactgccacatcaagagttcaatttaattgcttggcagttgatccaagtggtgaagtcattgttggtgggtcacaagatacttttgaaatatatgtttggtcagtacaaacaggtcaattattagactcattaaccggtcatgaaggtccaatctcttgtttgacttttggtaaagagaattcaattttggcttcagcatcatgggacaaaaccattagaatttggaatattttcagtcgtaatcaaactgtggaacctattgaaattcaaagtgatgcattatgtttgactatgagacccgattgtaaggaattggcagtgctgacattagatggccatgttaccatttttgatattgaagatgctaagcaattgcatttaattgatggacgaaaagatattgtcaatgggagatacttggaagacaaatttattgccaagaattcaaacagggggaaatatttcagtaccattgcttattcctttgatggattgactttgttggccgcgggtaacaacaattctatttgcatgtatgatattgaaaacgaggtactattaaagagattcattgtttcggaaaatatgtcattggatggtactttacagtttttgaacagtagcaaaattaccgatgctggtacaaactctgatttaatcgatagagccggtgaattaagtgacttggaagatagagtagacaatagtttgcctggttcacatcgtggtggtgatcctagtgaacgtagaacgagaccagaagtcagagttactgctgtcgagttttctcctacaacagctgcatttgctgcagcttccactgaagggttactaatattttctataaatcaagagcttatttttgatccatttgacttggatgttgatgtcacccctgaagccacgttggaatcccttaaggagaaagaatatttggttgcattggtcatggcattccgtttgaatgaaaattacttgatccacagagttattgaatctattccattacaagacatcaaattagtgtgtcaagatttaccagtaatttacgtcaacagggtattaaatttcattggtgaattgttgactaagaaagaatctccgcatattgaatactatttgattatggttaaaaacttattgatacagcatggtcgatacattagtctgaataaatttgaatttcaatcttccatgaagttgttgtcacgattcttaaataagacagctaaagatgtgataaatgttggtaaaagaaatgaccatttattgacttacttaacagttagtaaagatttgaaaactgcaagtggtcacagtgaaggagaagagaatatagaaatgaacgaagacctggaagctgaagatatagacattgacgaggacgacgatgatgaagaaggttggttaggtccaaatggaaactctgtaaaggctgcaaatggaattgtttttagtggaccggctgacagtagcgatgaagaggatgaagatgagttgattgaagtatag

SEQ ID NO: 6220 - DNA, 1563 bp, Candida albicans
  misc_feature (829)..(829): n=g, a, t or c
  misc_feature (1224)..(1224): n=g, a, t or c
atggctacagttataccaccaccttctaagaaacaaaagagggaagcacaaaaagtccgtgagttggatcttataccaaaagatttgccaaatgtccttatcaaatttcaagcctcagatacaggtgaatcaactggtggttcaattcgagttcctggtggaatcactgaaaaacaattagaagaattattgaataatttacaaggtgaatctgatgatccagttccatatacattttctcttttgaatagcgatgaaaaagataccaccaataataataataaactaattgatattaaagatgatttatatcattcagtattaaaaccaggaatcaaaacaactgaagatttcttaacattagtatataccccaagggccatttttaaagttaaaccaatcacacgttcaaatgcagcaattgcaggacatggatccactattttatgttgtgcatttgctcctaatgattccagtcgtatgtgttcaggagctggtgattctactgctcgtatatgggattgtaatacccaaactccattgcatacattgagtggccattcaaattgggtattatgtgtcacttattcccccgatgggaaattaattgccacgggttcaatggataatactataagattatgggatgctaccacgggtaagccagtggggaaaccacttttggggcattctaaatgggtcagttccttgagttgggaccctttacatttcgttcacgccagtgataatccacgtttagtttctggttccaaagatggaactgttaaagtttgggacaccacagcaaagaacttgtgccatgacattnaagtagtcatactggagccgtttcttgtgttaaatggtctggttcaaacattgtttatagtgcgtctcatgatacaaaccatcaaagcttgggatataagtgctaatggcaaatgtattcaaactttgaaaagtcatgctcattgggttaatcatttatcattatccactgattacgttttacgtaaaggtgggtttgatcatacatcaaacaggaccacccaaatttcaccagaagaattacgtgctcgtgctttacaacaatatgaaaaagtagctaaattaaatggatcaattagtgaaagattagttactgctagtgatgattttacaatgtatttttgggaaccattgaaatcatcaaaacctatttgtcgaatgacgggacatcaaaancttgtcaatcatgttaatttctcacctgatggaagatttgttgtttcaagttcttttgataattctattaaactttgggatggtattagaggtacatttatttctacacttcgaggtcatgttgctccagtttatcaaactgcttggtccgctgataatcgtttattggtaagttgttccaaagatactactttgaaagtatgggatatccgaactaaaaaattgagtgtcgatttaccaggccattctgatgaagtttatgcagttgattggagtttagacggtaaaagagtggcatctggtggtaaagataaaatgattagattatggtcccattaa

SEQ ID NO: 6221 - DNA, 1542 bp, Candida albicans
atgagtaatttcattgaagtccagaggtctaacattgaagagattggtattatagaagattcattatcaaggagattattaagaaatccttatatattaccgtcaaacttacagccacgaccaaacatccttgtatcaaaagtaacaaaaccaaattcaaccaaaagaatatcgatactacaacaatatgaattgggttattttaaagatcgatataatcaaataataaaaggcttgaatcattgtcttactgacgagaaggagtcattttccaggacattagaattgatcactgagccaggtgatggatttgaaaagtttgatgagatgatcaatggcatctctctgaatgacaatatagtggaagatccaagaaagttgtattctagcttcagttcattaaacaaggaattgaatcctcaagatgtgactttaaaaataaataagaaaactggtaaagaacaagagtttgttaaaagaaaacattttttgagttccattgcttcacatttgaaaaatatagagattaacgatattttagaccttcatcattttcatgatttgtatgttagtaattttggtccgattctgtacattgaatatttgtataaattcctgagtttcccatataccaacgtcaatgggttttattcgaaatacttgacagaattgagtcggtttctagaggctacattattaaagttgcaaccgttactagactacaatgccttgttgcaaaattggaaaaaagagtatgacaatgctaatgaagaaaggaagtctaatggcaatgacggggacaaattgttttgcaaagcatgtaataaattattttcaaaagaaactgtttaccaatcccatttgtcaggaaagaaacataaaaagaatgcatctcaacaaaacccagacaactttgtgtcttcgttgccttggttggaatatttcattgaaaagttgtgtcaagtgttggccccagaattggaatacactagagcacaagttgagaaattgtcaaacttgtcggaaagagagctacaacttgatagacaggtgcaacacgatattgaaaatgaatttgttgccatcaacaacgaatttgatgacgatgatttgtctcaaaatgaacatggcgatgacgatgataatgatgactatttagatgacagctttaagaatttacctttaggcccagatggaacaccaatcccattttggctatacaagctacaagaactacataaacaatacaattgtgaaatttgcggtaacataagttacaaaggtaaaagtgtgtttatgaaacatttcagtggatctaaacatcaatatggtttgaagtgtcttggtgttgatgagaagaatatgaaaatgtttaaaaatattaccaaaattgatgaagctactgaattatggaaagtgttgagaaaggagaccaaattgaaagtgactgaattggaaaattcagttgaagtggaggataaagaaggtaatgttatgtcagagaaggattatatagatttgaaaaaacaagggttattatag

SEQ ID NO: 6222 - DNA, 771 bp, Candida albicans
atggattactcaggacgagttaactctaaaaagggtgctggtggaatagcaagtaatgaagatatcaacatccagacaaagcaacgagtacaagaattgttatccacccatgttttggatatagacaacgatccttacgttttccgaaaccatttgggtatgctagagtgtaagttgtgtcttaccacacatatcaatgaatcttcatatatatcccatttgggtggtagaaagcatcatttaaatttggagcgaagaaggattttggatgagaagcagaataaactgagagagcatcagttgagttctcaaaacattttgagtatcaataacatagaaaaacgatcgtggaaaaagataggtaagcctatttataagattaccaaagttagggatccggaaactttacgtactggaatcctagttaatattaaattgccaaaaattacggtaaaagagcctatgtttagaattatgtcgtactatgaattgacttcgaaaaatcaaaacagttgtcggaactttattgaaaaatataaaagcgatgacgatgatgatgctgaagatgatgatgacagtgatggtggtgatgataacaagtatcagtatcttgttgtgtctgctgaaccatatgataacattgcaattgtgatacctaataaacatgaaattgacaaacctttagaagagaataaaatgtccgacagttactggtggtattgggataatgatactaaggaattctttctacagttcttatataaactataa

SEQ ID NO: 6223 - DNA, 1089 bp, Candida albicans
atgaaaggattaattttagtcggaggatacggtaccagattgagaccattaactttaacattaccaaaaccattggtcgagttcggtaacagaccaatgatcttgcaccaaatcgaagctttggccgctgctggtgtcaccgatattgttttggccgtcaactaccgtccagaagtcatggtttccactttaaagaaatacgaagaagagtacggtgtctccatcaccttctctgttgaagaagaacctttgggcaccgccggtccattaaagttggctgaagaagtgttgaaaaaagacgactcaccatttttcgtcttgaactccgacgtcatttgcgactacccattcaaggaattggccgacttccacaaggcccacggcgctgctggtactattgttgctaccaaagtcgacgaaccatcaaaatacggggtcattgtccacgacagagacactccaaacttgatcgacagatttgttgaaaaaccagtcgagtttgttggtaacagaattaacgccggtttatacatcttgaacccatcggtcatcgacttgattgaaatgagaccaacctcaatcgaaaaagaaactttcccaatcttggtcgaacaaaaacaattgtactccttcgacttggagggttactggatggacgtcggtcaaccaaaagatttcctttctggaacctgtttgtacttgacgtcattgtcgaaaaaacacccagagaaattgtgtaaagagaaatacgtccatggcggtaacgtgttgatcgacccaactgccaagatccacccatctgccttaatcggtccaaacgtcaccatcggtccaaacgttgttgtcggtgaaggtgctagaatccaaagatcagtgttgttggccaactcccaagtcaaagaccacgcctgggtcaaatctaccattgttggttggaactccagaattggaaagtgggctagaactgaaggtgttaccgtcttgggtgacgacgtcgaagtgaaaaacgaaatctacgtcaacggtgccaaggtcttgccacacaaatcgatctcctctaacgtcgaaaaagagtctatcattatgtag

SEQ ID NO: 6224 - DNA, 2529 bp, Candida albicans
atggccaattctcatagaaacacattaaagcatgaccataagccattcaaatcaaagcatgccaccaaaggtcaaatcaaggccagaataaagggtaaagttgaaaaatcatccaatagtctgggtggcagtaaactgctgaaagttgtatcaaaattggaaaggaaaaacttatcaaaacaacaaagggacaataagatcttagaaacgaaattaactaaaaaattgtttgaaggtaattcaggggcagaaaagattgttaccataattacattaactaatgatttatctgctgttgacattgccaatagattatttaatgaacaagaagataccagtaatgagtcaataacaagattcgattttggttatccttcggtcacaaacataaatattgcaaaattcaaaaccaatttgaaagtgataattcccaaacaaaataatatgattagtattcttgatgcggcccaagtgtctgattttgttctcttggggatatctgcaactgaagaaattggagaaaactcatttggtgaaaccgtcttacgtgcattgattgctcaaggtatatcaacaacaattggggtgttgccgaatattgtcctggcttatccaaaacgtaatttacaattagatgtcaagcagtcgttacaatcattttatcatcattttttcccatcgcgagatggatcatcgaatcgaggcagtggcactgatagtggtgggaataaattatacctgttggaattagattctgataactcgaattgtttgcggataatatgtcaaaaattccctcaactgataacttggagagattctcgtgggtggttagttgccgataaagttgaaatttttaacccaaatggcatgcctgtggagaatcaacaacaaatgatggtggtagaaggtatggtgagaggagttggattcaatgttaatcggttagttcatttgcctggattgggcgatttccaattacacaagttggagaaattggcaagaaaagcacgtgggaacagctcacgtaatcatcgtggcggtatggatatagacactggtaatgatggtgatgctgaggaaacgtttttgcctaatgaacagcaagagctgttggatgaattgaatcctgacgaagggatcgatatgggaactatggaagatgacgatgatttcttaaataacgataactttggtgtcagatcagagggaaaaatatatttcgataacggcaacagcaacggtacgagctcttccagcacgggcaaaaaactagttccaagaggtacttcagaatatcaaggaagatggtttgttgatgatgtattggatgaagatgcatctgatttagaagaacaacgagaaggagaaggagaagaagaagaagacgccaatatagttgacgatgatatgatggtagaagataatatggaggcagatgacattaccgatagtatccatgattcagaaatgatgcacgttgacttgtcaccagaagaagaaagtcgtcaacttgaagaataccgatcattagctaaagatgatttggaattccctgatgaaattgagttgcatcctaatgaatcggctatagagcgattgaaagggtttaggggcgtcaagtctttaggtaattgtgattgggattatgatgagtacgatcctgaagcaccatcgatattgaagaggttgttccaggtgtcgaattataaagccacgaaaaacaaagtcaataaacaattcatcaaacaaacagaaatcaccgcaggtaatcgagtcagattatatattatcattcctcctggcgcttccaacaatgtaagcagcgttattggcagttgctcgagtgttccattccctgtatacgagttattagaacacgaacacaagttgggtgtttgtaatttctcatttgaagcatggcaagattacgagaaaccaattattaacaaagagcaaatcattgtgcaatatggaccaagaagacaaattatccagccgttatataatcaagccaacaataatccaaacaacgttcataagttggagaattttgtccatcataaccaaggtggtggcggtgcaattatcgctactgctataaccccagtattgtttactaactcgccaacattatttttcaaaattcatcccgacgctgacgatagtagcaactctaatggtggatcagttgagtttgttggtaagggtacttatttgggcagtgatgctaaacgtatcatggtacaaagagttgttttaactggtcatccaataaaaattcataaacgtgtggtcactatccgttacatgtttttcaatcgtgaagatatcaactactttaaggcagtctcgttgtttacgaaaaacctgggacgagtcggatttattaaagaaagtcttggtactcatggttatttcaaagccaatttcgatggtaaattgacatcacaagatgtggtggctatgagtttatataaacgatcctggcctgaagtttcaactgcctggaataagtttaattattag

SEQ ID NO: 6225 - DNA, 1302 bp, Candida albicans
atgtctcacgaaggtcaagaagaattattagattattcagattctgaagaaattgctgtttcaaccaccactcaagcttctggtgaagctcaatctaatgataaagaaagtgataaaaaaggatcttatgttggtatccatgccaccggtttcagagactttttattgaaaccagaattgttgagagcaattggggattgtggttttgaacatccttctgaagtccaacaagtttgtattcctcaatccattttgggaactgatgttttgtgtcaggccaagtctggtttgggtaaaactgctgtttttgtattgtcaacattgcaacaattagacccagttccaggtgaaatttccactttggttatttgtcatactagagaattggcctaccaaatccgtaacgaatatgccagattttccaagtacatgccagatgttaaaactgatgtgttctatggtggtaccccaatcaaaagggatattgaaaaattaaagaacaaagatacatgtccacatattgtagtggcaactccaggtagattacatgctttggttgaagaaaaagctatcagattgaacaatgtcaagtcgtttgttattgatgaatgtgacaaagtcttggaatccatcgatatgagaagagatgtgcaagatatcttccgtgccactcctcaccaaaagcaagttatgatgttttctgccaccttatctcaagatattcgtccagtttgtaaaaaatttatgcaaaatccattggaaatttatgttgacgatgaggccaaattgaccttgcatggtttgcaacaatactacatcaaattggatgagaaagagaagaatagaaaattgtctgacttgttggattcattggaattcaaccaagtcattattttcgtcaagtccactagaagagccaacgaattgaacaaattgttgtgtgcttgtaacttcccatcgattgctgtgcattctggtttaccacaagaagaaagaatcgaaagatacagatcttttaaagaatttaataagagaatctgtgtttccactgatgttttcggtagaggtattgatattgaaagaattaacttggccatcaactatgacttgccaaacgaagctgatcaatacttacatagagttggtagagctggtagatttggtaccaaggggttagctgtctcttttgtttcttctaaagaagacgaggaagtcttggaaaagattcaaagcagatttgatgttaaaatcaccgagttcccagaagaaggtgttgatccatctacttatatgaacacttga

SEQ ID NO: 6226 - DNA, 696 bp, Candida albicans
atggcagaggaacaaagaagacaaatagaacagttgatgggaaaagaaaacggatcgctgatacggcgaagagatcctgaaatgacttcatctcgtgtatgtcgggcttttttagtcggcacctgtcctcatgatttatttgtaggaacaaagcaagatcttggaagatgtcctaatctacatttacaaaaacataaactagaatacgagcatcgaacgaaaaaattgggcgaaaagtttcctgacatagagtatgattattacaaattgttgtctaaatatgtctctgatttggaccgaaatatccacaatgcccaattacgtttgcagcacacgccagaggaaaaagcaaaaattgcccgagttacaaaggaattagatgatctagatgttgagattggtttgatggtccaagagcttaattatttggtagccaaaaatcaggccagtaaaattattgattacgccattgaattgaatgccaaatgtgaagagagggaaaaactcagtcaacaggctcgaagaataactgaaaatgttggacaaacatcacaacagaaacttcaggtgtgtgatgggtgtggtgcttacttgtcgagattggataacgatagaagattagcagatcattttgttggaaaaatacatatgggttatttggaaaatacgagaaaacttcaaggaggtacaaaataa

SEQ ID NO: 6227 - DNA, 2481 bp, Candida albicans
atgactggtgaagaagataaaaaacaacattttgatgcttctggtgcttctgctgtagatgataaaacagcaactgcaattttaagaagaaaaaagaaagataatgccttggtcgttgatgacgccaccaacgatgacaattctgtcataaccatgtcgtcaaacacaatggaattgttacaattattccgtggtgatacagtcttggtgaaaggtaagaagagaaaggacacagtgttgatcgttttagctgatgatgatatgcctgatggcgttgctagagttaacagatgtgttcgtaacaatttgcgtgtcagattgggagatatcgttactgtccatccatgtcctgatattaaatatgccaacagaatctcagtattgccaattgctgatactgttgaaggtattaatggttccttattcgacctttacttgaagccatattttgttgaagcctatagaccagtgagaaaaggtgatttattcactgtgaggggtggtatgagacaagtagaattcaaagttgttgaagttgaccctgaagaaattgcaattgttgctcaagataccattattcattgtgaaggagaacctattaatcgtgaagatgaagaaaatagcttgaatgaagtgggttacgacgatattggaggttgtaagaaacaaatggcccaaattagagaattggttgaattgcctttgagacatccacaattgttcaaatcgattggtattaagccaccaaagggtattttgatgtatggtccacctggtaccggtaaaaccattatggcaagagcagtggccaatgaaacaggtgccttctttttcttgataaatggtccagaaattatgtctaaaatggctggtgagtctgaatccaatttaagaaaagcttttgaagaggctgaaaagaattctccttccattattttcattgatgagattgactctattgccccaaagagagacaaaactaatggtgaagtagaaagaagagttgtttctcaattgttaacccttatggatggtatgaaggccagatctaatgtagttgttattgctgctactaacagaccaaattctattgatcctgctttgagaagatttggaagattcgacagagaagttgacattggtgttccagatgctgaaggacgtttagagattttgagaatccacacaaagaatatgaaattggctgatgatgttgacttggaagccatcgcttctgaaacacatggtttcgttggtgctgatattgcttcattatgttcagaagctgctatgcaacaaatccgtgaaaagatggatcttatcgacttggaagaagaaaccattgatactgaagtgttgaactctttgggtgtcactcaagacaacttcagatttgctctcggaaactccaacccatctgccttgcgtgaaactgttgttgaaaatgttaatgtcacttgggatgatattggtggtttggacaacattaagaatgaattaaaagaaaccgtggagtatcctgttttacatccagatcaataccaaaaattcggattggcaccaacaaaaggtgttttgttctttggtccaccaggtactggtaagacacttttggccaaggctgttgctactgaagtttctgctaatttcatttctgtcaaaggtccagaattgttgagtatgtggtatggtgaatctgagtctaatatccgtgatatatttgacaaggccagagctgctgctcctactgtggtgtttttggatgaattggactccattgccaaagctagaggtggttctcacggtgatgctggtggtgcctccgacagagtggtcaatcaattgttgactgaaatggacggtatgaatgctaagaagaatgtgtttgtcattggtgccactaacagaccagatcaaattgatcctgcattattgagaccaggtagattggatcaattaatttatgtcccattgccagatgagccagctagattgtctattttacaagctcaattgagaaacactccattagaacctggtttggacttgaacgaaattgccaagatcactcacggtttctcgggtgcagatttgtcttatattgttcaaagatctgctaaatttgctattaaagactctattgaagcccaagtaaagattaacaagattaaagaagaaaaagaaaaggtgaaaactgaagatgttgatatgaaggtagatgaagttgaagaagaagaccctgtgccttacattaccagagctcactttgaagaggctatgaagaccgcaaaaagatctgtttcagacgctgaattacgtcgttatgagtcttacgctcaacaattgcaagcctcaagaggtcaattttctagctttagattcaatgaaaatgctggtgccactgataatggttcagcagcaggtgccaactcaggtgcagctttcggaaacgttgaagaggaagacgatttgtacagttga

SEQ ID NO: 6228 - DNA, 2259 bp, Candida albicans
atgtcatctactcttccaccattcagtgatttaaatgccacttggacattcatccaaccaggacttgaatatattttgggtgctcatggagaacaaggtgttaccgccacagtgtatatgaattgttatactgcagtttacaattattgtgtcaacaaatcaagacgtggaacaaccccggtttctatttccaataattccgataataattcttattcacttgctggtgctgagatttataaaaaattagaagaatatttaactgaattcatcaagaatttgaaaagattacctaatgaatcatttttagaattttatgttcggaaatggacgcgattcaccattggagcagtatacatgaacaatgtttttgattatatgaatcgttattgggttcaaaaggaaagatcagatggacgtaaagatgtttatgatgttaatactttatcatttattaaatggaaggatgaaatgttcaaaccaaattcaaaattattaattgaacaaattttaacttgcattcaacaacaaagagataatatgattgttgacaccaatttaatatctagtgctattaaatcattggtatttttaagtattgatatccaagatttgaaaaaaccaaatttgattatttatgtaaattcatttgaaataccttttttggaagccaccatggaatattatgctaaagaaagtgcagcatttttggcatcacataatgttattgattatatgaagaaatgtgaaactagaataggtgaagaagtgtcgcgttctaataattatttagaagaacgtactaagaaaccattattagaagtattgaatgcagctttaattgaaaaacatgccaatgaaatgtatgatcaattccttgtattattagaacaaaatcaaattgatcatattcaacgtatgtataaattacttgctagagtacaaaaaactttggatccattggccaatactttagaattatatattaaaaaggaagctgctgctgcattagaagaaattcaaactcaagcagaaaattcagaagcgaaaaagaaaatcgtggaacctaaagtttatgttcatacattgatatcgatatacaatcgatttaatgatattgttgttagagcatttagcaaagataccaaatttattaaatctttagataatgcttgtcgtcattttgtcaataataatccaatagctacccctaaaccaagaagtccttgcagaactccagaattattggctagatatgctgatggatttttgaaaagcaattccaaagacaatgaaatgaatgccgataatcttatgattgtgttcaagtttattgctgaacgagattcatttgaagaacattatcgtcgtctattagcgaaaagattagttaatggtaccagtaaatctgaagaaatggaagaaagtgtaattcatcgattacaagaagaaaattctattgaatatacatcgaaaatgacaaaaatgtttactgatattaaagcttctgatgatttgaaaattaagtttaaagatggaatgaatgttttatttgatttttcaccaatggtgttagcacgtagtacatggccattccattcttcacaagattataatgatttgaaacttgctcctgaattaaaagtgacaattgattcatttaaagcaatgtatttacaacaaggtaaaggtaaacaaattgaatggctttggaatcatggtcgagctgaattaaaagcccatttaactaaaggtaaaggtggtaaaccatttaattttattgtttcacaaatacaactcatggtattattagcttataattattccaaaacttatacattggatgatttagtaaagattgtcgggattaaaaaagaattattacaaaatcatgtgacaccatttgttaaatataaattacttaaagaagaaggtgatcaattagtaattgttgatcattatccatcgaaaaagaataaagttagttttattggtgccatcactaaaactaaagaagaagatgttgaagaaattactaaagaagttcaacaatcaagaacaatatttttggaagcttcaattgttagaatcatgaaactgaaaaaactgatggcaccaaataatttattaaatgaagttgttgttcaagctggtaatagattcaatgccaagaatattgatgttaaaagagctattgatagtttaatagataaagaatatcttaagagaaatggtgatgattatgaatatattagttga

SEQ ID NO: 6229 - DNA, 1998 bp, Candida albicans
atgaatgttttagtatattctggccccggcactacaactgagggcgtaaaacactgtttggagactttgagactccatttagggtcgtattatgctgttcttcctgttaacgagactgtgttattgaatgagccatggatgagaaaaacgtccttgttagttataccaggcggagcagatttaccatactgtaatgtacttgatggaaatggcacgagaaagatttccaagtatgtcaaacaaggtgggaagtttttagggctttgtgctggtgggtattttggatctgctaggtgtgagtttgaagttggcaatcctaccatggaggttactggacctagggaacttgggtttttcccaggaacggccaagggatgtgcatttaaaggtttcaagtacgaactgcgtactggtgcaagagccgtcaaattgctggtcaatacagctgcattacctggatgtgcaagtcacatttataattattacgatggcggggcggtgtttgccaatgctgaaaagtataaagatgttgaaatcttggcaaggtacgacgacaaaactgatattgtggatttagagaaggctgctgttgtatacagaaaggtcggtaagggtggtgttattttgagtggtactcatcctgaatttgcacctcacttgttgcatccacgagatgaagatggggcaggttattttatagtggttgacacacttcgagcatacgatcacaacaaaaaggtatttatgagagactgtttgaagaaattgggcttgcgagttgccgagagtgttgatacaacgattccaagagttacaccaatgtatgttgtatctccgttcaaggataaagttagggatgtatacctgattttaaccagcaagttaggtaagctgtttgaggatagtaatgatgctttttattttgctgacgaaacgcaggaaactagtgagtatgttggtagtgaagaagatccagtcaagtatatcaactttctcactctggccggtataccggatttgaaaatggttccctattttgacatccaaaagtattttgataatttgaggatgttgtcgggtggtgacatcaagtttgggagcattttaggttattccgaggtgattacatctacaaacacaattatggataagaatccgcaatggttagagcatcttcctaatgggtttaccattactgcaactacacaaatagcaggtagaggtcgcggtggcaatgtatgggttaacccccgcggtgtccttgcaacgtcagtgcttttcaaaataccaccttcaccctcgtcgtcgtcaacggtggttacattgcagtatttatgtggattggcattgattgagtcgattctagggtatggaagcaacgtttcagggcaaggcgttgggtatgaagatatgccgttgagattaaagtggcctaacgatatctttattatgaagccagagtatttcaagtcgttggacgataaaagtgatataagtgccactgttgatggtgacgatgagaagtttgtcaaggtttcaggtgcattgattaactcgcaatttatcaacaaaaccttttatttggtatggggaggtggagttaatgtatcaaatccagcaccaacaacgtcattaaacttggttttagaaaagttgaatgagatcagacgtggaaagggtttatcaccattaccaccatacgaaccagaaatattgcttgcaaagcttatgtttaccattgaccagttttattctgtatttgaaaagtcaggattgcaaccatttttgccgttatactataaacggtggttccataccaaccagaaagtggacgttgacaatggcagtgggaaacaaagaacatgtataatcaagggtattaccccagactatggattgcttattgctgaagatgtagagacgaaaaaagtgttgcatttacaaccagatggcaactcgtttgatatttttaaaggtttagtatataagaagaattaa

SEQ ID NO: 6230 - DNA, 1497 bp, Candida albicans
atgtcctctgtagtatattataaatttttgcatcagaagaataaaagtgttatacattttgatggaacctccataagtgtatttgatttgaaaaaagagatcattttacaaaaccaattgggttcaggtcaagatttcaatttgagattatatcattctgaacaacccgatcaagaatatgaattggatcaagatgtaatacctcgatcgagttatgtattagctaaaagatctccagcatttgtcaaactgggtaaatataataatgctctgagatatataactggtaaaccaagaataaatcgaaaggcaattacttcgactgttggacataattcaaattcaaatcctttagtgtcagcacaacttcaacaacaacaacaacagcaattggatgagaatgccactgaagaagatagaattaaattgatgtttcaaaaccaatcgaatgcttgggaacaaacacaagaagatttagctcatcataaaatggtgttcaataaacccacagcatcaagtacggcgaataaacaagatgatcatccacctccaggttatatttgttatagatgtgggaaaaaggatcattggattaagaattgtcctacaaacaatgatccaaattttgaaggtaaaaaaattatgagaacaactggtattccgaaatcttatttgaaaaccatttccagagaagaagtcgaaagtaaagcaaatacattaactacaaatgataatggtgatgttgttgatagtgaaggtaatgtgatattaattactgatgatggtgattatgccattgccatggctgattccaaaacatggcaaaattatcaagaaaaattgcaaaatgctgctttaaaatcaaagagagaatacgaactgaaattagttgcggaaattgaaaaggataataaatgggaatttttggatccattggccaatactaaagcggttttaacatcaccaattgtcatgacaccatgttgtactgatagttccaaactacaaaacttgaagaatttcaattataatcaacctgaactagaaagagttttaattgataatgactttcattgtcctaattgtggtaaagctgatgtgtttcttgattcagttattcccaataaggatttagaagagaaattaaaagaatatgtatcgtcaaaagaaaaagaacttaacataaaagatccaagtaaacgtacagcagcagaaatgacggctgatgataataatgatcctcatcattcaggagaacctgatgctaaaaaacaaaaaattgttcctaatactgtccaaccaggaatgttcccagttggtgttatgccaccaccaccaccaccaatgccatttgccttaccaccaggacttcaaattcctccacctggatttggaatggtgccacctcccaattttatgccaccaacccaaggacaacaatttaataataataataataataataatagtaataatcagtttaatcagcccaaatag

SEQ ID NO: 6231 - DNA, 1032 bp, Candida albicans
atgtctactgcagcagttgcaacgaaaccatctgttacttcaaaaccagcaactaaacaagttctgaattacaccaaagaaaaaaaagtaggggaaggtacatatgctgttgtgtacttgggtaaacaaatctccaccaaacggcaaattgccatcaaagaaatcaaaacaggattattcaaagatggattggatatgtcagcattaagagaagttaaatatttgcaagaattgaaacatcccaatgttattgaactagtagatgtattttcagcaacaaataatttaaatttggtattagaatttttaccttgcgatttggaagtgttgattaaagataaatcgattgttttcaaatcagcagatatcaaatcatggcttctaatgacattacgtgggatacatcattgtcatcggaattttattttacatcgtgatttgaaaccaaataatttattattggcaccggatggacaattgaaaatagcggattttggtcttgcacgagctttggtaaatcctaatgaggatttatcatctaatgttgttactagatggtatagagcccctgaattattatttggtgctcgacattacactggagcagttgatatctggtcaataggtataatatttgctgaattaatgcttcgaataccttatttgccaggtaaagatgacgttgatcaattagatgttacatttagagcttatgggacaccaacagagcaaatatggccaaatgtttccagtttgccaatgtataacgcacttcatgtgtatccacctccttcaagacaagaattacgtaatagatttagtgctgctacggaaaaagcccttgatttgttgatatcgatgacccaattggatccaagtagaagatgtgattctacactagcattattacacgattattttactgaatcgcctcgtcctactgacccgaaaaagttgcctaaaaagtcttctccagaaaagagagagaatgaagatgaacagaataatggctctaaaagaaggcatgtttag

SEQ ID NO: 6232 - DNA, 1080 bp, Candida albicans
atggctcctccagcagttttaagtaaatccggtgttatctacggtaaagacgtcaaagacttgtttgactatgctcaagaaaaaggttttgccattccagctatcaatgtcacttcatcctcaactgttgttgctgctttagaagctgccagagacaacaaggctccaatcatcttgcaaacttctcaaggtggtgctgcctactttgccggtaaaggtgtcgacaacaaagatcaagctgcttccattgctggttcaattgctgccgctcactacattagagccattgctccaacttatggtatcccagttgttttacacactgatcactgtgccaaaaaattattgccatggtttgatggtatgttgaaagccgatgaagaattctttgctaagaccggtactccattgttctcatcccacatgttggatttatctgaagaaaccgatgacgaaaacattgctacttgtgccaaatatttcgaaagaatggctaaaatgggtcaatggttagaaatggaaattggtatcactggtggtgaagaagatggtgtcaacaacgaacacgttgaaaaagatgctttatacacttctccagaaactgttttcgctgtctacgaatctttacacaagatttctccaaacttttctattgctgctgcttttggtaacgtccacggtgtttacaaaccaggtaatgtgcaattgagaccagaaatcttgggtgaccaccaagtttacgctaagaaacaaattggtactgatgctaaacacccattatacttggttttccacggtggttctggttctactcaagaagaattcaacactgctatcaagaatggtgttgtcaaggtcaacttggacactgattgtcaatacgcttacttgactggtatcagagattacgtcaccaacaagattgaatacttgaaagcaccagttggtaacccagaaggtgctgacaaaccaaacaagaaatactttgacccaagagtctgggttagagaaggtgaaaagaccatgtccaagagaattgctgaagctttggatattttccacaccaaaggacaattgtaa

SEQ ID NO: 6233 - DNA, 1404 bp, Candida albicans
atgaatataaaactatttagacatttacctaaatcaataacaagatcaataataatgtctaaattttcaccaccaatcaaccgtaatatggttgaattagatcgttcatttttccataaagaagtaccattattagctgcttatttccctaatcccaaatttttaggtcaatttgttaaatcttgtcaaaatgatattctttatgttcaaaccgtaaaacatattatttccatggatgattctaaagccatattattacgtgatgatgtgaaactgatatctgatttaaacccggaaacacaattgaaaattaatgaatttggaataatattaaaaccttatactttaaaacttgattattcattttggaaaagtgaagaaattttgaaaagtatattaccagaaaatttaatagatgatgtacctagtggatttagtcaagcaggtcatttagctcatattaatttaagagatgaatataaaccatttgggaaattaattggtcaagtgattttagataaaaatcctctggttttaaccgttgttgataaagtcaataccattgctaataaatttagaactttccccttggaattattagcaggtgaaccaaattatattgttgaacaactggaaagtggatgtaaatttaaatttgattttagtaaagtatattggaattctcgtttaagtactgaacatgaaagaataattggtaaatttaactctggtgatgttgttggagatgtctttggaggtgttggtccatttgccattccagcatctaagaaaaatgtcattgttttggcaaatgatttaaatcctgaaagttataaatatttacaagaaaatatcaaaataaataaagttgaaccatttattaaacctttcaatttagatggaagagaatttattagaaaagcacctgaattattacttcaatggcacaatagtcaaaatgggattattgaaaagaaaatcattaaaaaagtttcaattgatgataataagacaaaaaaaaattttgaaagaaaacccattattgaaacaaccaagattcctaaattttatcatcattttgttatgaatttacctgattctgctttaactttccttgatgaatttattggattatatggttcaaatcctcaattgaaaactgatcctgaattcaaattaccaattattcatgttcattgttttgaaaaatttgaaaataatgaaaatccaactccagaagaattacataatcgagtttatgaaaagatttgtaaattaatacaattcccattaaataaagagaaaatggaatttcatgaagttagaatggtttctcctacaaaacccatgttttgtgtatcgtttgaactaccggaagaagtggcctttaaacaaagtaaatag

SEQ ID NO: 6234 - DNA, 723 bp, Candida albicans
atggaattatattcacctgagggacttagaatagacggaagaagatggaacgaattgcgtagatttgaatgccgtatcaacactcatccaaactcatcggatggctcctcatatgtcgaacaaggtaataccaaagtgatgtgcacagtacaaggaccaatagaaccagcattaagatctcaacaacattcagaacgagcaaatatagaagtgaatttgaatattgctagtttttcaacttttgaaaggaaaaaacgaagtagaaatgaaagaagattagttgaacttaaaactactttagaaaaaacatttgaagaaagtgttatgataaatttatatccaagaacaaatattgttataaatgttcaagtattatgccaggatggtgggatgttagctgcagttatcaactctattacattagcactcattgacgctggtatatcaatgtatgattatgtgagtggtgtatcttgtggattatatgatcaaacaccattattagatgtaaataacttagaagaacacgatatgagttgtttaacagttggtgttattggtaaaagtgagaaattggcattaatgttgttagaagataaaatgccattggatagattggaatcagtattgtcaattggtattgctggaagtcataaaataagagaattaatggatcaagaagtgaggaagcatggaattattagggcttctaaaatgcaataa

SEQ ID NO: 6235 - DNA, 624 bp, Candida albicans
atgccaccaccagataaagcaagaagagacgttctcatttcaaaggcattatcatatttgctcagacatggtgctgaaaaagagaagctatccattgatgatcaaggatacgtcaagatatctgatgtgttatcgcatcagcgactcaaaagtttgaaaacaaccagagatgacatcaacagaattgttcaagaaaatgacaagaaaagatttaccattaaagatgacatgatatgtgccaaccagggccattcgttaaaagcagtgaaaaatgataacctaactccaatgaccgtcgacgagctcaaccaattgcgtatttatcatggaacttatagaaccaaattgccattaataaagtcaagtggtgggttgagtaagatgaacagaaaccatatccatttcacctgtgagcaatattctacatgttcgggaataagatataatgctaatgtgctaatttatatcaatgcctccaaatgtattgagcacggtattgtattctataagagtttaaacaatgtgatcttgaccagtggggataaggatgggaagctaagctgggagtttattgatcgcattgttggccttgacggtaatgaaattaacaaagagcaagtttag

SEQ ID NO: 6236 - DNA, 948 bp, Candida albicans
atgactgtatcacctaacactgcagagcaagcatatcttgatttatgtaaaaggattatagatgaaggtgaacatcgtcctgatagaactggtacaggcacaaaatcgctctttgcaccaccacaattaagatttgatttatcaaatgatacttttcctttattaaccactaaaaaagtattttcaaaagggatcatacatgaattattatggtttgttgctggctctactgatgctaaaatattaagtgaaaagggagtgaagatttgggaaggcaatggatctcgtgaatttttggacaaattagggttgactcatcgtcgtgaaggagatttgggaccagtttacgggttccaatggagacattttggagcagaatataaagattgtgattccgattataccggtcaaggatttgatcaattacaagacgttattaaaaaattgaaaacaaatccatatgatagaagaattatcatgtctgcttggaatccgccagattttgctaaaatggccttgcctccatgtcacgttttctgtcaattttatgtgaatttccctacatctctgccggacccaaataatcctaaacaagctaaaacggccaaaccaaaattatcttgtttattgtatcaaaggtcttgtgatatggggttaggtgtaccatttaatattgcatcctacgctttattaaccaagatgattgcacatgtggtggatatggactgtggtgaattcattcatactttaggtgatgcacatgtctatttggaccatatagatgccttaaaagaacaatttgaaagaatccctaaacaatttcccaaattagttatcaaagaggaaagaaaaaatgagattaagtctattgatgattttaaatttgaagatttcgaaatagttggatatgaaccatatccacctataaaaatgaaaatgagtgtgtga

SEQ ID NO: 6237 - DNA, 1194 bp, Candida albicans
atgaatcaattattaatcaataaacatgagaaatttttcaatagatgtttaattggacttccatcaacggctcaatctgaagattcaaataaattagccataatatatttttgtttacatggacttcaattaattcaaaaatttcaattcactaatcaagaattaatttattatcgaaatttcattattaatcaatttatgattgaaaataatcaaattatatcatttcgttcaacttattattttcaaaaaaccaatcaaaaatatgattgtcctaatttatcatcgacattatttgcattatataatttattgattttaaaatcaccttatcatactattataaatcgaaagaaaatcatgaattttttatgtaaatgtcaagttaaagatggtatcaataaaggtgggtttgtgccgacactctattataatgaagaaaatggagattataaacaatatggagaaccagatcttcgagtttgttatatggcattattgattcgtcatttaatgaaatatgatgacaataataataataataataataataataataataataatagggaagatagcaatgagactgatatagatttgatatctttacaacaatttattcttgatagaataaatattaatggtggatttagttctaccataatggatgaatcacatttaggattcacattttgtgctatagcatcattaaaattacttaattatccattagagaaattaaaatctaccaaagaatggttaattcatagacaagttgattatcctgaaaatttatatcctaaagatggtaatggtgatggtaatggtaatggtgataattatgaatattatcgtaatatagatattggtggttttaatggtagagaaaacaaattgagtgatacatgttattcttggtggtgtactggaagtttatataatattgatgttaatttcattaaattggtagatttaaacaaggcggaagattatttattaaataaaactcaaaatcaattatttggtggatttggaagagatcctgattcaacacctgatcctatgcatagttatttggcattagctagtttatcattatggaatcatgaaaaatttgctttacaagaaattaatccaattttaacaattacaaaagaactgtatcaattttttaaagaagaaataaagtattaa

SEQ ID NO: 6238 - DNA, 5128 bp, Candida albicans
atggattattcagggattacccgtggctcaattcgtgctgaagcccttaagaaattggccgaattgacggttcaaaatccatcttcaaatttaaaagaagttaatactggaattcaaaaagatgatttttccaaattattatcggccactcccaaattactcaactcaaggggtaaattgaacggcagtgtaagtaatggtggtggtgctggtggtagtagtggtgttcgtgatagattatctgaagttgccattgctaaaaaggaatacgaagtgattattgcccttagtgatgccactaaagaacccatgaaagttgactctcaaattcaagctttaatcaacaagtttaaagcttatctctttgaattaccagatcaaaaatttgcttattcaattgtttctaattcagccaccatttcaccatggaatttattaggggaaaaattgactactgggttgatcaatcttgctatgcaaaataccaaacaatatttagatgaagttgttgatattttccaagagtttattgagaaatttttcgacaatatgaatcttcatttgactcatttcttgactttagcaggggtattggatgggtttaatcaaaatgccaaatttttaagtatttcatccagaacttataaaattttcattgccttagactcaaacatagatgatgcagattttttgaatgacgttgagaattacactgattatctttatgatgaaccaaatgaattccaagatttattgactcgtgattttgttatcaatttctcaccaatcttgtatttggaaagtttgtcgagattaatgtgtgctattgttaatggaatcattgataataaagatcaatctttgttgcattatattttagaaaaagttgccaacaagtatgatcaagttgacgataaatcgaacctggcagtttttgctaaagacaatttggatttttcaagagctcatatggatattatcaacaatttaactggattggctttacgtaaattggaatttttggacagaggagaaacttatattgtttactcaacttatgatcgtttgaaattgggttatttggccaagagccataacttacaaattttgagttgtggtatgtttactgataatttggatttgaaaacatcaagaaaattatttaaatcaagtattgaaataagagatgttatgttggatccagatttagggttgactgtttttgaatttggttctttattggtttataaggatgaatctattggtccctcattgaccagagcattcacttcagttattgccaatcctaaattagacccacattattgtttgaaagcttccaaagccgttggattaggtacgaaaaaattgcctcaagacactgtggtgacaacaatttattcattaacaaatcttttatttgttactaatgaagggttattattaccttctaaaagtaccaaaagatttaacaccggtttgagtggaggtgataatttattaggaagagaagcatttgcatcacctatgtcatctagaagaacttcattcacttctttctctcaagcttttagtaaaggtgctaattctagtgaatttgatgaaaatgattaccgtaaagtttgtgaaaatgccgttacgggtattattgaagtttgtgaaaaatgtaatgatgaaagtgttccagcattgacttgtactattttatcacaaaaggtcagcaaaatcgattcaccaattggaccattgattttgaaagggttaagttcatgtgccccatttttacctgaacgtgaatttgttattttgattagattattaaacaagatatcatttgatgcattagagaagaaaaatatggtgttgatgggctatttaacagaaagtaaaatgttacttgctgaaaaattaaaggtatcaaacccgttatttacggtttatcttcatgaattattacaaacaatcaacagtaaaggtgatgttcaacaattggaacatcatagatcccataatgaaattagtgaagttggtgatcaaattgctatttatttgaaaccattagctgcattgttgcctgatgttcatttaggtgagaaaccattagagattaaaagtactgtcactatcaacttgtttagaaacatttggttcaatatggttgttcatggatacaatatcaattcaaagaataccaaaactttccggaatgaattagaaagaattgcttataattcaccaccattggcttcagaattgtcatgggacagaaccgaaacttccattgaattaaacacagttttaagaagaggttcatccaatcataatatcaaagatcatcgtcattatttgggcaacatttttgaagtccatcgtagtttatcttatccgaaattgatgtttttatctgctgcagtgtttgttgaatctttaagagttagaaatggtaattgttcggattcattattgtatttcactgatccaacatttaagatttctggggttgacaaatatttaggacatatttcatttaaaattgtcaaagatttcattcaattaattaatactggtgccaataaacaatttagtgctgaccatattgcggaacaattgacgactatgttgatctattgttgttatccagttccagaaatgcaagatgctgccatgcaatgttgtgatttattaatcagtagagtgccatcgtcattgtgccacaagaagagtttattcgctgtatttgatttattgactttattatttgatagtattgctgatgctgatgttcatgaatatgaacccaccacagttttcagagcaagatgtactggtattaaagtgtccatgtctgacgactatcattggagaaccagtacattcaacagattccatgataaatgtaaacattggcttaaaatcttgttacacaaatgtaacattgatgtcaagagtttaattcaatcgtacatttctgccaatgaaagtttacagtttgatagtcctgttcaatttgggttatcctttgccttggaaatggcgggtgccatttcatctaatgatcgtgaatggtccgcaattacctatgccaatagttccaatttgaatgccttgcccactattgtatcccaattatcatggagaagtagttttgttactgaaatcatgaataaattaccattgcgtaccgatgaagaaactgattttgccttccaagctattagagaaaaagtttattacattaaagccagattagttccaggagacaatggaggatttgattatcctaccaatgatgaaattatgaaattattgagtgaaattgctgggttaactttattgagtgatgttaacaatgctgaattgattagatatttagtggaaatcccattcacaatgtttgttccactgattatgattactgctagtggtgtttggtttgctgttatgaaagataaaccacaattatcagtacttttgttgagtgaaattgccaaaaaatgggaagaatctatacaattacgcaaaggggtcttttcacaagaatttgatcttgttcatcctgaatttgagaaaatggaatatgcaccaagtaatagagtattggttaataaggaagctgacaatgctcaaaaaaatttcgctcctcacttagagattattagattatttgcatctaattttgaagctacattgaatcaactggatcatttattgaagattttcactagatttgttgaagttggcttggaaaatttgaaaattgccagttatcatccattatctcgtttagttcgttttgaattggttaaattttcttttgaattattacaatatcatatcaaattaggttccagaagcagcaaatatttaagtgaattaatcttggatggggcattgacttggtttagacaaagaagcacatatccatttggaggtaataaattgaaatttaagagtgaattaatacttttaaaagaagttgccaaatttgtcactggattaaataatttccaactggaattgattgatatgaaagctaaaattcttttatattttatggatgatgagatttgtaaatttactgtgtggttacattcaatgaatccttcagatactagtggtacttatgttaatcaacaaattggaggtcaacaccttaaatttgcttatgaaattgatccaattttggcagtgaatttggccatgagatacaaattaaagagtttagacgaattattacaacaattgataattaaagacccattacctgctatcagttaccctgatgccgtacaatttttcattggtatcaatgctggaactcacatgccatcgtatcatttattgttttgggctccattagctccaattgatagtatcacattatttttaccaccatttggatccaattcatacattttacaatacaccatgaggtcattagagagtcatgacgttaacttgacattcttttatgtgccacaaattgtccagtcattaagattcgattataaaggttatgttgaaagatttattgttgagacagctaaagtatcacaattgtttgctcatcaaattatttggaatatgttggctaatagttataaagatgaagatagtcaagaacccgatgatttgaaacctactttggatcgtatccaacaaacaatgttgaagagttttagtgctcatgatttgaaattttatgaaaaagaatttggatttttcaatgaagtcaccagtatttctgggaaattgaaaccttacattaagaaatctaaagcggaaaagaaggaaaaaattgatgaagaaatggcattgattaaagttgagccaggtgtatatttgccatccaatcctgatggggttgttattgatattaatcgtaaactgggtagaccattacaatcacatgccaaggcaccatttatggcgacatttaaaatcaagaaggaattggttgattatgatgaacaaggtcataaacaatcatttgaaattgaaaaatggcaaagtgctattttcaaagttggtgatgattgtcgtcaagatgtcttagcattacaattgatttccatgtttagaaccatttggagtaatgcaggattagatttatatgtgttcccatata

SEQ ID NO: 6239 - DNA, 681 bp, Candida albicans
atgtcaaaacatatagaagatagtctaaaaatatgtacagtatgtgcatcgaataacaatagatccatggaatctcacaaacaattgatggatgcaggttatgatgtgcattcgtttggtaccggtactgccgttcgattgcctggaccaagtgtggataaacctaatgtctatgaatttggaactccttatcaagtaatgtatgatgatttaatcagtcaaaaaagcaggaaattatatgaatcaaatgggttgatacatatgttggaaagaaataaaagtgttaaagaagcacctgaaaagtggcatagaaatgcaccccttggtaaatttgatttggttataacatgtgaagaaagatgttttgatagtgtaattgatgatttgatgcatagaatgtatgatagagatcccagtgataatgatgatgttaaacgacttgtacatgttataaacattgatattaaagatgataatgaaaatgcgataataggagggaaaggtatattgaaattggttaatatgattcatgattttagaaggaaaaaaaaacaggagttgggtcatgacctcgaagatgagctggatataatattagaagatcaaatgatgagtataataacagaatggcaaagagaccacacaaatttacccacattatatagtgtatcttattattag

SEQ ID NO: 6240 - DNA, 531 bp, Candida albicans
atgacagtttctaacaacacttctgtcacttatcctattcaacaacaagcaactattattgccggatttggaagaggatcatctgaactaggaatccccacagctaatattccaatcaataccgagctaaataagttagaaccagggatatattatggatggtgtaaattaatcccattaacagcccaatgtgacgaaatcaagaaaagagtagatggcaaagatgtattattcaatcatggcaatgaattgaccaatgaagaaagagatattttccccatggtgatgtcaataggttggaatccttattatcacaacaaagataaaactgctgaagttcatataattcacaagttccagaaaaatttctatggatcaaagattgaatatgttgtattaggatatatccgtccagaattgaactttgatagtatagacgagttaatcgataccataaattccgacattgaatttgctaaactgaaattaaagagtgacgaagaaagtggcaaggaatatttcacgaaatga

SEQ ID NO: 6241 - DNA, 1686 bp, Candida albicans
atgtcggtatcaagtagtaaacagcctggaaatgatgccaatgatgcgaatctgtcagttaaaggtgtcagccacttgataattgtgcagattatagccaagttgctcacttttgttttgaatcaattgataatcaggtacttatctccatcaattattggcgtgactacatatttggaattcatttgttcgacaatactatttttcagtcgagaatcaatcagattgtccgtgcaaagagttcgcaacaatctggataataaggactatgttgctcaaaaggtggttaattttggaattttggcaatagcatttgcattccctattttcatggttattgggtattggcaactcaattactcactggttatggacaagttatttgtgtcaccattttataaaccggttattgtcttgtttgtggccctggttattttggaattgcttgttgagcctatatactgtttgtaccaattccaattagattttggtaagcggtcaaagttcgaagggtcggcaattttcgttaaatgtatagtttcggttttgtcgattttacttgctagacaatattttgtcgatcagaagtttgaaggtgtggcgatttgtgcctttgccttggctcaattcagttattcattaactttatttgcatgttacttgatgtcatttagatttgagtttcagaataataagataaattacaacttagtgaaactaaaagacgagaatgcaagagaattttattttgaacaggacactttaactattgtcaaggggttttttgtgcaaatgatcttcaaacaatttctaacggaaggtgataaattactaatcagtcatctctgcacaattgaggaacaaggtatgtatgcagttatggccaattatggctccataatagcgagattgttgtttcaaccgttggaggagtcaactcgattaatgttcaccaaactcttaaatgagaatacacgttcccagggggatgagaaaccccaaaaactggaatcacataagtgcatgcaaacatttaattatttaaagttaatatcaatcttttatttcaatttgagtttgattattttgtttgcaggtgtcactagtggtccttatttgctaaaacttttaatgggcgggagagcttcaaactgggaaagtacagacatatttaagcttttcccgcaatatgttgtgtatcttccgtttcttgcctttaatggaattttggaagctttattttcgagcatggcaactaattcagacttgaagaacttttcaaaatttatgacattaattaccatcttggtgttaatatttctgtacttgcttattgatgttttgaatttaagaatatctggtttaattttggcaaacgtattcaacatgagttcaagaatagggtattgttactttaagatttcaaaattctattcgaaagaaaatgtgaaagtctcttttgttgatatcgtcagatacagctgtccatctattttgattacctcgataatatggattattcagcttttcataataggaaaaaataccactaattttgtacagttaatcctaaatgcttgtttttcatttgtgttggtaataatattgatggttatggaaaggaaaaactcgaaaaagccgtttgaaaaagtcacaaataagtttatgaaacctaaattagactag

SEQ ID NO: 6242 - DNA, 1491 bp, Candida albicans
atgagtttaacacttgatgaattaactcaattgaaaaaacaagtaaaagaaagagatgaagaaattgatttattaaatgcatttataaacaagaatccaagattactgtccccctgtgttatagttcacggttataaatctattggtaaaacatttaccgtcacaaaattcttaaaggcattaggaacaaatttttctactattaattgtgatgaatgtgtttctaaaaaaatcttattacgtcgatgttttgatagaattagaattgatagtggttgtccaataggatcattaaatactagaaatgatttagcaaaatatgggaataatggtgatagtttttcaacatttgtatcagcattagaattgtttgttgaagaatttgattataaattggaacatcatgttttactactagatagatttgatcaatgttttgaatatgtcaatgatttattagccgggtttactcgattaagagaatcatctactatattacaaaattttaccgtagttgttattatatctggtgaagacccaaaagaaattgtcacattatcaaacccacatgtttattttaaagtttacaatgagagccaaattatcagtatcttgcaagagagcagattgtgcaaatttaatatcaatgatgtttctgatgattcaacggaaagtatagaattttataatcaatacgttaaggcaatagtggatatgctttatccctacactggatcagatatgtcattattgattgatttcaccaaaagattatgggatccatttattgaaccaatacgacaaggtcgattacaaatcactgaatttgtgaaatgtcttaaagaaggtatacatttatttactaatgaagatgtggttagtacttcaggagtcattgaatttaaaactttacaatgggaaaaacaagtgactcatggaggacatgttcatgatttacctttacattccaaattttttttacttgcatcttatttggcatcatatgggagttatcgaaatgatcttcataaatattccaaagtaaaagtagtaaaatataaaaagagacaaagcactaaagcaacttcagttactaaaggacatatgagtaaagaaagtattgatacacgtttattatcagctaattatgttgatcttgaaaggattttggctatcttatcagtcatatatagaaattatgccccgtctttaaatcattctgataaagatgaattactttacatggatgatcgaatcattgaagatgaagagaaaaaggaatcagagagatctaaattcactttgacaagaaatatcgatttgagtaatcaaattgcaactttattttccttggggttattaagtaagaccaattcatctgatattttaaccgccaaagtaagatggaaatgtaatattgattggaaaacagctgaaggaatagcaaaatcagtggatttccctatttcagatttcatgatggatgattaa

SEQ ID NO: 6243 - DNA, 507 bp, Candida albicans
atgaaagtttactctatattaattctaaataaagcaggtggtcttatttatcaaaatgaacttgtaccaggtctaagtaaattgtcagctaacgattacttggtgctagcaggtacactacacggtgttcatgccattggttctaaattgtcttcaacgattaacaacaataacaatccaaacggagaagaacttaatgctgcccataatgccatcatattatcttctggtaaagccgggagtgcaaatagtaacagaactggcttacaaaaaatcgaaactgatatgtttaatttatatatatttcaaactgttagtgggttaaaattcattatgatcacagcaccaaatgtggccaattcagagacagtcaccgatgagttattccgtcatttatacatactttattctgattacgttatgaaggatccattttattcattagatatgcctataaaaagtagtttattcgatgggagagtcaagcagttgtttgcacaactgtaa

SEQ ID NO: 6244 - DNA, 852 bp, Candida albicans
atgataagaaaacaggctagagaaagaagagagtatctttatagaaaggctttacagcttcaggaatcttccttaacagaaaaaagacaacaattgaaagcagctctagcaagtggaaaatcattatcaaaggagcttgccgaagatgaaaaattacaacgtgattttatttacgatgaaagtgaacaaatagaaattgatgacgaatacagtcggttgtcgggaatatctgatccaaaagttgttattaccacatcccgtgatccatctgtcaagttgctacaattcctgaaagaaatcaagttaatgtttccaaatagcttgaagttgaatcgaggaaactatataatctcagatttggtaagtacctgtaatagagtgcaagtttccgatatgattttattgcacgagcatcgtggtgtcccatcaagtttaactgtaagccactttcctcatggcccaactgcgattttcacgttacataatgtcaaactaagacacgatttgccaaacttgggaaacgtctcagagtcctatcctcacttaatatttgagaatttccaatccgacttgggtaagcgtgtggttaaaatattgcaacatttgtttcctccaggtgtcaagaaagatagctccagagtaataacatttgtcaataacgatgactacatatcggtgagacaccatgtttacgtcaaaactaaggattcagtggagttgagtgagattggcccacgtttcgaaatgagattgtatgaaatcagactaggattacctgacaacaaagatgctgatgtcgagtggcagatgagaagattcataagaacagctaatagaaagaattacttgtaa

SEQ ID NO: 6245 - DNA, 831 bp, Candida albicans
atggccgcccctacagctataaggaaatccactgaaaagagtggtataaacgagcaaatacaagaaaactctactttacaatccaaccaagcattagatcaaaacaatgatgacgaggacatgttaatcgatacaaatgccattccaactacaacagttgaagaccaagaccaatctgaaccttcaaattctttaactatacaacaaggagaaaccactgagcttcaactagatgaatccggaaaaccaaagttctctgctgcatccaaatccaacatgaaggtcaaattagaaagcagaaaagtggctgtaccacctcatagaatgacaccgttaaagaatgtatggagtaaaatatatccacctttggttgaacatttgaaactacaagttagaatgaacttgaaaactaaaacagtcgagttaagaacaaataaatacactactgatgtgggcgccttacaaaaaggtgctgattttgtcaaggcttttacattgggattcgatgttgatgacgccattgcattattgagattggatgacttgtatattgaaacatttgaaatcaaggatgtcaagactttaactggagatcatttgtctcgtgcgattggtagaattgctggtaaagacggtaaaactaaatttgccatagagaatgctaccagaacaagaatagtgttggctgattccaaaattcatatattaggtgggttcacacatataagaatggcacgtgaggccgttgtgtcgttgattttgggttctccaccagggaaagtttatggtaacttgcgtacagttgccagtagaatgaaagaaagatattaa

SEQ ID NO: 6246 - DNA, 879 bp, Candida albicans
atgtcagctatctataaggcattacaatccaaatcatctaaggaaacatcggaaaaaaccaaacatattaatagacaaagattattggtgatatcatctcgtggtattacttataggcatcgtcatttaattcaagatttattagcattattaccacacgctagaaaagaaccaaaatttgattctaaaaaaaatttacatcaattaaatgaagttgctgaattatacaattgtaataatattttcttttttgaatgtagaaaacatcaagatttatatttatggatttcaaaaccaccaaatggaccaactttaaaatttcatattcaaaatttacatactttagatgaattgaatttcactgggaattgtttaaaaggttcaagaccaattttaagttttgataaaagttttttagaaaatgatcattataaattattaaaagaaatgtttcttcaaacttttggagttccaccaaatgctagaaaatcaaaaccatttattgatcatgtcatgactttttctatagttgatgggaaaatttggattcgaaactatcaaatcaatgaaactttggatgttaaagaaaatgataaaattgaagatgatgaagattatgatgttgatcaattgaatttagtggaaattggtccaagattagtattgactttaatcaccgttttagaaggatcattttctggtccaaaaatatatgaaaataaacaatacgtttcaccaaactttgttagagctcaattgaaacaacaagctgctgatcaagcaaaatctagatctcaagctgctttagaaagaaagattaaaaagagaaaccaagttttgaaagctgatccattatccaatgatgctttatttaaatag

SEQ ID NO: 6247 - DNA, 840 bp, Candida albicans
atgtcattacaacaagatacagaactagaaaagcatctactctcaagatgctatgactcacaatcaaaaatagttgagttgcttcaagataggtattcagtaactggttcacaaaagtctacaatactatttaaaaacattgttactgataccaaaaaaccaaagtcattactacaccaagaaaacacccaaccaaccaaaataacccaagaaaggaagaaaaccacaagacaggtattgagagaatatatatctggcactctcaataatcagcgcaaattaatcaagaagatacagtcacataatcggaaaaacacgactggtcaccaacctttcccaattcaccaatacttgcaaaaatacaagattcccaattttgatgactttttccaaatgaataagctttggcaaaaatacgctcaagatttgatatttcaaaatggtaacctgatgcaatcattatcaagtatattaccgcgattaacggctgctgattttaatggttgtctattaactgttctacagtcccgaaacactaatgttataggcaccagaggaattgttgtttgggatgcacaacattcatttatattagttgttccacgaaacgaagatagtaaagaatggaatgaagaaaaatcacgattcagtcctagtgaaatggtaggtggattgaaagttattcccaaaaagcatacaatgtttgggtttgatatcattgacccacgtaacgaaaatgactgttacgggtttactatagtgggatcaagatttgagattagatcagttgaaagatcaggcaagaaatttaaaaatcattcagttgatgatattctataa

SEQ ID NO: 6248 - DNA, 1563 bp, Candida albicans
atgtcaaattatactcaaatggaccccgctaaccagcctggtggtgctcaagtggcaacagtattatgttgtaattgtggtgttccaatggatggatccctgggattagtaatgtgttatgactgtattaaattaaatgttgatataacagaaggtatccctagagaggcaaatgtgtcattctgtagaaattgtgaaagatttttacaaccacctggacaatggataagagcagaattagaatcccgtgagttgctagccttgtgtcttagacgtttgaaaggtttaaacaaagtgaggttagttgacgccagtttcatctggaccgaacctcattccagaagaatcagaattaagatcactgttcaaggtgaagccatggcaaataccattgttcaacaaacattcgaagtcgaatacgttgtgattgccatgcaatgtccagattgtgccaaatcttataccaccaacacctggagagctaccgttcaaataagacaaaaagtcccacataagagaacctttttgtatttggaacaattgattttgaagcataatgcccacgttgatactgtttcaattcaagaaaccaaagatgggttagatttcttttatgcacaaaaaaaccatgccgctaagatggttgactttttgcaagctgtcgctcctatcaaagttaagaaatctgaagaattggtgagtatggatatacattcgggatcttcaagttataaattctcctattcggtagaaattgctccaatttgtcgtgacgatttggttgttttgcctaaaaaattggcccactccatgggtaacatttcacgtttggttttatgtaacaagatcaccaatgctattcagtttatggatcctaatactttgcagacagccgatttatcagctccagtgttttggagatctcctttcccatcgttattggatgctacacaaatggtcgagtttattgtattagatattgaaccaacaggtgacattagaggtaaatatgtgttggcagatattgaagtgagccgtgctagtgatttggggtctaatgatcaaactttctatgtccgaactcatctcggtggtattttacatccaggtgattcttgtttgggttactatttgacaaatacaaatataaattctgaattgtgggatactttggatactgataatactcctgaagttgtgatagtgaagaaacattatgcaagaaaatctaagaaatctaagaacagaaaatggaagttgaagagaatggcaagagaacacaacgatatcgttgccaatgatgatagtagacaagcaagacaagaacaagagagagccgaaagagattacgagttgttcttgcaagaattagaagaagatgatgaattaagacaaacaattaacttgtataaggcaggtgaaaatcaaccacaagtgtccagaaaccatgacgacatgaatgacgaagatgaggatgatgacgaagatgctcctgagattggtattgatgagttattggatgaattggatgatatgacgttggatgatactccaatgaattag

SEQ ID NO: 6249 - DNA, 903 bp, Candida albicans
atgtataatccatatggtaatgccgctgatgcctatcaacaacaacagcaacagcagtaccaacaacagcaacaacagcctcattctacaaatttacaacatccacagccaattcatcatgtttcctcacatcaaccaccaccaggtgctgctgggggacaattcaattttttgaatgatccagctgctgctttggcatcacaatttgcacgttcgggatttgaacaatcaaatcaatatcttcaagaaaattttggcagtttacaaggtgatattaagtattatttccaagttagcaattcctatgtatttaagaaaatcattttgattttgatgccttataatcataaagattggaatagagtgtccactaaagagacagggacaaatcaattcttgcctcctaacttagacatcaatgcacccgatttatacttgccattaatgtcgtttgtcacatatatattattatgggctgctttccaaggtataaatggagatttccatcctcaattgtttggatatttggcgtcacaaactattgcattttccgtattagatgttgttatctttaaaactgggttgtacttattaaattgcccacaatcaaaaatctatgatataataagtttttctggatacaaatatgtttcaatcattgtattgttgattttaaaataccttgtggggaactatttaggatcattctactatattgatgttttattattgattgccaacttgtccattttcttaatgagatctttacgatttcttatattgccccaaagcacgtcgatgaataacaccattacttccaagcaaagaaaaatcagaatccaattcttatttgtttactctgttattattcaaggattgatcatactttatatgagtaaataa

SEQ ID NO: 6250 - DNA, 657 bp, Candida albicans
  misc_feature (141)..(142): n=g, a, t or c
atgtcaaagaaaacaacaggagacgatatatggaaaaacaatgttgaaaaaattgtatgtatatatacacatttttttgagtacgaagtcaaaggtttttaccatgttattcaaatcactaacactcatatagaattctgnnaattattcacattgacctatggatcggtggtggcacagctatgccgtgatttccagaacaattacattgaagttaataatcaattagataagatgggatataacataggattaagattgattgaagaatttctcgcaaagacaggtattagacgatgtcaaacatttaaagaaacagcagaagttatatctaaattgggatttagaatcttcttgaatatacaaccgatagtggaaaattggtcaaacgacggcaaatcgtgttctttaattatacctgaacctaatccattaaccgagtttgttgaattacctattactgctgatagtaagatagccaaagaattatggtactcgcaaatattatgtggagtgttacgaggggccttacaaatggtacagttagattgtgatgttagctttgtcaaagatgtattgaggggagatgatagaactgaaattagattgaaattgaatagaatattaaaagacgaagtgcctgctggtgaggattaa

SEQ ID NO: 6251 - DNA, 738 bp, Candida albicans
atggctactagaactcaatttgaaaactctaacgaagttggtgtcttttccaatttaaccaactcatactgtttagttgccgttggtggatcagaaaacttttattctgcctttgaagctgaattaggtgatgttattccaatcgtgcatacaaccattgctggtactcgtattgttggtcgaatgacttctggtaatagaagaggtttattagtcccaacccaaactactgatcaagaattaatgcatttaagagactccttacctgactcaatcaaaatacaaagagtggaagaaagattatcggcattgggtaacgttatatgttgtaatgattatgttgccttggttcatcctgatattgaaagagaaactgaagaattaattgctgatgtattgggtgtggaagtgttccgtcaaactattgctggtaatgtattagttggttcatattgttcattgagtaatcaaggtggtttggtccatcctcaaacttctatacaagatcaagaagaattgtcatctttattacaagttccattagttgctggtaccgtgaatagaggttcctcagtggttggtgctggtatggttgttaatgattggctcagtgttgctggtttggatactactgctccagaattgtcagttattgaatctattttcagattacaagatgctcaaccagatgctattggtggcaatttaagagacactttgattgaaacttattcttaa

SEQ ID NO: 6252 - DNA, 756 bp, Candida albicans
atggcttattatcaacaacaaatgggtaatccccaaaacatgcagttttaccaatcaaattattcctatcaacaaccaactaacgcgcaaggaacctctggtatgatgggttcaatggattccaattttggttctaatatagatgtgagtggagtaatgggtaatggggaattgactccgggcttattagcagcattcggtacatcaggttaccctggagaaccaccattactagaagaattgggcatcaattttcagcacatcagaagtaaaacattagttgtgttaaatccattgactaaagatattccaagtgatataatggcagatctggatcttgctggacctatattgtttgtattgttatttggtacattgttgctattagcagggaaagttcagtttggttacatttatggggttggattgtttggaataataggtttacattatttattcaaatttatgagcaatgaaacaactattgatttgatccgatcggcgtctgtacttgggtattgcttattgccattagtcttgattagtgtattgggagttgtcaccagtttggataacttggttggatacattttgagtgctatagctgtgatgtggtgcacatattctgccagtggatttttcgtgagcgttttgaaattgcacaatgtcaggccattaattgcatatcctttgtgcatgttctacactgtttttgctttaatggccatatttgtagaaaatgtagaggaaaagtaa

SEQ ID NO: 6253 - DNA, 591 bp, Candida albicans
atgaatagaggcagaggtggattcagaggtggacgcggaggtagatccggtcccgttcaatacggtcccccagatacagtgttagagatgggttcattcatgcaagcttgcgaaggtgacattgtttgtcgttctataaatgttaaaattccatacttcaatgccccaatatatttggaaaacaagacacaagtagggaaagtggacgaaatcttgggtccattaaacgaagtgttttttacaattaagccatcagaaggtgttaaagcagaatctttcaaagaaggagacaagttctatattggtcctgataaattattaccattagaaagatttttgccaaaaccaccaagcgtgggtccaaaacctaagagaaaaactggtggaaagtctgctggtggaagcagccgtggtgggttttcctctagaggtggtggccgtggtggattctcatcaagaggcggtggtcgtggtggattctcatcaagaggcggtggtcgtggcggtttctcatcaagaggtggtggtcgtggaggtgcccgtggaaacagtagaggtggatttagaggaggaagaggaggaagattttag

SEQ ID NO: 6254 - DNA, 750 bp, Candida albicans
atgtcagaatcattcaatacttatgaatcggaatttcaatttgcgatacaagaagcgcaaactaagatatctcaaattaattcggttgatgcagatatatatatatatatgataaatactaacaaagatgtttcaactcccatggtcgtttttggtgaatgggatgggtttgaaaactttcttgtattagagcaacgtaagaattatttaaaatcaattgaaggagccaatgaggaagcaagagaagtacttgatcaaatgacaattgaagtgtcgaatttaccttcgaatcaaagatcatcatataatgctaaaattcgaaactatcgaacagaattagatactgtgacagtgacatataataaacttttggatgctcaagataaagttgaattatttggtagtaatagatataccgatgatagtggcgattcatcagaacaacgtaaacaattattgagtaataattcatcgttagaaagatcatcacaacgattacatgatagtcaaagaattgctatggaaacagaaaatattggtagtaatattttgaatgatttacgatcacaaagagaacaaattaatggtgctagaaatacattactgcaagcagataattatgttgatcgttcagtacaaaccttgaaaactatgggtcgtagattgacggctaataagtttataagttatggaataattgcggtattgatattattaatatttttagttcttttcagtaaattttcttag

SEQ ID NO: 6255 - DNA, 1608 bp, Candida albicans
atgaatatatcaatactattggtgtcattatttctatcactcgcgtgtgcagatgaaattaaaccaagtggagaatttcacgagcaccttcatttgaaacctttgtccaggaacaggctattaacaaattttgaatttgatgttgaatcatcaccatttcaaattgattattacaactcctcctctcctgttgaagcctccagaagaagtcattacaactactttccaaactctttaggtttgataatagagtctacgaatactaaagagttgcaattgagattcacacaaggatggtgggatgctagttcatggggccagttaccttttaatggtaaatacagtggaggtacaggagtagaagtgtctgctgtcattgaagcacctaatgtcgaagttgccaaacgtaactggctaaaattaacgaaaactttatctgggttcttctgtgcatccttgaactttattgacgatcacatcacgacatatccaaagcatgcagtcaaagaaatcaaccttgctgaatatgcaccagaaaagggtaataaattgtatttgttacgtgctgcattacccagtgaaccagtttgtacagaaaatttgaccccattcttgaaattattaccaacaagaggaaagtccgggattagctctttattagatggacataaagtgtttgactcattgtggcatggaatgtccattgatgtcaccaccaattgtgatactaataatcaatgtactttaaagttgcatcaaactgttaatcaaattgttgatatcataaggtcacttcgtaaacggaaggaaggagcaattcccaaacccacaccaggcgaccaattaagatgtgatacagagaaaacttacaactcttggcaatgctttccgttaagtgatccagtgaatcttgaatggaatttagaaacaatttatggaagaggtatcaatggaccagcattagctgatgatccacaagtgtcgaaagtaactatagatatcgacccatcatcttggaatattatgttgttaagagaaaaggaaaattccattgaaggaagttcattaaccaatcaagaagaaacaaatcagatagtccaatatttgcatgaaaatgtcaaatttgattttcaattcattgctcaaaatagttctatcgttttaccaattgataccccaccgttatatgcatctcgttctttaactggctactcattggataaaggggggttgcgtaccgtgtttaccaataacaacgacgagccagttaaatttgtgtattttgaatcgactccttggttcatgagattgtatttacacacattgagattgacattgaaaaactcaactgggttatttgatatttttgaccatgaacaatatatcaaggacgtttatttccgccctgctgttgacagagagaggccatctcacatggagttgattatggaagtacccgctaaactgacattagctatatcgtatgactttgacaaatcattattgttgtatcgtgagtaccctccagatgcaaatcatgggtttgacgtcgagcctgcagtaatatctgtttttgataaggacagtgaaaaagtatatgagttctga

SEQ ID NO: 6256 - DNA, 981 bp, Candida albicans
atggctaaagcaccaaagaagaaattttcaactgcatctaaccctactgctaataaagttgcagctgaaaaacatttgaattcagtatttaaattcaacactaatttaggtcaacatattttgaaaaacccattagtggcccaaggaattgttgataaagctcaaattaaacctagtgatatagtattggaagtaggtcctggtactggtaatttgacggttcgtattctagaaaaagctcggaaagttattgctgtggaaatggatccaagaatggcagcggaattaactaaaagagttcatggaacacctcaagaaaagaaattggaaattctattaggagatttcatgaaaactgatttaccgtattttgatatttgtatatccaatactccttatcaaatatcatcaccacttgtattcaaattattaaatcaacctagaccaccaagagtatcgattttaatgtttcaaagagaatttgctcaaagattagtggccaggcccggtgaagaattatattgtcgattatcagcaaatgttcaaatgtgggcaaatgttactcatataatgaaagtagggaaaaacaatttccgaccaccaccacaagttgaatctagtgtggttagaatagaaattaaaaatcctagacctaatattgattttaatgaatgggatggattattaagaattgtttttgtaaggaaaaataaaactatagcggccgggttcaaatcttctaatgtgattgaaattttggaaaaaaattataaaacttttttggcaactcaagaaagtaataataatgattctatgatggtagatgataaatcaatttctttgaaagatgttgttaaaaataaaattactactgttttgactgaaactgggttttccgataaaagagccggtaaattggatcaaactgatttcttaaaattgttatacgcatttcatcaagtaggtattcattttgcataa

SEQ ID NO: 6257 - DNA, 867 bp, Candida albicans
atgtcttcatactctactcgtcaagttggtgctgccaacactttagactacaaagtctacattgaaaaagatggtaaactagtttctccattccacgatattccattatacgccaatgaagaaaaaaccattttgaacatgattgttgaagttccaagatggaccaatgctaaattggaaatttccaaagaacaaaaattgaacccaattattcaagacaccaaaaagggtaaattgaggtttgtcagaaactgtttcccacaccacggttacattcacaactacggtgccttcccacaaacttgggaagatccaaaccaatcccatccagaaaccaaagctaaaggtgacaatgatccattagatgtttgtgagattggtgaaaaagttgctactgttggtgaagttaaacaagtcaaggttttgggtgtcatggcccttttggatgaaggtgaaaccgattggaaagtcattgtcattgacgttaacgatccattggctccaaaattgaacgacattgaagatgttgaaactcatttgccaggtttgttgagagctaccaacgaatggttcagaatttacaaaatcccagatggaaaaccagaaaatcaatttgctttctccggtgaatgtaaaaacaagaaatacgccgaagaagttattggtgaatgtgctgaagcttgggaaaaattaatcaaaggtgaatcagttgattctaaaggaattgatttgactaacaccaccttgtcttctaccccatcttactctgatgctgctgctcaagaaattccaagtgcttctccagctccagctgctccaattgacaaatctattgacaaatggttcttcatttctggtgctcattaa

SEQ ID NO: 6258 - DNA, 1077 bp, Candida albicans
atgccatctactcataatcgtgataaaccatgggataccccagatatagataaatgggctcttgaagagttcaaacccgaacataatgcttcaggtctacattttgctgaagaatcatcatttatgactttattccctaaatatcgtgaacaatatttaagaagtatatggagtgatgtgactaaggcattagataaacattttattaaatgtgaattagatttagttgaaggatcaatgactgttaaaaccactacgaaaacgtttgatccagctatgattattaaagctagagatttaattaaattattagctagatcagttccattccctcaagcggtgaagatattacaagatgatattgcttgtgatgttattaaaattggtaatttcgttgctaataaagatagatttatcaagagaagacaaagattagttggtcctaatggtaacactttaaaggcattagaattgttaactaaatgttatatattggttcaaggtaatactgttagtgccatgggtccatttaaaggattaaaagaggtaagaagagttgttgaagattgtatgaaaaatattcatccgatttattatattaaagaattaatgattaaacaagaattgagtaaaaatccagcattagctaatgaagattggtcaagatttttaccaagtttcaaaaagagaaatgttgctagaaagaaaaagactagtaaaaaactggttgaaaagaaagtatacacaccattcccacctgctcaacaacctagaaagattgatttacaaattgaaagtggtgaatatttcttaggtaaaaaggaaaaagaattgaaaaaattacaagaaaaacgttcaaaacaagaagaagtgagtgaaactaaacgacaagaaagagctaaagattttgaagctccagaagaagaagtttatgaaaataaactcttgaaaaaggaaaagaaagagaagaaggaaaagaaggacaagaaagagaagaaagacaaaaaggataagaagaagaagagatcacacgatgatgaagaccattcacctgagcctaagaaatctaagcattaa

SEQ ID NO: 6259 - DNA, 402 bp, Candida albicans
atgaaggtggaaatagttgaatggaagagttattgcacgtggcactgggaccttgcatcatcagatggatacgtagatgagttgtgtggtatatgtcgtgtttcgtatgatggaacgtgtccaaattgtaaatatcccggagatcagtgtcctattgtgttggggtcaggttgtacacacaatttccacttgcattgcatactaaaatggttagaacaagaaacatcaaaaggtctttgtccaatgtgcagacagatatttacattcaaagaacaaaagaagcaaacaccagaagaggtggcaaaactaaagaaattgattgatggtcataaagttatgagagaacggccagagcaggcagatcaagagtttgaggagtatgttcctgaaacgattggatag

SEQ ID NO: 6260 - DNA, 1308 bp, Candida albicans
atgtctggacaacaattattagaagaagctagaaaagctgtaactaataaacaatatgatgaagcagaaattaaatataaacaaataatcaacccatctgaatcttccacttctactactactaccaccaccaccaccaccacaacggcaaaacaattacaacaacaagaaagtgctattttagaattgggtaaaatttatgaaactttaaatgaacctactaaattatctgatttaattgctgattctcgatcaattttaggtaattttgctaaatcgaaaactgccaaaattgttaaaacattaattgaagattttgataaattatcagcaaaagatgaaaaatctttagatattcaaattgatgttactaaatctagtatgcaatgggctattgaatcgaaattatcatttttaagacaatcattacaattgaaattgagtgatttattatatcaaaagaaacatcatcatgaagccattaaaattattaatgaattattaagagaatataaaaaattggatgataaatcatcattagttgaagttcaattattagaactgaaaatttatcatgcattaagaaatattcctaaagctaaagcagcattaactagtgccagaacttcagctaattcaatttattgtccgacaattttacaagcagaattagattgtcaaagtggtatattaaattctgaagataaagattataaaactgctttttcatatttttatgaaagttttgaagggtttaatagtcaagatgatccaagatcaataattgttttaaaatatatgttattaacgaaaatcatgttgaatttaattgatgatgttaataatattttaaataataaaaatgttattaaatataaatctaaagacattgatgctatgaaatcaattgctatggcttattcaaatagatcacttaaagaatttgaaaattctttattgacttatgctaatgaattaaaatttgatgcaattataaaaaatcattttaatgcattatatgataatttattagaacaaaatttattgaaaattattgaaagttatagttgtgtggaattatctcatatttctaaagttattggattaaatttacaacaagtcgaaggtaaattatcacaaatgattttggataaagtgttttatggggttttggatcaaggtaatggatggttaattatttatgatgaaccaagaaaagacgctgcttatgaagcttctttagaattggtgaaaaatttatctaatgttgttgatttattatatgaaaaggcatcttcattaaattaa

SEQ ID NO: 6261 - DNA, 1635 bp, Candida albicans
atggcatcagttgcaagaccagcagtagcaccttccaatgctacttttaaagataaagaaaaaccacaagaagttcgtaaagccaacattcttgctgctagagctgtatcagatgcaattcgtacatccttgggacctaaagggatggacaaaatgatcagaaccaaaaatggagaaatcattatatcaaacgatggagcaaccattttgaagcatatggcggttttacatcctgccgctagaatgttagtcgatgtaagtcatgcccaagatgttgaagccggagatggtaccaccaccgttgccatcttgacaggtgcatttttgggtgcagcagaacgattattaagtaaaggaatccatccaactttaattgctgaatctttccaaagagcagctcaacgttcagttgaaattttgttagatatgtcatataaaataagtttggataaccgtgaacaattgatccgtgctgccactacttcattaagttcaaaaattgtctcacaacactcacaattattggctcctttagctgttgattctgtattaaaagttataaatgaagaagaaattagtagtggccctgatgaaactattatgaagaaaaatgtcgatttaaatgatattagattgattaaaaaagtcggcggtaccatcgatgatactcatttagttaatgggattgtattgactcaaaatgtcgttaaacacgctggaggacctgtacgtgtggaaaaagccaaaattgggttgatccaatttcaaatatctcctcctaaaccagatatggaaaataatgttgtggttaatgattatcgacaaatggataaaattttaaaagaagagagagcttatttattgaatatttgtaaaaaaattaaaaaggccaaatgtaatgtgttgttgatccaaaaatccatccttagagatgctgtcaatgatttagcattacatttcttgtcaaaattaaacattatggttattaaagatattgaaagagacgaagtagaatttttgtcaaaagccattggatgtaaaccaattgctgacattgataactttactgaagatagattaggtactgctgacttaattgaagaacttgatagttcaggttctaaaattgttgaaatcactggtgtgacttccaaaaatattaaaccaacagtttctgtcattataagaggggcaaataacttggttcttgatgaaactgaaagatctttacacgatgccttgtgtgttattagatgtttggtcaaacaacaggctttaattgctggtggtggtgctccagaaatcgaagtttctagacaattgatgaaagaagccaataaattatccggggtggaacaatttgtttataaagaatttgctcaagctctagaagttatcccaacaacacttgctgaaaatgctgggttgaatccaataaatgttgttacagatttgagaaatagacacgaaaatggcgaaaaagatgctggtatttctgttagaagatctggcgcttcaaacacttatgatgaacatgtattgcaaccagtattggtaagtacaagtgccatcgtattggcatctgaatgtgtcaaatcgatattgagaatcgatgatatccaatttagtcgttaa

SEQ ID NO: 6262 - DNA, 1016 bp, Candida albicans
atgcctcatcatattatgtcaattaatgattctaatcatgttcaaatcggtggtagaaaatcaaaattagcagttgttcaatcagaaattgtcaagaaggttattgaagacactttccccaacttgtcatgttcaatattagcattatcaaccttgggtgataaagtacaaacccaaccattatatacttttggtggtaaatcattgtggacaaaagaattggaaattttattactagatagtgttgatgaatttcctaaattagatcttattgttcattcattaaaagacatgccaactaatttacctgaagaatttgaattgggatgtattttccaaagagaagaccctagagatgctattgtcatgaaacaaggatcatcatataaactgttgaaagatttgccagcaggtgctattgttggtacttcatcaattagaagatcatcacaattaattaaaaactatcctcatttaagatttgagctggttagaggtaatattcaaaccagattaaacaaattggaccaaccaaataatgaatattgttgtcttatattagccagtgctggtttaatcagattaggtttgggtcatagaataacatcttatttggatgatatgtattatgctgttggtcaaggtgctttgggtatagaaataaggaaaggtgatgataatatcaaatcaatattaaagaaaattgaagatcctattgctactatttgttgtcttgctgaaagatcattaatgagataccttgaaggaggttgttcggttccattaggggttcatagtgattacaatgaaagcaaacaagaattgacattaaaggggataatagttagtcctgatggaactgtttctattgaagacgaagtaattaaaagaattacgtgtgatgaagattgtgaacaagttggaattgaattaggtgataaattaaaagcaaaaggtgccaaagaaatattggataagattgatatgacaagaaacattaatgccagacctactga

SEQ ID NO: 6263 - DNA, 480 bp, Candida albicans
atgggtagtaaaaaagaaagtaaatccaaatcatctagtgatgatgtttcaaccgaagataactatgaaaaaagaatgtcagcagttttaccgttcgctaaaccattagcatctaagaaattgaacaagaaaattttgaaaacagttaaaaaggcttccaaagccaaacatgttaaacgtggagttaaagaagttgtgaaatcattaagaaaaggtgaaaaaggtttagtaattattgctggtgatatttctccagcagatgttatatcacatatcccagttttgtgtgaggacaattcagtggcatacattttcattccttcaaaagaagatttgggttctgctggtgctactaaaagaccaacttcttgtgtgatgattgtccccggtggaggtaagtctaaaaagaacgcagataaaactgacgagtatagagatggttttgatgacattgttaaagaaatcaatgcttctgaataa

SEQ ID NO: 6264 - DNA, 639 bp, Candida albicans
atgtcagccgaagatactaaaccaaagactgaagaatcaacttctattccaaaaccaccaacttctaatgtattctccatgtttggtgccaaaaaagagaaaaaaccagaacaagaagattcagacaacaagaaagaatccgataaaaaggaagaaaaagatactagcaaatcaaccggcgatgacaatgaagtagctgaagaagaagaagctgatgtcgaatttactccagttgttcaattggataaaaaagttgacgttaaaaccaatgaagaagatgaggaagtcttgtataaagttagagccaaattatttagattccatggtgattcaaaagaatggaaagaaagaggtactggtgatgttaaatttttaaaacataaaactactggtaaagtcagaattttaatgagaagagataaaactttgaaaatttgtgctaatcatttgatttctgctgattatgaattgaaaccaaatattggttctgatagatcttgggtttatactgttactgctgatgtttctgaaggtgaacctgaagctcaaactttagctattagatttggtaataaagaaaatgctgatcttttcaaagaacactttgataatgctaaaaaggaagctaaaaaagattaa

SEQ ID NO: 6265 - DNA, 711 bp, Candida albicans
atgtttggagatacagctaataaactaatattggatgctaaacgatcaagcaacttatctgctattcctatttatcaatcagatttagtgaaaagcattgtaagagaaaccaatgatttgaataaagatgctgaatatttggttgaagaacaagaacaattacaagaaacccaggatcaagaaaatagtaaaataaatcaatgtcaattatttgtcactcatttatctatgagaagaaataaacgatgtttattagcatatgaaaagtcaagagcagataagataactgaattttgttggctaaatattgatcctattgaaacttcaacctcatcgtcaacaacatcaactaatacaaattcaaatgtcaatcaaagtagtagtaacaatgctgtgaatccattgacaaaaaatcttagtaattatacaactagtttggacatgaataacttgaatcatcatgaacaagattttttcaaacaatatcaagatttaataatggaattcaagtcaagttttgaagatattgatttgagtggtgatttaaacccaccaacaaacattttcattgatgttagagtattgaaagatggaggtgaggtcaccactgaatatggttcttttaacttgatcaaagattctcaattctttgtcagaaaatctgatgtggaaagattaatacaacaaggatatttagaagagataatataa

SEQ ID NO: 6266 - DNA, 1389 bp, Candida albicans
atgttagacattaatgcatttctcgttgaaaagggaggtgacccagaaattattaaagcatcccaaaagaaaagaggtgactccgtcgaattagttgatgaaatcatcgccgaatataaagaatgggttaaattaagattcgatttagatgaacacaacaagaaattgaattcagtacaaaaagaaattggtaaaagattcaaagctaaagaagatgctaaagatttaattgctgaaaaggaaaaattgagtaatgaaaaaaaggaaattattgaaaaagaagctgaagcagataagaatttacgtagtaaaatcaatcaagttggtaacatcgttcatgaatcagttgttgattctcaagatgaagaaaacaatgaattggttagaacctggactccagaaaattacaaaaaaccagaacaaattgctgcagctactggtgcaccagccaaattatctcatcatgaagtattgttaagattagatggttacgatccagaaagaggggttagaattgttggtcatcgtggttatttcttaagaaactatggggtatttttgaaccaagctttgatcaactacggtttactgtttttgagtagcaaaggatacgttccattgcaagcaccagttatgatgaataaagaagtcatggctaaaaccgcacaattgtctcaatttgacgaagaattgtataaagtcattgatggtgaagatgaaaaatatttaattgccacttcagaacaaccaattagtgcttaccatgccggtgaatggtttgaatcaccagcagaacaattgccagttcgttatgctggttattcatcatgtttcagaagagaagctggatcacacggtaaagatgcttggggtattttccgtgtccatgcttttgaaaagattgaacaatttgttttgactgaaccagaaaaatcatgggaagaatttgatagaatgattggatgttcagaagaattttatcaatcattaggattgccatacagagttgttggtattgtttcaggtgaattgaacaatgctgctgctaagaaatacgatttggaagcttggttcccattccaacaagaatacaaagaattggtttcatgttcaaactgtactgattatcaatcaagaaatttggaaatcagatgtggtataaaacaacaaaaccaacaagaaaagaaatacgtccattgtttgaactcaactttaagtgctactgaaagaactatctgttgtattttagaaaactaccaaaaggaagatgggttggttattcctgaagtattgagaaaatacattcctggtgaaccagaatttattccatacattaaggaattgccaaaaaacaccacttctgttaaaaaagctaaaggtaagaattag

SEQ ID NO: 6267 - DNA, 1785 bp, Candida albicans
atgtctgaagaagttgataaagttgccgaacaagttcaaaaaacctatttggacgatgtcaccggtgaacaagtttccaaaaccgaattaaaaaaaagacaaaaacaaagagcaattgaagctaagaaagctgctaaagctgctgccactccagccaaaactaccactaaaaagaaagatgaattggctgatttgaatccaaatcaatttttcgaaatcagatctcgtcaaatttctgaattaagagagaaaaacaatgctgatccatcagctttcaacccataccctcacaaattcaatgttaccaccaaaattccagaatttgttgaaaaatacgcccatttgcaaagaggggaaactttgaaagatgtcactgtttccgttagtggtagaataatgaccaaaagagaatcaggatccaaattgaaattctacgttttaaaaggtgatggtgttgaagttcaaattatggcccaagctcaagatgctccaagtgttgaagctttcgaatcaatgcacgaaattttgagaagaggtgacattatcggtgttactggttatccaggtaaaactgctccagccaaaggtggtgaaggtgaattgtccgttttcgctaccaaagtccaattattgactccatgtttgcacatgttgccaactgaacattatgggttcaaagatcaagaagctagatacagaaaacgttacttggatttgattatgaacgattccagtagagaacgtttcagagttagatccaaaatcattcagtacatcagaaaattcttggacaacagagatttcgttgaagttgaaacaccaattttgaatgttattgccggtggggccactgccaaaccattcactactcaccataatgacttgaatatggaaatgttcatgagaattgctcctgaattgtttttgaaagaattggttgttggtggtatggacagagtttacgaaattggtcgtcaatttagaaacgaaggtatcgatatgacccataaccctgaattcaccacttgtgagttctatcaagcttatgctgatgtttacgacttaatggacatgaccgaattgatgttttccgaaatggttaaagaaatcactggtgattacgttatcaaataccacccagaaggtccatcaggtaaagaaatgactttggatttctccagaccatggaagagagtcaacatgattgaagaattggaaaaagtatacaatgttaaattcccagctggtgatcaattgcacactgctgaaactggggaattcttgaaaaaagtcttgaaagacaacaacttagaatgttctccaccattgaccaacgctagaatgttggataaattagttggtgaattagaagatgcatctatcaacccaacctttattttcggtcatccacaaatgatgtcgccattagccaagaaagatagaaacattcctggtttgtgtgaaagattcgaagtttttgtcgccactaaagaaatctgtaatgcttacacagaattgaatgatccatttgatcaaagagctagatttgaagaacaagccagacaaaaagcccaaggtgatgatgaagctcaaatggttgatgaaactttctgtaacgctttagaatatggtttaccaccaactgccggttggggttgtggtattgatagattggcaatgtttttgaccgactctaacaccattagagaagtattattgttcccaactttgaaaccagatgctttggtcttgaaaggtgaagaaccattaaaagatgaaaactaa

SEQ ID NO: 6268 - DNA, 336 bp, Candida albicans
atgcttacattctgcccgaactgctcaaatatgctacttatatccgctggagatgatggtcttaatcgattttattgctctacgtgtccctatgagttcaagataaatggtctacagatgtatgataggaaaaagttgaatagaaaagaagttgatgatgtgcttggtggagaaggtacctgggataatgtcgatcaaactgcagctcagtgtccgatagactcctgtggtggtgataaggcttactttttccagttgcaaattcggtcagccgatgaaccaatgactacgttctacaaatgtgtcaaatgtgggcatagatggaaagaaaattag

SEQ ID NO: 6269 - DNA, 735 bp, Candida albicans
atgtcatccaaatcagcagcagctatcttacaacggcaatttaaagacttgactgatccgaaaaaaggaattccctcatttcacattgagttggacgatgacaacattttcttatggaatgttggtgtaatggtcttaaaccctgaatcattatatcatggaggctatttcaaaggtcaaatgagatttcctcaagactttcccttttcgccaccaagtttccgattcacccctgcattatatcatccaaatgtttatcgtgatggtagattgtgtatttccatattgcaccaagggggagaccctaccagcgacgaaccagaaagcgaaacttggtcgccggcacaaaccgttgaaagtgttttgatttccattatttccttattggatgaccccaacggcaactcaccagcgaacattgacgcttccgttgaatttagaaagaactacaacgtatacaaaaagaaagtattacaagaagttgaacggtcgaaaaaagatattccagaggatttcattatgcctgaaacttctgacaacgcttattcaaactataacaactcgaagaacaaagagggggccgaggaaccggttgacgaagatttttggtatgagagcgaagaagaagaaagctttgatgaagaaagcttaatggatgaaaatatggacgatcagtttgaagatgacgatgaagaagaagaggacgacgaggatgaagatatgggtggaaaataa

SEQ ID NO: 6270 - DNA, 207 bp, Candida albicans
atggctgctgaaggattagaaaaattaactgaagttcctgttgaattcttcaaagatggaagtgcatttgtaaagaaatgtcaaaaaccagatgaaaaagaatacttgaaaattattagagccgttggtattggtttcattatgatgggtgttgtcggctatgccgttaaattagttcatattccaatcagatacttgattgtttag

SEQ ID NO: 6271 - DNA, 828 bp, Candida albicans
atgtcacaaacctcaagttttgtcaagaaactagcatccaatgacaaaccaacaagagattcggcattggaatcattaaagaatttccttggttccaagaaagatctatcattattggatttgaagaaaatttggaaaggattatatttttcaatgtggtattgtgatcgatctaaagcacaagaaagattagctgaaaacttgggtaaattatatagtgaaacagttagtgttctgttgtttcctcaatttgtgttggcatttttcgatattataagtattgaatggccaaatattgatcaatggagagtcgataaatattatttattaattagaagaattttaagacataatttcaaatttttgaaacaaaataattgggatgaagaacttgtggaaaactgggtcaatgtattacatcaaagcgtattaagtggtgaaaaaaatgtcagcatgggattaccttatcatttgtgtgatatatttatagatgaattggaattagtcatgtttgaagatattcaagaagaaatcgatgatttggataatgatgccagtttacaagataaaactaaactacttggtaaaaaaatcgatattgtatcagaagttcctgtattaaaactactcgagccattccaaaaattgaataaactggcacaattgaaaacattgagagaaaaatgtgctgaagaagtcttgaatgatgaaagattgaaagattggggtgttattgaagctgatgatagtgatgatagtgacaacgaaggttcgggtgatgatgatgacgatgacgatgaagatgaagatgaatggaaagggttttaa

SEQ ID NO: 6272 - DNA, 1869 bp, Candida albicans
atgagtacaaaaggaaaaggaaagaccaagaacgggagaggtgatacccatgcaaaaaacgaaagaattgccattgtgtcagccgacagatgtaaaccaaagaaatgtaaacaagaatgtagaaagagttgtcctgttgtgaaaactgggaaattgtgtattgaagttactccagcatccaaaattgcatttatttcagaaactttatgtattggttgtggtatttgtgttaaaaagtgtccatttgatgctataaccattattaatttaccaaccaatttggaaggcgaaactacccatagatactcagctaattccttcaagttgcatagattgccaactccaagaccaggtcaagtgttaggtttagttggtaccaacggtattggtaagtccacagcattaaaaattttggctggtaaacagaagccaaatttaggtagatatgatgatcctccagactgggaagagatcttgagacatttccgaggttctgaattgcaaaactatttcacaaaggtgttagaagacaacatcaaagctattatcaaacctcagtatgttgataacattcctagagctttagccaagtctaaagttaaacaagtcggtgccattttggaatccaaaaacgagaagaatgatgactacaattacattttgaatgttttggaattgaagaacgttttgaaccgtgaagtcgagaatttatctggtggagagttacaaagatttgctttaggtatgacctgtgttcaagatgctaatgtttatatgtttgatgaaccttcctcgtacttggatgtaaagcaaagattaagagctgcagaaatcattagatcattgttaaatcctactacttatatcatttgtgtggagcacgatttatctgttttggattatttgtccgattttgtttgtatcctttatggtgctccatccgtttatggtgtggttacattaccagcatctgtcagagaagggatcaatattttcttggatggtcatatcccaaccgagaacttgcgattcagaactgaatcgttgcaattcagattggccgacgccgcagatgatttgattttggacaaatctaattctttggaatatccaagcttgcaaaaaacccaaggggactttaaattacgtgttgaagctggtgatttcacaaattcagaaattttggttatgatgggtgaaaatggtactggtaagaccactttctgtaagcttttggctggagccattgccccagatggtggccaagaaataccaaaattgaacgtctcaatgaaaccacaaaagattgctccaaaattcactggtacagtaaggcaattattttttaaaaaaattagagcagcctttttgcacccacaattccaaactgatgttgtgaaaccattaaagatcgaagacatcgtcgaccaagaagtgcaaacattgtctggtggtgaattgcaaagagtcgctattgtgttggctttgggtatcccagccgacatttatttgatcgatgaaccatcagcttatttggattccgaacaacgtattatttgttctaaggttatcagaagattcattttgcatgccaagaagaccgcttttattgtcgagcacgatttcattatggccacctatttagccgatagagtcattgtttttgaaggtcaaccatctaaggatgctgttgctagaagcccagagtctttattaacaggatgtaaccgtttcttgaagaatttgaatgtcactttcagaagagatcctaactcctacagaccaagaattaacaagttggactctcaaatggataaagaacaaaaggcttccggtaattacttcttcttggagaatactgaattgtaa

SEQ ID NO: 6273 - DNA, 735 bp, Candida albicans
atgagtgaacccataaataagccagaagacgaagagatggacgttgagtttaatgacgttgatgatcagattgtcccagatgaattaccagaacaagcacagaaacaggacgaccaacaaccccaacaatcccagagccaaacagcggagacaaagatcgacactggtgatagcgcaaaacctcaaaatgatgctacttcatcaactgctcatcctacaggtacagctaacggtaccccaccagcgtcagtaatacccgagttaccagaccttacacgtaaagataaatcgttaaaggaagtgctcgatttgatggatggcgactttgcaccgattattcccgacgcggtaactgactattatttggccaaaaatgggtttgagacatcggatataaagattaaacggttgttggctcttgctacccaaaagttcattagtgatattgcacaggatgcgtacgaatatagcagaattagaagtgcaagtgctgtttacaattcctctaatcctcaggttcgtgcaaaactattactacagggtcaacaatacgcaaatcaacagaccttgactggtaatgctaataataatggagaaggtgatcaacaacaatcactgcaatcacattcgaacgcaggtaaccagcaaggaaagatagtattgacaatggaagatttaagtaatgctttatctgagtatggtatgaacacttcaagaccagatttttacaggtaa

SEQ ID NO: 6274 - DNA, 2166 bp, Candida albicans
atgtctgaccaacagaatactcaggaccaattgtctggtgctatggccaatgcatctttgaatggagatcaatccaagcaacagcaacagcaacaacaacagcaacaacaaaactactacaatccaaatgccgctcaatcttttgttccacaaggtggctaccaacagttccaacagttccagcctcaacagcagcaacagcaatatggtggatataatcaatacaaccaataccaaggaggttatcaacaaaactataacaatagagggggataccaacaaggttataacaacagaggtggataccagcaaaactacaataaccgtggtggctatcaaggatataaccaaaaccaacaatatggaggatatcagcaatacaattcgcaacctcaacaacaacagcaacaacaatctcaaggtatgtcgttggcagatttccaaaaacaaaaaactgaacaacaagcttctttgaataaaccagctgttaagaaaacccttaaattggcaggatcttcaggtataaaattagcaaatgctacaaagaaagtggataccactagcaaaccacaatctaaagaatcatctccagctccagctccagctccagctgctttcgcttctcaagaagaaaagaaggaagaaaaagaagctgctgctgctactcctgaaaccaaaaaggaaacttccgcaccagcagaaaccaaaaaagaagctactccaactcctgctgctaaaaaggaatcaaccccaactcctgctactgctactaagaaagagtcaactccagtttcaaactctgcttctgtggcaactgcagatgctcttgttaaagaacaagaagatgaaattgacgaagaagttgtcaaggatatgtttggtggtaaagatcatgtgtctattatattcatgggtcacgttgatgctggtaaatctaccatgggcggtaacattttatacttgacaggatctgttgataaacgtactgttgaaaaatacgaaagagaagccaaagatgctggtagacaaggttggtatttgtcttgggttatggacaccaacaaagaagaaagaaacgatggtaaaaccattgaagttggtaaagcctattttgaaaccgataaaagaagatatactattttagatgctccaggacacaaaatgtacgtttcagaaatgattggtggtgcatctcaagctgatgttggtattttggttatttctgcaagaaaaggtgaatacgaaactgggttcgaaaaaggtggtcaaaccagagagcatgcattattggccaaaactcaaggtgtcaacaaaattattgttgtcgtcaacaagatggatgattccactgttggttggtctaaggaaagatatcaagaatgtaccaccaagttgggtgctttcttgaaaggtattggatatgccaaagatgatatcatttacatgccagtatctggttacaccggtgctggtttgaaagacagagtagatccaaaggattgtccatggtatgacggaccttcattattggaatacttggataatatggataccatgaaccgtaaaattaacggtccattcatgatgccagtcagtggtaaaatgaaggatttgggtacaatcgttgaaggtaagattgaatcaggacatgttaagaagggtactaatttgattatgatgcctaacaagactcctattgaagttttaaccattttcaacgaaactgaacaagaatgtgatactgccttcagtggtgaacaagtcagattgaaaattaaaggtattgaagaagaagatttgcagcctggttatgtgttgacttcacctaaaaacccagttaaaactgtcacaagatttgaggcccaaattgctattgtggagttgaaatctattttatccaatgggttctcttgtgttatgcatttgcatactgctattgaagaagttaaatttattgagttgaaacataaattagaaaaaggtaccaatagaaaatctaagaaaccaccagcatttgccaaaaaagggatgaagatcattgctattttagaagtcggtgaacttgtttgtgctgaaacttacaaggactacccacaattgggtaggtttactttgagagatcaaggtacaaccattgccatcggtaagattaccaaattgttgtaa

SEQ ID NO: 6275 - DNA, 1923 bp, Candida albicans
atgtcacttgatgtaagtttacgagataggcaaatttctattttgcaaagaatgcttcatttgaacaaagaaggttctgcagatttgacattggcatccaaatcagaagaaataatttggaaggtcttagtattagatgctaagtctcgatcagtcttgtcttcagtattgagagtcaatgatttgttgaaatgtggtattactgttcattccttgatcaattcgaaaagagcaaatttgcccgatgtccctgtcatttactttgttgaaccaacaattgaaaatattttgtacattattgaagatttgaatcaagaccgatacgatagtttttacattaattttacgtccctgataaatcgtgaattgttggaagagtttgctaaaaaagtttcaatatctggtaaatcccaaaagattaaacaagttttcgatcaatatttggactatatcgtcaccgagccaaacttgttttcattgaacttaccggaaattttcactcagtttaacagctcaaatactgatgaagagaaaattcacaagttggttgatatcattgccaatggattgttatccaccattgtttccatggatattattcctgttatacgagcacaacaaaatggccctgccgaatttgttgcccaacaattggacttgaaattaagagaatatttaagtaacactagaggcagtacagtggccacagcttctatccaacaacgccccgtcttaatcttattggatagaaattttgatttggcatctatgttttctcattcatggatttatcaatgtatggtcagtgatgtattccaattgcaaagaaacacaattaaaattaccaagcacgcagcaaaagatggagaaaaggactcaacgaaaaattatgatgttgatcccaaagatttcttttggaacaagtactctcagctcccattccctgacgcggttgaaagcgctgatgctgaattgaatgcatacaaaaacgatgctaaagaagttactgcgaaaacggggattagttctttggatgatattgaccccaatgcaaatgcaactgctaatattcaacaggcagttgaaaaattaccagaattgacggctagaaaggcaactttggatatgcacatggacatattgtcatcgttaatcaatgaattgcaagcgaaaaacttggacaagtattttgaaatagaacaaaatgcaacggatcctaaagtcttaaaagagtttttggaattattggtggttgattcagaaagagatagttctttggacaaattaagaacatttataattttgactttgttggtggatttgacacctgaatatattgaaaaagttaaatctattttcaaggagaaatacccccaagttgacttatccagttttaactatatcttgaaattcaaagaacactcaaaattggctaatttatcaactttgaacgagaccagcaataatttcaccaatcaagcttcacagatgaattcaagtgccttattgagtgggttatcgtcaaagctctacggtttgacagaaggtaaaatctcagaaggattaacctctattgccacaagaattaaaagttttatacctgaaaagaaactacttccaattacaactatcgttgaagcaattatggatccgattaatgcttctcagcaaagtgttcagttgaccgacgaatacgtatatcttgatcctaaatcaagaggtggtcactcaaaaccaccaaaaagacaatcttatcaagaatcattggtgtttgttgttggtggtggtaattatttggagtatcagaatttacaagaatgggccaatgatcctaataaagcccataggaaggttatatatggtagtactgaaattacatcagcatccgaattcttggaagagtgtagcgtgttaggtagctaa

SEQ ID NO: 6276 - DNA, 726 bp, Candida albicans
atgcttattgttggcttgactggaggtatagcttgtgggaaatccactgtttccaaagaattaaaagatcggtatggggtggctgtcgttgatgctgatttagtcgcaagagaagtcgtttacccaaataagccagcatttaatcagatagtagcagcatttggggatgaagttcccaacttgataaatgaagatggtaatttgaacagagcagctttgggacaagcagtgtttggaaataaagaaaagttagcaatactaaactcaattgtacaccctgctgtcaagtgggagatatttaaacagatcattagggcttatttctctttaaacaaattagttattttggatgtcccattgttatatgaaagtgggttaagtttgttatgtgggctaactgtcactgtgtcttgtgaaaggaatgtacaaattgaaagattgttagctcgaaacaacgaattgtctgaatcggatgctaacaagagaattgagagccaaatgtcaaataaggagagaaattaccgatccgatatagtactagataactctggaagtttagactcgttaaaggaatcaataaagtgtttagtacctgaaatgaaacctaaccttatttggtacttactagatttgttcccaccatttgcggttacgtcagctttatttacttttactattagaagaattgcagaaagattcaaaggcactaaaccaaaatccgattaa

SEQ ID NO: 6277 - DNA, 1665 bp, Candida albicans
atgttttcaactgcacgttcagatacattatttttaggagcacaaaagataagtggagacgatgttcgtactcaaactgtacttgcagctcaaactgtcgccaacgtcgtcaaatcatcattagggccagttggattggataaaatgttagttgatgatattggtgatgtcactgttaccaatgatggagccaccattttgtctttattggacgtacagcaccctgcaggtaaaatattagttgagttagcccaacaacaagaccgtgaagtcggtgatggtaccacaagtgtcgttatcattgctgccgaattgttaaagcgtgcacacgaattggtgagacatggtattcacccaactacaattataagtggatatagattggctttaagagaatctattagatatatcaaccaagttttgtcacaaaatgtcgatcaattgggcaaagaaactttgataaacattgctaaaacatcaatgagctctaaaatcattggttctgattccgatttttttggaaaaatggtagtggatgctatgttggccgtaaagaccaccaacggtaaaggtgaaaccaagtaccctgtcaaagcagttaatattttaaaagcccatggtaaatcagccttagaatctgttttagttgatggttatgctttgaattgtactgttgcatcgcaagcaatggtaaagtcagttaaaaatgcaaagattgcttgtttagatattaatttacaaaaggcaagaatggccatgggtgtgcaaataaatatagatgatcctgaccaattagaagaaattagaaaaagagaatatggtataatcattgaaagaattcaaaagatcttggctagtggtgctaatgttattttaaccacaaagggtattgatgacttgtgtttgaaagaatttgttgaaaatgattgtatggcagttagacgttgtaaaaaagaggatttaagaagaattgctcgtgccactggtgccactttggtgtcatccttgtctaatttggaaggtgaggagactttcgaaacttccaatttgggatatgccgaagaagttgttcaaaccagaatcagtgatgatgaatgtattttaatcaagggtacaaggcaacacacttcaagttccataatattgcgtggtccaaacgatttctccttggatgaaatgcaaagatcattacacgattccctttctgttgtgaaacgtactttagaaagtggacacgttgtaccaggaggtggggctgttgaagctgcattgaacatttatttggaaaattttgcaacaaccgttggctcacgtgaacaattggctattgctgaatttgcaaatgctttattggttattccaaagaccttggctctgaatgctgccaaagatgctagtgatttagtggctaaattgagaacttaccatgctgctgcacaaattgctaaacctgatgatgaaaaacgtagaaaatacaaaaactatgggttagatttaatcaatggtaagatcgtcaacgaagcaactaacggtgtattggaaccaacagtatccaaaatcaaatccttgaaatccgctttggaagcatgtgtttcaattttaagaattgacactattatagaagttcaccctgaacctccaaaagaagatcctcatgctcattaa

SEQ ID NO: 6278 - DNA, 2859 bp, Candida albicans
atgagtgacagtggttatacattaatctatgagcctaatacggctacgaaagtatctgtcaatgaatttaaaaatttgttggaaaagggtaaagatgatgtgaaagtagataccatgaagaagattttgattaccatattaaatggagaccccttacctgacttgttgatgcatataatcagatttgtcatgccttccagaaataaagaattgaaaaagttgttgtatcattattgggaggtttgtccaaaaatggatgaatcaggtaaaatgagacatgaaatgattcttgtgtgtaatgccatccaacgtgatttacagcatccaaatgaatatattcgaggcaatactttgagatatttgacgaaattgaaagagccagaattattggaaactttagttcctaatgtccgtcaatgtttagaacaccgtcatgcctatgtcagaaaaaatgctgttttcgcattatggtctattcataaagtcagtgatcatttagctcctgatgctgacgagttaatttacagatttttgtatgaggaaaacgattctgtttgtaaaagaaatgcttttgtttgtcttggagacttgaatagagaagctgctttgcaatatattcaggataatatttcagttattgagactttggatccattgatacaattggcttttattgagtttatcaaaaaggactctattcaaaatccagctttaaagcaacaatatgcccaattaatgacagaaattattgaaagctcttcaaatgttgttatgtatgaagctgctaacacgttgactgttttgacttcaaacccacaatcaattttgttggcaggaaacaagtttgttgaattggctactagagagtctgataataacgttaaaattatcactttagagagaataaatcaattacacaagcaacatcctggtgtgttacaagacttgtcattagaaattttacgagttttatcttcccaagatttggatgttaaaaagaaagctcttgatgttactttacaatttatcaccaccagaaatgttgaagatgttgttaagttattgaagaaagaattgcagtctacagctttatccaatgatgacaagaatgcagattatagacagttgttaattaatgccatccatcaattggctattaaatttgtggaggttgctgccaatgtcattgatttattgttggattctatagccgatttgaataccactgccgcctacgaggttatcacatttgttaaagaagttgttgagaaattcccagatttaagggacgctattttgagaagattgattttggctttgccacatgtgaaaagtggtaaagttttccgtggtgcattatgggttattggtgagtatgccttagaggaatcattaatacaagaatcttggaaatatattagaggaagtattggtgaagtaccaattattgctagtgaattgaaactgaaaaagcgtgatgatactgaggaatcacaagaggaagaaaccgagtatgatggtaaacctcgcagaaagggtccagttgtattgccagatggtacctacgctactgagtcagcattgacaagcgaaacaactgactctttggaaagtgacagcaagactcctatcagaaagcaaattcttgctggtgatttctacttaggtgctgtattagcatcaactttggtgaaattgattctccgattgcaaagtttgaaacaaactcaagaaaaaattttgaacggattaaaagcagaagcattgttgattatggtttcgattttaagagttggggaatctagcttggtttctaagaaaattgatgaggattctgctgacagaattttgtcttacatcaagattttgaacgatgaagaagaccttcaggaaatcaagacaagcttccttgaagatactaaagatgcatttaaagcacaaattaataatgctgaattgaagaaagcagaagcattggctaaggatttgcatgataacgctgaacaaattgacgatgcaattgtttttagacagttggataaagataacaaaaagagtaaagcttctgtggatgatgttgctgctgcgtcaggaagcaatgaattaaagaaagaaaatttgtcgtcgagattgaacaaaattatacaattgactgggttttccgatcctatttacgcagaggcatttgtcaaagttcatcaatacgatgttgtgttagatgtcttgctagtgaatcaaaccacaactactttaagaaacttatcagttgaatttgctacattgggtgatttgaaagtggttgataaaccaactaccgcaaatattggacctcatggtttctacaaagttcaaacaactattaaagttacttcggctgatactggtgtcatctttggtaacatagtgtatgacggtcaacactcggacgattcacgtatagttattttgaatgacgttcacgttgacattatggattacattaagccagccacttgttcagaaagtcaattccgtaaaatgtggaacgaatttgaatgggaaaataagataaccattaaatcacctattgaaacattgaaagagtacttggatgaattaatgaagggtacaaatatgcaatgcttgacaccgggtgcggtaattggagaagaatgtcaatttttatcagcaaacttgtactcaaggtcaagctttggtgaagatgcattggctaatttatgtatagagaaacagagtgatggaccaataattggtcatgtcagaataagatcaaaaggtcaaggtttggctttgtcattgggtgatagagtagcttccatttcaagaaaaggtaagaaggcaactattgctcgtgtttaa

SEQ ID NO: 6279 - DNA, 1014 bp, Candida albicans
atgtcgaaagaattatcattaaatcaaaaaaattatttaatacaagcattaaaatcgaatattcgattatcaacttctaccaatactggtggatcacgaaaattcaatcaatttcgaccaattgacatcaaattatccaacactagatatggatcagtagaattatcattaggtaaaaccaaagtcatggtaaatattacatcaagaatcactgaaccatatcaagatcgtccatttgaaggaatcatgaccataaattgtgaaatacctaatcatattaaacttcaatctaatgatactactaataataataacgataatgaagatgaatttataaatttgattaatcgagcattagatcgagctatacgtagatcaaatgcagttgatttagaaaatttatgtattatagctggagaaaaagtttgggaattaattattgatttacaagtattaaattatgatggtaatttgattgatagtggatgtttagccataattactgcattactcgattttaaaaaacccgacgtcacaatcaataataacaatactagtaatagttcttctactagtggtggtggcggtaatattatagttcatgatgatgaaatgaaacgaccatttattgaattatcaatattacatattccaatatgtttaacattcctgttatttaatcttggaagtaaagaaactaatttaaaaactaatgatattgatcaagaaatttggttattagatggtgatgccatggaagaatcgtgtcgtgatggatatttaatcatgacaatgaatcaaaatcatgaattaattcaattgagtaaaatcggtggtggtggtaataatggtggtgtatctatagatggtcaacaactaattaatttatgtcatgaatcaatcgatgaaattaatcgattgaccaatttggttaaatcaacggtaaagaatcatcaattgaatagatacaataatgaaaattataaattattagaatcaagtgcagatagataa

SEQ ID NO: 6280 - DNA, 1152 bp, Candida albicans
atgaataggttacttagtttcatactacctatttttcttattttcagcacagtgttatcatctgattcaccaaatgactctgtaaatatcaataattctgatccaagtcgtcattcaaataactgggccgtcttagtgtcaacatcacgattttggttcaattatcgtcatatggccaacacattaagcttgtaccgtactgtcaaaagattagggattccagattctcaaattattcttatgttatcagatgatattgcttgtaatccaagaaatgctttcccagggtcagttttcaacaatatggatgaagctattgatttgtatggtgaatcgatagaagtggattaccgaggatatgaagttaccgttgaaaattttatgcgtttattaactgataaatgggattcagatcaacctagatcaaaaagattattgtctgatgaaaattccaatatttttatctatttgacaggtcatgggggtaatgagtttttgaaattccaggatgcggaagaaattagtgctcatgatcttgctgatgcattttctcaaatgtatgatcaaaaaaggtataacgaaatatttttcatgattgatacttgtcaagctaataccatgtatgaaaaaatccattctccaaatatcttggcagttggatcctcagagatagaagaatcgtcctactcacaccattccgacatggatattggtgtagcagtgattgatagatttacttattatactttggatttccttgaaaagatcgatagagattcaaaggagaccatggacaaattatttgctgaatacacttttgaaaatgttcattctcatccaggtattagaactgatttattcaagcgtaatgttagtgaagtcttattaactgatttctttggtaatgttcagaatgttgtcgttgatgatgtcaatatggagttgttggagaatgaaaaagtcacggaatctaacgaggacaacaatcaaactaagaatattatcaaagaaagaggcccaacacaattcagttttgaatgtgacgagaattcaaaatcattgattaaagtcccccaattgcatgctcgaatttttggtgtagtaaccgttggtgttattgttgctctatggtttatatcctcaaagttctaa

SEQ ID NO: 6281 - DNA, 576 bp, Candida albicans
atggggaaaacggtttctaaattatcaaaagatgatttgaggcagcttcgacaggccacgtattttgataaacgtgagttgcaacaatggtacaaagggtttctaagagattgtccactgggccaattgtcagaagaagaatttgtgaaagtttacaagcaatttttcccatttggtgacccgactgattattgtcattatttgtttcgagtttttgatttggataattcaaaatacattgattttaaagagtttataattgcattgagtataaccagtagaggcacagaggaacagaaaatcaactggagctttaaaatgtatgactataaaaaggaaggaaagattggttataaagaaattttacccattgtgagggctacttataaaatggttggaccgatggtggaattaccggaagatcaacaaactcctgaagctagagtagatagatatttccagttgttgggcaaagacaagaataccgacaaattagatttgaatgactttaaaaaattggctcaactagattcaggaatagctgcggcgctaaactcctatctgggtttggtatag

SEQ ID NO: 6282 - DNA, 1449 bp, Candida albicans
atgaagccaaggttcctatcatacaccactagacttctcacgaaaccattcaaagttgcaattgttggcacaggacctggtgggttttatactgcccatcatttacttaacaagtcctcaccagatgtcaaattgaatattgatttttttgaaaaattgcccacaccatatggattgagtcgatacggggtagcaccagatcatccagaggtgaaaaattgtgaagatcatatgattaatataatgaaagattttgggaattccgagagccgccataaggtgcgatttttgggtaacgttgaagttgggaaggatattgctttaaaggaattggaaggcaattacaattcaattgtgttggcttacgggtgtacatctgccgacaacaagttttctataccaggagctgatttaccgggagttgttccagctagacaatttgtgaattggtataatggacatccagactattatggcgagaacaagtatatccctccaccactagataaagttgatacagtttcaattattggaaatggtaatgtcgcattggatgtggccagaatattacttgctgatccacgtgaacattgggctaaaacagatatttcggtggacgcccaacaattgttggagaaaagcaccgtcaaacatgttagaatagtcgccagaagaggtgttttggagtcagcgttctctaacaaggaaataagggaattactagaattgcctgctaaattcgtaccattaccaaaggatttattagattttgatacaaaaaaattgggaagagttgataaacgaagagtatcacttctagaaaaatatagtaaacaacaaagagaacatactaaccgttcatgggaattggaatactataaaagcccagaagagtttatacaaggtgaaaacaaccttttaaaaagtacaaagtttgttataaataaaccggcaaacgatcctttagctccccacaaagttgagcctacggacgagactgtgacagaaaataatgagctagttattttatccataggataccaaggatcaccaatccaaggttttgaagaattaggtatttggtatgaaaaaaatagacttcaaaataaaagtggcagaatactatccactaaatcaaaggagaaagacgaacataatgctgttttcaaaccaggttggtatgctgctggatggatcaagaatggacctcaaggtgcaattgcttcaacaatgatggattcgtttgacacagctgataagattttagaagatttagcaaatgatgcgtatattaagatcaactcagacaaggagttggagttctcaaacgctgtggattggggtaattgggagaaattgaacacttatgaacttgaaaaaggtgaggcattagggaaaactcgtcttaaagtgtgcaacaaagatgaaatgttgaaattgatgaaataa

SEQ ID NO: 6283 - DNA, 1875 bp, Candida albicans
atgtcgaaagatatttatttgaagaagatacttggtgaagagtgtgtttctcggatccgaaactcaaaaatccttatggtaggagcaggaggtattggatgcgaattacttaaagatttagtgttgactgggtatggggaaattcacattgttgatttggataccgttactttatcaaatttgaaccgtcaatttttatttcgtcaaaaagatattgataaatcaaaatcattcaccattgccagtgccgtgcaatcatttaattatctcggagtcaagttgattcctcatcatggcaatgtcatggatacaaaacagttcccaattgaatggtggggacagtttaattttatttttaatgcattggataatttagaagccagaagatatgtaaacaaaatggcattgtttttgagaaagccattaatggaaagcgggactactgggtacgctggacaaatccagcctatctatccgtattacagtgaatgttttgattgccatcccaaagagacccccaaatctttccccgtatgcactatcagatcaacaccatctcaaccagttcattgcattacctgggctaaggagtttttgtttcgtcaactatttgatgaaaacgataattcaaattcaatgaatgatgccaatcagattcaaaatgaaacagacgacaaagacgagttggagaatttgaacaaagaggccaatgaattaattgaattgcgttctaaaattctactgttagatctgaattcctttattaatgaattgctcaaaaagatttttaaagtggatattgaaagattattgagcattgaaactttgtggaaggctaggaaaaagcccattccattagatatgactgaatatcgagaggcattacagcagttattagagcaggaactgagtagttcaatattgactgcagatacaaaagtgtggaccattttggaaaacatctattctttgtacaagtccagtgagtcaattcaaaaacgattgaaatctggtaatgaaccatttattacatttgataaagatgatgaagacactttaatttttgtagctgctgcttcaaatttaagatcttttagttttggcattccattgaaatccaaatttgacatcaaggaaattgccgggaatattattcctgccattgccactaccaatgccattatagccgggttttcaagtttgtccggcacacaattttttcagcaccaaaaagatcttacaagttcagactttagtaacatttttaaaagggcatcttctgtgtttattagtataagaccgaataagtacattactggcgatagattatcaaaaccagctgaaaattgtgccagtgattcactaacagcaagaggagtgctcacagttgcattgagtgaccttgctgttttgactctcgaaggattcattgatagacttgcttataaatatggatattccaaagaagatatatctatccaaattgggaaatcgaagttaatttatgatgttgatttcgatgactatcttcaaaccaaattgaaggacgttcctggcgtggccaatggagaggtcatgctaatacaggatgatgctgacgagttagaaaacttagaattgtatttgaatataaaagacgatactgtcgagttgaaattgccaatattagagttgagacctaaaaaaatggtcccacagccaaatcataatgaagagaacaatagtgagtatgccaaggagttagagggaggaactattttattagatgatgatgacgatgagctgtttggaaacgaaatcgaaatacttgatgatgaagaggaggaagatatgaagattgtagaaccacctgtaaagaagagaaaacttgactag

SEQ ID NO: 6284 - DNA, 1236 bp, Candida albicans
atggaagacccagttctgttagacaacgtaaacagtgtgttatcaaaattgaataacgtttcagctacaaactccaatgaaactgatgtgtatcttaaattgaaaaaattggagaaggagttagatttactattactacaagaagagtacattaaggatgaacaacgtcatttaaagcgtgaattggtgagggcacaagaagaagtcaagagaataaagtctgtgccattagtcattggacaattcttggaaccaatagatgaaaacactggtatagtttcatccaccactggttcaaactatgtcgttaggattttatctacattagatcgtgagttgttaaaggcatcctcttcggttgcattacatcgtcactcaaatgcattggttgacatattgccaccagaagctgactcttctatatcaattgttggagaagaccaaaagccagatgtcacttatgccgatgttggtggtctagatatgcaaaagcaagaaatcaaggaagccgtcgagttgccattgactcaaggtgatttgtattctcaaattggtattgatccacctagaggggtgttgttgtatggtccaccaggtactgggaaaaccatgttagtcaaagctgtggcaaattcaaccacggcttctttcatcagaattaatgggtcagaatttgtacaaaaatacttaggagagggtccaagaatggtgagagatgttttcagattggccagagagaattcaccagcaatcatttttattgatgaaatagatgcaattgctaccaagagatttgatgctcaaactggtgctgatcgtgaagttcaaagaattttgttggagttattgaatcaaatggatgggtttgatcagacatctactgtcaaagttataatggctactaacagagcagatactttagatcctgcattgttgagaccaggtagattagatagaaagattgagtttccttcattgaaagatagaagagaaagaagattgattttttcgacaattgcatcgaagatgtcattagcacctgaagctgatttggactctttaatcatcagaaacgatccattgtctggtgcagttattgctgcaattatgcaagaagccgggttaagagctgtgagaaaaaacagatatatgattttgcaaagtgatttggaggaagcttacacttcacaagtaaagacagggacagaacatgataaatttgatttctataagtaa

SEQ ID NO: 6285 - DNA, 522 bp, Candida albicans
atgttctttttaaaagatttgtcattaaatttaactttacatccatccttttttggacctcaaatggaccagtatttgagagaaaaactattaagtgatgtggaaggtacatgtacaggtcaatttggttacattgtgtgtgttttggattcaatgaatatagatgttggcaagggaagaataattccaagtactgggatggctgaatttgaagtcaaatatagagctgttgtgtggaaaccattcaaaggtgaagtggtagatgcagttgtaacaaccgtcaataaaatgggatttttcgccgatgttggcccattatcagtgtttgttagtacccatttgataccttcagatatgaaatttaatccttcagcaaacccaccagcatatgtgagtcccgatgaaaacattgaaaagggatcgagggttagattgaagattgttggtacaagaactgatgtcaatgagatttacgccataggaagcataaaagaagactatttgggaccaagtcctatgtaa

SEQ ID NO: 6286 - DNA, 840 bp, Candida albicans
atgtccacaggattactcgactcatgggcagatgccggagatgagttttcagctccaccagaagttatagccaacccagacggaaccaaaactgtgattaccttcagaaccaaccaagatggtaaaaaagtcaaaataacccaaaagataaaagaagtaaaagtacaagaaaaagtacatccattaattgctcaacgtaaaaactggaagaagtatggtaaagaaaagaactcgccaccaggaccagataccagtaccacacagttgggggaaaaagtggatttgaagttgggtacatcctggaaacaagacgaaaagaaagaagaggaagacaaagcgcacgaaagagctcaaaaaattgctgtccaaactatcaaatgtagagtgtgtggcggtgaccattacacagccaaatgtccatttaaggatactttgggagctgctgctggtgttactccaagtggcactaccccagaacctactagtgaaggtggcgccggtgcagctggtgcaggtaaatatgttccaagacacttgagagccgacgctaatggaaatgtcccaaccagagaagcaagagacgactctaccacattgaaggtcagtcaattgaactcgtttgttgatgaagatatgttgagaaacgaattgtttgccaaattcggtccattacaaagagtcactattgtgagaaacagagaaactggcgaatccagagggtttgcttatgtttcctttgcaactgaagaaattgctcaaagggccttggatacattcaatggtaaaggttaccattctttgattttgcatttggaatggtcaaagaagaagaaaacctaa

SEQ ID NO: 6287 - DNA, 573 bp, Candida albicans
atgtcatcatctgccaatagaccaatcgttatttccggtccatcaggtactggtaaatcaaccttattgaaaaaattatttgctgaatatccagataaatttggattttcagtttcaaacaccaccagaaaaccaagaccaggtgaagttaatgggaaagattataattttagtactgttgaagaattcaaacaattaattgatgaaaacaaattcattgaatgggcccaattttcaggtaattattatggcacaacaattaaagctgtcaaagatgttgctgaacaaggtagaatttgtttattggatattgatatgcaaggggttaaatcagttaagaaaaccgatttgaatgctagatatctttttataagtcctccttctattgaagaattgaaaagtcgattgactggtagaggtacggaaactgaagatagtttacaaaaaagaattgctgctgcttctgatgaaatggaatatgcccaaactggtgctcatgataaaataatcgttaatgacgatttggacaaagcttatgctgaattcaagaaatttatcgttgatgaacaataa

SEQ ID NO: 6288 - DNA, 333 bp, Candida albicans
atggatcaattaaacgttaaagaacaacaagaatttcaacaaattgttgaacaaaaacaaatgaaagatttcatgaatttatattccaatttagtttcaagatgttttgatgattgtgttaatgatttcacttctaatagtttaacttcaaaagaaacttcatgtattgccaaatgttctgaaaaattcttgaaacatagcgaacgtgttggtcaaagattccaagaacaaaagtatgttgatttactgagagtaacaaatggcaatatgcctttgatgatcattattatttatcatcagattatactaacaaataaactcatattattatag

SEQ ID NO: 6289 - DNA, 381 bp, Candida albicans
atgtctgccccaaatccaaaagctttcccattggctgattctgctttgactcaacaaatcttagatgttgtgcaacaatcccaaaacttgagacaattaaagaaaggtgctaatgaagccaccaagactttgaacagaggtatttcagaattcattatcatggctgctgataccgagccaattgaaattttgttgcatttgccattgttatgtgaagataaaaacgttccatacgtttttgttccttctaaagctgctttaggtagagcctgtggtgtttccagaccagttattgctgcttctgtcacctcaaatgatgcatcttcaatcaagaaccaaatttacggtatcaaagacaagattgaaactttgttgatctaa

SEQ ID NO: 6290 - DNA, 1326 bp, Candida albicans
atgtcttcagaaaaattatttagaatccaatgtggataccaaaactacgattggggtaaaattggttcatcatcagcagttgcccaatttgttcacaattctgacccatcaatcaccatagatgaaactaaaccatacgctgaattatggatgggtactcatccttcagttccttccaaggccattgatttaaacaatcaaactttacgtgatttggtcactgctaaaccacaagaatacttgggtgaatctatcattaccaaatttggttcatccaaggaattaccatttcttttcaaagtgttatctattgaaaaagttttatctattcaagctcaccctgacaagaaattaggtgcacaactacatgctgctgaccctaagaattatccagacgacaatcataaaccagaaatggccattgctgttacagattttgaagggttttgtgggtttaaacctttggaccaattggctaaaactttggctactgttcctgaattgaatgaaattattggtcaagaattagttgacgaatttatcagtggtattaaactaccagcagaagttggaagtcaagatgatgttaacaatagaaaattgttgcaaaaagtgtttggtaaattaatgaacactgatgatgacgttataaaacaacaaacagctaaattacttgaaagaacagacagagaacctcaagtgttcaaggatattgattctagattaccggagttaatacaaagattaaacaaacaatttcctaatgacatcggattattttgtggatgtctcttattgaaccacgttggtttgaacaaaggggaagcaatgttcttacaagccaaagatcctcatgcttatattagtggtgatataattgaatgcatggctgcttctgataatgttgttagagctgggttcactccaaaattcaaagatgtgaaaaatcttgtggaaatgttgacttattcatatgaatcagttgaaaaacaaaaaatgccattacaagagttcccaagatcaaaaggtgatgctgtcaagtcagtgttatatgatcccccaatcgctgaattctctgttttacaaaccattttcgataaatccaaaggtggtaaacaagtaattgaaggattgaatggtccttctattgttatcgctaccaatggtaagggaacaattcaaattactggtgatgattcaaccaagcaaaaaatagatacaggttatgttttctttgttgcccctggttctagcattgaattaactgctgacagtgctaaccaagaccaagactttaccacctacagagcctttgtggaagcatag

SEQ ID NO: 6291 - DNA, 1581 bp, Candida albicans
atgagagtgaagaagccaacatccaaaagaactaccactcgtatgagagaaggtatcaagaaaaaagctgcagctaaaagaagaaaagataaaaaaatcgcaaagaaagacgttacatggaaatcaagaaaatccaaggatccaggtattccagccagttttccttacaaggataaaatcataacagaattggaagaaggtagaagaatcgaacaagaaagaagagaacaattaaaattacagaaaccacaagaaagacaagaagctttggcaagaggagaaattgttgaagacgatgatgaaatggatgaagatgaccaagaagaaggagatggagctaatggattagctgcattattggaatcagctcaacaagctgctaaagattatgatggtgaggactatgaagacaatgaaaatgaagacatggttgattctgaagaagatgtggaatatgaaatcagtgacatcgaagatactcaagacgaagagtttggggaattggagaaatcacgtaaagcttatgacaaaattttcaatacagttgtcgatgaagctgatgttatattatacgttttagatgccagagatccagaatctacgagatcaagaaaagtagaacaagccgtgtggcaaaacccaggaaagaggttgattttagttttgaacaaagtcgatttaattccaactcatgctttgaatcaatggcttaatttcttgaaatcatctttccctactgtgcctgtcaaagctgcacctggtgccactaattctacatcgtttaacaaaaacttgacaaactccatgacatcggatgctttattgaaagcattgaagagttacgctagtaaatctaacttgaaaagatcaattattgtgggggttatcgggtatccaaacgtaggaaaatcatcaataataaatgcattaaccaatagacacggaaacaattccaaagcttgtcctgttggtaaccaagctggtgtcacaacatctttaagagaagttaaaattgacaacaagttgaaagtgttagactcaccaggtattgtgttccctgatgaaattgtaaataccaaaaaacaatcaaagacacagcaattagcaaaattggctttattatcagcaatcccaccaaaacaaatagttgaccctattccagccattacaatgttgttgaaaaaattttccaaagacactgagatggctgatggattgaaaaacttctaccagttgccaccattgccatcgagtgatttaaatgaatttgtcaaacatttcttaatccatattgccagaagcaaaggacgattgggcagaggtggtgttccaaacttagagtctgccgccatgtctgttttgaacgactggagagatggtagaataattgggtggactttaccaaaagcatctaaaagtgctgctggtgtttcctctgaagaagttgatttggatgctcctaagagttcattaagaggtgaaaaagagccacctaaagttgaacaaactactattgtttcttcttgggctaaagaatttgatttggatggtcttctaggtgataattttggtcttcaatag

SEQ ID NO: 6292 - DNA, 591 bp, Candida albicans
atggatattattttaggaattaaagtatctgacggcacccttattgcaacatctaaagctgccacaagaggtatttcaattttaaaggatacagatgataaaacaagacatttaaatgcacacaacttaatagcatacactggtgaagctggtgatacggttcagtttgccgagtatgttcaagcaaacattcaattgtactcgatgagagaaaatgacattgagttatctccaaaggcaacagcctcgtttgtgagaaaccaattggccagttcccttagatctagaaaaccgtaccaggtgaactgtttaattggaggatatgatgtaaagaaaaatgagccatcgttgaattggatagattatttgggtacacaagttgaactcccttatggtgctcatggctacgctgcattttacacaacatctttgttagataaacattatagaaaggacatgacggtcgaagatggtttaaagttaatggatatgtgtgtcaaggaattacaaacgagaatgcctattgactttaaaggtgtgtacatcaaggtggtagataaagatggtataagacagattgagtcaaattga

SEQ ID NO: 6293 - DNA, 1446 bp, Candida albicans
atgcaagaatctaaggatattaaaatgaaggatgttcagcaagatgatgtatcctctgaaatagacacattggtcaaggaaattgaacagtcttttattttgttaagtaaagttgccacaactttcgacaatagatacgtttcaaaagtgttcagagacttgggtccattgagaagaaaattggtcaggaatgggaattcagtgttagcaactgtcataaacaacacatacccgcaaactcataactcaaaaacatatttattaaagtatttgaatgaatcgccaacttcagtgggaaacgatgcaatggatgttgataataccacattgattccagaaattgaactttacatacatctcttggttcaagtttatcttttagatactggtaaattggaagaattgaattccttaggagaacatgtggtccaattgatgaaatcattcaatagacgttcattggactttattcaggcaaaggtatggttttatgtatgcagggctaaagagttgattggagatttatattcgattcgtccagagttactgtacagtttgagaacagccaccttgagacatgatatagaaacaacagcatcggtcatcacattactattaagaaattacttattgacccacgacatcagtcaagcttctgatttggtagaaaaagtcgaatttcctgaaaatgctggtaatgcgttagttgctagatactattactatttggcaagaatcaatgccatccagttggactattctactgcaaatgagtgtgttataaccgcgatcagaaaagcaccacaaacatctttagccaacggatttgtccaagcagctactaaattgagcattgttattgaattgttaatgggagatattccggaattgaaagttttcaaaaacaagtctggcaatttggaaccttacttcaatgttactaaggccgtgagattgggtgatattaagttatttggtgaggtattgcacaagtttgaagctgacttcaaaaaggatgacaatttcactttggtttctagattacgtcagaacgttataaagacaggtattagaatcatatcattgtcatactccaaaatatcgttaaaggatatatgcatcaaattgcatttggattctgaggaatcaacagaatacattgtttccaaagctataagagatggtgtcatagaggccagcatcaaccatcaaaagggatacatgcaaagtaaagaattgttggatgtgtactctacaaaattgcctcaagcagagtttgaccaaagaattaagttctgtttgtcattgcataatgagagtgtcaaatccatgagatatccaaatgataatgaaaaagaaaataccaacaaagaaattgaaccaagtgaggaagttgaattattgaaagctattgaagaaggagatttggatgactttatggattaa

SEQ ID NO: 6294 - DNA, 1830 bp, Candida albicans
atgtcgatttctgcatcaaaagctaaaagagagcaaaagcgtttagaaagagaagccaaaaaggctgctgttggtaaaagcactaaaaagaccaagaagcaagctgaaaaagatgctgctgaagatgaagtcgaaggtgctgaagaacaaattgccaaaatgaaattacaaacagatgaacatggcttgtccgatagagtcactactggtgttttggaatccttggaaacctcaagagatattaaattgtcatctgtttctcttttattccatggtaaagttttgattcaagattctacattggaattgaattatggtcgtagatacgggttattgggtgaaaatggttgtggtaagtctactttaatgaaatctattgccgctagagaattccctattccagaacatattgatatctacttgttgaatgaaccagccgaagctactgaatactctgccttagaatacgttgtcagagaagccgaacatgaaatgaaaagattggaagatttagttgaagagttgattgttaaggaaggtccagaatgtcctgcattggaaggtctttacgaaaagattgacgaaatggatccatcaacatttgaaagtagagcagcaattattttgactggtttgggtttcaactcagttactattaaaaaaaaaaccaaagatatgtcagggggttggagaatgcgtgttgcattagcaaaagctttatttgtcaagccaaccttgttgctattggatgatcctactgcccatttggatttagctgcttgtgtctggttggaagaatatttaaagagatttgatagaattttaattttggtctcccattcccaagatttccttaatggtgtttgtaccaatatgattgatatgagattgaaactcttgacaacgtacggtggtaactacgattcctacgttaagaccagagccgaattggaaaccaaccaaatgaaacaatataataaacaacaagaagaaattgcccatatcaaaaaattcattgcatctgctggtacttatgctaacttggtaaggcaagccaaatctagacaaaagattttagataaaatggaagctgacggtttgattcaaccagtcgttccagataaagttttcacttttagattccccgaagtggaaaaattgccaccaccagttttagcattcgacgatatgtcattctcatactctggtaaaccagaagataacttgtatgagcacttggacattggtattgatatggattccagagttgctcttgtgggtcctaatggggttggtaagtctactttgttaaaattattccaaggaaaattgcaaccacaaactggtagagtgatccaacatacacacatcaaattgggtgtctattcacaacattctgctgatcaattggatttgaccaaatctcctttagagtttgtgcgtgacaaatttgcaaacatttcacaagattatcaatactggagaggtcaattgggtcgttatggtttaagtggtgaagcacaaactgcccaaatggctactttatctgaaggtcaaagatcccgtgttgtttttgcattattggctttagaaggtcctaacttgatcttgttggacgaacctacaaatggtttagatttaggtactattgattctttggctgatgccatcaatgcctttaatgggggtgtggttgttgtttcgcacgatttcagattattggataaagtggcaaaagacattttcgtcattgaaaataaaacagctacaagatggaatggatctattttggattacaagaaatcattggcttccaaagttgtattatag

SEQ ID NO: 6295 - DNA, 621 bp, Candida albicans
atgtcggatccattttcaattaacggaggtgcagcagtagctatgattggtaaagactgtatagcaatagccagtgatttaagattaggacaacaatcgcttggtgtgagtaataattttgaaaaaattttcagtgttggtgataaaaccttcttaggattaactggattagctactgatgtgatttctttgaaagaattatttagatttaaaaccaatttatataaattacgagaagaacgtaatattgaaccatcaacattggcaaatttggttagttcatcattatatgaaagaagatttggaccttggtttgttagtcccattgttgctggattaagtagtaaagataataaaccattcatttgtggatttgattcgattggatgtattgattttagtcacgatttcattgttagtggtactgctagtgatcaattatatgggatgtgtgaaagtttatatgaaccaaacttggaaccagaagatttatttgaaactatcagtcaagccttgttaaatgctgttgatagagatgcattgagtggatggggtgctgttgtatacatagtgactaaagataaagtgattaaaagggtattaaaaactagacaagattga

SEQ ID NO: 6296 - DNA, 2499 bp, Candida albicans
atggctcctaatatatctacatcaaggagcaacaacaatactaccaccatcaacgttaaagttgttgctgctgaatcattatataaacgagatgtattccgtcaaccagatccatttgccgtgttgacagttgatggatcacaaactaaaactaccattactgctaaaaaaacattaaatccttattggaatgaaactttcaatttccaagctaaagaagattctatattagttatacaagtatttgatcaaaaaaaatttaaaaagaaagatcaaggatttcttggtgttattaatgttagaattggtgatgttattgatttgtctttaaatagttcggaagaaactataactagagatttgaaaaaatctaatgaaaatttagcggtatcggggaaaatcattgttgtgatatctcataatagaaattccaatggaggaggggtaaccacagccactactagaggtactggtgcttcatcatccaataatattgctacaattactagcggtgttaataatttacgcataggttcagctactactactgcaaactcaacagcacaagcatcttctgatgcaactgttggtgctaatggatcaggtccaacatcttcattgcctccaataggacaaggacacccagaaactgcggcaaccccaggaggagcagctggagcagctggagcagcatctagacaatattcatcttttgaagatcaatatggtagattaccacctggttgggaacgtagaactgataattttggtagaacttattatgttgatcacaattctagaactacaacttggcaacgtccagctttacatcaatcagaaactgaaagaggccaacaaagacaatcagaaactgaagcagaaagaagacaacatcggggtagaacattacctggtgaaggatcggtttcacctttaccaacaggatcgggtaattccattactagtggtaatgtcacggtaaatgcatcaggtgcgaatacaccagtcaaccctgcagctgcagtttcaatggcagcttccggtgccactactagtggattaggagaattaccatcgggttgggaacaaagatttactactgaaggacgtccgtattttgttgatcataatactagaacaacaacttgggttgatccaagacgacaacaatatattagaacatttggtcctaataccactattcaacaacaaccagtgagtcaattgggtccgttaccttcaggttgggaaatgagattaaccaatactgctcgagtatattttgttgatcataataccaagaccactacatgggatgatccaagattaccatcatcattggatcaaaatgtcccacaatataaacgtgatttcagaagaaaagtcatttatttccgttcacaaccagcattaagaatattaccgggacaatgtcatattaaagtaagaagagatcatatatttgaagattcatatcaagaaattatgagacaaacccctgaagatttgaagaagagattaatgattaaatttgatggcgaagaagggttagattatggtggtgtttctcgtgaattctttttcttattatctcatgatatgtttaatccgttttattgtttatttgaatattcatctcatgataattatacattacaaatcaatcctaattccggtattaatcctgaacatttgaattatttcaaatttattggtcgtgttgttggattaggggtattccatagaagattcttggatgctttttttgttggagcattatataaaatgatgttacataaaaaagttgtgctacaagatatggaaggggttgatgctgaattctatcgatcattaaaatggattttagataatgatataactggtatattagatttgacgtttagtgctgaagaagaaagttttggagaaattgttgaagttgatttaaaacctggtggtagagatattgaagtgactgaagaaaataaacatgaatatgttgaattaataactgaatggagaataagtaaacgagtggaagaacaattcaaagcatttattgatgggttcaatgaattaatacctcaagaattggttaatgtatttgatgaacgtgaattagaattattaattggtggattagcagaaattgattgtgaagattggaaaaaacatactgattatcgtggttatcaagaaaatgaccaagttattcaatggttttggaaatgtattaatgaatgggattcagaacaaaaggcaagattattacaatttacaacggggacttcccgtataccagttaatggtttcaaagatttacaaggtagtgatggaccaagaagatttactattgaaaaagctggtgaagctaatcaattgcccaaatctcatacatgtttcaatagagttgatttaccaccttatactgattatgaaagtttgaaacaaaaattaacattggcagttgaagaaacagttggatttggacaagaatag

SEQ ID NO: 6297 - DNA, 717 bp, Candida albicans
atggatttaaaattacccccaactaatccaaccaacccacaacaagcaaagacttttatgaagtcaatagaggaagatgaaaaaaataaagccgaagatttggatattataaaaaaggaagacattgatgaacctaaacaagaagataccactgatggtaatggtggtggaggtattggtatagtgcccacattacaaaatattgttgctacggtgaatcttgattgtcgacttgatcttaaaacaattgctttacatgctagaaatgccgaatataatccaaaacgttttgctgcggtgattatgagaattagagatccaaaaactacggcattaatctttgcttcggggaaaatggttgtgactggggctaaatccgaagatgattccaagttggcttcaagaaagtatgctaggatcattcaaaagttggggttcaatgctaaattttgtgatttcaaaattcaaaatatagtggggtcaacagatgttaagtttgctattagattagaaggcttagcttttgctcatggtactttctcttcatatgaaccagaattatttcctgggttaatttatagaatggtgaaaccaaaaattgttttacttatatttgtttctgggaaaattgttttgacgggtgccaaaaagagagaagaaatttatgatgcatttgaactgatttatccggttttaaatgaatttcgtaaaaattga

SEQ ID NO: 6298 - DNA, 441 bp, Candida albicans
atgtcaaatttacaggatttaataaaccatgatgatgatgaatacctaccatccccatctccaccacaacaaccagaaccacaacatgcaagctcactggaattgaaaacttctactacagaagatttacctgattcagtaactcaagaacatatattgacaagttttgaaaaaataaaaacccatttcccggctgcaagaattaagaaaattatgcaaagtgatgaagaaataggtaaagttgctcaagctacaccagttatagttggaagagcattagaaatatttatggctaatttggttgaagtgtcattattagaagctaaaaaacaaggcgtcaaaagaattactgcttcacatgttaaatcggcaattgaaaacactgaacaatttgatttcttagtggaagcggttgaaaagtatccatctttgagaaattga

SEQ ID NO: 6299 - DNA, 1896 bp, Candida albicans
atgaaatcaaatactgaatctcttgcatgggagaatttacgttatgacttgcattcatggatcaaagaagcaatatcatcaatggggtatcccactatgactccagttcaagcatcgactatcccattattgagtggtaataaagatgttgtagttgaagcagtcactggatcagggaagacattatcatttgtaatccctgttttacaaaaaatttctgatagattatataaacccgatagtgatggagatttaccagaaccagttaaacgaggacatatgttatcgattgtattatcaccaacgagagaattagctaatcaaattcaaagtgttttcaatcaagtattacaatatttacctgaagataagggtacccgtattaacacacaattattggttggatctataggtaatgttcgagaagatttaaatcaatttttaacgaatcaaccacaaatattaattggaactccagggagaatcttggaatttttaggtagttcacaatcaattaaaacatcatctttggaaatagttatccttgatgaagctgataaattattagatttcctgtttgaaaaagatgtgatcaatatattgaaaaaattacctaaacaacgtcgaacaggattattttcagcaacgatatcttctgcaggtaatactattttccgtacggggatgaataatcctgttaaagttcaagtgaaatcgaaaaattattttggtgaacaaagtaattctccaaagagtttacaattatcatatatgatgattaatccagaattgaaaataaccacattattaacgatattatcaaaatatcaatataaaaaggccattgtttatttccctacttgtacatcagtgagacatttttatcaaatattcaataaagtttatcaacaagagtctagtgatgaacctcttaaatttttttcattacatggtcaacttaatactaaatcaagattgaagacattagataatttcactcaaggggatattaatctttataaacatattcttatgactactgatgttgcagcaagaggaattgatatacctgatgttgatttagtgatacaaatagatccacctactgaccccaatgtttttttacatcgttgtggtagaactggaagagcaaataaagttggtcgagccattgtcatgttaaatgataattgtcaagaagaagattatattggatttatggaagtaaaaggaatttttttaacaaaacaagatataccaacatcatcagcaacaaaaaatttacatgaaaatttccaaattaaacttcgacaatatatgcttgaagatagagcacgacatgaattagcggtgaaatcatatgtgggatttattcgatattattctaaacacatagctagttcgattttccgattagctacattagattatttggggattgccaagatgtatggattattaagattaccgaaaatgcctgaaacgaaatatattgataattcgataatgcccactgatggttggttaggtgaaattatcgatatggataaatatagttatgctgataaattacaagagaaaattcgattagaaaatttagagaatgataaattgaaaaaaattcaggatgcaaaaagaagaaaagaattaaaaattaaaaatgaagcttggtcaagtaaatcagaaagaaaagaaaataaattagatcgtaaagaaaaattgaaaagaaaacgtgaagccattgaaaaacaaattatggaagaagaaagatcaaatggtggaggcaacaaagatgaggaggatgaagttgttgaagattggaaagatatggttagaaagaataaaaaaaagcaaaagaaaaataattctatacaaggttcatttgatgatttataa

SEQ ID NO: 6300 - DNA, 633 bp, Candida albicans
atgagcggtaaaggaacatcatcaagagcatatgacatgattatgaagttattgttggttggagattccggtgttgggaaatcgtgtttattattgcgttttgttgaagataaattcaacccttcatttataaccaccattggtattgatttcaaaatcagaactattgaaagcaaagggaaaagaattaaattgcaggtttgggatactgctggtcaagaaaggttcagaaccattactactgcttactaccgtggtgccatggggattgtcttaatatatgatgtcactgattcaagatcatttgaaaatgttgaaaattggtttcaaacagttactcagcacgccaatgaggatgcacagatatttttagtaggtaacaagtgtgatgatgaagtaaacagacaagtttctaaagagcaaggtcaagaattagctgctaaattaaatgttccatttttggaagccagtgccaaaagcaatgaaaacgttgactctattttttacgaattggctagtattatccaagagaagcatgttgaagagaatattggtggtgttggtggtgccagtggtgctggtggtatagatgtttctcagaataattctggagcaaagaataactgttgctag

SEQ ID NO: 6301 - DNA, 450 bp, Candida albicans
atgctgttaccacaaggttatacattcagaaaactaaaacttactgattatgataatcaatatttagaaactttaaaagttttgacgacagttggtgaaatttccaaagaagaattcactgaattgtataatcattggtcttcattgccatctatttatcatccatatgtaatcaccaatgcatcaggtatagtggtagccacggggatgttatttgtggagaaaaaattgattcatgaatgtggtaaggttggtcatattgaagatatttcagttgctaaatctgaacaaggtaagaaattgggatattatttagtcacttcattaaccaaagttgctcaagagaatgattgttacaaagtcattttagattgttctcctgaaaatgttggcttttatgaaaaatgtggttataaagatggtggtgttgaaatggtatgtagattctag

SEQ ID NO: 6302 - DNA, 1491 bp, Candida albicans
atgtctgacttgcacctacaaatattaaaacttgtggatgataacagtggagttattgaaaacactcttaaatcacccgagttatcgaaaatagatgtcagtactttacaagccaatttaacatctctttgggccaaagaaatgattgttttctccaaaattgaaactgatagatgggtattaaccaaagaagccgaacaatatctcaaagctggtgccaccccagaagttcaagttgtcgatgaagttttgaaagctttagaaggattgacgatttctcaattgaaagaaaaattaggtccaatgggagctgttggtcaaggtaaggcattcaaaaacaaatggttgagtaaagatggtgacaaattgattgcacaagttgaaaaattacctgaagatgttgtattaaacgagttgaaaactattagtgaaaccggaacccttaatgacaagaaggaattaactgaattgaaaaaaagaaaattggtcactttgaccaaaatcgttggttacaaaattgaaaaaggtccaaaatttgctcttgaaattgtgaatttggaaactgatattacatctgatatggtgttgaaccacacttggaaggatgcccaattcaaaccatataatttcaattctgaaggggtttatccaaactctggtgccttacatccattaaacaaagttagagaagaatttagacaaatttttttctcaatgggattcaccgaaatgccatcaaaccaatacgtggaaacagggttttggaattttgatactttattcgtccctcaacaacatcctgctagagatttacaagatactttctacttgaaagatcccaaaaaagctggcgaaccagaagataaacaatattgggaaaacattaaacaagtacaccaagaaggtaaatatggttctattggttacagatacccttggaaagcagaagaatcattgagaatggttttgagaacccacacaactgctatctctgctgccatgttacataagttagctcaagaccctaaaccaaccagattgttttccatcgatagagttttcagaaatgaagctgttgatgctactcatttggctgaattccatcaagtcgaaggggttcttgctgggtatgacattactttgggtgatttaattggatttatggaagatttctttggtaagatgggtgttgataatttaagattcaaagcagcatataatccatatactgaaccatcgttggaaattttcgcttaccacaaggggttgaagaaatgggttgaaattggtaattctggtatgttcagaccagagatgttagaatcaatgggattacctaagaatttgagagtattgggttggggtctttctttggaaagaccaactatgatcaaatacggtgtttctaatattagagaattattgggtcataaggtttcattagatttcattgaatcgaatccagctgctagattagacgaacttttgtaa

SEQ ID NO: 6303 - DNA, 624 bp, Candida albicans
atgaataacgaatacgactatttatttaaattattattgattggtgattcaggtgtcggtaaatcctgtttgttattgagatttgctgacgacacatatacaccagattatatttctactattggtgttgattttaaaatcagaaccatcgagttggacggcaaaactatcaaattacaaatctgggacactgctggtcaagaaaggtttagaactatcacttcttcctattatagaggagcacatggtatcattatcgtgtacgatgtgactgaccaggaatcatttaataatgtcaaacaatggttacaagaaatcgaccgttatgccacaggtggtgtcatgaaattattagttggtaataaggctgatttgtctgataaaaaaatcgtcgaatatactgctgctaaagaatttgctgatgccttggacattccatttttagaaacctccgctttatcatcgaccaatgttgaacaagctttttacactatggcaagacaaatcaaagcccaaatgacaaacaatgccaatgccggaaatgctgccaatgccaagggcaaatctaatgtgaatttgagaggtgaatctttgacttctaaccaatcgaattcctgttgttaa

SEQ ID NO: 6304 - DNA, 759 bp, Candida albicans
atgtcttttgcaaacaaacaagatccaaaaactttagttttattcgatgttgacggtactttaactccagctagattaactatttctgaagaaatgaaaaaaactttagaaaaattacgtgaaaaagttgttattggatttgttggtggttctgatttatctaaacaagttgaacaattaggtccaaatgttttaaatgattttgattattgctttagtgaaaatggtttgacagcttataaattaggtaaagaattagcttctcaatcatttattaattggattggtaatgaaaaatataataaattggtaaaatttattttaagatatttatctgatattgatcttccaattagaagaggtacttttattgaatttagaaatggtatgattaatgtttcaccaattggtagaaatgcttctactcaagaaagaaatgattatgaaaaatttgataaacaacatcatattagagaaaccatggttgaagctttgaaaaaagaattccctgattttggtttaacttattcaattggtggtcaaatctcttttgatgttttcccaactggttgggataaaacttattgtttacaacacgttgaagatgaacattttgaaaacattcatttctttggtgataaatcttataaaggtggtaatgattacgaaatttataatgatccaagaactattggtcacgctgttaactcacctgatgacactattagaatcttgaatgaaacttttaaattacaatag

SEQ ID NO: 6305 - DNA, 939 bp, Candida albicans
atggaaagattacaaagattattaggccaaggtgccggattaggaggagcagcacccacacagagtgatgggcctgcgattgacaattcagagactgtttacatatcgtcgttggcgttgctcaaaatgttgaagcacgggcgtgctggtgtgccaatggaagttatggggttaatgttgggagagtttgttgatgatttcactatacatgttcacgatgtgtttgcgatgccgcagtcgggtactggagtttctgttgaggcggttgatgatgtattccagacaaagatgatggatatgcttagacaaacgggcagagaccagatggttgttggatggtaccactcgcaccctgggtttgggtgctggttgagttctgtggatgtcaacacccagcagtcgtttgagcaattgaacaagcgtgctgtggctgtggttattgaccctattcagtcggtcaagggtaaggttgttattgatgcgtttagaacgattgacaccacgacgttaatgatgggccaagagccacgtcagtcgacgtctaatgtgggccacttgaacaagccgtcgatccaggcattgattcatgggttgaaccgccactactactcgttgaacattgattaccacaagacagagtacgagaccaatatgttattgaacttgcacaagaagaactggcagtcggggttgaagttggttgactataaccacaaggaggttgagaatttggacaacacggagaagatggttagcattgccaagttgtataaccaaagagtgcaagaagagaaagagttgactgaagaccagttgaagacccggtatgtaggtaagcaagacccgaagaaacatttgtcggatactgctgagaagttgattgatgagaatgttagttcgttgctcaccagtaatatagatgctgtagccattcaatag

SEQ ID NO: 6306 - DNA, 1686 bp, Candida albicans
atgtcagctgaacccgaaataccaaaagttgaagttcccaagttagaagaatctgttactgaagatactccagccccaacaacagatgaccaaaacaaccagacgccgcaagtcattgatgttgaaaagctacaacacgaatttcaggaatcggccaaaagatacttggtggaacaaacagctcaagtgatcgttccatcatttgccaagtggtttgatttgagcaaaatacatgacattgagaaaaaatcgttgccagatttctttgttgaagatggctccggttataaatcatcacaggattacaagtacattcgagattttattgtcaatacttttagattaaaccccaaggaatatttgacaattactgctgttcgtagaaatttgtctggggatgtaaccaatataataagaattcatcaatttttggagcagtgggggttaatcaactaccaaattgaccctaaaaccaaatcatcagttttgggcccacaatatactggccatttccaaatcacattggatgcaccacaaggcttggtaccatttgttccagaaaatgccgaattgacaaaggcaactccatcaaatgttacaaagactgacgacttgaacaacgaaaatatacctaccgcaaaggaaaatgagttgccattgaatttggaaatcagacgtaatgtctatgcaactggggaaaagaagacaaattacaaaactaacaatattgttcattattcgtgcagtatttgtggtaaagatacaactgaggtcaggtatcacaacttgaaaataaaatcctacatgtacaacccaacatcaaccataaacaatgccagtgttttatgtgaaatttgctatgaccaaggcttgtttccactgagctttcattcgtctgattttattcaattgaaaagaaccgaagaaggagagaaatggagcgaacaggaaatcttgttattattagaaggtattgaaatgtttggaacttatgaaccaccatcttctactggcccagtaaatgtcaatgcaaacttgaacaatcaatgggataaaatcagtgaacatgttgctacgaaaaccagagaacagtgtatcatcaagtttatccaattaccaattgaggacaagttcttgacaaagttaataaaagaagaaaacgaaaaagacacaacaaaaagtgtagtatcacaaagcttggtacaggatattgctgccaaattagtttctactactgagggccgtgaatttatcctgcaaaatgctgaagaaaatttaaagcatgcacaattggagcaaacaaatttggtgaaccaagtaattgaattgacattggagaagttcaatttgaaattgaaaaagattgatgaattgcaagctaatttgctcaagtacgaaaatcaattgaacttagagagaaaacagattcttctcgaaagatgggtccaatttgaaaagatatccaagttgaaagaatcaaaccccgaattatccactgttttggatgacttgcttaaaccagtcaagatcaatgaaatacacaagtctgtcaaacagagtaatcaaaccgaaaatggcgacgataaaatggatgttgatgaaagcagtaatgaaaatgatgacaacacttccaagttgcccgtgagtgtcaaagaacccaaggcttaccaattttggtctggctaa

SEQ ID NO: 6307 - DNA, 837 bp, Candida albicans
atgaatcacgatccatacagttggggtagaccatccaatgacacttatggtccatacaattacaaaattgctcatgccaataacaaccaagttgagcagactacccataatttccctaaaatgaatactcaacaaccaataattactggtacctcagtgattgcttctaaattcaaaaatggggtgataatggccgcagaccatgttggatcgtatggttcattattgcgattcaataacattgaaagattgattaaagtaggtaaggagactgttgttggtatttctggagacatttcagacttgcagtatattgttagattgttggatgaattagaaattgatgaagaggtttatgataatgatggcggtgaatacttgagagcccccaatgtgcatgaatatttgtcacgagttttgtacaatcgaagatctaagatgaatccattatggaatgctatcattgttggtgggtttaacaaggaccgtactccatttttgaaatatgttgatttattgggagttacttaccatgccagtaccatggccacagggtttggttcacatttggctatcccattgttgagaaacttgattccggaagataaggattatgttaaagttgacgagcaacaagttagcaaagccatagaagattccatgagagttttgttttatcgtgatgctagatccggtgagaattattcggtggtgataatcaagcttgatgaaaatacaggtgaattaagctttcaatttatcaaggatgccaaagttcaaaatcaaagttggaaatttgccggggatattagaggatatggtagttcacaacaataa

SEQ ID NO: 6308 - DNA, 834 bp, Candida albicans
atgtctttacaaaaactcactgcagaaatatactcactatttggaaaaggagattatcaaggttgccaacaattacttgctccgattaaactagaattagtcaaacatgatttgttggttcctttaccatccaacaccaccgataaaaaccaaattaatgatttgagaattgcccaaagaattttggaaattggagcattatcgtcattattaaccaacaactattccggttttgagaattattttgctcagttgagaccattttactctaaccccaaattacataatttacaaaaagtccatatcaataccgatataacaaaaatcatttcattatacttgttatacttgttgagtcagggtttgatttcaaaattccatgttgaactagaagtgatttataattcatcacaatatgatgcccaacaagacaagtatttacaatttccaataaatttagaaagcaatttaatggaaggtaattacataaaaatctggaagttattaaaagaagagaaaaacttaccatgtcaagaatacacccattttgttgatactttgataaatgctttacgttttgaaattgccaaatctttggagaaaacttacgattcgattccaatttctaattgcaagaatttattatatttaccacaagaattgtccgatgctaactttgagaaaactttaaaggaaacttatcaagttgataattggaaattcgaggatggagttatatatttcactaagaatgaaaatgaaaccaatgttgataaccaatcggttataaagaatttattagggtacgctgaacaaatcgaatccatcgtataa

SEQ ID NO: 6309 - DNA, 1176 bp, Candida albicans
atgtctactccaattgtgcttgatcaaggtactggttttgtcaagattggtagagcaggaaccaactttcctgatcatacatttccttccatggtaggacgaccaattttacgagctgaggaacgaaacatactagtcccatcagatgttgaaatcaaagatataatgtgtgggtctgaagctagtcaagtcagatctttattgcaaatcaattatccaatggaaaacggtataattaaaaactgggaagatatggaacacttatgggactatgcattttatgaaaggatgaaaatcaatcctcaaggtcaaaaaatcttgttaacagaaccacctatgaacccattaaagaaccgagaaatgatgtgccaagtcatgtttgaaaaatacggatttgatggtgtttatgtggccattcaagcagttttggcattgtatgcacaaggtttgagttctggtgttgttgtggactctggtgatggtgtgactcatattgtgccagtttacgaatcggttgtgttaaatcatttgacgaaaagattggatgttgccgggagagatgttactagacatttgatcaacttgttgtttcgtcgtggttatgcttttaacagaacagccgattttgagactgttcgtcaaatcaaagaaaaattatgttatgtgtcctacgatttgggatttgatgctaaattggctcgtgaaactacaactcttgtggaaagctatgaattgccagatggtagagtcataaaagttggatctgagagattcgaagccccagaatgtttattccaaccacatttggtcgatgtcgagcaacctggtgttggagaaaccctttttaatactattcaatctgcagatgtggatattagatcatcattatacaaagcaattgtcttatccggaggttcttccatgtaccccggcttaccttcaagattggaaaaggaattaaaacaattgtggctaactagagtgttgcagggtgatgcttctagattggataaatttaaggtgagaattgaggatccaccaagacgaaaacatatggttttcattggaggtgcagtgttagccaatatcatggctgataaggatcatatgtggatctcaaaacaagaatgggaagaacaaggaccaagagtgttggaaaagttaggacctagataa

SEQ ID NO: 6310 - DNA, 1377 bp, Candida albicans
atgtcaagagaagatccaattaaggctgaaaaagacttttctgctactttagatgaacaattcccattgattgaaaagatctctgactacaagcaagcattagataagtatcttgtcttggagaaacagactcgtcagtcttccgatttggcttcatcaaaaagagttctcaacaagattgttacaacattggttgataacaacgattgggagtatttgaatgacttgataactatcttgtcaaagaaacatggtcagttaaagtcgtcaattcaagcatttatcaaagatgtgattgataatttggataaattggatgaaaacaacaagcaacaattagagttgaagatgaaattgattgaaactattagaacagtcacagacaaaaagatttttgttgaagttgaaagagccattgtttcaagacagttggccaaaatttatttgaacaaattgaatgatttggataaggcagtggaaatcttgtgtgatctacaagtagaaacgtattcgttaatgccattcagtgacaagattgagtatatcttagaacaaattcagttgactttacaaaagggggactatggccaagccaagattttgagtcgaaagattttattaaaatcgttgaagaactttgccaaagctgatgagtttaaggctacttatttgaagtacttgattgatattaacgtgtttgattatgattatatttcaattgttaagaatttgttattgttgattgagattccattgatcaaggaatcggcagagtacaaggagtatttggtgctggttatttactacatcattttgtcaacctacgatcctcaccagaacgatttaatcaacaaaatcaaatcaaaccccattttcaccaagaatgttgatgctaatattgtcaagttgttagatgttttcaccacaaacgagttgattcactggtcaaacatcgagtcgttgtacaagacgtcatttgccaattccaaaatatttgctgatgaaaagaactataaaaacttgcaaaagagaattattgagcataatctccgtgtgatcaacaagttttatcaatctattaggttagatagattagcgcaattgttgcaactatctgtcgatgaagctgaactgtatgttagcgaattggtaaaccaaggaatgattgttgccaagattaatcgaccacaaggacttgtgaaatttgacaaaaccaaacatattgaggggagtgatcctcgtacgagtgataaccatatcaacgcagtgttgaatgactggtgttatgatattgagaaattgttagaagaggttgacgctataggccatttgataaacaaagaagagatgatgtacggaatcaaacagaaaagttaa

SEQ ID NO: 6311 - DNA, 2529 bp, Candida albicans
atggcagggtcccagttaaaacaacttaaggctgctcttaaagacaaaggattaattggtcaaactaatgtttctcagaaaaagctgaagaaaaagaattctcaatcttccaccaccaataacaccaagaatattaatcgagatgaaaaattacaacaattaaaagaaattcgtgatcaatttaataaatttgatcaaaaaattaatcgatccaaacatgacatttctattattcatcaaggtaaatttgttaaagttggatcaaaacagcataattctctggctataaagaatggtaatatgcaaagacaaatgaaaatgcaatatgatttagaaaaattccaacatggtaaaactggtgggatattagataaaagatttggtgaaaatgattctcatttaagtaaagaagagaaaatgttagccagatttactaaagaacgacaatccgggtcatctaagaaaagaagtgttttcagtttagcaagtgatgatgaacaagaaccagacgaaagtgatggcgaagataatggtggatttatgttgactcatggaggaaatgctttatctttagatgatgaagaaactattaattatgttgatgaagattctttgcaacaacaaccgccaaagaagaaaagtaaaaatgaagtgatgaaagaaatcattgccaaatcgaaattttataaacaacaaagacaaaaagaatttgccaagactcaagatcaaattgatgaattagatgaagattttggtgatgtcatggatgatttaagaaatgtacaactgcaaatttctaaaaccactgccaatagtggtagtggtaaggctgatggagtcttttcaactaaaacacctgaacaaattgaatatgacaataaagtgagagaattaacctatgatagaagagcagttcccgcagaaagaacgaaaaccgatgaagaaatacgtaaagaacatgaagagaaaatgaaaaaattagaagctgatagattaagaagaatggaaggatttgttgatgatgatagagatactcaaggtgatgatttagataatgatttttgggctggtagtgatagagaaaatgatgaaaacgaagctgatggatttactattaagaattcagatcaagaaagtgatagtgaggaagaagaacaatatcaacctccacataaaagacaagttaaatctcaaaaaattactagtgtaatcatgccatttacaattgaagaatttatacaagaaatgtcgaatgttgatccaaataaacaaccagaatatgttaagaaaatatgtgaaacttataaaccaaatttagctgaggggaataaagagaaaatgagtaattttgttggcatattgtttgaatatattttacatattgccaatcaatatcaagattttgaaccatttgtgaaaatattaagaaaattggccgaatcatcaacatcttcaagagcaaccaccatcaccaccaccaccacaacaacaacaacaacaaaagcttacaatgaatcattagttgaaagagttcgtgaacatattaaacatattcaatcaagaatcgataagcaattgactcctggagatttagtatttttcaccataattgcatatttattttcttcctcagatcattatcatattgttatcactccaagtttgattttaattaatcaaatactaagtaatataatttatcatccgaaaaccgtgactgacattgctcatggagtttatttaatcgatgttttattaatgtatcaacgatttgctaaaagatatgatccagaaatcattagttttattgaacatgcattatttatgatgattcccgaagttgataaattggatactttgaaattattatcaatttctcctacagcagcaacagcagggagtatcaccgtgcaattttccatgaataaatcagaaaaaatatgttcacaggaacaaacattatcaattaaacaattatatgaagaagatttaaataaatccagtttaatcagtaaattaattcaattaatggataaatgtgttacattatggaaagaaaagtctagtttaattgaaattcttgaatcatttattagtatattaaaacatatcaccaaatataatgccactgttgctggtccaatattaactaaattcacaagattacatgctaatttggtgaaagatcgcaaaccattgacattacaacatcataaagccatcgccattgccacttttgcacctaaattcgaagaaaatttcaaccctgataagaaatcttatgatgttaatcgagaacgtcaagaattgaataaagttaaacatgaattgaaaaaggaaaagaaggcagcactaaaagatattcgtcaagaaaatagatttattgcacgtgaacaaatatcggaaaagaaaagaatgtatgatgattatcataaaaagatggccaatattgttaattcgattcaatcagaagaaggggctgaaaagaatcaatatgaaagagaaagaaaacaaaggaaaagaagatga

SEQ ID NO: 6312 - DNA, 3201 bp, Candida albicans
atgagttctggtttaaatttgtcctcattgaaggataaaatattcagtaaattaaatttacagaaagacaaccaaaccaaatcacaacaaaaatcaaagaaagcaagttcaaatgacaaagagatacaaaaagataaaaagaaaccagcaacaccagcaaaagcaaacgccaaaaaaactaaaggagttgatgaaatattgcgtcgtgaggcattagcattgggtgctactgacgaagatttgaagctagtagaaggtatcgaaagtgacgatgacaaaagtgaacaggaatttgacgacgactcgaaattggacaagaattttagtgctgatttgagtaagttcatgaaagggataggtttgggagaagaagaagctatggtagtgagtgaagaagaagaagaagaagctatggtagtgagtgaagaagaagaagaggaagttcccgagctagtcgaaggagaagaggaggaagaagaaaaagtgtcagaagatgatgttgttgaggaggaggaggagagcatcagcgagaaagagagtgaatcagaagacacttcagattctgagtctgaaaaagaggttgttgttaaagaggcaaaaattgataacaaaaagtccaaccaggaccctgataaggtgacagatctttcatcagtgtcaagttccaagttgattgttcctaatagaacagattggtttaatattgtcgaagtcccagcagaaacaccagaaaaattggacagatttgccagagaaagattattggaaagggcacaaaaaaccatcgaaaaggataataaaacttacttggaagaatttgcctcaaacacttcacaaaagaagttcttgtctcaaatcttgtctgatggtactttgaatgataaaatttcagcattgacattattgattcaggaagcacctttacataacttgaaagctttggataccttattggcatattgtgacaaaaaatcaagaacagctgctttgcaatctattgttgcattaaaggatttgtttgttaatagtttgttacccgatcgtaagctatttgcgtttgacaaacaaccattaagaaaagatgatagcgatattcagttggccatatattattttgaagatcacttgaaaaaagtgtacttcaaattaatccagatattggaaaagttatctcacgaccctatagtacatgtgagaatgacagttgtgaatcatatttttgacttgttaggtgctaagccggaacaagaagttaatttgttaaagttgggtgtgaacaaattaggtgatattgataataaagtgtctgccaaggcttcctatttgattttacagttggagcaagcccatccagctatgaaacaaattatcaccgatgctgttattgatgttattttccaaagcaataatgacgaccacgccaaatactatggtgtcacaaccttaaatcaaaccattttaacccgaaaggaacatgagttagccaattctttggtgaagacctactttgccttatttgaaaaaattttggtggaaagtgatggatacaataaagacactaaagacgataaatctattggtgactccaaaaagggtagaaagaataatcgtaagaacttcaagaaaggtaagaaaggaggtaagtccgttaaaattgaagagaagactgaacaagaactcgttgaagaaaagaatgctaaatttttctcagccttacttaccgggttgaaccgtgcattcccattttcaaaattgcccaacgaaatcttccaaagccatttggacactttgtttaaaatcacacacagtagtaattttaacacttcgattcaagcattggttttgattaatcatatagtgtctgaacaaggtttaaattctgatagatactacagaacattgtatgaatcattattggatcctagattggctaattcgtcgaaacaaggaatttacttgaatttactatttaaatcattgaaaaacgacattgctaatataccaagagtattggcatttgtgaaaagaatgttgcaaatatgttcacattggttgaatgttggtgctgttgcaggtatgttatacttaatgatggagttatcgaaaacaatccctgaaatttctgatttattagtagaatttgcttccagaccagacgatacagaagaatcatcagagaaggataccgaagaagttgataaaaccaaggatgaaaacaaagacatagagtatgacccaagaaaaagtaatcctaaatttgctaatgccaatagatcttctttatgggaaatacaccaattcttaaatcattatcacccaacaatcgctatttatgcatcttcgttcttggatggaacagaacaagttaaaccagatttgggtttatacaccttatcccatttcttggatcgttttgtttataaaaatgctaaacaaaaaccacaaacaaaaggttcatctattatgcagcctttgggtggtgctcatacaggatctttgttggtccgatctactaatcttgtcgataccacagttcccgtgaatactgaaaactggcttggtaagaagattgaagatatcaaaccagatgaaaaatttttccatcaatacttcagtactaaagttaacaaattaaagaccaagaaagatgataagaaatcaaaggaagaaggtgataatgatgatgacgaggaagacgataatgaaatggatgacgacgaagtctggaaagctttggttaaatcgcgtccagaggtagaggatgcttccgaagatgacttttcagattttgatgaagaagattttgctgacatggatagtgaagaagagaatgaagaagatgcgaacgaagaaaaagaggatgtggaaggtgaatttagtgatgctaaacttgaagcagaacttgatggtgacgatgatgaagaattagatcaagatgattttgatgatgatgaaaaggccatgtttgcaattaacgatgaagatgagtttgaagatgacgaaatagagttgaagatgttgggagatgacgacgatgatgaagaagaagaatctgaagaagaagaagaggaaacgaaaaaacgtgcaagagaaaatgattcacattcaaagaaaaagtcaaagaaacagagagtgaaagatttaccaatatttgcttctgctgaagattatgcagaatatttggactctgacaatgaataa

SEQ ID NO: 6313 - DNA, 1695 bp, Candida albicans
atggtagaaaaaaatgggaagctttacctgagaaatattccaaacgctccagaagataatagacctttaagtgagagaagtgatcgagagtatggtaaattgacatcaaacgattatttatatgtgtcaaaacatccattgggagagccattaccaactccaatagatgatgaaccaccttacattatattaattgccacatatatcaattatttaattttaattatcattggtcatactcgtgattttttcggtaaaatttttaaacctaaagaatacgaacatttagtggaaaaagatggttatgccccctggtatgatgggtttgaaagtttttatgttcgtagattgaaaactagaattgatgattgttttgctcgtccaatccatggagctcctggtcgttatattaaatgtttcaatcgttttagaagtgggaaaactggttatttatatgacggcacatccaaggaatgtcttaatttatcatcgtataattatcttgggtttgctcaatcaagtggtgtttgtactgatttttctgttaaatgtgttgatgattatggaacctctggttgttcaccaagactttattgtggaaccactgatttgcaccgtcaatgtgaagaggtcattgctgattttgttggtaaagaagatgctatcattgtcagtcaaggttacgggactaatgccaatctatttgcgtcaattgcagactctaaaactttggttatatccgatgagttaaatcatgcatcaattagatttggaatcagattatctggggcttcggtcaaagtgtttaaacataatgatatgaatgatttggaaaaccttatacgtaatcaaattgctcaaggtcaacccaaaactcataggccatggaataaaatcattgttgctgtcgaagggttgtattccatggaaggtaatatgtgtaatttgccagagattgttagaattaaagacaagtacaagtgctatttgtttgttgatgaagcccattctattggggcgttaggacctgaaggaagagggatttgtgattatttctcagttgacccagctatagtcgatgtattaatgggtacattgaccaaatcttttggtgccactggtggatatattgctggtgataaaaccttgattgaaaaattgagactcaattatataagtcaaagctattcagaaggagtgccaccgccagttttaggacaaattatttcttcgttgaaagtgattaaaggtgaattaaatcctggtgaaggtaaagaaaggttacaaagaattgcctttaattctcgttatttaagattgggtttgaaaaaattgggatttattgtatatggagctgatgattctcctgtgataccatttttattgtttgtgccttcaaaaatgccagctgtatctcgtatgctttatgatatgggtatagcagttgttattgttagttatccagcaacccccttgacgagtgcacgtgccagattatgtgtcagttcggcgttgaccaaagaagatttagattatgtgttggccaaaattagtgacattggtgatttggtatttttgaaattcagtagtggtattgctggtggatgtaaagttcctggtgaaccacctcggtggtcaattgaagatgttttagctactaatgtcgaagattgtaaaaaaccaaaactaatgtaa

SEQ ID NO: 6314 - DNA, 2247 bp, Candida albicans
atgaaaaatcacatcttgaaagttcttttaagcaagacgaacaaccaacatggctccaaaactgaaaaagcaagcagtacgcaatcgaaatcgaagaagctgaaagacttagttgatgagagatttcaagcaattgttttgacagactccttcgaaactaggtttatgccattaacagcggtgcatccaagatgtttgttaccattagccaatgtccctttaatcgagtacactttagaatttttagccaatgccggagtcaatgaagtttaccttatgtgttcagcacatgctgatcagattcaagaatatattgaaaactccaaatggatgggtgataactcgcctttcagtgtgaccacgatcatgtcaattgaatcaagatctgttggtgacacgatgagagatttggacaatcgtggcttaattgctggtgatttcttattagtatctggggatgtggttaccaatatggattttagcaaggcattgcaattccataaacagaaaaaagcacaagataaggatcacattgccaccatggtattgaatcaggcttcgcctttgcatagaacaagatcacaaatagaccctgcagcatttgtgttggacaaggagactaatcgttgtatattctaccagagtatccctccagtaagtggtaaaaagacatgtatatccattgatccagaattgttggaagatttccaaggtgaactccaggtgcgcaatgacttgatagactgtcacgttgatatttgctcgcctcatgttccacaaatatttcaggaaaactttgattatcagtatcttagaagtgatttccttaaaggggtgttgacatcagatttgctcaagaaaacaatttacgcctatatcagtaaggatagttccgaatatgcagcaagagtggaaagctggagcacttatgatgctatatctcaagacatattggcacgttggtgttatcctttggttcctgattccaaccttgttgaaggcaattcttattcctacgaactcaataacatttacaaagaggataagattatattggcacaatcttgtaagattggcacttcaacttcaattgggagaaactctagtgtgggtgaaggcacacagataaagaattctgttattggaagaaattgtaccatcggtagaaatgttgtgattgagaattcctatatttgggacaatgctgtcatcaaagacaattcagttttaaatcgctcaatagttgcagcagatgcacaaattggaaataatgttacgttgtcacctggttcagtaattggttttaatgtaattattggcgacgacaaagtaattccacacaatgtaaagattgttgaaactccgatcgttacggagaatgagtttggagattttgatgacgagagcaacagtgaagacgaaaatgaatatgaagatggaaatgctgtgccggtcttggcagttaaagatgttgaattggttggtgaaacaggaaaaggatttgcatatgagtcagaaatagagagtggcgacgaagatgatgaagaatttgttgggaatggcacttactcgggtataatctaccaaatgaattctttgaatgtctctgatgactcgattgcttctgttagcaataagaaagtcaaaaaacattctcatagacgtagattgtcgatgaattctatgatcagtgataatggaggagcatttgaaagtgatgaaggtgaagaagaagaagacttcggtgtagaagggttggccacggttacacgagctattgaaaataaccatgacattgacactgctttgttagagttgaatacgttgagaatgtcgatgaatgtcacttatcatgacgtaagatcggtcaccacacaagctttggtgaataagattgttgactttataacaaccggtaccttaactccacaagaagctgctaccaagatttttactaaatgggggatcatgtttaagagacaagtgtttagtccagaggaagaagttgatttattgaatattgtggaagaaaagtcttccgtattggacaaagcgtataatcagattgtgttatttcttggtgtaaaatcgttttacgatatggaagtcgttgaggaagaaaatattttaaaatggtggaacgatggtgagaacgatgaggtgagaacgttagctgccaaatttattacctggttacaagaagctgacgaagaagatagtgatgaggatgatgaggatagtgaatag

SEQ ID NO: 6315 - DNA, 495 bp, Candida albicans
atgtcatctcctaaggttattattgtttcttcagataatgaaaagttcccagttgaaccaaagattgctgaaaagtccattttgattaaaaacatgatcaatgatttacatccagacggattggaagaagattttgaaattccaactcctaatgttagagccaatgtattatgtaaagtgttagaatggtgtgaacatcataaaaacactgtattccaagatgatgaagatgaagatgctaagaaatctgtgcctgttgaagaatgggacagaaatttcttgaaagttgatcaagaaatgctttacgaaattatcttagctgccaactacttgaacatcaaaccattattggaaagtggatgtaagatggttgctgaaatgatcaagagtaaatcaccagaagagttaagaagaacttttaacattatcaatgatttcagtcctgaagaagaagctgccattagaaaagaaaatgaatgggctgaagatagataa

SEQ ID NO: 6316 - DNA, 1605 bp, Candida albicans
atgtcatacgacgatatagaaaatgccactcctgatattgttattgggagtactatagaggaacctgaagaagattaccaagtggaaagtgacaatgagttacaagccgcagaccatgagtcatcgcaaataaatgaagaatcagccaaaggcaaaaagtcagttgcatttactggattggatgaagacgaggaaaatgcagaggaattggccagaaaggagtttgaagaaggtggtggattgcctgaacaaccagaaaacccagatttcaatgagttaacacctttatctcccgagattatcaacaggcaagccaccattaatattggtaccattggtcatgtcgcccacgggaagtctactgttgtcagggctatctctggtgtccagaccgttcgtttcaaggatgaattagaaagaaacattactatcaagttaggttacgccaatgccaaaatttacaaatgtgataacccagagtgtccagaaccagattgttacagatcattcaaatcagataaggaaataagaccaaaatgtcaaagagctggctgtgacggtcgctacaaattgttaagacatgtctcttttgttgattgtccaggacatgatattttgatgagtactatgttgtcaggtgctgccgtgatggatgccgccttgttgttgattgccggtaatgaaagttgtccacaaccccagacttctgagcatttggctgccattgaaattatgaaattgaaacatgttattattttgcaaaataaagttgatttgatgagagaagaatcagccttggaatacgaaaaatctatcattcagtttattagaggtacaattgccgataatgctccgatcgtgcctatttctgctcaattgaaatacaacattgatgcagtgaatcaatttattgttaactacatacctgtgccaatgagagactttactgcttcaccaagattgatcgttatcagatctttcgatgtgaacaagcctggtgcagatgtagacgaattgaaaggaggtgttgcaggtggttctattttgactggtgtttttaagattggtgatgagatcgagattagacctggtatcgtcaccaaagatgatcaaggaaagattcaatgtaaacctatattctcgaacgtggtttccttgtttgctgagcataacgatttgaaatttgctgttcctggtggtttgattggtgttggtactaaagttgatcctacgttgtgtagggctgatagattggttggtcaagttgttggtgcaaaaggaaacttgccctctatttacgctgatattgagataaactatttcctattaagaagattgttgggtgtcaaaactgaaggtcaaaagcaaggtgctaaagttcgtaagttggaacaatctgaagtgttgatggtaaatattggttctactgcaactggtgctagagtggttgctgttaaagcagatatggctcgtttacaattgactacaccagcctgtacagaaatcaacgaaaaaattgcgttgtctagacgtattgaaaagcattggcgtttgattggttgggccactatcaagaaaggtacagcattagaaccaatttcttaa

SEQ ID NO: 6317 - DNA, 1350 bp, Candida albicans
atggacgaaaactacgacgttattgttttaggtactggcttgaccgaatgtgtcttgtccggtatcctctccgttgaaggcaaaaaggtgttgcacatcgacagacaagacttttacggtggcgaatcggcctccttaaacctctcccagttatacggcaagttcaaaccaagctcccaaaaacccgaactcaaaggcagagacagagactggtgtgttgatcttatccccaagttcttgatggccaacggcgagttaaccaacatcttggtcaacactgatgtcacccggtacatggaattcaaacagattgctgcgagctacgtctacagaaacggcagaatcgccaaagtcccctccaacgccaaggaagcattggcttcgtccttgatgggcatttttgagaaaagaagaatgaagaggttcttagagtttatccaaaactacgacgaagccgacgcatcgacccaccaagggttcgacttggacaaaaacaccatgaacgaaatctacacttattttgggttggaaaacggtaccaaagactttattggacacgccatggctttgtggtcgaccgacgactacttgaacgaagtcgcccgtcctacttacgaaagaatcatgttgtatgcttcgtctgtcgccaagtacggcaagtccccgtacatctatccattatacgggttgggcgagttacctcaagggttcgccagattatcggctatctacggtggcacatacatgttggataccccaattgacgaggtattgtacgagggcgaaggtcccgacaagaaatttgctggtgtggtcacaaaagaaggtaccgccagagcacccattgttattgctgacccaacctacttccctgaaaacgttaaaaagaccggcgctaaagttatcagggccatttgtattttggaccaccccgttccgggtgttgagttagactcgttgcaattgattatcccgcaaaaccaagtcggcagaaagcacgacatttacgttgccgtgttgtctgacgtccactgtgtcgttccgaaggggtactaccttgctattgtttccaccatcattgaaaccgacgcaccgcacgccgagttagaaccggcattcaaattgttgggcccaagagtcgacacattaatgggaattgccgagttgtacgagccaattgacgacggtaccaaaaacgggatctacctctccaagagctacgacgcctcgtcacatttcgaaagcactacagacgatgttaaggatatttattttagaattactggcaaaccagtggaattgaagaaaagacctactgccgaagaagaagaggctctccaaggtttatag

SEQ ID NO: 6318 - DNA, 2298 bp, Candida albicans
atgaagttctttattgacgacttacctgtactattcccataccccagaatatacccagagcaatattcgtatatgtgtgatatcaaaaagaccctagatgtgggtggcaactgtatattggaaatgccctcagggactgggaagacggtctcgttgctttcgcttacggtggcgtaccagatgcattatccggagcataggaaaatcgtttactgctcgcgtacgatgtcggagattgagaaggcgttgattgaattgcacaagttgatggagtttagggccaacgagttgggagaggtggaagattttcgtgggttggggttgacaagtagaaagaacctttgtcttcacccgacgatttcaaaagaacgaaaaggggtggtggtggatgaaaagtgcaggagaatcaccaatggacaactaaaggaaaagattgaaaagggcgtgcctacagaggatagtttgtgttcgttccatgaaaagttgtacgatttagagcctcataatttagtgccgccgggagtctactcattcgatgcattgatcaagtattgcaaggaagaaggaacgtgtccatactttacagtaagacgaatgatcccgttttgcaatataatcatctattcgtaccattatttgcttgatcccaagattgctgaacgtgtttcgcgtgagttgtcaaaagatagtattgttatatttgatgaggcgcataatatcgacaatgtctgcattgagtcgttgtcgttggacttgactgatgagactttgaagaaggcgtcacgtggtgccaataagttgggtgaggccattgaggatatgaaggcgcaggatagtgaaaaattgcagaatgagtatgagcagttggtggaagggttgcgacaggccgagattgcacgagaccaggaattgtttatggcgaacccggtgttgccgcaggacttgttagatgaggctatacctgggaatattcgaaagggtgaacactttattgcgtttttgaaacggttcattgagtatttaaagacgaggatgaaggtgttgcatgttattagcgagaccccaacaagttttttacagcacttgaaagagttgacgtatattgagaggaaaccgttacggttttgttccgagaggttatcgttgttggtgagaacgttggaggtgacggagattgacgactttaatgcgttgaaagatattgctacgtttgccacgttggtgtcgacgtacgacagtgggttccagttgatactagagccgtatgagactgaggggagtactgtgccgaatcccattttgcattttacgtgtttagatgcgtcgattgcgatcaagccggtgtttgacaggttttcatcggtcattattacgtctggtactatatcgccattggacatgtatccgaagatgttaaaatttgaaactgttatccaggaatcgtatgccatgacgttggcgcgtcgctcgtttttgccaatgattgttaccaaagggtctgaccaagtgtcgatatcgtcgaggtttgagattcggaatgacccgtcggtggtgagaaactatgggtcgttgttgattgagtttgccaagatcactccagacggtatggtagtgtttttcccgtcgtatctttacatggagtcgattatttcgatgtggcagagtatgggggttttggacgaggtgtggaaacacaagttgattttggtggagacgccggatgcgcaggagacgtcgttggcgttggagacatacagaaaggcgtgttccaacggaagaggggcagtgttgttgtcggttgcgcgtggtaaagtttctgaagggattgattttgaccaccactatgggaggacggtattgatgattggtataccattccagtacaccgagtcgaggatcttgaaggcgagactagagtttatgcgagaccatttccaaatcaaggagaatgactttttatcattcgatgcgatgagacatgcagcgcagtgtttggggagagttttgagagggaaagacgattatgggattatggttttggccgatcgaaggtttgcacggaagaagaaccagttgccgaaatggattgcgcaggcgttgaatgattcagatacgaacttgtctacagatatggcgcttgcaactgcgaaaaagtttttgcgtagtttggcgcagccaactaacccgaaagacctggaaggggtatcgatatggaatatcgagcagttgcaggagtaccaacagcagtttcaaaaagacgaaatggatattgatgaggaggatttagatttgttgtga

SEQ ID NO: 6319 - DNA, 3723 bp, Candida albicans
atgggtagattaataggattagaactattcaatttcaagtcttataagggcaaatccattattggatttggctcctcgtactttacatcaatcataggacctaatggggctggtaaatcaaacatgatggatgccatttcctttgttttgggggttaattcttatcatttaagatctcagaatttgaaggatttgatttacagaggaagaagaaatattgacactgatagtactacattagatgcaattgaacaggatcccaccagtgcttacgttatggcgacttacgaaaaggatgatggagaaattttgaaattaaagagaaccattaccgcttctggaaatagtgattatcaaataaatggtcaatcagtgacaatgttgaattatagtatggttctaaaacaggaaaatattttgatcaaagcaagaaactttcttgttttccaaggtgatgtagaaacgattgcatctcagaatccaaaagatttgaccaaattgattgaaaccattagtggctcgaatgaatacataaatgaatatgaaagattgaaagaagaacacgaaaaagcccacgagttgactacttcggttttctcaagaaagagaacccttaattccgagtcgaaacaatataaagagcaaatggctgaacaacgtcaatttgaagagaaaattattaccaaaaatgatactgtcaaaaagatcaatttgtataagcttttccataatgaaaagaaacacaatcaattaaaagatgaaattaaatcaaaaaacgaggagttgaaacttgccaagaaagagttatcgaataaggagaaaacatacaaatccataatgacagattactcaagcagtgttttgaatgccaaaaagcaaaagcaacaaacagaggcagctcaacagaaaatcgactcaacgaaacgtgaattaattccagttgaagctaaccagagatcattatcgaataaaatcaatttccataaacttaaggttggtgacttggtaaaggatattgctagacaaaagacgcaagtttcctcagtggaaagacaattgagagatgctcaaagaatgtttgatgattttcaagcaaaaatagctgcagctgttgcatcatctacgaatatttcaccagaggcccagaaagagtatgaagagttgaggtctaagtttttagcagagaatggatcagaactagaagagcagatttcgttgttgttgaacaataaggatagtttgaactcagcaaagtcaaatcttgagaaccagaaaactaatgctgaaaatagaattgcggaattggaatccattgtagccactgacttgaaatcgaaattacacgatgtttccaatgaaatcaatgaagtgcttgacaaaaaaagtgacaaagtggaagcacgaaatgctcttattaaacagaaagatgaattcaaccacgaagaactaaaattaaacactaggttgagagatgtcttagttaagctcgacgagttagcttcccaacagagagaatcaaacaaacaaaaaaagttgagagagaatgttgctacattgaagagacttttcccacaaggtgcgattaaaggtcttgtatacgaattagttcgtcccactcaacaaaagtatgagtcagctttggcaacgttgttaggaccaaactttgacagtattattgttgaatcatctgcagttgcgtataaatgtattgatattttgaaagagagaagagcaggtgttgctacgtttattcctttggattcaatagaaactgatataatcaatttaagtcacctcagatccattcatccttcggcattacctggtgttgatattattgagtaccaagataaatctttggaaccagcagttaattatattattgggaacacagttgttgtcgatactattgacacagcaagaaatttgaaatggcaatccaatacccgttttgacaacaaaattgtaacattacaaggatcagtgattcacaaatctggtttaatgaccggtggtcaacagcaacagaaatcatcagcaagtttaagttggagtaaacaagaatggactaaattaaacgaattgaaagaagagttgaatcaaaaaattttcaaattacaagaaaaaagaccaaaagatttagagattaatttattagcagaagaaataggagcactagatgacaagttgccagtgttgcgtaatcaaaagaccagtattgaacgaattatcaaagatagagaatctgaaattgaattccaaactgggttatttaaagggtttgataaatccatacaagagaagatgaatgaaataaccaagataaatgggaaaatcgacaaagttaatgaaaaaatgaaatcaagcaaggatttgatatttgctgaattttgtgaaaaatatggttttgttaatggtattgaagattatgaaaacatgcatggaagcacattaagagtgagagcaaaagaaagagctcaattctctaaaactatttccgttttacaaaacaaattggatttcgaaaaagaaagattgaaagaaaccaaagatcgaagaaaaagtattgaaagtttgattgttgatttagaagatgatttagcaaaagtattaacagaaaagaagaaattagaagaatctttggataaagcagaggctgaatatgaagtgttgcaaactgaaatatctcaatttgatgatctgatgcaatctcaattgaaaacttcgaaatctattgaaagcgatcttgacgatagtaaactgctagtttccactttggttaaggagattactcaaatagaggaaaacttattgaaaacagattctgaaagagcaaatgttttgaggaattgtaaaattcaaaatatcaatttgccgttgattgatggggatttggatagtatttcagtaggtgaaaacttggaaagctccataaaggaagtctataaaatagaacttgattatgaaatgctagaagagagatttaaggaagtttttaacaataaactccagagtgaattagaagtcatattacaaaatactattagtgatttggaaaaattgacacctaatgctaaagccatagaaagattgcgtgaagttgaaactaagttacgaaattacgataaagaatataacgttgccagacaaaaagagcgacaagtaaacgaacgtttcaaaaaagtgcaagagaaacgttatgataaatttatggatgcatttaatcacatttctggttgtattgattcaatctataaagagttaaccaaatctgccatgtcaccattaggtgggtcagcatacttgacgttggaggatgaagatctgccatttttgtcgggtataaaataccatgctatgccaccaatgaaacgattcagagatatggaattgttatccgggggtgagaaaactatggcggccttggcacttttatttgctattcattcctatcaaccttcaccattttttgttcttgatgaaattgatgctgctttagataacgccaatgttgctagaattggaaattatatcaagaaatatgctgggcctaattttcaatttattgttatatctttgaaaaattctttatttgaaaaatcagatgcgttggtaggtatttatcgtgaacaaagagaaaacagttccaagactgtaactttggatcttagagaatatccagatgatgatgttcctttgagtactgtcactgccactacatag

SEQ ID NO: 6320 - DNA, 1053 bp, Candida albicans
atgagtgaatctttacagtcagtattaatcattggaggatcaggatttttgggacttcatttaatagaacaattttatagacattgtcctaatgtggcaatcacagttttcgatgttcgtcctttacctgagaagttatcgaaatatttcacatttgatccttcaaaaatacaatttttcaaaggtgatttaacttccgataaagatgtctctgatgctataaatcaatctaaatgtgatgtaattgttcattcagcttcaccgatgcatggattacctcaagaaatttatgaaaaagttaatgttcaaggaaccaaaaatttgctttcagtagcacagaaattacatgtcaaggctttagtctacacctcctcagctggtgtgatatttaatggacaagatgttattaatgctgatgaaacttggccataccctgaagttcatatggatggttataacgaaacaaaagccgcagctgaagaagctgtcatgaaagccaacgataatgatcaattgcgtactgtttgtttacgtcctgcgggtatttttggacctggtgatcgtcaattggttcctggattaagagcaagtgctaaattaggacaactgaaataccaattgggtgataacaataatttgtttgattggacatatgttggaaatgtagccgatgctcatgttttggcagcacaaaagattttagataaatctacaagagacgacattagtggtcaaacattttttataactaatgactcaccaacatatttttggacattggcaagaactgtttggaaaaatgatggttacattgataaatattacattaaattgccatatccagtagcattgactttaggttatattagtgagtttgttgctaaaaatattttgaaaaaagagccgggtattacaccatttagagttaaagttgtgtgcgccataaggtaccataatattgctaaagctaaaaaattattaggctataaaccagaagttgatttggaaactggtatcaactacactttagattggatgaatgaagatttgtaa

SEQ ID NO: 6321 - DNA, 2688 bp, Candida albicans
atgagtgctactgaaccaaccaacgaaaaggttgataaaatcgtctccgatgatgaagacgaagacattgaccaattagtcgctgatttacaatctaacccaggtgctggtgatgaagaagaagaagaggaaaatgactcttccttcaaagccgtcccagaagaattattgcaaactgacccaagagttggtttgactgatgatgaagtcaccaaaagaagaaagagatacggtttgaatcaaatggctgaagaacaagaaaacttggttcttaaattcgtcatgttctttgttggtccaattcaattcgttatggaagccgctgctgttttggctgctggtttagaagattgggtcgatttcggtgttatctgtgctttattgttattgaatgcttttgttggttttatccaagaataccaagctggttctattgtcgatgaattgaaaaagactttggccaactctgctcttgttgttagaaacggtcaattagttgaaatcccagctaacgaagttgttccaggtgatatcttgcaattggaagacggtaccgttattccaactgatggtagaattgtttctgaagattgtttgttacaagttgatcaatctgctattactggtgaatctttagctgtcgacaaaagaagtggtgactcttgttactcttcttctactgttaagactggtgaagcctttatgattgttactgctactggtgactctactttcgtcggtagagctgctgctttggttaacaaagcttccgctggtactggtcatttcactgaagtcttgaacggtattggtactaccttgttggtctttgtcattgttactttgttggtcgtttgggttgcttgtttctacagaaccgttagaattgttccaatcttgagatacactttagccatcactattattggtgttccagttggtttgccagctgtcgttaccactaccatggctgtcggtgctgcttacttggccaagaaacaagctattgtccaaaaattgtctgccattgaatctttggctggtgttgaaatcttgtgttccgataaaaccggtactttgaccaagaacaaattgtccttgcacgaaccatacactgttgaaggtgttgaaccagatgacttgatgttgactgcttgtttagctgcttctagaaagaagaagggtttggatgccattgataaagctttcttgaaatctttgatcaactacccaagagctaaagctgctttgccaaaatacaaggttattgaattccaacctttcgatcctgtctccaagaaagttactgctattgttgaatcaccagaaggtgaaagaattatttgtgttaagggtgccccattattcgtcttaaagactgttgaagatgaccacccaatcccagaagatgtccacgaaaactaccaaaacaccgttgccgaatttgcttccagaggtttcagatctttgggtgttgccagaaagagaggtgaaggtcactgggaaattttgggtattatgccatgtatggatccaccaagagatgatactgctgccacagtcaatgaagctagaagattaggtttaagagttaagatgttaactggtgatgccgttggtattgctaaagaaacttgtcgtcaattaggtttgggtactaacatttacgatgccgacagattaggtttgtccggtggtggtgacatggctggttctgaaattgctgatttcgttgaaaatgccgatggtttcgctgaagttttcccacaacataaatataatgccgttgaaatcttacaatctagaggttacttggttgccatgactggtgatggtgttaacgatgccccatctttgaagaaagctgatactggtattgccgtcgaaggtgctactgatgctgcccgttctgctgccgatattgttttcttggccccaggtttgtctgccattattgatgctttgaaaacttctagacaaattttccacagaatgtactcttatgttgtttaccgtattgccctttcattgcacttggaattgttcttaggtttatggattgctatcttgaacagatctttggatattaacttgattgtcttcattgccattttcgctgatgttgccactttggccattgcttatgataatgctccatacgatccaaaaccagttaaatggaacttgccaagattgtggggtatgtccattgtcttgggtgttattttggctattggtacttggattactttgactactatgttgttgccaaaaggtggtattatccaaaactttggtggtttagatggtattttgttcttgcaaatttccttgactgaaaattggttgattttcgtcaccagagctcaaggtccattctggtcatcaatcccatcatggcaattatctggtgctgtcttgattgttgatatcattgccacttgtttcaccttgtttggttggtggtctcaaaactggactgacattgtcactgttgtcagaacctggttttggtctttcggtgtcttctgtgtcatggggggggcttactacttgatgtctacttccgaagcctttgacaacttctgtaacggtagaaaaccacaacaacacactgacaagagatccttggaagatttccttgtgtccatgcaaagagtatctactcaacacgaaaaatctacttaa

SEQ ID NO: 6322 - DNA, 744 bp, Candida albicans
atgtccaattcagcaggttttgatagacatatcactattttttctcctgaaggtagattataccaagtagaatatgcctttaaagctatcaattcagcaaatatcaccagtttaggaatcacaggtcaagattccgccgttattatatcacaaaagaagatcccagataagttattagatcctaaaaccgtgtcatatatttttaaaatcactcctagtataggaatggttgccactggatcagttgctgatgctagagctcaagccatgagagcaagatctgaagctacagaatttagatataaatatggttacgaaatgccggtggaaagtttatcaagaagaatggcgaatatatctcaattgtatactcaaagagcttatatgagaccattgggtgttgctttaacttttattcaagttgattttgctgatgaaggtagaggtccacaaatttttaaatgtgatcctgctggatatttcactggggtgaaagccgtggccactggtccaaaacaacaagaagcaacgacttatttagagaaaaaattcaaaaaaaccgatgctgttaaaggagattggcaaaaaactgttgaatttgcaataattgccttgagttctgtgattggaactgaattcagaaaaaatgatattgaaattggtgttgccactgaaggagaatttagaattttgacaccagaagaaatagacgaaagattgatttcaatagctgaacaagattag

SEQ ID NO: 6323 - DNA, 2256 bp, Candida albicans
atggcttctaccatatcatctaaacctcaattgaaagtattggggatagatgttgaactgattagagttttattaaaagttattatatttatatcgatagcaggtgcagctatttcttctcgtttattttccgtgattcgatttgaaagtattattcatgaattcgatccttggttcaatttccgagcaaccaaatatttagtcactcattccttttatgaatttttgaattggtttgatgatagaacttggtacccattgggaagagtcactggtggtactttatatcccggtttaatggtgacttcaggtgccatttggcatattttacgtgattggtttgccttacccgttgatattagaaatatttgtgttttattagcaccagttttctcgggattaactgcaatttgtacttattttttgactaaagaaatgaaggattctagtgcaggattattggcagctatatttatggggattgccccaggttatatttcaagatcagtggctggttcttatgataatgaagcaattgccattactttattaatggcaacattttatttctggattaaatcaatgaaaatgggttcagttttctatgccacattgacagcattattctatttctatatggttagtgcttggggtggatatgttttcattaccaatttgattccattacacgtatttgtcttgattttcatgggtcgttataatgccaaactttacactgcttatactacatggtatgccttgggtactttggcatcaatgcagattccattcgttgggtttttaccaattagatcaaatgatcatatggctgcattaggagtatttggattgttacaattagtggcttttggtgattatgttaaatcaaaagttccaaccaaacaatttaaatcattcttgatagtttccattgtacttgttgttggattaggtattggtggattatttggattaacagcaatgggttggattgctccttggacaggtagattttattccttatgggatacaaattatgccaagattcatattccaattattgcttctgtttctgaacatcaacctactgcttggccagcattctttttcgatactagtatgcttatttggttattccccgctggtatctatttatgtttccaagaattgaaggatgaacacgttttcattatcatttacagtgtattgtgttcttattttgctggtgtcatggtaagattgatgttgactttgactccagtcatttgtgttgctgcagcaattgccttatctaaattgtttgatgtctatttggacattgttgatttgttcactgagaaagttggaaagtatgatgatgacgttagtgacgaatccaagagctcaaccaaaaaatcaagttccagatttccaattgctggatatttgtcaaaagttttggttttactgacatttacattttaccttttctactttgttttacattgtacttgggtaacatcgaatgcttattcatcaccatcagttgttttagcatccagaaacccagatggctcacaacatatcattgatgattatagagaagcctattactggttaagaatgaatacaccagaagatgccaaagttatggcctggtgggattatggttatcaaatcgggggtatggctgatagaaccacacttgttgataacaatacatggaataacacacatattgccactgttggtaaggcaatgtcttcccctgaagatgtgtcgtatgaaattttgagacaacacgatgttgattatgtgttagttatatttggagggttattgggttattctggtgatgatattaacaaattcttatggatggtaagaattgctgaaggtatctggcctgatgaaatcaaagaaagagactactttactgaccgaggagaatataaagtggataaagatgcatcactggcaatgaagaattctttgatgtataagttatcgtatcatagattcactgaattgtttggaggtagagatggtgttgatagagttagaaaccaacaaatcccagccaatgaagtaccgaaattgaatgttgttgaagaagccttcacatcagaaaattggattgtgagaatttacaaagttaaagatttggataatgttggtagagatttacatcaagctactgcttttgaagaatcatcatccggcacttccaaaagaaacagatccataaagagacctaaattggaagtaagagagtaa

SEQ ID NO: 6324 - DNA, 831 bp, Candida albicans
atgtatcgaaattggttgtactttggaagagattctatcgataatttgttaaataattatagttttttgttaccaagaatcaggaaaactagacagctcaaactaaatatggatagtaaaagcacttgtgtttcaataggtaaatttccatttgattacactgaagaacaggtgcgggatattgcaagatcagttggaccagtattagatgtgaagttattatttgatgaattaacaggtaaatccaaagggtatgccattataaattatggagataatgaaactgcgtcatcagctgttcgtaatctaaattatatgacattgcctaatggtagatttctaaagtgttcatttgtgacagattatgacatgtcgagtaaggaatcagtaaaattgccacctttgccacttgggatacaaatacatcctaatcagaatgcatcacaggttatatctactatactatcgaatattgattccaattcggcactacagatattgaaggaaataaaggttatgagtattgataatccaaaaagtacaaaggttttattagaaaggttcccacaattgagtttagctttagtggaattagggctactttcgaatactacaaaccaagagttgattgagttgactttaaacaagagacctgtggatttgaccgagttatctttggatcacgttaggttgttgcagtcagtagagaagctaacagacgaggaaattgacgagttggatgaaagtcaacaggagatagttagaaaagtaaaggaggaaatagcgaaaggcacatatggtgaagtcctggctgtcaaagataatgcctga

SEQ ID NO: 6325 - DNA, 1206 bp, Candida albicans
atgactacttcaattgataaatcttatgttcatgaaggtggtataagaccatattttgaacaacaaatacaagatacggaaataagaatacagcaaaccacacagaacttgcgtcgtttggaagcccaacgtaacaaattgaataacaaagtcagacaattaaaggatgaattaaaattattacaagaacctggatcatatgtaggtgaagttgttaaagttatgggcttgaaaaaagttttagtgaaaatccatcctgaaggtaaattcattgtcaatgttaccaaagatatcgatgtcaagaaattgactccatcaataagagtgtgtttgaaagcagattctcacgatttgtacaaaatattacccaacaaagttgatcctttggtttcattgatgatggttgaaaaagtcccagactcaacatacgatatggttggtgggttagataaacaaattaaagaaatcaaagaagttattgaattacctgtcaaacatccagaattgtttgaaagtttgggtatagctcaaccaaaaggtgttatattgtatggaccaccaggtacaggtaagaccttattggcaagagcagttgctcaccataccgaatgtaaattcattcgtgtttctggttcagaattagtgcaaaagtatattggggaagggtctcgtatggttagggagttgttcgtgatggcaagagaacatgcaccatcaatcatttttatggatgaaattgattctattgggtcgtcgcgtgttgaaggttcatcaggaggtgattccgaagtgcaaagaacaatgttggaattgttaaatcaattggatgggtttgaaagttcaaaagatatcaaaatcattatggccactaatcgtttagatattttggatccagctttattgagaccaggtagaattgatagaaaaattgaattcccagcaccaaccgttgctgctagaacagatattttaaagattcattcaagatccatgaatttgacaagaggtattaatttgcgtaaaattgctgagaaaatgaatggatgcagtggtgctgatgtgaaaggagtttgtaccgaagctggtatgtatgcattgagagaaagaagaattcatgtaactcaagaagatttcgaattggcagttgcaaaagtcatgtctaagaatgacgatggtgctgtctccttacagaaattattcaaataa

SEQ ID NO: 6326 - DNA, 525 bp, Candida albicans
atgtctgccataattcgtcaagccataagaccagctttgagatcagtgtcttccaagagaattgccgtcactgccttacgttataactccactgccgcagaaccagccaaagctccagtcgacgctaagattactaccatagtggatcaaatttcaactttgactcttttagaaacctcacaattaatcaatgaattaaaagaaagattaaacatttccgatatttccttgccagttggtggagctcaagcagccccagttgctcaagcagccccagctgaagaagaagtcaaagaagaagttgaagaaaaaaccatattttccattaaattagaatctttcgatgccaaatcaaaaccaaagattattaaagaagtcaaaggaatgttaggtttatcgttggtcgaatctaagaaatttgttgaaagtgctcctaaagtattgaaagaaaatgttgccaaagaagatgctgaaaaaatcaaggccactttagaaggattaggtgctaaagtttcattggaatag

SEQ ID NO: 6327 - DNA, 1482 bp, Candida albicans
atggtggcattgaaaagagaggcagagcctcgtgaaaatgggaaatccaagaaagcaaaaacatctttggcaacatcttcgtttgttttacattcgtactcgaaattaccgaacattaatgaatacgcaaaggccaagtcaactccgttagacgtttttgtttgggggactgggtctatgtgtgaattaggattaggtccatcagcaaagaataaagaggttaaacgaccaagattaaatccctatttaacggaagaaaaactcggaggtacaaaaatagttgatttcgctgttggtggtatgcacactttagcattagatgggaagaatagaatttggtcttggggaggaaacgacagtggagttttaggtagagacacttcccaagctaaggaggtattgaaagatattgatgggaaaaatggtaatgatgatgatgacgacgacgacgatgaagatggtgatcttaatgaagctgaatcgacacctgcattggtagagaatcttcctgaaggtgaaattgtgcaattagccgccactgacaatttgagtgccgctttactttcaaatggtgatgtatatgcatgggggtgtttccgttgtaatgaagggttattgggatttttgagagatgaaataaaactccaaaaaaccccactaaagattaaggaattgaaaaacattgtccaattagcggctggtaaagatcatttacttgctcttgactcaaagggaattgtgtatgcctggggtaatgggcagcagtatcaacttggtcgtaggattttagagagacaccgctatcgaagtttggaaccacaacaatttggattatacaatatcaaatacattgccagtggagactttcattgttttgcaattgatcattccgacaatgtttatgcttgggggttgaaccaatatggtcaatgtgcattaacaggtgataacggtgagttggaggatgggtcagttttgatgaaacccactttgattcctgaattgtcccacaagggcattaaggaaattgctgcaggtgagcatcatacattggcactaacagaggatggacaagtttatgcatggggtaggtatgatatgaaagaaattgggattccaaaagacaaattgccgaaatcaacttttaaagatcaacacgggaacccacggtctgttcctgttcctacaaaacttgaatttgccgtcaaaattaaaactattggtgttggatcccatcattcctttgccgttacagaagatggtgttgtttatgcatggggatttgcagaaacctacggacccggtttaggtccatctattgatgatgttgaaaaaccaacaagaattgtaaatacagctacaaagaatgaagatatacttcttattggtgccggtgggcaattttcagtgagtggtggtgtcaaaatcgaagacgaagagaaagcagaagttagacttgataagtatgaagatttagaatag

SEQ ID NO: 6328 - DNA, 1560 bp, Candida albicans
atggatgctaaaccaccaacctcacattcattgtggtcaccgtatgatactgttcgagacgcagctgattctttaggtgtgactatttcagatgaaactgccaaaagtttagccatggatgttgaataccacatccatgaaataatagagactgctgtcaagtttatgagacattcgaaacgaaggcagttgactacgtcagatgtaagtaacgctttaaaaatactcaatatcgaaccattatacggctacgataatactcaacctttaaattacaaagaaacaatggttggtgctggtggacaaacattgtattatattgatgaacacgaaattgaatttgagaaattgattaatcaacagttacccaaagtacctcgtcaagtgaactttacagcccattggctagctattgagggtgtacagccaatggttcctcaaaatcccttgcctagtgaaatcaaaagcttaccagcagcagtacgtggagcaacaacatcgatgttgggtaatgatattttaagtctcgggagcaaaaatgaaaatggggaaagtaacgattcaaccaaacatgaatctgaattgttatcgaatggtggttcttctagccacacaaataacagtaactccaataaaaaatcaactgaaaaagatatggaaatcaaacctttgataaaacatgtcttgtcgaaagaattgaaattatattttgacaaagtggttgatgtattgatttccactgatccagaaaaggaacatttgaaaaatgctgcattaacttcattgaaatccgatccaggattgcatcaattggttccttatttcattcaatttatagcagaacaaataaccaatcaattaaggaatattgaaattttatcaaccatgttagaagtcatcctggcattagttgataacaaaactatatttttggatccatatgttcatgcattgatgccatgtattttaactttattattggcaaagagaattggtcccgtgataaaattaactcaagaaaataaagaagaatggcaagatgcattaaaatctcaattggccatccgtgaatttgcagccatattgttgcaacacattatcaaagtatatggatcatcttatagtacgttgcgcccaagaataacacgtacattgttaagagcattattggattcaacaaaaccagtaggtacgcaatatggcgcattattaggattgaaaaatatggggaatgaagttttaaaattagttttgcttggtaatttgaaagtatggtatctggcaattattgaaaagaatgaaaatgattatgaacgtcaaattttgattaatgctttattggatacacttcgaaaattgaaacttgaagataaacttttgaatcaaactaaagctcaagatagtgatgatatggatattgattcaaataatgaaatcagtgatgaagtaaaaacaaaattagtagaaagatttgggaaatcattagctgatttattaatagagcaagaggatggaaaacaaattattaaaggaattttctttggcgaattatcagtttga

SEQ ID NO: 6329 - DNA, 2304 bp, Candida albicans
atggctaacgaggagaaaagatcaaacaagagacagaagttaattgacaactatgaggctgaaaaaattgctgaggcatcagaagaatctctcagaacccatcctcatccttcagacaaaattgaactaatccaccatgatcaaggggaattcaaaggattaattcgtcaccagactactgctgagcaagcacaaaaattagaagatggacctaaaaatccatttactggtcatgatttcaccacaaagtattttgatatattgaaaacaagacgtgatttacctgtacatgctcaacgtgaagaattcttaaagatcttccattccactcaaataatggtgtttgttggggagactgggtcaggtaaaactactcaaatccctcaatttgtattatacgatgaaatgccccatttaactggtaaacaagttgcttgtacacaaccaagaagagttgccgccatgtcggtagcagcaagagttgcagatgaaatggacgttgaattgggtgaagaagttggttacaacattcgttttgaaaacaacagtggtcctaaaaccattttgaaatatatgactgatggtatgttattgagagaagccatggaagatcatgatttgacaagatattcttgtattatattggatgaagcccatgagcgtacgttggctacagatattttaatgggtttattgaaacaagtcagtgtaagaagacccgatttgaaaattatcattatgtctgctactttagatgcagaaaaatttcaaaactattttaataatgcacctttgttggcagttcctggtagaacccatccagtagaaatttattacacaccagaatttcaacgtgattatttggacgcagctattagaaccgtgttacaaatccatgccactgaaggtgaaggggatatattgttgtttttaactggtgaggaagaaattgaggatgcatgtagaaagatttcccttgaaggtgatgaattggttagagaacaaaattgtggtcctcttaaagtttatccattgtatggttcattaccacctcatcaacaacaaaagatttttgaacctgctccaaccaacccaaatcctaatgggagaccaggacgtaaagtcattatatctacaaacattgccgaaacttctttgactattgatgggatagtatatgtggtcgatccaggattttcaaaacaaaaagtttacaacccaagagtaagagttgaatcacttttggtgtctcctatatccaaagcttcagcacaacaaagagctggtagagctggtcgtactagacctggtaaatgtttcagattatataccgaggaagctttcaaaaaggaattgattgaacaatcatacccagaaatcttgcgttccaatttaagttcaacagttttagaattgaaaaaattgggtattgacgatttggttcattttgactttatggaccctccagctccagaaactatgatgagagccttggaagaattgaattatttgcaatgtttatctgatgaaggggatttaaccgcattgggtagattagcatcacaatttccattagatcctatgcttgcagtaatgttgattggatctccagcatattcatgttctgaagaaatcttaactatcgttgccatgttgagtgtccctaatgtatttgtacgtccagcactggcaagaaagagagcagacgaagccaaattgtcttttgcccaagctgatggtgatcatttaactttaatcaatgtttatgaagcatttatatctcctgaagcgagcgaaataggaactcacaaatggtgtcgtgataatttcctttcatacagatctttgacttcagctaaaaacgtcagaaatcaattacaaaggctcatgcaaaaatatgatttacagttaatttcacaatacaatcaagtgtctgaatttgaatattgggaaaatgttaaaaaggcattagttgcaggatttttcatgcaagttgctaaaaagaaactgggcaataaaggatatctcactgtaaaggataatcaagatgttttaattcatccctctactgtactttctaaagaaggtgagtggttgatttataatgagtttgttttaacttccaaaaattacataagaactgttactgtggttaagccagaatggttagtggaaatagcaccaaaatattacaacttggaccatttcgccaaaggagatgtcaaattaagtctagaaagagttgtcgaaagagttggtaatatgaaaaagttggataagaagaagaaaaaaagtaaaaattga

SEQ ID NO: 6330 - DNA, 1350 bp, Candida albicans
atgattcaattagaagaaagagaaattcctgtaataccaggtaataaactagatgaggaagaaaccaaggaattacgattgatggtggctgagttattaggaagaagaaatactgggttcccaggttcacaaccagtttcatttgaaagaaggcatttagaagagacattgatgcaaaaggattattttgtatgtgaaaaaactgatggattaagatgtttattatttttaatcaatgaccctgataaaggtgaaggagtatttttggttactcgagagaatgattattattttatccccaatatccatttcccattatctgttaatgaaactcgtgaaaaaccaacatatcatcatggaactttattagatggtgagttggtgttggagaatagaaatgtcagtgaaccagttttgcgttatgttatatttgatgccttggccatacacggaaaatgtattattgataggcccttaccaaaacgattaggatatattaccgaaaatgttatgaagccatttgataatttcaagaaacataatcctgatatagtcaactcccctgaattcccctttaaagttggattcaaaacaatgttaacttcttaccatgctgatgatgttttgagtaagatggataaattgtttcatgcttcagatggattaatttatacttgtgccgaaacaccttatgtatttggaactgaccaaacattgctaaaatggaaacccgctgaagagaacactgttgattttcaattagagtttgttttcaatgaggtgcaagatccagacttggacgaaagagacccaacatcaacttatctagactacgatgctaaaccgaatttaataaaattgagagtatggcaaggtagcaatgtacatactgattttgccaagttagatctatcagatgatgattgggaaagattgaaggcactagagcaaccattacaaggcaggattgctgaatgtcgccaatctacaactaagaagggatattgggaaatgcttcgattcagaaacgataaaagtaatggaaatcatatcagtgtggtggaaaagattttggtatccatcaaggatggtgtcaaagagaaagaagtcattgagtggtgtcccaaaatatcaagggcttggaagaagagagagaacgatagaagacagaagcatttcaatggagttgctcgtccagcttctgtactgcacgaagaaccactacggaagaaaattaaaacggaatctaatggtaatggacatcaaacgcctccaagacaagaacaacaacaacaactgcaacaaatacttaatgacatacccacttatgaagatagtgacgacgaataa

SEQ ID NO: 6331 - DNA, 549 bp, Candida albicans
atgtcaactacagaaacgacagaaaaaaccgagtctaatagtaaaccagaagttggtttcactggacgtaagattgtctacgataaagatgggaaaccatgccgtacttgtaattccttactagatttccagtttgcaagtggtaaaatcaagaaatcaccagtgactccagaatcgaagaaagtgaacaagtcagagctcaagtcgtatccccaagacgagcctccggatgttactgagttgggcaaatcctcatggacattattacattcaatagcagccacatatcccgagactccaaccaccaaacagcagctggatatgaaactgtttataaacttattttccggattttacccctgttggttttgtgctgaagatttccaaaagtatattgccaaaaatgaaccaaaaacaagaaatcaagaggaattagggagatggctttgtgacgctcataatgaagttaacaaaaaactaaataaacctcaatttaattgtgatttatggaaaaaaagatggaaggatggctgggataacgaagaataa

SEQ ID NO: 6332 - DNA, 966 bp, Candida albicans
atggaagttttgcatcaattaactactaatcatacttcaagtttatctaatttgataaataatcatccaacaagtttttcatcaattttaaaagaagttgatattactaatcatagtttaacttatattgaaaaattatgggcctcatattatatttatatgaataatgatattttagctacagggttattatttttcattactcatgaattaatgtattttggtagatgtttaccatggtttattattgataaaactccttggtttaatcgttataaaattcaaccaacaaaaattcctactaatcaagaacaatgggaatgttttaaaacggttttaaaacaacattttcttgttgaagctttacctatttggttattccatccagtatgtgctaaattaggtattacttatgatgttccattccccaattggaaaattcaagctatacaaattgccatttttttcatttgtgaagatttttggcattttgtattccatagtttatttcatcaaggttggttttataaaaatattcataaagttcatcataaatatgctgctccatttggtttagcagcagaatatgctcatccagtcgaagtcatggccttaggagtggggacggtggggttccctattttatatgcttatttggccacagtttatactaatatgccaccacttcatttatttacattgacaacttggattgttttaagattattccaagccgttgattctcattctggttatgattttccttggtcattaaataagttcttcccactttgggctggtgctgctcatcatgatgaacatcatcattatttcattggtaattatgctagttcttttaccctttgggattggttattccaaactgaatgtggtacttatgctagaaaaagaagagaaagaaatagtcaagctagtgctgaaagtaaacataaaaaaactttatag

SEQ ID NO: 6333 - DNA, 3360 bp, Candida albicans
atgctttatagcagaaatctactcttatcaacatcatcaatattatttagaaaaagaattgatttttgtataagaagaaagttattatcatcatcatcaattgttacaaataacatgagtgactcatcaactaatccaccaccacctccacatccagctgctgctgctgctgctgctgctgctgctgcagaacaaccagttgcaaccactcctcaagaaggacaaccaaaacaaaaaactgctaaagaattagaaaaggaaagaaagaaagctgaaaaattggcaaaatttaatgctaaaaaggccaaacaagcagctgaagccaataataaacctaaaaaggatcaacaaaaagatgacaaaaaaaccaaaaaagccaatactccaaccaccaaaattcctgaatttgttgataaaactgttcctggtgataaaaaaattttggtttcattagacgatgaatcctttaaagcttataatcctaaaaatgttgaaagttcatggtattcatggtgggaaaagcaaggatttttcgaaccagaattaactgctaatggagaaatcaaaaaggaaggatgtttttctattccttgtccaccaccaaatgttactggtgccttacatattggacatgcattgactgttagtattcaagatactttaattagatggaatagaatgcaaggtaaaaccacgttattcatcccgggatttgatcatgctggtattgctactcaatcagtcgttgaaaaacaaatttgggctaaagaacaaaaaactagacatgattatggtagagagaaatttattgaaaaagtttgggaatggaaagaagaatatcatcaaagaattaaaaatcaatttaaaaaattgggtagttcttatgattggtcaagagaaaaattcactttaaatcccgatttatctcaagcggtcactgaagcatttgttagaatgcatgaagatggaacaatttatcgtgcttcaagattagttaattggtcagttaaattaaataccgccatttctaatttagaagttgataataaaactattcctggtaaaactttattatcggttccaggttatgaatcaaaaattgaatttggtactttaacttcattttcttatccagttgtcgatagtgaaactaatgaaaaattgacagttgccaccactagaccagaaactatttttggtgatactgcagttgctgttcatcctaaagatccaagatatactcatttacatggtaaatttgttcaacatccatttttagatcgtaaattaccaattatttgtgatgctgaaaccgttgatatggaatttggtactggtgccgttaaaatcacccctgctcatgatcaaaatgattacaacactggtaaaagaaataatttagaatttattaatatttacactgatgatggattattaaatgaaaattgtggacctgaatggaaaggaatgaaaagatttgatgctagatataaagttattgaacaattgaaacaaaaggggttatttgtcgatcaaaaagataatgaaatgacaatcccagtttgttcaagatcaggagatattattgagccattattaaaacctcaatggtatgttgatcaaaaacaaatggctaaagatgctattgaagttgtcaaacgtggagaaattgttattaatcctaaaacttctgaagcagaatatttccaatggttagaaaatattcaagattggtgtatttctcgtcaattatggtgggggcatagatgtccagtttattttgttaatattgaaaatgaacaaattcatgataaattagataataattattgggttgctggtagaactgaagaagaagcttttaagaaagcccaggaaaaattccctaataaaaaattcactttagaacaagatgaagatgttttagatacttggttttcatctggattatggccaatttctactttaggatggccaaatgaaactaaagatatggaattatttaatccaatgtcaatgttagaaactggttgggatattttatttttctgggtttcaagaatgattttaatgtcaattaaattaactggtaaagttccatttaaagaagttttctgtcattcattagtcagagatgctcaaggtcgtaaaatgtcgaaatctttaggtaatgttgttgatccattagatgtaattaatggtattccattacaaggattacatgataaattgttaactggtaatttagatcctagagaattgaaaaaagccactgagggacaaaaattatcttatcctaatggtattccagaatgtggtactgatgctcttagatttgctctttgtgcttatagtactggtggtagagatattaatttggatattttaagagttgaaggttatcgtaaattctgtaataagatttatcaagctactaaatttgttttggggagattaggtcaagattatattccaccaactacaagtgaattaactggtaaagaatcattagttgaaaaatggattttacataaattatctcatgctgccaaattaactaatgaatctttagaagctcgtaatttcggtgatgctactaatcatatttataatttctggtatgatttatgtgatgtttacattgaaaattccaagagtttaattcaagatggtactccagaacagaaaaaatctgctcaagatactttgtatacttgcattgatggggctttaagattaattcatccatttatgccttttatcactgaagaaatgtggcaaagattaccaagacgtgaaccagaaatcactggcaacctcaaaactatcatgaaagctccatatccagtttataaatctgaatttgatgatattaaatctttagaagcttataatttagttttagatatcaccaagggagcaagatcattattatcacaatataatattttaaagaatggtcaagtttatgttgaaaccaataatgaagaaatttataaaattgccaatgatcaacaagattcaattgtttctttgatcaaaggggtggaaaaaattactgtggttaaaactttagatcaagttccttccgggtgtgctttacaagccattggacctgaatgtactgttcatgtattagttaaaggacaaattgatttagatgctgaaattgctaaagtggaaaagaaattatctaatgttttagaacaaaaaaagaaaactgatgaatcaattagtaaattcactgaaaagactaaaccagaagctaaagattcagcttataaaagattagaaaaacaaactgctgaaattgaaggttatgaacaaactattgccattttagaaaaattgaaactttaa

SEQ ID NO: 6334 - DNA, 1764 bp, Candida albicans
atggccagaataaagaagaggggtaccaccgggaatgccaaaaactttattacgagaacccaagcaatcaagaaattgcagatttctttggccgatttccgtcgtctttgtatattcaaagggatttatccaagagaaccaagaaacaagaagaaagctaacaaaggatctactgctcctgtaaccttttattattcaaaggatattcaatatctcttgcatgaacctgtattggacaaattcagacagcacaagacatttgccaaaaaattgcaaaaagctttgggaagaggagaagttagcgatgcctataaattggatcaacacagaccaaagtatactttgaaccacatcatcaaagaaaggtatcctacatttgctgacgcattgcgtgacttggatgatccgttaaacatgttgtttctttttgctaacatgcctgcaacagacaaggtttctgccaaagttgtttctgaagctgaaaagttgtgcaatcaatggttagcttacgttgctaaagaaagatgcttgaaaaaagtttttgtgtctatcaaaggtgtttattaccaagccactgttaagggacaagaaataagatggttgattccgtacaaatttcctacaaatattccgaccgacgttgactttagaattatgttgacgtttttggaattttattctactttggtacattttgtgttatacaaactttacaatgaagctgggttgatttatcctccaataattgagaaatcaattgggttaagtggatacgttttgcaagataaagatgctcctttgaagaagaaagaggaaaagaatgacgaagaaggaaagaatttgtcaaagaaagaattgaacaaggccataaaagcagatcaagaacaacaagaaaacgacgagcaagacaacaacaacggagaatcagtagaagatattgaattggacgaattcacatcgactaaagaggactcgttattacaaccttcaaagtatgcatctctgacagcagaattattttccaagtttattttttacattggcagagaagttccgttagacattttagaattctgtatattatcatgtgggggtaagataatttcagaaattgctattgacgatttgaagattaatgatcctgaggcatataagaaattgaatttatcaaatataactcatcaaatcattgacagacccaagatcttgcaaaaagttcccggaagaacttatgtacaaccacagtgggtttttgactccatcaacaaacaagaattgattaatgtcaatgaatacgctgcaggtgaaacattaccacctcatttatctccatggggtgatgctggtggttatgatccaaacaaggaagtagaaaaggaagacggtgaagctgtagaagacaccgacgaagaagaagaagaagttgaaattgaggacggagatgaagatcaagaagatgaggaagaggaagaagatgaagacctcaaggctcaaaaggaattggaattagaagctgctggtgttaaattctctgaaataaatgaagagaataagaagagtcactccaaaaaatcgaagggaacttccaacaaagaagctgatgaagaaaaggaattgaagaagattatgatgtctaataagcaaaagaaattgttcaagaagatgcaatatggtattgagaagaaagaaaatagagaaaaacaattgaccaaaaagaagaagcaattgaacaaaaagaaagaacaattgaaaaaattgaattga

SEQ ID NO: 6335 - DNA, 1230 bp, Candida albicans
atgacagtcataacggatccagttgaacaatataatttaattaccaagggtttacaagaaactctcaatgggcaaatcattaaagatgttctagaaaaagaaaatagaccagttaaaatctattggggaacagcaccaactggtaaaccacattgtggttatttcgtgccaatgatcaaattggcccatttcttaaaagctggttgtgaagtcacagtattgttggctgatttgcatgcctttttagataatatgaaggcaccattggaagttgtcaaatatcgtgccaaatactatgaatttgttgttaaagcgattttgaaatcaattaacgtcccaattgaaagattaaagtttgttgttggttcctcataccaaaaaggtggtgattatgtgatggatttatttaaattgtcaaacattgtatcccaaaatgacgccaaaagagctggtgctgatgttgttaaacaagttgccaatccattattgtcggggttgatttatccattgatgcaagctatagacgaagaacatttgggtgttgatgctcagtttggtggtgtagatcaaagaaagatttttgttttagccgaagaaaatttgccaagtattggttataaaaagagggctcatttgatgaatcctatggttcctggtttgggccaaggtggtaagatgagtgcctcggatccaaactccaaaattgatattattgaagaacctaaagttgttaaaaagaaggtcaatagtgcctactgtgcccctggtgagttgaaggataatgggttgattgcatttattgaatacgttatacaaccaattgctgaattgaagactggtgttgaaggagcattcaaattggatatagacagaccagaaaagtatggtggacctttgtcttatgactccatcgaacaattaaaggctgactttgtggatggaaaattggctcctccggatttgaaactgggtgttgctgacaagattaatgaattgttggcaccaattagggctgaattcgaatctagtgaagagtttcaagtggcacaaaagaatggttacccagtcgaaaaaccaaaacaagaaaagaaaaagaaagttaagaagataggtactagatatccaggtactgtttctggtggtgattctgctgacactccagcaaactctaatgatggtgaaaaggctgcagaaaagaaatctgcagacgaaaagccaactactgaataa

SEQ ID NO: 6336 - DNA, 1476 bp, Candida albicans
atgtctgaagaaagtaaccaacaagtgttttccactgtgggagaacaagctcaagaagtcgataacgctattaaacaaaccggagctgccgatgctgaaggacacccagttcaagaagttgaatctttatgtatgaactgtcacaagaatggggtaacaagaatgttattgacaagaattccatattttagagaagtcattataatgtcattcgaatgtcctcattgtggatttaaaaatagtgaaattcaaccagcagcacaaattgctgaaaagggggcaagatacgttttaaaagttgaaaacaagaaagatttcaatcgtcaaattgtcaaatccggaactgctacgggtaaattcactgaattagatattgaaatcccaccgaaaagaggtcaattaatcaatgttgaaggtattttacaagaaatgattgatgatttagagtctgatcaaccacaaagacaaaaagttcaacctgaagtttatgaaaaaattgatcaagtgataagcaaaataaaactgttcatcaattgtgacccaaatactgttccattaacggtgacagtcgatgatccagcaggtaattcttggattgaatatgtcccaggtgaaccaactcataaatgggccatgtacgaatataatagaactgctgaacaaaatgtgtttttgggattgatttctgctgatgacgttgctcagcatagacaagccgaattagccaacaaaaagcaagccactgattcaaacatatcatcaaacttgaacaaagaacaatcacaatcacaatcacaatcacaagaagaacattccaatcctcatactactggcttcaaatctgatgcttcggaaattgaaaatttcagtaatgaagtccaaacatttgctgccacttgttcctcatgttataaaccatgtgaaacccatatgaaaacagtcaatattcctcatttcaaagatgttattttaatgtctactgtatgtgatcattgtggttataaatcaaatgaagttaaaactggtggtgccattccagaaaaaggtaaaagaattacattaaaagtaactgatccagaagatttagctcgtgatattttgaaaagtgaaacttgtggattaaatattcctgaattgaatttagatttaactccaggaactttaggtggtagatttactactattgaaggtttattgactcaagtattagaagaattacatagtagagttttcactcaaacttcagattcaatggatgatgaaactaaaactagatggacagggtttttcgcaagattacaagatgctatcgatgggaaaattggattcactattgttatggaagatccattagcttcttcttatatacaaaatgtctatgctcctgataatgatccaaatatgactattgaagaatttgaaagaacttttgaccaaaatgaaggattaggtttaaataatattaaaactgattag

SEQ ID NO: 6337 - DNA, 3240 bp, Candida albicans
atggatgccatattagatttttcaactgatttggatatcaatttatttgatcaaacagttgacacgtttttcaaaggatctggtaatgatcaaaaaaatgctcaattggttttgaacaaatttcaagaacatcctgattcttggaaatttgccgataagattttatccaattcaaataatgctcaatcaaagtatattgccttatcatctttgaacaaattgatacaatatcgttggaaaactatacctgataatgaaagaattggtattagaaatttcattgtcaatatgattattagtctttgcgacaatgaacaagaatttgaaactcaacgagccttaattaataaaattgatttgacattggtttctgttttgaaacaagaatggcctcataactggcctgaattcattccagaaattgttatgagttctagatcatcgtataatgtttgtgaaaataatatgattattcttaaattattaagtgaagaagtttttgattattctcaagaccaattaacccaagctaaagctcaacaattaaaagtcagtatgaaaaatgaatttgaaaaaattttcaccttgtgttacgaagtattggataaaacaaccaaatcatcattgattattgccaccttgaatgcattattgaaatacatacaatggattccttcagaatacatatatcaaacagatttattgaatctattatcaacaaaatttttagctccagctgatacaagagcaatttctttaaagtgtttgacagaagtttcttcattacccgctcataatgaaaaaactttaatttattttaaaaacactttggaacaaatttattctatagtgccactcactactaatttgaaacaaacttataaagttgcttcatctagtgatcaatcatttttacaagatttagccatgttcttgtgtacatttttgacaaataatttagaattattagagaaacataaagaagcaggtgaattattacaaaattcattgttctatttattagaactttcccggattgaagaacgtgaattgttcaaaacttgtttagatttctggtcaacatttgtttatggattatttaaagaaattagagatttaccttccaatgaattaaccccaatgatgcaattagcttatggtaatagtttaagaccaacatcttccggtggtgcacctgacccagctcttttacagaaattcccattgagacaacaccaatatgcggaaatattatcgaaattgagattggttattattgaaaatatggcccgaccagaagaagttttaattgttgaaaatgatgaaggggaaattgttcgtgaatttgttaaagaaagtgataccattcaattatataaatccatgagagaagtgttggtttatcttactcatttgaatgttattgatactgaacaaatcatgattgaaaaattggctagacaaattgatgaaagtgaatggtcatggcaaaatattaatactttatgttgggctataggatctatatctggggccatgaatgaagatatggaaaaaagatttttggtttccgttattaaagatttattatcattaacggaaatgaaacgtggtaaagataataaagctgtggttgcatcaaacattatgtatattgttggtcaatacccaagatttttgaaagctcattggaaatttttgaaaaccgttgtcaataaattgtttgaattcatgcatgaaacacacgagggggttcaagatatggcttgtgacacttttattaagattacccacaagtgtaaaaaacattttgttgccgtgcaagcaaatgaaaccgaacccttcattaatgaaatcattagagaaatccaacagattacggaagatttacagccacaacaagtacacaccttctatgaagcatgtgggattattgttagtgctgaatataataaaactgctcgtgataaattattgagtgaattgatggcattacctaacatggcctggacggcaataatccaacaagcaggtcaagaccccgagttattgagtaatactgaaaccgtcaagattattgccaatatcatcaagactaatgttgctgtttgtaaagctttaggtccaggattttattcacaattgggtggattatacgtggatatgttatcattatataaagctgtttcacaaatgatttctgatgctgttgctaaagacggaataattgctaccaagacccctaaagtgagaggattgagaaccatcaaaaaagagattttgaaaatgattgaaacttatattaatcaagctgataatttacaagaaattgttcgtgatttggtccaaccattatttggagccgttttagaagattatagttccaatgttcctgatgctagagatgctgaagtattgagatgtttgacagcattggtttctaaagccggacatttaatccctgatggtgtggtattaattttacaaaatgtgtttgaatgtactttggatatgattaaaaatgattttgttgaataccctgaacatcgagttgaattttataaattattaaaagaaatcaatgccaaatcattccaaggtttactacaattatctggagaagcattccaatcattgattaatgccgccttatgggctttcaaacataataatagagaagttgaagataatggattatcgttaactttagaattgatcgaaaatgttgaaaaattaggtgacactccattcaccaaggcattttatgagaatttttatttccaaattttatctgatacattgtatgttttcactcaaccagatcataaagcaggatttagatatcaagcccaattattagctcaattgattcatttggttgaagataatgttatcaaatatccattatacacatcagatcaagctcctgaagggacttctaattcagatttcctcaaacaatatttatcacaattattatcatcggcatttgataacttacaagaagtgcaattgatcaatttccttaaagtattgacaaccgtttataatgatttattcaaattcaagtcggtattaagagattttttggtgcaattgaaagaatttggtggagatccaactgattatttgtttgctgaagataaacaaatagaaagagaagaacaagatagattacaaagagaacgagacatgcaagttggtgggttaattagaccttctgaaatggatgacgaataa

SEQ ID NO: 6338 - DNA, 1662 bp, Candida albicans
atgagcaagcctagaaaacaacaaaaatgtaaaacgtgtggtcacacacagtttgatgtcaatcggtacactgcagcaggagatgtgtcttgtcttcgatgcggaacggtgttggaagaaaaccccatagtcagtgaagtccaatttggagaatcgtcatcaggtgcagccatggtacaaggtgctatggttggagcagatcaagcaagagcaacctttgctggtgggcgtcagaatgccatggagagtagagaacagactttgagtaatggtaagcggaaaattaagagaattgcagctgctttaaagatccctgattatattgctgaggctgctggagaatggttcagattggcgttaacgttgaatttcgtccaaggaagacggtctaataacgtgttggctacatgcttgtatgttgcttgccgtaaagaaagaacccaccatatgttgattgactttagttcaagattgcaaatttccgtgtattcactaggtgctacttttttaaaaatggtcaaggcgttgcacataacatcattaccgctagccgatccttcgttgtttatacaacactttgtagagaaattggattttaaggataaggccaccaaagtggcgaaagatgctgtcaaattagctcatagaatggccgctgattggatacacgagggaagacgaccagcaggtattgctggtgcgtgtgtgttgttggcagcaagaatgaacaatttccgtaggagccatgccgaaattgttgccgtgtctcacgttggagaagaaacattacaaagaagattaaacgagtttaaaaaaaccaaagctggtacattgtcggtaaagtcatttagagaggttgaaaacttggaaagctctaaccctccatcatttgaaaagaaccgtgctatggaattgaaaatttccaagaaactacagcagcagcaaacagacaattttgaagacttgtcaaagatgacagaagaagaaaaacaatccgtgtttggcaaattatctaaagaggaggctcaaaaacagttgttgatgaatacaattttaagcgatatcaccattaccaccgaaaatcttaatgatcagatggatagaatcttgaaaatgaagaaatctagtttggaaaactctctttacaaaacaccatatgaattagcattagccaatggatcagagcaggacccttcaaagatttggaatattaataaaccaaagaaccttgtggcaaacttaccgaaaacagacgatattttacagaacgtttcctcagaagtggaattaaattcagatgatgacgatgagatcgtcctagaaagtaaacttactgaagaagaagttgctattaaagaaagaatttggaccgggttgaaccacgattatttggttgagcaagaaaaaaagaggttgaaacaagaagcagatgaacttacgggaaacacatcaaagtcgtccagcggtaatcgtcgtaaaagaaacaagtcttcattacctgctgagttacgtaaagagcttggtgacattgatttggatgaagatggtactccaagatcagctgccgatagtgcaaagatgtatatttcgaaaacatcggtgtctaagaaaattaattacgattcacttaaagggttactaggaggaaacatgggattttaa

SEQ ID NO: 6339 - DNA, 768 bp, Candida albicans
atgtttttaacaagaagtgaatatgatcgtggtgtatccactttttcaccagaaggtagattatttcaagttgaatattctcttgaagcaattaaattaggatctactgccataggtatatcaactagtgaaggggtgatattaggagttgaaaaaagagtcacttcatcattattagaatcttcttctattgaaaaaattgttgaaatagatcatcatattggttgtgccatgagtgggttgacagctgatgctagatcaatgattgatcatgctcgtgtatccagtttaactcataatttatactatgatgaagatattggagttgaaagtttgactcaaagtgtgtgtgatttggccttacgttttggggaaggagctggcggtgaaaaaagattgatgtctagaccttttggggtagcattattaattgctggagtagataaagaaaaaggtccccaattatatcatgcagaaccatcaggtactttttatagatatgaagctaaagccattggttctggtagtgaaggtgctcaagcagaattgaataatgaatatcacaagtctttgacattgaaagaagctgaattattggctttaaaaatattgaaacaagtgatggaagaaaaattggattgcaaaaatgctcaattggccagtgttactaaagatggtgggttccaaatttacagtgatgaaaaaacagatgccataattaaagagttaaatgcacaagctactgatgaagatactgtcataagctag

SEQ ID NO: 6340 - DNA, 360 bp, Candida albicans
atgtctgccccaatcaacaaggaaaaagtcgaacaagaagctgaacaacaaattcacaaaatcagaattaccttaacttccaccaaagttaaacaattggaaaacgtttctgctaacatcatcagaaacgctgcccaatacaacattgtcaagaagggtccagttagaatgccaaccaaggttttgaaaatcaccaccagaaaaactccaaatggtgaaggttctaagacttgggatgcttacgaaatgagaatccacaaaagagttattgacttgcaagctccagcttctactgtcaagagaatcactcaaatcactatcgaaccaggtgtagatgtcgaagtcaccattgctgcttaa

SEQ ID NO: 6341 - DNA, 276 bp, Candida albicans
atgtttggcttaggtggtactactcctcaaatttcatctcaacaaaaacttcaagctgctgaagctgaattagatatggttactggcatgttcaatgctttagtttcccaatgtcacaccaaatgtatcaacaaatcatataatgaagctgatatttcaaagcaagaatctttatgtcttgatagatgtgttgccaaatattttgaaaccaatgttcaagttggtgaaaatatgcaaaaattaggtcaatctggtcaatttatgggtagaagataa

SEQ ID NO: 6342 - DNA, 1659 bp, Candida albicans
atgtcacaatctatatatgttaacgaaaagtctggtgtagacaccactgaagctaagggtacacaagaaaaaccatatgctactccagcttttgcattgtatactcatcctgatgccaaagtatttgtttacaaacaatctgaagaggatgctgaaaaattcgaatacgttgaaatctccgcttctgccttaaagaaagctaaaaaaggtgttgaaggattgaaaaagaaagctgaaaagcaagccaaattagaagaacaaaagaagcaacaacaagccactgccaaattagccgaattagatttatcatcaattgaagaagacaaatcgttaccatcagcccaaaaaattaaaatcagacaattgaaagatcatttggatacaagagtacttgtgcaaggttgggttcatcgtttgagagttcaaaaaggtttagcttttattactttaagagatggcactggttatctccaatgtgttttaactggtgacttggccaaagctaaacaaactcaagaattaactattgaatccactgttgccattaaaggtgttatttccaaattaccagaaggtaaaactgctccgggtggagttgaattgaaagctgaccattatcaaatcattgctttagctccaggtggtgatgaatctttcaccaataaagttcaagaaaacgccgatccaaacttgttattggaccaacgtcatttggccttaagaggtgaatcattgtctgctgtcatgaaagtcagagctgcttacctggctgctattagaagattctttaccgaagaaggtttaactgaagtcactccaccatgtatggtgcaaaaccaagttgaaggtggatccactttattcaaattagactactatggtgaagaagcttacttgacccaatcatctcaattgtacttggaaacctgtttagcatctttgggtgatgtttactgtatccaagaatcattcagagctgaaaaatcccacactagaagacatttaagtgaatatactcatattgaagctgaattggtgttcataacatttgaagacttattgacccatttggaaaaattactttccaagaccattcaatatgttttggaagacccagttgctggaccaattgtcaaacaattgaacccagattttaaagcaccaaaagcgccattcaaaagaatggaatatattgaagccttggattggttgaacgaacacggtattccaaacgaagatggtgaaaaattcaaattcggtgatgacattgctgaagccgctgaaagaaaaatgactgataccattaacgaaccaattttattgactcgtttcccagcagaaatcaaatctttctatatgcaaagatgtaaagatgatccaagagtcactgaatctgtggatgtattgatgccaaatgttggtgaaattactggtggttcaatgagaattgataactatgatgaattaatggctgctcttaagagagaaaacttgaacttggatagttactattggttcactgatgtgcgtaaatacggtagtgctcctcatggtggttacggtattgggttagaaagacaacttgcttacatgttgaacagatacactgtacgtgattgttcattgtacccacgtttcactggaagatgtaagccataa

SEQ ID NO: 6343 - DNA, 2076 bp, Candida albicans
atggcattagaacaatcattggcccaattatccttggctactgtcgcatcaccagaaaatggaaaggctttaccaaccaaatctttgattttcaaaccaaagactgccaaaacagctacaccaattcccctctttgtttttgcattacaagataccactactccatcaaatttgatagccaaatcagcaggtgttaaagaaccaagattggccaaagatgatttagtcgaagaatttttcaaaaccaccacaaaagaagtttccattgccaatttgtccaaagaattagctggtaaaattaagattgtcattgatgataatgttttgaaagctgccaaaaatgaagaattgttgaaattatccactcaaagttcagcagcttgtttatctgctaaaactgtagtagaatttttacaatctactggtattgagattattgaagttgatttttcagctgaaccaactcaagctccagcttcagcatctccaggtggtagtggtgctgctgcttcctctaaaaaggaaaagaaagatgatgctaaattagaagatgctaaattgattggtatcactgttgacaaggaaaaagatttctcttcatggtatacccaagttgtcactaaaggtgaaatgcttgattattatgatgtttccggttgttacattcttagaccaaattcatactttgtttgggaaaccattcaagattggttcaatgccagaattaagaaattgggtgtacaaaacacttatttcccaatgtttgtttctcagagagttttggaaaaggaaaaagaccatattgaaggttttgctcctgaagttgcttgggtcactagagctggtaattcagaattagatgaacacattgctattagaccaacttctgaaactgtcatgtacccatactatgccaaatggattagatcacatcgtgatttaccattgaaattgaaccaatggaactcggtcgttcgttgggaatttaaacaccctcagccatttttaagaaccagagaatttttgtggcaagagggtcatactgctcatttgaccaaagatgctgctgctaacgaagttttacaaatcttggattattatgctggtgtttatgaagaattattagccgttccagttgttaaaggtaaaaaaactgaaaatgaaaaattcgctggtggtgattacactaccactgtcgaaggttttattgctgctactggtagaggtattcaaggtggtacttctcatcatttgggaaccaatttctcgaaaatgttcaatatttctgtcgagaaccctgaaggttcagaaaaaccaagaattttcgcttatcaaaactcttgggggttgtcaaccagagtcattggtgttatgattatgacccattctgacaacaaaggtttagtgttaccaccaagaattgcccaatatcaggcggttgttatcccagttggtcttacatccaaatccactgatgcacaaagaaaagaaatcaatgaaggggcagaaaagattgaacaatctttaagagccaatggtataagggttactggtgattatagagaaatttataatccaggttggaaatttgctgattgggaattaaaaggggtcccattacgttttgaatttggtcctaaagatttggctggtaatcaagttactattgttagaagaaatgatgggaagaaatacacggttaaattagacgagttagataccgaagttccaaaattattggaccaaatgcatgatgatttattgactaaagctaaacaagaatttgatgaacatcgtgttaaagttgatgaatggaaagattttgttccaacattgaacaaaaagaatgttattttgtctccttggtgtggtgatgccgattgtgaagatgatattaaggactcttctgctaagaaagatgatggtgaagaagaagaagttgatgaaaaggctccatcaatgggtgctaaatcgttatgtattccatttgagcaaccagaattgaaagaaggtcaaaaatgtgttaaatgtgatagaaaagcagttacttactgtatgtttggtagatcttattag

SEQ ID NO: 6344 - DNA, 1569 bp, Candida albicans
atgctaagtagaagaacaataactaggaaactaaataaaggtgtttcaaaatctttactatcatttgcaagatataatcattccataaccagtaccacaacaccggcatcactgcaaccccatattgaattaaccacatttgccaatggattgagattaattactgattctacaccgggacatttcaatgctgttggagcgtatattgatgctggttcaagatacgaagatcctaaggcaccaggattatcttatttgcgcgatagattatcctggaaatcaacagaagattttacggggcaacaaatgttggaaaatttatcgaaattgggtggtaattatatgagttcggctcaaagagagtcaatgatttatcaagcatctgtttttaataaagatattgatagaatggttggtatgattggacaaaccatcagatatcctattttcagtgatcaagaattccaagaagcattacaaaccgctgaatatgaagtagcagaattggcatacaaatctgatttatatttacctgaagaattacatactgtggcgtataaggaaaacactttaggactaccattattcatccctcaggaaagaatccccttggtatctaaatcagacgttattgattataataataagtttttccaaccacaaaacactgtcattgccatggttggtgttcctcatgaatatgcattgaaactaattatggaaaattttggtgattgggcaaatacaaccacaacaaaaccaaatccaggaattaagaattatactggtggtgaaatttcattaccttatactccaccattatatgccaatttacctgaattatatcatattcaaattggattcgaaaccacgggacttttaaatgacgatttatatgctttagccactttacaaaaattattaggtggtggctcttcattttccgctggaggtcctggaaaggggatgttttctcgattatatactaaagtattgaacaaatatccatttgttgaaaattgtatgagtttcaatcattcttatattgatagtggtattttcggtataacattatctttagtccctgaagctgctcatgtttcatcacaaatcattgctcatgaattgagtcaattgttagtcacagaagaatcacaaggcggaatgaatgcaaaagaggttcaacgtgctaaaaatcaattaattagttcattattaatgaatgttgaaagtaaattggcaagattagaagatttgggtcgtcaaatacaatgtcaagggaaaatcactactattgatgaaatggttgataaaattaatcgtttaactataaaagatttacaaaatgttgcagaaaaagtattgacaggtaaggttataacttctaatggtggtactagtttgggtcttccatcaattgttatgcaaggagaaagagaaacttttggtgatgtggaatttattcttcgaagatatggattaggtaattacaaaggtccagaaatcacggaaccaagagatttcagtagtaatcaaaatgaaaagaagaaaaagagtcgttggttttag

SEQ ID NO: 6345 - DNA, 948 bp, Candida albicans
atgtcctatgatttgaatataccatggccagtcaataattatgataaatcgccaacattacaacaattaaccaatcttcgaaatattatcatcactaattattcattaggtataactcatcaagcaatcaatttccaaatatcaatagaatcagtgaaaataccaaccacaactactgccaccagcaaaatcaatccaatacctataaatcaattattaaatgaattattgcctaaattccccaaattaaaattattttctcgattaactttaatagttaatgattcatcaaaattacctcaactcaataaattacaaaatcaatttgatataattgctattcaaccattaaatgaaaaagttttacaattatcaatattaaatttagatattgatttaatatcaattaatttagcatcgaaattatcattttatttaaaatttaaaactttaaataatgctactgaaaaaggtataaaatttgaaatttgttatagtcaattaatatcaggcaacacaaacagtggaggaggaggatatattgacgattcaacaaatactaatttgattaagaagaattttttcaataatgtattacaattaatccgtggatgtagatcaagaggcataattatatcaagtggagctcaaacatcattacaattaagaaatttatcggatattttaatattattgaaaactttaagttcttcaccttcagatttatcgaaaaataattgttcgaaatttataactattaatccagaaagagtattaattaatgggaaattaaaacaaaaatctcatcgacaaactattgttgttaataatgatggagatttattgcaagaaaaacaaacaatttctggtagtgggggtgggtttaagaagaaattagatgatacttcatctggccgattattgaaaaagaggaaaacaacaaaatag

SEQ ID NO: 6346 - DNA, 2193 bp, Candida albicans
atgtattattcagaggaaattggtcttcccaaaactgatatttcaagatggaggttacgaagtgacgctcttggtagggaaacatggcattatctatcacaatctgaatgtgaaagtgaaagtgaaccacaatcaacatttgtccaatggcttttagagtcgccagattttccatctccgccatcgtcagatattcatactccagacgaggcagcaagaaagggagctgattttttgaaactattgcaattggataatggtatcttcccctgccagtacaaaggtccaatgtttatgacaattggctatgtaactgctaattattatagcaagactgagatacctgagccgtatagagttgagatgatacgttatattgtcaacactgcacacccagtcgatggtggttggggacttcattctgttgataaatctacttgttttgggacaaccatgaattatgtatgtctccggttattaggaatggaaaaggatcatccagttttggttaaggcgagaaaaacattacatcgtttgggtggtgccattaagaatccacattggggtaaggcttggctatctattttgaatttatatgaatgggagggtgtgaacccagctccaccagaactttggagattaccgtactggttaccaattcatccagcgaaatggtgggtacatactagggctatctatttgccattgggatatacgtctgcaaacagagttcaatgtgagcttgatccacttttaaaagagatcagaaatgaaatttacgttccaagtcaattaccttatgagtcaatcaaatttggtaaccagagaaataatgtttgtggtgtcgatttatattacccacatacaaagattcttgattttgcaaattctatattgagtaaatgggaagctgttagacctaagtggttattgaattgggttaacaagaaagtttatgatttaattgtaaaggagtatcagaatacagagtacttgtgtattgctcctgtgagttttgccttcaatatggttgtgacgtgtcattatgagggctctgaatcagaaaactttaagaaactccaaaacagaatgaacgatgttttgtttcatggacctcagggaatgactgttatggggacaaatggtgtacaagtttgggatgccgcctttatggtacagtactttttcatgacaggcttagttgatgacccaaaatatcacgatatgatcagaaagagttatttatttttagtgagatctcaatttacagaaaattgtgtcgatggaagtttcagagatagacgtaaaggtgcttggccatttagtactaaggaacaaggatatactgttagtgactgtactgcagaagcaatgaaggctattattatggttaggaatcatgcaagttttgctgacatcagggacgaaataaaagatgaaaacttgtttgatgctgttgaagttttgttgcaaattcaaaatgtgggagaatgggaatatggctcattctcgacttatgaaggtataaaagcccctttgttgctagaaaaattgaatcctgccgaggtttttaataatattatggtggagtatccatacgtggaatgtacagactcttccgttttagggcttacttactttgccaaatattaccctgactacaagcccgaattgattcagaaaactatttcctctgccattcaatatattcttgattcacaagataacattgatggctcttggtatggatgttggggaatttgttatacttatgcgtcgatgtttgcattagaagctttgcatacagttggtcttgattatgaatcctcatcagctgtgaaaaaaggatgtgattttcttatttcaaaacaacttccagacggtggatggtcagaatcaatgaaaggttgtgaaacacactcttatgtcaatggtgaaaactctcttgttgttcaatcggcttgggctttgatagggttgatattgggaaattatcctgatgaagagccaatcaaaagaggaattcaatttttgatgaaacgacaattaccgactggtgagtggaagtatgaagatattgaaggtgtatttaatcacagttgtgcaatagaatatccttcatataggtttttatttccaattaaggcattaggtttatataaaaacaagtatggtgataaagtgttagtttaa

SEQ ID NO: 6347 - DNA, 180 bp, Candida albicans
atgcatttgatgtacaccttagatgccgaaggcaaaagaatctacactttgaaaaagatatcagaagatggagaaatcaccaaatctgctcacccagctagattctctccagatgacaaatactccagacaaagagtgaccttgaaaaagaggttcggattgttaccaacccaaaactaa

SEQ ID NO: 6348 - DNA, 897 bp, Candida albicans
atggatacatcaactgtacttgagaaatacacacaggatttatctaatctaccacttgaagtgaggcatttattagaggaaatcaaaagcaaagatgtacaagtctcagaagcaaggaaacgataccaaactcgtgaccatcaacttcataaatttatacgaacaaatgggacactaactaaacatccaaaggaagaccagttgtattccaagatcgaagaagatatgaagcttgtgcagaaactacagaaagagaaaattctattggctaacactgcattgtttttgatatcgaaacatctatatcattttgagacagacattgccaagctagaaagagatgaattgttgcctcctttagaacaccccatcgagctaactgaagtatctaaagacgaatacgcaaaatcacttaatggcttttctgatagtgcctctgccacaccaacgcctaggaatggatcatcggcaactccagtggcagaaacagtgaaaaagatccaaaagaagaaacttagtgttaaaggggcgtcctcttctctggctcagtcatcctctgcttcaagacaggtgaagcgactccggtcagaagagatagaggatcctctaccgtatgagggagggtcattggcgttcaatggaaatgtagcaatgagcataaatagtgcagcagatgcaaatggtccaaacggcgaagatgctgataataatctatattgtttttgtcaacgtgtttcatttggtgaaatgattggttgtgataatgaagactgtaagtatgaatggtttcattggagttgtgttgggatcacatcacctcctaaagatgacgaaatttggtattgtcctgattgtgcttcaaagatggagaaaagaaaaaagaaacggaagaactga

SEQ ID NO: 6349 - DNA, 669 bp, Candida albicans
atgagtgatcctattaatgctaatccaacaattatcgatgtggcggatttacccacaagattaaataatgacaataacaacaacaatgataataattatcaaacaactaataaattgaatctaaaaaaaaacaaacaaatgatatcacaacttgtttctttatcattattaaaccctgatgaatcacctgaagcagcagatgatgaaacatccttgtcatccgatgaagaaaatgaagatgacgattttgatcctatagatgaacaagaaattttcgatcttatagcaacaatatctgatcctgaacatccattaacattagctcaattagccgttgtgaatttatccgacatcaaaataactaacccaccaaattgtggtggtgatggtggtgatggtggtggtggtggtatatcggaagtattaattaaaatcacccctacaattacacattgttcattagcaacattaattggattaggtatacgagttagattagatcgtagtttaccatcaaggtatagaattaaaatattgattaaagaaggtactcatcaactggaaaatcaagttaataaacaattgaatgataaagaaagagttgctgctgcttgtgaaaatgatcaattattaaatgtaatcctgcaaatgttaagtacatgtaagtag

SEQ ID NO: 6350 - DNA, 222 bp, Candida albicans
atggcatctcctcaaagagaaggattcagcatcccatcatctatctcacatgctgctttaggtcaagttcaaagcaagtcgcttggtgttaaatacaactgtgcacagtgtgctgcgtcgttttcgttaagtaagagtgataccatcagatgcaaagagtgtggacacagagttatatacaaagccagaacaaagagaatggtacagtttgaagctagatag

SEQ ID NO: 6351 - DNA, 552 bp, Candida albicans
atggttagggcattaaaacatcatgagaaaaaattattgaaaaaagtagatttcctcgattggaaacaagatcaaggtcatcgagacactcaagtgatgagaacgtatcatattcaaaatcgtgaagattatcataaatacaataagatatgtggtgatattaggaaattagcacataaattatcattattacaaccaactgatccatttagaattaaacatgaacaattattattagaaaaattatataatatgggagtattactgacaaaatcgaaaatatccgatttggaaaataaagttactgtgagtagtttatgtcgaagaagaatcggggtggttatgtgtcgattgaaaatggcagaaactataagtgatgcagtgaaatttattgaacaaggtcatgttagagttgggccaaatgttattactgatcccgcatatttaatcacgagaaatttagaagattatttgacttgggttgataattcaaaaattaaaagaaatgttcttaaatataagaataaaattgatgattttgatttagcataa

SEQ ID NO: 6352 - DNA, 7251 bp, Candida albicans
atgggacgtaaattacccccacctccacctcctccaggaatactgaataagaacaaacgaagaaaagagaatgatggaaaaccaattacggagaacagcaatggtgccggtaagcaacaacttccaccacctcctcctcctccttcatcctctcaatctttgaatagcaaacttcgaccacctccacctccacctccacctccaccaccttctgcagatagtaaaaaacaatcagcaccatcaacatcccttgaaaatgaacaagaaccaagaaaaagaacttggtctaatgtggtgaaatctcgacgtcagaaaaagtcagatacaaagagatcagccactcaggtcataccacagaagccagagatgccaccgcagcacttgcgcaagattatgattgatcatggtgatttgactctgaacaagattgcatctgataaacgctcacacttgggatctttaaaatatttaccacatgcattgttaaaattactcgaaaacatgccacaaccatgggaacagcaaaaggaagttaaagttctttaccacacaacaggagccatcacatttgtcaatgaaattcccagagtcatcgagccagtttacatagcccaatgggcgactacttggaacatgatgagacgagagaaaaaagataggaaacatttcaagaggatgagattcccgccatttgatgacgaagagccgccgttagattggctcgaaaacttggatgatacagaactagtggatgccattagactgaaagaaatagaggatgacgacgaattgagagattggttttatgatacaagacctttagtagaagacccggacattgtgaatggtgattcttaccgtaaatggaatttagattttggtaccatgaacaaattgtatcagttgtctcgacctatattacacgagggacaaacacagaaattcgataaaaactccttgttcacagcaaaaagtctaaatgttgctattccaggaggaccaaagtttgagccacttttcaaagacaaaatcaataatcccgagctcgaagattttacagaattcaattccgttgatagaatcatatttagacagccaatcaagactgaatataaagtggagttgccattcttatacaattcctttgtcaagaaagtatcggtttcccctcttggtgcaccattggattgccgatctcagcagccacaaagcaaggggcttcctgcttttacttttaatccaaaattcaatctcattgtgccgaaaacacaacctaagaagagtgaggataaagatgacgacgacgacgacaacaacgattttgctttagatgttgagccgtttctatcttggacgacaactgaagaaacaaatgacattgaagagtttggagaagttccagtggaaccaaaaggcacagcagatgcattggatttgttttttgctccatacccttttaatcgtcgcagaggcaaaaccatacgtgctcaggacgccgcattaacgaaagattggtatttgcaccaggccccgaaaagcagcaacaccaaagtgcgtgtttcttaccagaagctattgaaaaattatgtgttgaatgaggttcacaaacgaccaaactcaagacgaagatcacataagaataaacatcaaaaactattgaggagtttaaagatgacgaaatactttcaacaaacaacaatagactgggttgaagcaggtatacaagtgtgcagacaagggttcaatatgttaaacttgttgatacacaagagaggtcttacgtatcttcatttggattataattttaacttgaagccaacaaagacgttaagcaccaaagaacgtaaaaagtctcgttttgggaacgcatttcaccttattcgagagcttttacgagctgtcaaaatgattgttgattcccacatccagtatcgtttaggtaatgttgatgcttaccaactagcagatgggctttactatcttttcaatcacttgggccaattgacaggtatctacagatacaaatacaaggtcatgcaccaaatacgtcaatgtaaagatttaaaacatattatttatcaaagattcaacaaagtaataggtaaaggtcctggatgtggcttttggcaaccggcatggagagtgtggctcttctttttgaggggtatcattccgttattagagagatggttgggtaaccttattgctagacagtttgaaggtagaagacaaaatgatgtggcaaaaacaattaccaagcaaagagttgacgcatactacgatattgagttgcgagcccaagttatgcacgacatattagatatgatccctgaaggattgaagcaaagcaaatctaaaactgttcttcaacatttgagtgaggcatggcgatgctggaaagcaaatattccttggaaagttccagggttacccaagcccattgagagtataattgaacggtacataaaagccaaggcagatggctggatttcagtggcacactacaacagagaaagaattaggaaaggtgcacatgtggaaaagacagttgctagaaagaatttggggagacttacaaggctatggatcaagaatgaacaagaaagacaaatgaattttggcaagaatggtccatttgtgtcaccagacgaaggggtgaagattttccaaacaatggtgagctggcttgagagcagaaagtttaatcctattccgttcccaccaatatcttataagcacgacacaaaattgttggttttggcattggagaatttgaaagaaagctatagtgcaaatgccaagttgaattcggcacaacgtgaagagctcgcattgattgagcaggcatatgacaacccccacgagtgtttggttcgaatcaagaagtttttgttgacccagagaattttcaaggaagttggtttagagatgatggattactatagccatttggtgccaacgtattcggtggatccattggaaaaaattactgatgcctatttggaccagtacttgtggtatgaagcagataaaagaaggttattccccaactgggtcaaacccagtgatgatgaaatcccaccgttacttgtctacaaatggtgtcaaggaatcaataatttacatagtgtgtggaatacgtcggcaggtgaatgcggtgtcatgcttgaaacttcattaaacaaattttcggaaaacattgatttcaccttgttgaacaggcttttacgtttaatcatggacactaatattgccgattatatcacttccaaaaacaacgtgagtcttacattcaaagacatgaaccatgtcaaccagtacggaatcatcaggggacttcaatttgcgtcatttgtgtatcaatactatggtttagttgttgatttgttgattcttggcttggatagggcattggaaatagctggtcccgttcagaacccaaacaattttcttcaatttaaagatttggagactgaaactgcatcaccaatcaggttgtattcgcgttatttggacaagattcatatatttttccaatttgacaatgaagaggcatctggtttaattcaagactatttgtcggaacacccagatccaaattttgaaaatgttgtggggtataacaatcatagatgctggccccgcgactctcgaatgcggttgatgcgacacgatgtgaatttagggagagcaacattttgggagattagtggacgcattccaacttcgttgacgtcgatagaatgggaggattcgtttgcatcagtgtactcccgcgataacccaaatttattgtttctgatgtgtggttttgaagtgagaatattaccgaaaatccgagccaaagagcttctgtcatcgcaggaaggtgtgtgggatctcgtagaccaaaacaccagagaaaggacagctaaggcgtttttacaagtgtcacaagaagctgtcgatcatttccacaatcgaattcgtcaaatattaatgtcttctggatctactacatttaccaaagttgctgcaaaatggaacactgcgttaattgcgttggtcacatactatagagaagctgccattgccacgccgtcgttgttggatgtgcttgtcaaatgtgaaacaaaaattcagaatcgagtgaaaatggggctcaattccaaaatgccttcaagattcccaccagcagtgttttatacacccaaagagttgggagggttaggcatgctaagtgcatcacatattttaattcctgcttcagatcttcggtggtctaaacaaacagatactggaataacccatttccgagctggtatgacgcaccaagatgaaaagattatccccacaatatttagatacgtgacttcttgggaaaacgagtttttagactcgcaaagagtgtgggccgagtatgctattaaacggcaagaggcaattgagcaaaacagacgattgacatttgaagacatggaaaataactgggaccgaggtttgccacgtatcagtacgttgtttcaaaaggatagacacactttggcttatgacaagggccatagaataagaagagaattcaagcagtttagcttagcccgctttaacccattttggtggaccagtaatcatcatgatggtaaattatggaacttgaatgcgtacagaaccgatgttatccaagcgttgggtggtattgagactattcttgaacatacattatttaaaggtaccggttttgattcgtgggaaggattgttttgggagaaagcttcaggttttgaagactcgttgaaattcaagaaattgaccaatgcccaacgacaagggttgagtcaaatacccaaccgtcgtttcacattatggtggtcccccacaatcaatcgagcaaatgtttatgttgggtttttggtgcagttggacttgactggtatatttcttcatggtaagatcccaacattaaagatttcgttgattcaaattttcagagctcatttgtggcagaaaatccacgagagtgtagtccaagacatttgccaagttctcgataaagaattggaagttttgcagattgataatgtggaaaagcaagctatccatccaagaaaatcatacaaaatgaattcgtctacggcagacattgtgttgacaagtacttacaaatggaaggtctccaagccatctttgctcaacgaaaaagatgataaaatggaaattcctgccacaacgttttggattgatgttcagcttcgatatggtgattatgactcgcatgacatatcaagatatgcgcgatcaaagtttttagattatacaaccgatggtatgagctcgtatccgtcaccaactggtattatcattgcaattgacttggcatataacatgtacgatgtgtatggtaattggttcccagggttaaagccgttggtccacaatgccatgagagagattatgaaggcaaacccagcattgtatgtattgcgtgaacgtattcgtaaggggttgcagttgtaccaatcacaacctcaagaagcatttttgaattctaataactatgctgaattgtttaataacgatacccaattgtttgttgatgacaccaatgtttatcgagttactgttcacaaaacattcgaaggaaacttggccacaaaaccaatcaatgggtgtatatttatactcaatcctaaaagtggacaattatttttgaagattattcacacgtcggtatggtcaggtcagaaacgtttgggccaattagccaagtggaaagcagcagaggaagttgctgcgttggtcaagtcgttaccacgagaagaacaacctaaacaattaattgtcagtagaagggggatgatggatccacttgaagtccatatgttggatttccccaatatctccattagaccttcggaattgcatttgccgtttgctgcggttatgaagatagacaagttgtcggatatagttttgaaagcaagtgagccgcaaatggtgttgttcaacttttatgatgattggttaaagagcatttccccttatactgcattttctcgagtgatattgattttgagagcattgaatattgacactgagacagccaaccatattttacgtcctagtgctaacattgtgacacaagaccaccatatttggccatcacttagcgatgagcaatgggttgacgttgaagcccagttgcgagacttgattcttagcgactattccaagaaatacaatgtcaatatccaatcgttgacgcaatcagaagtgcgtgatttgatattgggtcaagatattagagctccttctgttaagagacaagaaattgctgaaattgaagatggtaaatccaacaaccaagtggaaaacaaggaactaacagcattgaagacaactacaaccaatgtacatggtgaggagattacaaccgtaaccactacaaactatgagcaactgacgttttcgtcaagaaatgaatggagaaatcgtgctattgctgccaacaacttgcacttgcgtgccaaaaatatatatgtgagttcagaagagtttgttgatgacgagaattcgttcacgtacatcttgccaaagaatattttgcaaaagcttatacagatttcagacttgagaatccaggtgggggcatttctttacggtaaatcccctgccgaccatgttggtgttaaggagattaagtgtattgccattgtgcctcagttgggtaacgttaattcaatacagtttccaaacacccttcccgaccaggtagggtacttgaaggatttggaattgttgggatgggttcatactcaatcacaagagtttagttacatgacatcatttgacatcaccacacaatcgcggtttttcgatgaatacaagccaaattttgtcaccatgaccgttgcttacacgccaggatcagtcacagtatcgtcttttgaaatcaccaaagagggatttgattggggtcgcacaaacaatgacatgatgtcagaaaccccatctgggttcagtaaagattatgctaaaaagaaccaattgatcatgtccgacaagattgctggtacatttatggtgcctgatgatgacatctggaactattttttcatgggggccattttcaatgccgctgaattgtatgatctaaagttggacattccgttgacattctacgatgaactacaccgtccaatacattttagtaatttcacccacattgaggctggtaatgaagaggaagcaaatcaggaagatgtatttagttag

SEQ ID NO: 6353 - DNA, 1749 bp, Candida albicans
atgacaaccaatgaatccattgatatcactgagttgagaactcatctctatcattcggcatgtaaattgaacaacttgagtttataccaagccagtaaatggtgtgcagaagcattgaatggattgaaagacaaacaacagccggtgacgtaccctcccctcgccttagactctgatgatttattagatcaggatatactaatattggcaaagtcgtattttgattgcaaagaatttgacagggcggcccatgtgttgaaggactgtaagggaggcgatgccaagtttttaagattatattccatgttgatctctgtcgacaagcgctccacagaagagacagacgggtccttaaatattggaatgatcaatgaaaccaacgaagatactgggaccacaagcaaggagctggcattaaattctttgaactcgcaattatcgaaaatcatcttggaatctgaaaactatttgaaacaaaaacagaatgcctttttgctttacttgaacggaattatctataacaaaaagaaaaaataccagttagcccgccagagtctacacgattcattacagattttcccatataactggtcatgctggcaggaactcattgcatcgttttcatcttttgaagaggcccacaactatataaacaagtgcaaaaacaccaataatccattagccaacaatgtcatgtttcagttttttgaggtagtgatattgcaagaattttatcatcaactgaacactttgttcgataacttgagcaacttggcggctcttttccccgggtttgtgtttttgaaaatacaacaatttcttatatcataccataacttggattactttcaagcagaggcaacatttgatcagatactagttgaggacccgttgagattggatgatctagacacgttttcaaatatgttgtatgtgatggagaagcgctcgaaactttcgtaccttgcccagtatgcgtcgcaaattgacaaatttcgaccggaaacgtgttgtatattggcaaactattattcaatgaaatgcgaacatgaaaaagctataatgtattataaacgagccttgactcttaacaaaaattgtctaagtgcctggacattgatgggtcacgagtttgttgaattgaagaatagccatgctgcgattgagtcctatcgacgtgcagtggacaccaaccctaaagatttccgtgcgtggtatggtttaggacaagcatatgaagtattggatatgcatctttatgcattgtactactatcaacgagccacaaatttgcaaccattggataagcgtatgtggcaggcaataggtaattgttatgaaaagatcgatcaattagaagaagccttcaaatcatttgcaaaagcactttctatagggaaagtgatgcacggagatctggcttttgataacaaggattttgatgaatgtgatttttcggtagaaccacacatttgctatcgattagcaactattctggaaaaactaggcaatcacaaagatacctacaagtatatgaggctatgttttgcccaagagtttgagtggggtgttggcgacgagacatcaaaggcacggctttggcttgctagagacgccttgaataactggaagtttgaggaggcatatgaattagctaaggatttaaactacagcaatgctcacgatatcgaggaagcgcgagccatcgcacgagatgctcgaaatagaatgaaaaaccaaatgcattaa

SEQ ID NO: 6354 - DNA, 1323 bp, Candida albicans
atgtcttttaacgatttaggggtagccaagtggcttagtgaatctcttgatgctatgaagatatatacaccaacagctattcaatcagcatgtattccagcaattttgaagggccacgattgtattggtggtgctaaaactggtagtggtaaaaccattgcatttgcagccccaatgttaactcaatggtcagaagatccctttgggatatttggtttgattttgacaccaacacgtgaattggcattacaaatagctgaacagtttgcggcattgggagcaaatatgaatattaaagtggctgttgttgtcgggggtgaagatttcgttcaacaaactttagcattgcaaagaaaaccccattttgtcattgccacacccggtagattggctgaccatatcttgaacagtggagaagaaaccattagtggattaagaagagttaaatatttggtgttggatgaggctgatcgattattgagtaatagttttggcagtgatttacaacgatgctttgacgtattacctaccagtgataaacgacaaacattgttatttactgccactataacagatgctgtgagggcattgaaggagaaaccaccgactccaggtaaacctcccgtgtttatgcacgaagttgaaacagttgataaggtggctataccgtcaacattacaaatatcgtatgtgtttgttccttcttacgtcaaagaagcatatttgaatagtatattacatcttgaacagtttaaggattcaacagcagtgatatttgttaatagaacaacaacagccgaagttttacgaagaatgttgaggaaattggatttccgagtcgcctcattgcattcggaaatgccccaatctgaaagaacaaattcattgcatagattcaaagctggcgcggcaagaatattaatagccactgatgttgcctcgagaggtttggatatacccaccgtggagctcgtgattaattttgatatcccagctgatcctgatgatttcattcatagagtcggtagaactgccagagcagggagaaagggtgatgccgtgtctattattggagaaaaagatattgatagaattcaaagtattgaagaaagaatcaataagaaaatggagttgttggaagacgttaatgacgataatgtgattaaagaatcattgagtgccacatcagtggctaaacgtgaatcattgatggaaatggataaagaaaatttcggtgaacgtaagaaaatcaacagaaagaaacatggactcgataaagtgaaaccagaaagagtaacaaagccaaagaaatctaagaaataa

SEQ ID NO: 6355 - DNA, 1347 bp, Candida albicans
atgggcaaatttttacaattattatcacatcctactgaacttaaagcagttatacaactttttggatttagacaaccattacatccaggtaaaagagatgttaatgataaagaattggttagatgttatgaattattgaatctaacttcaagatcatttgctgctgtcattgaagaattacatccagaattacgtgatgcggtgatgatcttttatcttgtattaagagcattagatactattgaagatgatatgacgattaaatcatcaattaaaatccctttgttgcgtgaatttgatactaaattgaatactaaaaattggacatttgatggtaatggacccaatgaaaaagatcgaactgttttagttgaatttgataagattttgaatgtttatcatagattaaaacctcaatatcaagatattattaaaagtattacttttaaaatgggtaatggtatggcagattatattttagatgaagaatttaatgttaatggtgttgccaccgttgaagattataatttatattgtcattatgttgctggattagtaggtgaaggtttaactaatctttttgtattggctaattttggtgataaaacattgacagaaaataattttgctaaagctgattccatgggattatttttacaaaaaacaaatattattagagattatcatgaagatttacaagatggtagaagtttttggcctcgagaaatttggtctaaatatactgaaaatttacaagatttccataaagtaaaaacccctgccaaagaatttgctggagtaagttgtattaatgaattagttttgaatgcattgggtcatgtcactgattgtcttgattatttatcattagttaaagatccttcttcattctcattttgtgctattcctcaagtaatggcagtggctactttagctgaagtttataataatcctaaagttttacatggagtggtcaaaattagaaaaggtactacttgtagattgatattagaaagtagaacattaccaggggttgtcaagattttcaaagaatatattcaagtgattaatcataaatcatcagttagagatccaaattatttgaagattgggattaaatgtggtgaaattgaacaatattgtgaaatgatatatccaaacaaacaagctttacctccaagtatgaaatcattaccagaaaataaatttaccaagattgttgctagtagagaaagtattgatttatctgtacaaagaagaattgaacaagaaaatttcaattgtaatgttgtgttatttggtattggtgctttaattttaagtttaatttattttgtcctttattga

SEQ ID NO: 6356 - DNA, 885 bp, Candida albicans
atgtcgtcggaattgttacaggaagtccccaaatccatagaacatgtcaaacatattattttaattttgtctggtaaaggcggtgttggaaaatcttcagttacgacacaagttgcattaacattagtcaataaggggtttaatgttggagttttagatatcgatctaacgggaccatcattaccgagaatgtttggagtggaaaacaaacaagtacatcaatcaacacaaggatgggtacctgtttctgtgtataataacaataataatcaaggaacagattctaaacgtgggaacctttcattaatgtccttagggtttttgttgggcgatagaggtaattcagttgtatggagaggtcctaaaaaaactgctatgatcaaacagttcttgaaggatgtagtatggggcagtacagaaacccccttggattatttactaatagatactccacctggtacatctgatgaacatattgctattgccgaagagttacgatgggcaaaccctatcgatggtgctattatagtcaccacgccacaacaggttgccactgctgatgtccgtaaagagataaacttttgtaaaaaagtcaattttcagatattgggtatagtagagaatatgtctgggtttatatgtccacattgttctgagtgtactaatattttctcaagtggaggtggtaaggctttgagtgaacaattaaatttgacatatttgggtaacgttcctatcgatcctcaatttgttgaattagtggagttgcagaatgagcaagaaaacaaaaagttgattgaattgtatgatgattgtgaattgaaacctatactaaacgggatcgttgacaaaatactagataagaatctaccatctagaatttga

SEQ ID NO: 6357 - DNA, 957 bp, Candida albicans
atggaaatagatagtcatgaagggccatcggtcactattagggaagcggaaaaagaccatgtcaattttatattgaagaatgtcgacttggctgtggcaaactcaatgagaagaaccattatagccgaagtgccaacactagcaatagatttggttgaaatagatgttaacacgtcggtattggcggatgaattcttgtctcatagattaggattgattcctttagttagtgaaggaatcgataacttgacttactcacgagattgtacgtgtgacaactactgttctaaatgttctgtgacattacaattaatagcaaattgtgctaccgagtccaccatgaatgtttatgcttcagatttgcaaaagatgtctcataacggctcaaaattgggtgatccagtcatcagagatccccaagcaagaggtccattgatttgtaaattaagaaagcatcaagaattatcacttacgtgtattgctaagaaaggaatagccaaagagcacgccaaatggtctccgactgcggctatagggtttgaatatgatccttggaataaactaaaacataccgactattggtatgaagttgacgccgaggcagaatggccaaaatcgaaaaactgtgactgggaagaagcacctgatccagaggcaccttttgattataaagcaaaaccatcgacttactattttgatgtggaaactgttggtaacttgcctccaaatgaagtgattatcaagtctatagaaactttgcaaacaaaattggcagctatttcaattgaattaaataaggaagatgttgaagttaatgaagctgcagctggtgggttcactagttatggtagaactgagtatggcagaacagaatatggtggtgctgatggaggtcaaactcctggtggtagaacaccatatggtgacagtggtttcggtggtgctcaatggggttaa

SEQ ID NO: 6358 - DNA, 2859 bp, Candida albicans
atggcattggtatctgcagcaccatatttggcattattgggagaacccgattcaactttaaaatcgtatgccttatcatctttaaatcaagttgttgatcagttatgggctgaaattgccaataatatcactgaattggaagaattatatgaagatgattcattcgacaggaaagaattggccgctttggtcatatcgaaagtttattacaatttgggagatttcgacgccgccgttaaatatgcattatatgctggcaatgaatttaatttggaagaaaaatctcaatatatggaaaccattgtaagtcaatgtatcaatttgtacaattcattatctcaacagaaattcaacgattcaacaacaaagattgatcctcgtttgacagccattttcgaaaaaatgttgaacaaatgtttgaaagccaatgaagtaaaattatcattaggggttgccttggaaagttaccgattagatttagttgaatcgattttacaagaccaaataaaaaacaatgaagaacaagctttgaatttgatcaactatgtgttagtgtgctcaaataatactgttagcaacactaattttagagtacaagtgttgaactccttgatatctttattattatctttgaaaaagcatcaagattttttcacaatcattaaaatcattgtacaattgaacgattctgaattagctgtcaaattattccaagaattgataaaccaaaatgaagatttaattgcttaccaagcagcctttgatttagttaatgctgcttcacaagaattattggacttggtgatggaaaaattgtctaacgccaaggaatctgaaaatggcaccttgaagaagattttgaatatattgtctggagtgccaacctgtgatttggacaatacatttttattcaaaaacaataatgctgatatcaccattttgaacaaaaccaagaacttattagatggcagaagttcgattttccattcggcagtcacatttgccaatgctttcatgcatgctggtactaccgatgattcattctttagaaagaatttggaatggcttggtagagcaaccaattggtctaaattttctgctactgcagcattgggtgttattcacaaagggaatttatcacaaggacgtaccatattaaaaccatacttgccaggatcatctggttcagccaacaacaaaggtggttccttgtttgcccttggattgatctttgctggacatggtagagaagtcattggaactttgaaatcatttattgacgacaacgggaatgccgcaggatccaacgatattgatattcaattgcatggagcagctttaggtgcaggtgttgccggtatgggctcaaaaagtgaaagtctttacgaatctttgaaagtggttttgtactctgattcagcaatctcgtcacaggctgctgctttgggtatgggattagtaatgttgggttcaggaaatgaggaagccatcaaggatatgttaacttatgccttggaaactcaacacgaaaatattattcgaggattagctattggtattgccttgttgagttatggccgtgaagaaaaagccgatgaaatcattgaccaattgatgaaccaagaatcgtcgattttgagatatgggggtgcatttactatcgccttagcttatgctggtacaggaaacaacaatgctattaagaaattattacattttgcagtttctgatcccagtgatgatgtaagaagagcttctgtcttgagtttgggattcttacttattcgtgattacacagcagcaccacaaattgttaaattattatctcaatcccacaaccctcatgtgagatatggtactgctttagctctaggtatttcttgtgctggaagagcctatcctgctgcaattgaagttttggaaccattgacgaaagatgcagttgactttgtaaggcaaggtgctttaatggccagttcgatgattttaattcaacaaaatgaatttatctatccaaaggttaaagaattcactaaacaatatgctgacactattaaaaacaaacacgaagatgcattggctaaattcggtgctactttggcacaaggtataatagatgccggaggcagaaactcaactataaatttggaaaattcacaaacaaacacattgaatacaaaggcaattgttgggttgacattatttgtgcaatcatggtactggttcccattggctcatttcttatctttatcatttgctcctacttcgatcattggtgtgagaggtcaagatttgaaggcacctaaatttgaattgaattgtcatgccaatccagaatatttccaatatcctccaaaagtggaagaggccaaagagaaacagccagataaattggccacagccgtgttatctacaactgctaaagctaaaactagagccaaaaagaaacaatctcagaaagaaggtggtgatatcaaagctgaagataagatggatgttgacgaagaaacgaaaccgaaagttgatgccaaagaaagtaatgacgatgaaaagaaggaaacgaagaagcaaccagtttcagatgagccagtgactgttcgttacgccagaactccttacaaaatttcaaatttgtctagggtattaccggtgcaatctaattttatttcctttattaaagacgataggtttgttccagtaagaaagtatcgtgggtctagtggtatagtggtattgcaagataacaaaccagaagagaaagtagagtttatcaagacagtcagacaattgaacatcaccgaagcaccagtgcctgaaccatttacattgagtggtgaagatttgcaagatgatgaataa

SEQ ID NO: 6359 - DNA, 2121 bp, Candida albicans
atgtctgaagttgcagataaagtcaaggacttgtcgttgaaagacaagaaaaagaaacccaccaacccattatacttggaccctcaaccagaattcattgaagaaagaatcaagttgtttgacgaattgaaagctcaatatggcgaggaaattagtaagaaggagaaattgccaatcaaaattacgttaagagatggcacaatcaaagaaggtactgcttacgagacctctcctatggatattgccaactccattggtaaatcgtttgccgaaagacaagttattgccaaagtcgacggtaagttgtgggatatgccacgtccattagaaggagatgtcaagttggaatttttggactttgagcatccagaaggtaaggccgtgttctggcactcgtcggcccatattttgggtgaggcttgtgaatgccattatgggtgtcacttgtcgcatggtccaccaaccgaagatgggtttttctacgatatgtcgatcaacaatggtgaaacgtttgttacccaagcagattttggtaatttagaacaagtggccaccaaagccattaaggaaaaacagaaattcgagagattggaaatgaccaaggaacaattgttaaagatgttccactacaacaagtacaaggtcaagtttatcagcgacaagatccccgacggtacttccactactgtgtatagatgtggtccgttgattgatttgtgtgttggtccccacattcctcattcaggaagaatcaaggcatttaaggtgttgaagaattcttcgtcctactttttgggcgatgccaccaatgactcattgcagagagtttatggtatttctttcccagataagaagttgatgactgagcatttgaagtttttagctgaagctgctgaaagagaccacagaaagattggtagagaacaagaattgtttattttcaatgaaatgtcgcccggctcggccatgtggttaccacatggtgcaagaatttacaacaccttggttgatacgttgagaacagagtacagaaagaggggctatgaagaggttattacccccaacatgtactcgaccaagctttgggaaacttctggtcactggcaaaactataaggaaaacatgttttcgtttgaagttgaaaaggaaacgttcgggttgaaaccaatgaactgtccaggccactgtattttgtttaaatcgagagaaagatcatatcgtgaattgccatggcgtgttgccgattttggggttatccacagaaacgagttttccggcgcgttatctgggttgacgagagtccgtcgtttccaacaggacgatgcccatattttctgtaccactgatcaaattgggactgagattgctggtgttttcgactttttaaagaaaatgtatggtatttttgggtttgagttcaagatggagttatccaccagaccagaaaagtatgttggtgacttggatacttggaactctgctgaaaagaaattagagcaagccttaaacgatttcttgggtgaaggcaaatgggagttgaaccctggtgacggtgcgttctacggtccaaagatcgatattatgatcagtgatgcgttaaagagatggttccagtgtgccactatccaattggatttccaattgccacagcgttttgagttggagtacaagtccgacaagggtccaaacacgcgtccagtgatgatccacagagccattttggggtcagttgagagaatgactgctattttgaccgagcactacaaaggtaaatggccattctggttgtctccaagacaaattttgattgttccggttggtcctaaatactatgactatgcccaaaaacttcaaaagaagttgaatgacgattactttttctactgtgatgttgatgttagtggtaacaccttgccgaagaagattagaactggtcaaatgtacaagtacaattttattttcattgtgggagaagaagaggaaaacagtgaaagtgtcaatgtcagaaacagagacattcctgaagaacaaggaaagaatgctatggtaggatttgatgatgttgtgaagcaattggttgcgttgagagaatccaagagaagcgacaataaattacaatag

SEQ ID NO: 6360 - DNA, 1581 bp, Candida albicans
atgtctgttcaaatatttaacgatcaagctactgaggaaagggctgaaaatgcccgtatgtctgcatttattggtgctattgctgtaggtgatttagtcaaatcaactttaggacctaaaggaatggacaaattgttacaaagctcaagcaatgctgaccatgcattagtcactaatgatggagccactattctcaaatccattccttttgataatccagctgccaaagttttagttaatatatccaaagtgcaagacgatgaagttggagatggtactacttccgtcacagttttaagcgctgagttgttaagagaagctgaaaagttgattgatcagaaaattcatccacaaaccattatagaagggtttagaattgcatgtaatgtggctatccaagctttgaacaaagcagctgtcaacaatggcgacaacccaactttatttagaaacgatttattaaatatagcccaaaccactttgtcatcgaagattttgtcacaagataagctattattttccaatttggccgtggatgctattttaagattaaaaggatctaccaatttaaaccatattcaaattattaaaaaagtcggtggcaaattatccgattcttacttggaccaagggtttatattggaaaagaaatttggtattggtcaaccgaaaaaaatcaccgatgctaaaatccttattgctaatacttccatggacaccgataaggtgaagatttttggtgctaaattcaaagttgattccacatcaaaattggccgaattagaaaaagccgaaaaattgaaaatgaaaaataaagttgacaaaatagccaagtttggcattaatgtgtttatcaatcgtcaattaatttatgactacccagaacaattattcactgatgccaagattaactccatagaacacgctgattttgatggggttgaaagattagcattagtcactggtggagaagtggtgagtacttttgatagcccagacaatgttaaattgggacattgtgagtcaattgaagaaattataattggcgaagacaccttcctcaagttctctggagttgctgctggtgaagcatgtaccatagtgttacgtggtgctaccgagcaagttttggatgaagctgaaagatcgttgcacgatgcattatcggtattgtcacaaactactagggaaaccaaaactgtgttgggaggaggatgttctgagatgttaatggctaaagctgttgatcaagcagctgcaaacgaaacaggaaagagtgctttggccatagaagccttcagtagagctttgagacaattgccaactattttagccgataatgctggttatgactcaagtgatttggttactaaattgaggtcagccatatataatggtatgtctacttctgggttagatttgaatcatggtattgttgctgatatgagagaaatgggaattgtcgaatcgtacaaattaaagaaagctgtggtatcatcagcggctgaggcagccgaagtgttattacgagttgataacatcattcgagcaaaacccagaactgccgatagaaatcattag

SEQ ID NO: 6361 - DNA, 1359 bp, Candida albicans
atgagtcctgtgatggaaaatgtaaatatggagtcattcaaagactcagtgaatgctgaatctagcaagccgtccgagtcggacatgaaattttactaccagcgtctcttaccgttccgttatattttccaatggctaagtcactcgcctaaaccaaccaaggatttcaccatgagagaatttgcgtatgagtacagatctaagatataccaacgttataactcatttggaacgttagaagagttcaagaaatctgtggttaccgccaaccccacacgttttgaaattggggcagtctacaaaatcaaccccaaggaacgtaaaaacttaccaaaacaagcatttaagcctgaaagtaaggagctcgtttttgatattgatttaactgattatgacgatattagaacttgttgtcagggtactgatatatgctgcaagtgctggaagtttattcaagtgggatcgaaaatcatcgaagcggccttgagagaagattttgggtttgagcatttggtatgggtattttcagggagaagaggtgcgcattgttgggtaagtgataaacgagccagggaattggatgagactaccccaaagccgataatcgattatttggatgtattgagttccaaaaaccagaatggtagtttaaatattaaaaaaccattccatccacatgttgaacggtcatttgaaattgtgaaaaaagagtttttgaatgtgattctacaagaacaagatccatggaataccacatcggaagagaccaaggcctggaaacaagttgatgaattgttggcatttataccaaacaaggcattgcaaatagagttgaaaaacaagtggaaaggtcagacctttgggtctacatcaaaagaaaaatgggatgatatcagtacagtggcatcaaacgtgctcaaatcgaattctcaagtagcacaattaacggaagccaaaaaggatataattatttattatatgtacccgagattggatgtccaagtttctcgacaagtgatccatttgttgaaatccccattttgtattcacccgggtacaggtaatgtttgtgttccgtttgatccgttgaaaaatatatcagggaatcctgctgatgacgattatgggttcaatccgaaatcagcacccaatttacgcaaaatacagaatgaattggaagaatgggaacaaaataggtcggatgagaatgacagccaagaaaaagttattgccgattacgagaaaacgagcttgaagccatatattgattactttgccaagtttgtgaataatttgcttaaagaggagttgaaaggtactgaaaaacgatcgagagaagaagatccattgagtttttag

SEQ ID NO: 6362 - DNA, 501 bp, Candida albicans
atgaatattcgtcaacaaatcactcaatttttatcacttgcatatgttttttcatcagcatttatgttatggaaaactttatcggtgatagccaattctcattcccccatagttgttgtattatcaggatcaatggaaccagctttccaaagaggtgatatattatttttatggaatagagatcatcaacaaaaagttggtgatatagttgtttatgaaattgatgggaaatctattccgattgttcatcgagttttaagagaacatcataatctggaaaaacaattattattaaccaagggggataataatgctgttgatgatttatcattatatgctaaaaagcaacaatatttaaatcaaaaacaagatttggtgggtaccgtgaaaggatatttaccatttattggatatgtgaccattttaattagtgaaaatgtatattttaaatatggtatgttaggattattaggattatcatcattattttccaatgaatag

SEQ ID NO: 6363 - DNA, 645 bp, Candida albicans
atgaacggtatttcagtagacatcaatcatttgaaaaagggggaagtgaatttaggtacttcaattatggcagttacttttaaagatggagtaatattaggtgccgattctcgtactacaaccggttcatatattgccaatcgagtcactgataaattaactcaaattcatgatactatatattgttgtcgttctggatcagcagcagatactcaagcagttgctgatatggtgaaatattatttacaaatttattcatcacaattgcctcctggtgaaactccaacaacaaatattgctgctaatgtatttcaagaaatttgttataataataaagataatttaactgcaggaatcatttgtgctggttatgatagaaaaaatggtggatcagtttattcaattccaataggtggatcaattcataaacaaaattatgccattgctggttcagggtcgtcatatatttatggttggtgtgatgaaaattataaaccaagtatggaacaagaacaatgtgttgagtttgtaaagacagctttatcacaagcaattaaatgggatggttcatctggtggtcttattagaatggttattttgactaaaaatggagtagaaagacgtgttgtatatttgcatgaataa

SEQ ID NO: 6364 - DNA, 1590 bp, Candida albicans
atgtcaattcaagctcctgttgtatatttaaacacttctacgcaaagacagcagggaagacaagcacaagttgctaatatcactgcagccaaagccgttgccgatattattcgtacctgtttagggccaaaggcaatgctcaagatgttattagatccaatgggtgggatagtgttgactaatgatggtcacgccatattaagagaaattgatgtatctcacccagccgccaagtcaatgattgaattatcaagaactcaagatgaagaagttggagacggtaccaccaccgttatcattttagcaggagaaatcttagcacaaacattcccttacattgagaaaaacattcatccagtaatcattattaaagctttaaaacaagcattgaaagatgctttggaaatcatacacgacgtgtcaactccagttgatatcaaaaatgatgctgccatgttgaagttgattaaagcttctattggaaccaaatatgtcaacaaatggtctactaaaatgtgcgaattatcattgaaagctgttagaacagttatggttgaaaaaggagattacaaggaaatcgatgtgaaaagatatgttcgtattgaaaagattccagggggcgaagtcaccgatagtgaagtgttagatggtattttattaaacaaagatgttgttcatcctaaaatgaaaagagaaataacaaatccacgtattatattattagattgcccattggaatataaaaagggtgaatctcaaaccaacattgaaatcacaaaggaagaagactggaacagaatattacaaatcgaagaagaacaagttaaattaatgtgtgatcaaatcttggagtttaaaccagatttggtgatcactgaaaaaggtgtaagtgatttagctcaacattatcttttgaaaggtggagcttctgctttacgaagagttaaaaaatcagacaacaatagaattgcaagagctactggagccactatcgtaaatagagttgaagatttgaaagaatccgatattggtactaaatgtggagaattcaaagttgaattgattggtgacgaatatttcacttatttggtcaaatgtgaaaacccacaagcctgtactgtgttgttaagaggtgcctccaaagatatccttaatgaaattgaaagaaacttacatgatgctatggctgtcaccagaaacgtcatgtttgaaccttcattgtctccagggggtggggccaccgagatggcttgtagtgtcagattggctgaaaaggcaaagaccattgaaggaattgaacaatacccataccaagctgttgcagatgcctttgaagtcataccaagaactttaatccaaaactgtgggggtaatccaatcaaagtgttatcgcagttaagagccaaacaagcacaaggtcaatacacatacggtattgatggtgaaaatggtaaggttgttgacatgaaagattacggtatctgggaaccagaagtgatcaaacaacaatcaattaaaactgctattgaaagtgcctgtttattgttaagagttgatgatattgtcagtggagtacgtcaaagtcaatag

SEQ ID NO: 6365 - DNA, 3321 bp, Candida albicans
atgagattttttttttcttccctgttagtgatgagatgtatgttaaatagaacaagaactacaaaaagaaaaaaaaaattcatagtaaaattcaatcctttaaccatcaaacattacaaccaactacaaaagatggatgacttgtttgatgtctttgatgaagctcctcaagcagctccacctaaaatagaagaaatcaaagatgaagtgaaaccagaaaccacagataatcaaactcgctctacgaagaaacgtcagttcgacaacaacaacaaaacaactaccaacagcaacaacagtagtagtagtaataacaaaaaacataaacaagctgaagatattaaaccagttgtttttgattcagttgaaattgaaacatctagagaagtcaaaccaagtgaaggattgagtaattctgccacggttgacgcagataataaattgaaattaaaacatcaaattagacatcaagtagccatcccaccatcatatccttatgtaccaattggtgaacataaacgtaaacatgaagctagaacttatccattcacattagatccgttccaagacaccgctatttcatgtatagatagaaatgaaagtgttttagtctcagctcatacttctgctggtaaaaccgtggtggcagaatacgctattgcccaatccttgagagataagcaaagagttatttatacttcccctattaaagctttatcaaatcaaaaattccgtgaattacaagcaatttttggtgatgttgggttaatgactggtgatgtcaccattaatcctgatgctgggtgtttagtcatgactacagaaattttaagaagtatgctttatagagggtcagaagtgatgcgtgaagttgcttgggtagtgtttgatgaagtccattatatgagagataagtctcgtggggttgtttgggaagaaacgattattttattacccgataaggttcattatgtatttttatcagctacaatccctaatgctatggaatttgctgaatggattgtgaaaattcacaatcaaccatgtcatgttgtttacactgattttagaccaactcctttacaacattatttgttccctgctggtggtgatggtatccatttagttgttgatgaaaaagggacattcagagaagaaaatttccaaaaggcaatggcaactatcagtgataatagtggcgacgaccctgcttctagtgatagtggtagaggtaataaaaagggtaaaaccaataaaggtcgtaatcatcaagatggtaaaggtgatatctataaaattgtgaaaatgatttatatgaaaaagtataatccggttattgtattttcattttctaaacgtgattgtgaatctttagctttaaaaatgtcaaaattagatttcaatactgatgaagaacgtaattcattgacacaaatcttttataatgccattgaattgctacctgaagctgatcgtgaattacctcaaattaaaaacattctaccattattgaaaagaggtattggtatccatcattcagggttattaccaattttgaaagaaattattgaaattttattccaagaaggatttttaaaagtattatttgccactgaaactttttctattggattaaatatgccggctaaaaccgttgtttttacatccgtgcgtaaatgggatggtgttggttttagatgggtttctggtggtgaatatatccaaatgtctggacgtgccggtagacgtgggttggatgatcgtggtattgttataatgatgatcgatgagaaaatggaaccacaagtagctaaaggtatggtaaagggtcaagctgatagattagattctgcattccatttaggatacaatatgattcttaatttaatgagagtggaaggtatttccccggaattcatgttggaacattcatttttccaattccaaaaggcatctagtgttcctattttagaggggaaattagctcaatgtaaacaagaatttgctgatattactattgaagatgaaccaattataaaggactattatgatttgaaacaacaattgttaaaatataatgaagatgtacgtaaagttattactcacccaggtaatattttaccatttttacaagatggtagagttattaaagttaaaattggtgatcttgattatggatggggtatggttaccacatttacgaaaaggaaccgtagacaccaagaagaatttgctccacatgatgcatacgttgttgaagtatttataacaaccatgtttattgattcaccagtcaatttaattaaaaaatttaaccctatgttgcctgaaggtattcgaccagctaaatcaggggaacaaaccagagctgaatttatttctatcaccttaagctcaattgagaagattagtactgttagattaagagttcctgatgattataagagttcgactgccaagagaacattggttaaaactttgaaagatttaccgaaaagattacccgatggaatcccattaattgatccagtacaaagtatgaaaatcactgatgatgatttcaaaaaacttctacaaaaaattgatattttagattctaaaatagtttctaatccattgaataatagcgctagattggatgatttatatgccaaatacactgcaaaagttgatttaaacaatcaaatcaaaaaattagaggaacaaatattccaagccaaatcaatcattcaattagatcaattatcgaatatgaaacgagttttgaaaaaattagaattcactggttcagaagaagttgttgaattgaaaggtagagtagctgctgaattatctactggtgatgaattaatgattactgagttattattctccgggtttttcaatgagttaactccacagcaaatttgtggattattgtcagcatttattttccaagaacgagctaaagaattacctaaattaaaaccagaacttgctgaaccagcaaaagtaattcatgaaaccgctaataaaattgctaaaatttcaaaacaaagtggattagaaattgttgaaaaagattatattgaacaattcaatcttgccttagttgaagttgtatttgtatggtctaatggtgcttcattcagttcaatttgtaaaatgactgatatttatgaaggtagtataattcgtgccttaagaagagaaatcgaattgattaaacaattggtagatgcatcaaaaatcattggtaatcaagaattggttgataaatttgaaaaatgtattgaattgatcaatagagattttgtacaagtatcttcattgtatatgtaa

SEQ ID NO: 6366 - DNA, 3723 bp, Candida albicans
atgcatatcaagaagattattattcaagggttcaagacttataaaaacacaactactattgatttactttctcctcattgtaatgttgttgttggtcgtaatggatctgggaaatcgaatttctttgctgccattagatttgtattgagtgatgcttatactcatatgtcacgagaggagaggcaggggcttattcatgaaggatctggtacagttatgtcagcatatgttgaaatcatatttgataacaccgatggtcgtttcccaataaataagccagaaatcagtattagacgtaccattgggttgaaaaaagatgattattcattagatgggaaatcagctactcgatcagatattatgaatcttttagaaagtgctgggttttctagatcgaacccatattatattgtacctcaaggtagaattaccagtttaaccaattccaaaaatcatgaacgattgaatttattaaaagaagtcagtggtgccaatgtttttgaaaataaattgaaagaatcaatgaaagaaatgaatcaatcaaatttgaaacgagcaagaattgatgagactttggttagtattgaagaaagattaaaagatttacaaattgaaagtgctgatttgaaagatttccaaaaattagataaattgaaaaaaattttagagtttaatatttttgacagggagtataatgaattgaatgaatctttggaagaattagaagaaaagcatcaatcaatattacaagaaagtaacaaggatttaattgaattagaaaaaagggaaaaattatgtgttgaattacaagattcaatcaatgaattgaaaatttctgccaaagtcttgaaattagagaaggagcaatcggatttggattgtgatcaattattgaaagttattgctgaaaaagagattaaattgagagaattatcattgaataatgagttatccaaagaacaaaacattcatattaatgaacaaattggtattcttcaactggaaataaaccaacacaaacaagaaatttctcgttataaaccagaattgaacaaattacaacaacaagaatcgagtttaaaacaacaattactggagataagctcaaagcaaagagcgttgtatgctaaacaaagtaggtttctgaaatttgtgaataaaaaagatcgtgattcttggttgaatactgaaatatccaaattgaaacgacaaatcactgataaagatcaagaaatgcgtcatatttcaaatgaagtaaagactagagagtctagcttagaagcattgtctgaatcaataaaaaaattgaatgattcattaaatgatgaggaacatatcaaaacccttgccaatttgaaaacaactatcaatgattcaaagcaacaaatcactcaattggttgatcaaagaaagattttgtggcgtgatgaaattagattgaagagtgttcatgattcattgacaaatgatttgaccaatgctactaacatagtcaaccaaaccatggatagagcacaagctcaaggtattgctgctgtaaagcaaatagctcaaagattgaatctttctgaccgtgtctatgggactgttgctgaattatttaatgttaatgacaagtataaaacagcagcagaagtcattgctggtaattctttgtttcatattgttgttgatactgatgttactgctgctaccataatggaagaattgatccgtaataaagctggtagagtaacatttgttcccttgaatcgtattgataatattgaagttgaatatcctgattctcatgaaaatcaatgtcttccattgattaagaaattgaaatacaatgaacaagtttacaaggccattaatcaaatttttggtaaaactcttgttgttagtgaattactgaaaggtggtgaattgtctcgtaaatataaattgagttgtattacattagatggtgatagagttgatactagaggggttttatcaggagggtatcgtgattataaaaattcacgtattgatgcgcttaaaatccagacaagaaagaaacaagaattagagaaaaccgatagagaattggtgaaagtgacagaagagattgaatcaaccaattcgcaattgaataaattgaataatgaattacaattgaatgttcgagatttggatcgtttatctgttagtaaagagccaattaaaattgaattatctcaattgactaacaagaaattcaatttagatcaagaaatctcatctttgaaatctaatttacagaatttacaaaataccaagaattcaattaaagtaaatttgaaacaacatgaactggaattgaatagtgaattcacacaagttttaactcaagacgaacaaaatgaattagatgaattgtctaaactggctattgaattggaatctaaattagataatattgttactagatcatcagaattggataccaagatttctggaatcgaaagtgaagtaattaataatttacaaccaaaattaaacaaatatcgtcaagaacaacaaaagcaacagcaacagcaactacaactacaacaagaaagttcaaaaagttctgataccaagtcaaatctagaatatgaggaattgcaacaagaattggaaaatttacatattcaattagatactagtcaactgcgtaattcacaagttgttgagaatttgaccaaaataaatgaagaaatcaataactgtgaacaagaattagctcaagctaataagcaacaaattaaaatcattaaaaatattgaaaaattcctgaaacaaactaataatcttttgaatcaaaaactgattaaatcacaaatgagagatgatgctaatcaaaaaattcgagaattaggggtattacctgaagaagcatttcaatctgaaaaatatgatcaatatagttcggatcaattactttcgaaattaaatggtattaatcaagaattgacaaaatattctcatataaataaaaaagctattgaacaattcaatttatttaatcgacaaaaggaagatttaatggccagaagaattgatttaaataattccaaagcatcaattgaaaatttaattactaatttacaacaacaaaaaaatgatgcaattaaaaaatcatttaatcaagttgctaaatcatttaaacaaatatttgaaaaattagtacctcgaggtactggtaatttaatcatgcaaaagaaaaatgacaacaacaataatgtcaatgtaaccgatgatgttaattctggcaatgatgatgatgatgatgatgatgatatagataattattcaggagttgctatatctgtatcatttaattcgaaaaacgatgaacaacaaagaattgaacaattatcaggtggtcaaaaatcattatgtgccattgcattaatctttgctatacaaaattgtgatcctgctccattctatttatttgatgaaattgattcaaatcttgatactcaatatcgtattagtgttgctagattgattcatgaattatcaagaaataatgaagacaacaataataatgaaggaagaagtcgaggggcacaatttatctgtactactttcagacctgaattattacaattgagtggtgataaattttatggagtgacatttagtaataaagttagttcagttaatgagatcaataaagaggaagcaatgtcatttgttgaaggtcaacaacaacaacagcaacaactgtag

SEQ ID NO: 6367 - DNA, 1410 bp, Candida albicans
atggcaacagcatcaacaacaacagtatatggaggtgatgaaatcaatgctatagttcttgatccaggctcttatactacaagaataggatatgctggtgatgatttccctaaagtaatcacatcatcatattatggacaagtgaagaatgacaagaaaaaaatctttggtgaatcaattaatgttccaagagccaattatgacattaaaccaatattaaaagaatctattatagttgattgggatgcagccattgaacaatatcaatattattttgatcaacaattaaaagttgtggggccagaacaaccgattttaataactgaaccaatatggacagaaacttcatatcgtcaacaattggtggaaacttttttcgaaaattttgaatttagtgggatatatttagctaaatcacctacatgtgtttcatttcaacaaggtagatcgaattgtttagttgttgatttaggtcatgattctgtactggtaactccagtgattgatgggatttgtttattgaaaagttcaatgaaaactaattatggggggaaatttttatctaatgaaattcaagattatcttattgatactaaaaaagttgttatggaaccaagttttaaaattaaatcaaaaattccaactacttatcctgatccaccaaaatatgaactcaaaaataataatactatacccacatcatcatcatcatcactatcacaatcatttcttgaatttcaaaatgaaaaaatatatcataattttaaagaaattttagaagttccagaaaagaatagtagtagtggcactactaccaccaccaccaccaccaataaagattcatctagattatttgaattgcctactggtcaatctattgttatcgatagatttaaaattgctgaatcaatttttgatccaacaatttataaattcaccaattcaaaattatcattcccacccaataatggagaaatctcaattactcaagctaatgaatatcgccctcttaaaagagttcgtaaaaatgatgatgatgaagaagaagattctaatcaatctactccaaaaccagaagttaatattagaggtatatcacaattaatttctcatacattatcaaatatcgatatagatttacgtgcatcattagctaataatattattgttactggtggtgtatcacttatttctcaattaacagaaagactttatcttgaattatcaaataataatccaggattgaaaattagattacatgctgtggggaattcaacagaaagaatcaatcaagcatggattggtgggagtgtattggcttcattaggaacattccatcaaatgtgggtgacaaaagaagaatataatgaagttggtgtcgatagaatattaaatcaaagatttagataa

SEQ ID NO: 6368 - DNA, 366 bp, Candida albicans
atggctcacagattattagttaacgtgatattcactggtgcttccgtctttggtcgtgctttcactgaagcttatagacaagctgccaaggcttctgctgccggtgccgcaggtagaccagccaaagctagttctgctggaggtatacctgtagaagaagcaatgaaaattttggatttagagaagagcgagttaagtttagataaagttgaagagaaatacgaatatttgttcaatgtgaactcaaaagaacaagggaattcattctatctccagagtaaagtatattatgcgatggatacgttaaagaaagagctagagtatttggagaaattgcaaaacgaaaagggagcggcgtccaattag

SEQ ID NO: 6369 - DNA, 1650 bp, Candida albicans
atggcattttctaatcaaacaccaacaattgttgttttaaaagaggggacagattcatctcaaggacgaggtcaaattttaaccaacattaatgcttgtttagccattcaagacactttaaaaccaacattaggaccatttggatccgatattttaatagttgatagtaatgggaaacctactatatctaatgatggggccactatattaaaattattagatattgttcatcctgcagcacaaatgttagttgatatttctcgatctcaagattgtgaagttggtgatgggacaacatcggtgactattatagctggagaattattaaaagaagcaaaaaattttattgaagatggaatcaatcctcatttaattattaaaggttatagaaaggcatgtcaattaagtattgaaaaaatcgaatcattatcaattgatgtattggaaaataatactgatagtggcaatttccgtgatttattggaaaaatgtgctactactgccatgtcatcaaaattaattaaaactaattctaaatttttcacaaaaatggtagttgatgccgtattaactttagatcgtaatgatttgaatgaaaatttaattgggattaaaaaagttccaggtggttcattagaagattcattatttattgatggtgtagcatttaagaaaactttttcatatgcaggatttgaacaacaaccaaaatcattcagtaaccccaaaatattatgtcttaatgttgaattagaattaaaagctgaaaaagataatgccgaaattagaattgatcaagttaatcaatatcaacaaattgttgatgccgaatggaaaatcattttcgataaattagaatcaatttatcaaactggagcacaaattgttttatcaaaattacctattggtgatttagctactcaatattttgctgatcgtaatatattttgtgctggtagagttagtgatgatgatatgaatcgcgtgattcaagctgttggtggtgatattcaatcgagttgttctaatttacttaaagatgggaaattaggtcaatgtgaaagttttgaagaaattcaaattggtaatgaacgatttaatatttttaaaggttgtccacaaactaaaacttgtacattaatattaagaggtggagcagaacaagtgattgctgaagtagaacgttcattacacgatgccattatgattgttaaacgatcaattactcataaaaaaattgttgctggtggtggtgccattgaaatggaattatcgaaatatttacgtgattatagtagacaaattcatgggaaacaacaattaattattgctgcttttgctaaagctttagaagtgattccaagacaattgtgtgaaaatgcagggtttgatagtattgaattattaaatcgtttaagaagttatcatgctaaaggtgaaacttggtatggtattgatttccaattggaaaatattggcgataatttcaaaagtttcatttgggaacctgcattagttaaaatcaatgccttaagttctgctactgaagctgctacattgttgttatcagttgatgaaaccattagaaatgatgaacaagaacaagcacaacctcaaggtgcaccaggtagaggtagaggtgcatactaa

SEQ ID NO: 6370 - DNA, 465 bp, Candida albicans
atgtcagctgatcatactagagatccatgtccaatagtgattttaaatgattttggtggtgcatttgccatgggagtcattggtggttgtgtatggcatggtataaaaggttttagaaattctccatatggtgaaagaagttatggtgcattatcagccattaaagctagagcaccagttgttggaggtaattttggggtttggggtggattattttcaacttttgattgtacagttaaagcagtacgtaaaagagaagatgcttggaatgctgtcattgcgggatttttcactggtggggctttagcaattagaggtggttggaaacatacaagaaattctgccattacttgtgcttgtttattaggagttttcgaaggggttggtatgatgatgcaaagattacaagcacaacctaccatggctccagtttatccagaagaacctactgctcttgctgcttaa

SEQ ID NO: 6371 - DNA, 1056 bp, Candida albicans
atgtctgataaacttgctgctagagaaagatttcttgatgtttttgaagatttagttgaagaattgaaacaaattttagtttcttataatatgcctcaagaagccattgaatggtttgttagaagtttaaattataatactccaggaggtaaattaaatcgaggattatctgtagttgatacatttgccattttgaataatactactagtgataaattaaatgatactgaatataaaaaagttgcattattaggttgggccattgaattattacaagcatattttttagttgctgatgatatgatggatcaatctaaaactagaagaggtcaaccatgttggtatttagttgaaggagttaacaacattgctattaatgattcatttatgttagaaggggccatttatatcttgttgaaaaaacatttccgtcaagatccttactatgttgatttattagatttatttcatgaagtcactttccaaactgaattaggtcaattattagatttaattactgctgatgaagaaattgttgatttagataaattttctttggaaaaacattcatttattgttattttcaaaactgcttattattcattttatttacccgtggcattagcaatgtatatgagtggtattaatgatgaaaaagatttaaaacaagttagagacattttgattcccttgggagaatatttccaaattcaagatgattatttggattgttttggtactccagaacaaattgggaaaatcggtactgatattaaagataataaatgttcttgggttattaatcaagctttattgattgctacccctgaacaacgtcaattattagataataattatggtaaaaaagatgatgaatcagaacaaaaatgtaaagatttatttaaacaattgggtattgaaaaaatttatcatgattatgaagaatcaattgttgctaaattaagaaaacaaattgatcaaattgatgaatctagaggtttaaagaaagatgttttaactgctttcttaggtaaagtttataaaagatctaaatag

SEQ ID NO: 6372 - DNA, 1446 bp, Candida albicans
atgaatactactccatcaagaaaaagaacaattagagatatttctaatactcaattaccacttactccaactaaaacaccaaccaaatccaaaaaactcaaaatagataataataactcttttgatacagggaaaccttcatgtgttaagaaattagattttggacttcttactcctaccaaaaaaccttcaacttcaccttcaattccaacatcaatttattctcaagccaaagcattatttcaacgtggatccaacgtgagtcattctaatgattattttttaactagtcgagaaaaagaagctaaatatatcactgattttgttgccaatagtattcaacagaaaatatccaatagtctatatatttctggtccaccaggcactggtaaaactgctcaagttcaattaatcctacaaccttatcaacagaattcaagaatacgagtagtgaaaatcaattgtatgacattaaataatccagaacaaatttatcatgaaatatattgtaaaataatgaataaattatcaatatctttccataaacgtaaaacttgtgatgattttatgacattaatgaatgataatgaaaatcaacaatttgattctgtgattgtattacttgatgaattggactcattaatcacaagtgatcaacaagttttatttcaattatttaaaatggctagtataaattgcatccctcaaactaaaattaaattggtattaattgggatatctaatactttggatttgaatagtaaatttttaccaagattagttagaaataatattcaattggataatttacaatttttgccatacaatgctgatcaaattaaatcaattataatgaatcgattatctaatcttaaacaagaaattttccacccgggtgctatacaattttgttgcaaaaaatcagcatcaatatctggtgatttgagaaaggcatttgatatatgctataaatcaattgaattagtagaaagaagttgtcaaggtactgatacgattaataaagttatgattcaacatgtggctaaaatttgtatgacatcttttggcaataatgaaaatcaattaaacaatttgaatttattacaaaaagcaatattatgtcaattattcaattatcaaaaggaagttttttcgaaacgttccaacaaaactgctgctactactaccactcttacggtgaattcattttatgattattataaaaaacaatatgaaatgaatgatttgattggactgttgaaacatactgaattcattgagatattatatgcattggaaagtagtagttgtattttgttgaccaattccaataaaaacagtggtaatagtaataaaattattaaattaaatgtaccttacgatgatatagtgaaaagtgttgaaaatattggaatcttgaaaaaaattttacaaaaaccaaattaa

SEQ ID NO: 6373 - DNA, 1425 bp, Candida albicans
atgtcatcttcacagttttacaataaaggagttgatgaatccgtagtatctagacaagagattgaagagtttactaaaagaaatgaatttttccttaaaccaagcagcaggaaatatgccaaacaatatttttccatgtaccaataccgtttaaagaacttaagagatcgagttcataagactgccatggaaaaatggggtcacggaaccaagaaaataaatgggaataccattgaaaagcaagataaaatattagatattgctagtgggaaattatgttgggtaatcggaaccgtgttttgcgatgccaaatacaaacttgatatcttgaatgatgttgaaaaaggtacagatgacgttttaccattggagcctgtaacttatgtgaacgaggatgaacaaccaattgtaatgcttgaagacgagtcaggaagagctattttgaataacgataactttttggcaaagaatttattggtcactggctgtatagtggccgtattgggtattgaaatacaagcagggatatttgaaataatggatattgcatatccagattgtgcaccacagaaacctttaccacttggagaaaacaaaagagggaaaatagccttagtgtcgggattaaatatcggggacgaaggtcattacgatttgaaattggaacttttgaagcagtaccttttaggagaactcggaaatgccgaagataaattggatggcagcctaatctcccagttgataattgctggcgactctattatgcctatacagaatttaagagcagagatggatttgaaaaactttgtcactacaaataattatggatcaaagaatatttccaagtataatgttgagagttttaagaaacttgacgaattcttaaccgacattcttgtgagtttaccagtcgctgtaatgccaggaaagaatgatccagcagaaatatgtttgcctcagcagccattacacaggtcgcttttcaaaaacaactcgtcacttctcgatgggaatcgattgacgagattgacaaatcctcaatggattgatgcacaaactgtcaagatactaggaacaagtggccaaaatgtggatgatatccagaaatacattgtacctaaaaaagatcaccaatttacctcaattgaaattatggaaaacaatatcaagtggcaaaactttgtccctacagcaccagatactttatattgctacccgtatgaaaattatgatccattcattttctctgatgatttaccacacgtgtattttgttggtaaccagcaacaatttgacagcaaactctttgaacacgatggtgttaatgttagactaatatccatcccaaagtttaaagaatctggtcaatttgttttacttgatttggataccttggagactgaagtagtcaccatagagatttag

SEQ ID NO: 6374 - DNA, 534 bp, Candida albicans
atggcatcgacatcaacaggcttaccacctaattggacgattagagtatccagatcccataacaaagagtatttcttaaaccaatctaccaatgagtcgtcttgggacccaccttatggcactgacaaagaagtattgaatgcatacattgcgaagtttaaaaacaatggttacaagccacttgtgaatgaggatggccaggttagagtttctcatttgttgatcaagaacaatcaatcaagaaaacccaagtcttggaagtccccagatggtataagtagaactagagacgaatctatacagatattgaagaaacatttggaaagaatattgagtggtgaggttaaactaagtgaattggcaaataccgaaagtgattgcagctcacatgacagaggtggtgatttagggttttttagcaaaggacaaatgcaaccaccattcgaagaagccgcattcaatttgcatgttggagaagtcagtaacataattgaaaccaatagtggtgtccatatcctccaaagaacaggataa

SEQ ID NO: 6375 - DNA, 1647 bp, Candida albicans
atggctcgtgcaccacagggaatgcccgatttaagtaatgcgattgttgctcaagatgaaatgggtagaccattcattatagtgagagatcaaggtaaaaaagaaagaaaacatgggattgaagctacaagatcacatattcttgcagccagatcagtggcatctattgttaagacatcattgggccccagaggtcttgataagatcttgattagtccagatggtgagatcactattacaaatgacggtgctacaatcttatcgcaaatggatttggaaaaccaaattgccaagttgttagtcgagttatccagatcacaagacgatgagattggagatggtaccactggggttgttgtattagcaagtgcattattggatcaagctttagaattgattgataaaggcattcacccaattaagattgccaatggattcgacgaggcatgcagaattgccgttgaacatttgaacaccgtggctgataacatattaatagatgacaaggaaaatcttttaagagcagcaaaaacatctcttgggtctaaaatagtttccaaagcccacgaccattttgcgaagatggctgttgacgctgttttggaagttgccgatttggatagaaaggatgtcgattttgaattaatcaaaatggagaagaaagtaggtggatcaattgaagactcttctttaattaaaggggttttattggataaagacttttctcacccacagatgccaaaagaagtaagagactgcaaaatcgctattttgacatgtccgtttgaaccacctaagccaaaaaccaagcacaagttggatatttctaccgtagaggaattcaaggtcttgcaagaatacgagcaaaaaaaattccaggaaatgatagatgcagtgaagcaatcaggggcaaatgttgttgcttgtcaatgggggttcgatgatgaagccaaccacttgcttttagccaacggattaaacgccataagatggattggtggttctgaactagaattattggctattgctacaaacggtcgtattgttcctcgttttgaggatttaactcctgacaagttaggtactgctggtgtcattagggaattggagtttggaactacaaaggatcgtatgttggttattgaggaatgctcgaacacaaaagccgtgacttgctttatcaggggatcaaacgaaatgattgctgccgaaggtatcagagcattacacgattctctttgtgttgttcgtaatttggtaagagacagcagagtcgtttacggtggaggtgctgccgaattgacatgttcattggcagtttctgaagctgcagacagacaaaagggtattgatcagtatgcttttagagcatttgctacagctttagataccattcctatgacattggccgaaaattctgggttggatccaattgaaactttgtcagctttgaaatccaagcaagttaacgaaaactcatcacatttaggtgttgactgtctcggtaagggaactaatgatatgaaagaattatttgttattgatccattgatcggaaagagacaacaattgttattggccacccaattaacgagaatgattttaaaaataaatgatgttatcattagtggaaaggatgagtattag

SEQ ID NO: 6376 - DNA, 1260 bp, Candida albicans
atgagtatgaacacacccgcagttgtcatggacaacggtactggattgacaaaattaggatttgccggaaacgattctccttcatttgttttcccaacagcaattgcaacttcctctgcatcatcaaaagcaggaaaaggaccacgtggatctagcttggcgtcaaagagaggtttggaagatttggacttttacattggtgacgaagcattggaagcagcaagtggctcccaatatggtttacattatccaatcaagcacggacaaattgaagattgggatcaaatggaacggttttgggaaagttcaattttcaagtacttgagatgtgaaccggaagatcattattttttattaaccgaaccgccattgaaccctcctgaaaatcgtgaaagcactgccgaaattatgtttgaatctttcaattgtgctgggttatacattgccgtgcaagcagttttagcattggctgcttcgtggacttcaccaaaggttcaagatagatcgttaagtggtaccgttatcgattctggtgatggtgtgacccatgttattcctgttgccgaagggtatgtgattggtgctgccattaagaatatcccactcgcaggcagagatatcactttgtttattcaacaattactaagagatcgtggtgaagccgacacaagtttacaaacggcagaaaagataaaacaagagttttgttatgtctgtccagatattgtacaagagtttagcagattcgatcagtatccacaagaaaagtttgctcaatacatggttgagtacacagataagaacaaaagaaataccgttgatgttggatatgaaagattcttggctccagagatttttttcaaccccgaaatttgttcttctgattttttgactccattacctaccgttgtggaccaagtgattcaagcatccccaatagatgttcgtaaaaagttgtacaaaaatattgttttgtctgggggatcaactatgttcaaggatttcggtaagagattacagagagatttgaagagcatagtctccgagagaattcaacttagtgaaaggttaagtgggctgcaaagtactggtgttgatgttcaagtaatctctcataaaaaacaaagaaacgcagtttggtttggtggttctcttttagctcagacatcagaatttaagagttattgctacacgaagagcgactatgatgaatatgggccaagcattgttagaaacttctctttgttttcagtaccttaa

SEQ ID NO: 6377 - DNA, 1167 bp, Candida albicans
atgccaacaccaccacctacgattatatgtattggaatggccggaagtggtaaaaccacttttgtacaaagattaaattctcatttgcattctaagaaaacgccaccatatttaataaatttggatccagcagtattgaaaattccatttggagcaaatatcgatattagagattcagtaaaatataaaaaagtcatggaacaatacaatttaggaccaaatggagctattgtaacatcattaaatttattttccaccaagattgatcaagttataaaattgattgataaaaagcaagataaaataaataatgttgttattgatactccaggacaaattgaatgttttatatggagtgctagtggttcaatcataactgaatcatttgctagtgaattccccacggtgattgcttatatcgttgatacaccaagaaatactagtcctactacttttatgtcaaatatgttgtatgcttgttctatattatataaaactaaattacccatgattgtggtgtttaataagactgatgtaactaaggatgattttgctaaagaatggatgacagattttgaaagtttccaaatggctatacagaaggataaagatttaaataatgaacaaggtagtggatatatgagttcattgatcaattcaatgtcattgatgttggaagaattttattcaaatttggatgttgttggagtgagttcatatactggtcaagggtttgataaatttatggaagccgttgacaataaagttgatgaatataatgaattttacaaggcagaaagagaaagaattttgaaacaaaaggaagaagatgaaaagaaaagacaaacaaaatctttgaataaattaatgaaagatatgaaaatgaaagataccaaaggtgatcacaccaaaaaagatagtgaagtcttgtctgattatgaagaggacgataacgaaattgatgacgaaatacaaggtgaagttttacgagatgaagatgaaccagaaagagaatatacattccctgaagatcgtcaatcagaggtcaactctagaaacgatgctgatttacaatctcgttatcaacaagcatttgaatcaacagcaaaacctgcttcttccaaaactgcagaaaatattgccaattacatcaatagaacccaataa

SEQ ID NO: 6378 - DNA, 678 bp, Candida albicans
atgtctgacgttgaagaacaataccaagaagaacaacaaccagtcgttcaagaagaattacaagtcgttgaattagccactaccatcccattggatgttcaagaagctcaaagagaagtcaaattattcaacaaatggtcttttgaagatgttgaagttaaagacgtttcattagtcgactacattcaaatcagaaacccagttttcgtttcccatactgctggtaaatacgcctctaaaagattcagaaaggctcaatgtccaatcgttgaaagattaaccaactctttgatgatgaatggtagaaacaatggtaaaaaattgaaggccgttagaatcgtcaaacacgctttggaaatcattcacgttttaactgaacaaaacccaatccaagttgttgttgatgctattgtcaactctggtgccagagaagattccaccagaattggttcttctggtactgtcagaagacaagctgttgatgtttctccattaagaagagtcaaccaagctattgccttgttgactatcggtgccagagaagcttctttcagaaacatcaaaactattgctgaatgtttagctgaagaattgatcaacgctgctaaaggttcttctacttcttacgctatcaagaagaaggatgaattagaaagagttgctaaatctaaccgttaa

SEQ ID NO: 6379 - DNA, 1809 bp, Candida albicans
atgtcatcagattgggaagaactacgaactgaaacaggagaggtttattattataattataaaaccaatgagaccagttggacttttcctgagacagaagaaactttacctgtttctgaaaaacaggaaaccatcaccacatcaactactacgggtaaatgggaagaatatactacagatgatgggaaaaagtattattataatgcaattactggagaaacaacatgggaaaaaccaaatgagataatagaagaagaattatcaaatgaaaaactagcagaaaaaactgaacttagtgaattggataaaactttaaaatcaaaacctgtagaattgacaggtccaacttctaaaaccgacaatgaagccaaacaatcatttttgaaattattatcagacaacaaggtaaattctacttggtctttccaagcagtaatggaaaatcttgtggataagcccgagtattggtctgttaaagacccagtgacaagaaaacaactttatgaagaatatttggtatcgaaattccaaagtgaattatccaataaatcattattattagaaaatttcaaacgcaatttcaatgaagaattaaggaaattggaagctaagaatttagtgacttataatactcgatggatcactattaagaaattatggattgatcaagataatccaattttcaaacattcaatgatgctggattctgaattggcagcaatattttatgaatatactgataaattaagagaacaacatgaaaaacttttacaaaccaagaaaaatcaagcattgattgaattatcaacatatttacgacaagttaattcatcattagtggaaaaatctcaaacttgggaatcactttatgaaaatttaattaatgattcacgatttcaaagtaataaaaatttccaaaatttaactaaattgaatattctacaattatatgaaaatgagattttcccacggagaattgatgatattaaatcacaaataaccgtgatatcgaaaataaattatcgtaatgatcgtaaggcacgtgagagttataagaaattgttaggtgaattagaaattgatgctgatactgaatttaaagacattatagataagattgagaataatgatgcttttattgagatttgtggaagaaatggatctagtgcattagaattattttgggatatcgttgatgagaagaaacaaatattaaaagttaaaaagaatttagttgattcggtgatttccactatgaagaatggaaacacttatgatgaaaaaatgtgggaatccttggaaacattttctaatgccttgaaatcaacaagagatgaaagattagcaaatcttgatctaacattaggagatggtggtaaaggaaaagaaataaccatgatttatacactgttgaaggaagaatttgaattgaaaaaacaacaagaacgagaaaaataccttaaaaaaatggatgaagatatagcgaaattagctcgatggatttatgataatgatagaaatttaggagaaaatttcttacgtatggaagggacaagatttgttatttctaatagagtaaattatgaagatgaatatgaaaaattactgaaatttgatcaatttaaaccgttaaaacaatatgaaatagaattatcaacaactaaaattacgaaaaaaatcattgaagaatttgtttctgaatacaataaacatgcttcaaggaaaagacaatcaagtattacttcagaaactaataaaactggtgacaagagattgaaaactggtgtagccactgtattaaattattaa

SEQ ID NO: 6380 - DNA, 921 bp, Candida albicans
atgacagactccaaatatgactattctgacattactcctgtcgatataaacactgaagagcctcaaatatgtcaaattttgtatgacgaagactacaaacaaattatggggatattactttcacttatgaaagctgaagagtattctgaacgtgctttacatatcactgaattgggcattaacgaactagcttcacattatacaatttggatctatcgatttaatattttgaaaaacttacccaatagaaacctttatgatgaattggattggtgtgaagaaattgctttggacaatgaaaaaaactatcagatttggaattatcgacaattaattattggtcaaattatggaattgaataataatgactttgacccatatcgagaattccctatattagaagcaatgttaagttcagaccccaagaaccatcatgtttggtcgtatcgtaagtggttggttgatacgtttgatttacataatgacgcaaaagaattatcgtttgttgataaagtcatcgatactgatttgaaaaataatagtgcttggtctcatcgattctttctattgtttagtaagaaacatttggccaccgataatacaattgatgaggagctaaattatgttaaagataagattgttaaatgtccacagaatccaagtacttggaattatttattggggattcatgaacggtttgatcgatcaattactcaattagaagagtttagtttgcaatttgttgatttggaaaaagatcaagtgacgagttcatttgctttggagacattggcaaaaatatacacacaacaaaagaaatacaatgagtctagaactgtttatgatttgttgaaatctaaatatgatccaattagatccaatttctgggattatcagatttccaaactcacatcggtgtaa

SEQ ID NO: 6381 - DNA, 1185 bp, Candida albicans
atggacgattcagtcagatcacttattcggtttgttagcagaggattttacagtactccttatgtattaattcttgatgctgtccttcgtcactctgtattatcagaagatgatttgattcatttgttgggaatcaaaagaaaagagctacgttcactttgtaatcgattagttgatgacaggttattaaccaatcatattcaacgagaggataatggccaacagaaatatgtgactcgtacctactttttcattcatataactgaagctattgattcgatcaagtggaaagttcactcgattgtcaatgtattaaaacaggaaatgtcaagctttggtaatccacaggggtatgtatgtcctagatgtggcaataaagtaagtcagttggatgcaatatctatgttgagcgaagataaaactgaattcatatgtgatgtgtgtcaaggtgttttaattgaagacgattcttcacagcaagcaactttaaaacaagaacgacttgaaaaattgatgaaacaacttgatccaatcattaaatttttgaaaattatagatgaaactcaaatacgagacaacgatttcgaatcagctttattacaagctatcccagcacaatcagccaccacagcatcatacacattatccaatcgtgtcagttccaagtcaagatcgaatgctcaagcaatgcaaaatgccgcagccagatcacaagccactttacatgtctctatcaccgcaaatgatgaaaactatgaacgagaacaaatggaaaaggaaaacagaagacagaaattggaacagaatgcattgccttcatggcactcaaacagtactgttggccaatccaatacttttggtaaacttgaagacgaggaagacgatcacatgggtactccatcatctatcaaagaggaaagagagcaaggagaagcatataccgactctaaagaaatatatggaagtgacagcaaagaaggaactactgagcaatcctcagttatggctacacctgaacctcagagtactgtcaacaataattccaactttaataatgtatccgcagaattgaaagagagagaggcacaagatgcattagctgcatattatgctcaattggcagaacaggacgctgatgaagatgacgacgatgacgacgatgaagagtttgatgatataatttaa

SEQ ID NO: 6382 - DNA, 393 bp, Candida albicans
atgtcagcaccagcatattatgaattatatagaagatcaaccattggagtaacattaatggatgcattagatacattaatatctgatgaaaaaattcagcctcaattagctaatagaatattaattaattttgatagaataattgctgaaaatttgaaaaatgaaaatatcgtggggaaatcaaaattaatatttaaaggtgatttagatacttatcgattttgtgatgatgtttggacatttataattaaaaatgtcattattaaattaaatgatgtatcctcaaaagatagtggtggtggtgataaagataaagatagtggtgatttggaattgaatgttgataaatttaaaattgttgcttgtaattctagaaaggctggtgagatgtaa

SEQ ID NO: 6383 - DNA, 2142 bp, Candida albicans
atgtgtggtatttttggttacgtcaatttcttggtcgacaagagtagaggtgaaatcattgataatttaattgaaggtttgcaacgattagaatatagaggttatgattcagcaggtattgctgttgatgggaaattaactaaagatccttctaatggtgatgaagaatatatggattctattattgttaaaactactggtaaagttaaagttttgaaacaaaaaatcattgatgatcaaatcgatagatcggccatttttgataatcatgttggtattgctcatactagatgggctacacatggtcaaccaaaaactgaaaattgtcatcctcataaatcagatccaaagggggaattcattgttgttcataatggtattattactaattatgctgctttaagaaaatatcttttatcaaaaggacatgtttttgaaagtgaaactgatactgaatgtattgctaaattatttaaacatttttatgatttgaatgttaaagctggtgttttccctgatcttaatgaattgactaaacaagttttgcatgaattagaaggttcttatgggttattagttaaatcttatcattatcctggagaagtttgtggtactagaaaaggttctccattattggttggtgttaaaactgataagaaattaaaagttgattttgttgacgttgaatttgaagctcaacagcaacatcgaccacaacaaccacaaatcaatcataatggtgccacttcagctgctgaattgggctttattccagtggctccaggtgaacaaaatttaagaacttctcaatcaagagctttcctttctgaagatgatttacctatgccagttgaattctttttatcttctgatcctgcatcagtggttcaacacaccaaaaaagttttatttttagaagatgatgatattgctcatatctatgatggggaattacgtattcatagagcttcgactaaatctgctggggaatctactgttagaccaattcaaactttagaaatggaattgaatgaaattatgaaaggcccctataaacattttatgcaaaaagaaattttcgaacaaccagattctgcttttaatactatgagaggtagaattgattttgaaaattgtgttgttacccttggtggattaaaatcatggttatctacaattagaagatgtagaagaatcattatgattgcttgtggtacttcatatcattcatgtttagccacgagatcaatttttgaagaattgacagaaatccccgtttcggttgaattagcttctgatttcttggatagaagatctccagttttcagagatgatacttgtgtatttgtttctcaatcgggtgaaactgccgactccattttggctttacaatattgtttggaaagaggagctttaactgttggtatcgttaactctgttggttcttcaatgtctagacaaacccattgtggggttcatattaatgctgggccagaaattggtgttgcctcaactaaagcttacacatctcaatatattgccttggtgatgtttgccctttctttatctaatgattctatttccagaaagggaagacatgaagaaattattaaaggtttacaaaaaatccctgaacaaattaaacaagttttgaaattagaaaacaagatcaaagatttatgtaatagttcattgaatgatcaaaaatctttattattattaggtagaggttatcaatttgctactgctttagaaggggctttaaaaattaaagaaatttcttatatgcattctgaaggggtattagctggtgaattaaaacatggtatattagcattagtcgatgaagatttaccaattattgcctttgccactagagattcattatttcctaaagttatgtccgctattgaacaagtcactgctagagatggtagaccaattgttatttgtaatgaaggtgatgctattatttctaatgataaagttcatactactttagaagttccagaaaccgttgattgtttacaagggttattaaatgttattccattacaattgattagttattggttggctgtgaatagaggtattgatgttgatttccctcgtaacttggctaaatcagttactgttgagtaa

SEQ ID NO: 6384 - DNA, 588 bp, Candida albicans
atgtttatattatcagaaatatcagatttaatacgtataccacctagtgcattcaatgttcctatacaacattctatctcagatgaattgaacaaaaaatatgccaataaaataattgccaatctcggtttggtaataaccatatgggatatactcgacatcaaagatggattattgaaaccaggagatggtggatcatatgtcgaagtgagatttcgaagtatagtttggaaaccattccgaggagagattttaactggatgggtaactgaatgtacagcaaagggaattaaagttcgtatggagtttttcgatgagatttggattccaaaagattttctatttgaaaattgtaaatattcagaactggaacaagcttggatttatttattggatgaaaatgaattgtttattgatgttaatgaaaaaattagattcagagtggaagaagaaaatttctataatgttaaaccaaaactagaagatgaacaaactgaagaagaaaagaaagctactactttacctccatacaccataactgcatcttgtcaagattatggtatggggtgtgtttcttggtgggattaa

SEQ ID NO: 6385 - DNA, 1335 bp, Candida albicans
atgccaccaaaggaagattgggataaatatataccaccttcagaagaagagacctctgaaaagataacaccattgaccgagggtgacattcaggtattgaaacattatggatctgccccatatgcagactctttgaaggagattgacaaagatttgaagccaatagaagaaagaatcaagactaatcaagggatacaagagagtgatactgggttagctccacctcacctttgggatgttcttggtgacaaacaacgtatgcaagaagagcagagtttacaagttgccagatgtactaaaataattgaggcttctcaaccacaacagccaacaggattacagaatgccgataccaaatcaaaatatgtgattaatattaagcagattgccaagtttgttgtaggattaggtgaaagactttctcctaccgatatcgaagaaggaatgagagttggtgttgatagacacaagtatgaaattcaattaccgttgccacctagaattgatccatcagtgaccatgatgacagtggaggagaaaccagatgttacatacagcgatgttggtgggtgtaaagaacaaattgaaaaattgagagaagttgttgaattgccattgttgagtccagaaagatttgtcaaattgggtattgatccacccaaaggtatattgttgtatggtcctccaggtactgggaaaacattgtgtgcaagagcagttgctaacagaacagacgccacatttattcgagtcattgggtcggaattagtacaaaagtatgttggtgaaggggccaggatggtgcgtgaattgttcgagatggcaagaaccaagaaagcatgtattatattctttgatgaagttgatgccattggaggcgccagatttgatgatggtgctggtggtgataacgaagtgcaaagaaccatgttggagttgattacacaattggatgggtttgacccaagaggtaatatcaaggtgatgtttgccaccaatagaccaaatactttggatcctgcattattaagaccaggtagaattgatcgtaaggttgaattttctttaccggatttggaaggaagagccaacattttccgtattcattcaaagaccatgagtgttgagaaagatatcagatgggaattaatatccagattgtgtccaaatgccacaggtgcagaattgagatcggtgtgtactgaagcaggtatgtttgccatcagggccagaaggaaggttgccaatgaaaaagattttttgaaagcagtcgacaaggttattaaaggtaatttgaaattcagttcaacaagtcaatatatgcaatataattaa

SEQ ID NO: 6386 - DNA, 1284 bp, Candida albicans
atggctagaggtatattgaaacaacaattgaaaagtcatcaattaatagatgccattgataaggcaaaatcaaaaccaaccaagaaaaccccagtaacagaaaaaacagtagaagaagaaaaagaaatcatagaagccgccccagtgaccaccaaagtgaaatcaaacaagaaatcgaaaaaatcaaataccaaaaaagatgatgatgattatcaaagtgaagttttatctaaaaaggaacaaagaagattgaagaaattacaaactaaacaacaagaggaagaaaaagaagcagaaaataacgaggaagaagaagaagaagatgatgatgatgatgacgaagaagaattggatttggaaaaattagcagctagtgaaagtgaaagtgatatcaatgatgaggaggaagaggatgatgacgacgacgatgaagaagaggatgacgaagtagaaaatgacgatgaagcagaagatgatattccattatctgatgttgaagttgattccgatgctgatatagttcctcataccaaattaaccattaataatatggcagcattaagagaatcattagcacgtattgaattaccttggtcaaaacattcatttattgagcatcaatcaataactagtgctgataaaactgaatcagaaatcaaagatatttatgatgataccgaaagagaattggcattttataagcaaggtttagatgctgttaaacaatcacgtaaaacattattaaaattgaaaattccattctctcgtcccatggattattttgctgaaatggttaaaagtgatgaacacatggataaattgaaaaataaattattaactgaagccgccaataaaaaggcatcagaagaagctaaaagacaacgacaattgaaaaaatttggtaaacaagttcaacatgctactttacaagaaagagctaaacaaaagaaagaaactttagaaaaaattaaatcattgaaaaagaaaagaggtgctaatgaaattagtaatgatgatgatttccaaattgctttagaagaagcaactgaaaataaccagaaatatggccatggtggtagtggtagtggtggtgataataaaagaagaaaaccaaattctaaaagattggctaaagatgctaaatatggatttggtggtaaaaaaagaggtaaaagagaaaatgatgctgcttcatcagctgatattagtggattttcaacaagaaagatgaaaggtaaatcaacttcaagacctggtaaaagtaaacgtagtagaagacattaa

SEQ ID NO: 6387 - DNA, 3066 bp, Candida albicans
atgtctgataatatgcaaatagattccccatccccacaagaaattgatgaaggcttgtattcccgtcagttgtacgtgttgggtaaggaggccatgcttaaaatgcaaaatgccaatgtcttgatcattggactcaatggattgggtatagaaatcgcaaagaacattgctcttgctggggtcaagtcattgagtttatacgatcccaaaccagtatctattactgatttatccacacagttttttttgtcagaatcagaaattggccaaccaagagatgttgccagtcgtgaaaaattggctgaattgaattcttatgttccaattaatgttgttgacaatatagatgaagaaacgttattgaaattcaaatgtattgtgtcgaccaacatttcattagaagagcaagttaaaatcaacaacattacccatgccaacaatattggttacataaatgctgacattaaaggtttgtttggtcaaatatttgtggattttggagacaaatttactgtaattgaccaaacaggtgaagaaccattgagcggaattgtgtctgacattgagaaaaatggtacagttacaatgttggatgataatagacacggtttacaagatggcgattatgtcaagtttgccgaagttgagggcatgcccaaattgaacgaaggaaatccccacaaggttgaagttttaggaccatatgcattcaagattaagattgatgaaagctatggtgaatacgtcaaggggggattatacacccaagttaaagttcctaaagatttatcgtttgaaccattgaccaagcaattggcagctcctgaatatttaatttctgattttgctaaatttgacaaaccagcacagttgcacttggggttccaagccttgcatgcattccaaaccaagcaccaaggtgaattaccagctccatacaatgaacaagatgcaactgaagcatttagatatgctgaagaattggctactcaaaatccatcaattttgggcgaagacaaacttgacgaaaaatacctcaaggaattgttctaccaagctcgtggtgatattcctggggttgttgcattttatggtggattaattgcccaagaagttttaaagaactgttcttccaaattcacccctatcaaacaatggttatactttgactccttggaatcattgccttcagaaacggaatatccaagaaacgaagagaacaacaaaccaattggatctagatatgatggacaaattgccgtttttggtaaagcattccaagaaaaaattgccaacttgaaagtatttttagttggttctggtgccattggttgtgaaatgttaaagaactgggcaatgatgggattaggatccggacccgaaggtaaaattttcattactgacaacgattccattgaaaagtcgaatttgaaccgtcaatttttgtttagacctaaggatgttggtaaaaataaatcagatgttgccgctttagctgttcaacagatgaaccctgatttgaaaggtaaaattgattccaaattagacaaagttggaccagaaactgaagatattttcgacgacaaattctggactcaattgaatattgtcgtcaatgctttggataacgttgaagctagaacgtatgttgatcgtcgttgtgtcttttacaaaaaaccattgttggagtctggtactttgggtactaaaggtaacactcaagttgtcattccaaacttgactgaatcttattcatcctcccaagatccaccagaaaagtccattccgttgtgtactttaagatcattcccaaacaagatcgatcatactatagcttgggcaaaatcattattccaaggttattttgccgaatctccagaaagtgttaatttatacttgagccaaccaaattacgtggaacaaactttaaaacaaaacccagatattaaaggcacattggaaaatatctccaagtatttgaacaatcgtccttacacttttgaggattgtatcaaatgggcaagacaagaatttgaaaccaagttcaaccacgacattcaacagttgttgtacaatttcccaccagacgccaagacttctactggagctccattttggtctggtcccaaaagagcacccaaaccattggagtttgatattaacaataaggatcatttggacttcattattggtggagctaatttattggcatttatctacggattgaaagaacctaatgcaactgttgatgatttcaagaaagttttagaacaggttatcattgaaccattccaacctaaatctggggttgaaattgctgccacggatgcagaagccgaagaacaagccaacaatctttctggatctattgacgatgaacaaattagaaagattgctgcttctttgcctgaaccaagtaccttggctggttacagattgaccccaattgaattcgaaaaagatgatgataccaaccaccatattgagtttattactgctgcatctaattgtagagcattgaactatggtattgaaatcgcagatgcacacaagaccaaattcatcgctggtaagatcattccagctattgctaccaccactgcattagttactgggttggtttgcttggaattgtacaaggttgttgatggtaaagacgatattgaacaatacaaaaatggatttatcaacttggctttaccatttattggattttccgaaccaatcaaatctccagaaggtaaatataataacaagaagtttgatcaaatttgggatagatttgaacttaatggcgatattacattacaagagttattagatcattttgaaaaagaagaaggcttaactatttctatgttatcatatggcgtgtcacttttgtacgcatcatttttcccaccaaagaaagttaaggatagattaggattaaaattaaccagtttgataaaagaagtcagtaaaaaagaggtgccatctcatgttaagaatttgatttttgaaatttgctgtgatgatgaagaaggtgaagatgttgaagttccatatatttgtgtgaaattataa

SEQ ID NO: 6388 - DNA, 2423 bp, Candida albicans
atgtttaaagttactacaattacacatttgacagatgatacaacgagacctctaatatgtttaaccacaagaaaagggttcaagtatctttttggaaaagtgccagagggaacccagagagtggtcaacacatttgggtctgaagtcaagttttctaagttacaagggatttttcttaccgggtcaattctctcctggtcagacattggtggattgcctggattcttcttgactgttagtgatgcaaccaaaaatgggcttactgtaatgggttgtgaaagaatactatcatacattctagcaacatggagacaatttgttttccgaatgggtattaagttgcacattttggatgccgagacaaaccccactatagtcgatgaggaagtcgttatatccccaatcatgatcgatccggccaatcaaacatctccacctgaaaactccagcaaactagtgcgtcaaatcaaaaaattggcatccttgatgtttcccttggataccagtcaagtcaacagcagagatccagaatcttacaaatcagaccctacccaaaatgatatccatacacatgttcatttgccctcggcatcggagatagctacaactcaacaatcaatttcatattgcatctcattcgtgcctgtgcttggaaaatttgatccgaaaaaggcaaaggaattaggcttgacacccggccctcaatttagggatttgactaacggattgtctgtggttaacaaaaatggcgataccattactccagatcaagtgatcgctccaaatagagttttccgcaagattttagttatagatgtgccaagtaacgactactatgaaaatacaataaattccgatcgttggtttgaacatgatcaccccaaaaatgcaggtgaagttggcttggtttatcatatgttaggccaggatttggatttggatttactggactacaaagaaagatttttatcaaaatttccctcagacacataccatgttattagtcatccttcgatgacaaataatgtgattatgaatgatcgtttcatttcaaatacattaaagataaagtcaatcttgaacgagaactttaatttagtcaatctggaaaatttcaaaccattatctaacagtcaagtcgatagactacacgccttgcaactgtatcatctcaacgacaatggtgtagtaccagactcttcatctgctatcaagactacaaataaatcgttattcgaagaagaggtagaatcactagacattccaaatgctgccaatttcgagactatggaaaagaccaagattgaattggattgtaacaagcatactaatttgaaagatagagttcaggtttttatgttaggaacagggtcagcattgccggccatctgcagaaatgtgttgggtaatttaattagattgccatatcaggatgactcgggggcaatctcttatcgttcaatagtgctagacggaggtgaaaatacaatcggcagtttactccgtctatttggtcacgaaaacgggaaagagtttgttcagatatttcaagagttatcattaattcatttaagtcatttacatgcagaccaccatttggggattgtgtcgttaattaacgaatggttcaacatcaaccaagatgaatcgaaattattgtaccttgtggtcccttggcaatttattacgttcttaaaagattggtattctttagagctgcaatataataaggtgtttgatatgaataggttggtatgcattagctgcgaagattttatgatggataacagaactccagaatttataaaaattgatatggacaagtttgaagagttttatgatgaaggcggcctacacaaaccaatacctagggatagactattgctggtggatcacaaaaaaataaaaaatatgtatgagacggtaggattgaattctgttactactgtgcgtgcattacattgtgcctgggcatattcgactacatttgatttcaagttgaacgaaaatggggaaacatttaaaatatcattttcaggagacacaagaccgaatcccagattttctgaatgtggttatggaagtgaccttttaatacacgaggcttccatggatgggaattggatcgaagaggctatagccaagaaacattcgacaatgattgaagctgttgctgttagcaagcttatgaactgtcctaaattgatattgactcatttcagttctcgttatggtatctcgaacaactgtgttcctaaaaatgaattgcaaagttgtgctgataacttggacacttaccttaacaaaagtcattgtgagttgaatatatttcaatcacaatcaccaagtgacttgagtctagaagagatagatttgtggtttgcctatgatttaatgggtgtttgttatggcgatatgcataa

SEQ ID NO: 6389 - DNA, 3213 bp, Candida albicans
atgcgtatttttttttttgttggtgatgtttcaatttttacaaccataacaatttctttcttagaattcaatatagacaacaacaccttcccccctccccggataaacaatatatctacaatgaatatattagacgatttagatgatgaacttgatgaactagaaacaactactaaaccaaaagttaaaatactaaataaaaagaaagaagataaacctatagtagatgatgatcttgatcttgatcttgatgatgatgactttaatctacccaaaataaaacctccaactaaattcaaaaagatgaaaagagaagatgcacttcgaattaagaaggaaactccgtcgtcgttgtcaccatcgtcatcagtaccatccaagccacaaggtgtctcttctaacttgccatttcgaccggcaacaccaccagtttctgaaccatcgacatatgaagaagaagatctaggcgacataaatttagacaacttttccaacattgaagctgatagagaatggtataacatagatgaagaaagtgcacttgctagaaacaatgagattgatgaagatctaccacaacgacaacgtaagagaattcgcaatactagacatcctaaaaaaacacccaagacatcattcaatgaaagtggggcatcattcaatgaatttggtgaatatatcgattatgatcatcaaaaatctttgaatgaattaaatcgaatacctataactagtcatgttttcatcccaccatttcttgaaaatctgaaacaatatttacaattacaaatttctggatcaagtatacgagggattggacctacagtgaacccagtaaaagatcctacgtctgaattagcatcaatggcaaagcaaggatcatttgtggtacagaatagacgttcaaaacgtgaaagggcgctacaagccaaagaagcagctggcgtggaaaatagcaacattggatctattattgatacagccaataccaccgaggaaattaaacaagaagagaaaaatgctgatgtaaacgaaacaaaacaccaggatatacaacagcaaagaaaactgttaccagcttttgctgtcagaaatgatttgttgaccaccataagagataatcaagtaactatagttattggtgaaactgggtctgggaaaacaactcaattaacacaatttttatatgaagatgggtttggggctaatattgataagaacggcgagaagagaattattgcgtgtacccagcctagaagagtagctgccatgtcagttgctaaaagagtcagtgaggaaatgaattgtaaattaggtgaagaagttgggtattccattagatttgaggataaaactgacaacaaaaagactgttatcaaatacatgacggaaggtattttactacgagaaatcttggctgatcccatgttggctaattatagttgtattataatggacgaagcacatgaaagatcattaaatactgatattcttttaggattattcaaaaacttgttagccaagagaaaagatttgaaattaattgtcaccagtgctacgatgaatgcaaatagatttacgaaattttttggtgttgctccacaatttcatatacctggaagaactttcccagttgaagtttttttcaaccgagacgtgaatatggattatgttgaaatggcagttaaacaggttttaactattcatttaggtagatggaatgccgataataataatgccaatgatggtgatattcttgtgtttatgactggtcaagaagatattgagattacttgtgatttaattaaagaaaaattgaatttacttgaagatccacctccattagatattttcccaatttattctacaatgccacaggatttacaaaagaaaatatttaacaaaacgaacttgcaacgaagaaaagtggtggtggcaacaaatattgctgaaacttcattgacggttgatggaatcaaatatgttattgattgtggacttgtaaaagttaaagtttataacccgaaactaggtatggatacattacaagtggttcccatctcgttggcaaatgctgatcaacgtagtggtcgtgcaggtagaactggtgcaggtattgcttatcgattatatactgaaaaagccactgaacccgacagtatgtatgtacaaccgatccctgaaatccaacgaagtaatttaagtaatattatgttattattaaaatctttgaaagttaatgatatcaatagtttcccatttttagacccaccacccaaagatcttttaaattgttcattatatgatttatgggctattggagcattagataatcttggtgaattgacaaaattaggacattcaatgacacaattccccatcgagccaacattggcaaaattgattttattatccacacaacctgaattccattgttctgaagaagtggtgactattgtagctatgttatcggtgccaaatatatttaatcgacccaaagaaagagctaatgaagcagatatggcaagagagaaatttattatatccgaatcggatcatttaactttattgaatgtttttaatcaatggaatatcaatttaaataaatttaaaggtaattataccaagattaataattggtgtaataagaattttttacaattaaaatcattatatcgagctaaagatattaaacatcaattaatgttaattatgaaaaagaataaattggcaattttgaaatcgaaaaccgatgatgatatacgtaaatgtctttgtgcttcattttatcagcaactggcaaaattaaccaaaatgaatttaaatggacaaccagagtttgttaacttacgtcattcatatatgaaaatgtttttacacccaactagtagtttattggatagtaatttgagtacgaattatgtcatttatcatgaattagtgttgacgaaaaaagagtatatgaactgtgtaactacagttgatccaatttggttattagaatatggttataaattttttggggttgctgattcccatcgtaataaaatcgattcagaagcaattttaaataaacaaaaatttgaaaagcaattattaaaagataaagagatttatgatgatattattaaacaacaatcgaaaagaagatcaaatgaaatatctaccagtaacagagttagttccttattcaagaagcaaagaggaatttaa

SEQ ID NO: 6390 - DNA, 1737 bp, Candida albicans
atgtccgttgaaaagaaagtagaggaattatccattggtgaaaatccagctgcttccattgccaatgaatcagctccagctacgactgccaccaacagcaataatgttgaaggtgaagaagtagttttgggtgaagatggtcaaccattgtccaaaaaagccttgaagaaattattgaaagaaaaagaaaaggctgccaaaaaggctgaaagagaagctcaattggccaaagaaaaagcagctagagaagctgaagcagctaatgatccagctaaagagaattacgggaaattaccacttataaactcatcgactagaaatgctgacgaaaaacgtattcttttcaaagacttgtctgttgccaatgatggggaaactgtaaccttcagagccagagtacacaaaaccagacaacaaggtgccactatggtattcttaacattaagacaacaatctgaattgatccaagctttgttgaagactaacaaagatactgatgcaactgcagtctccaaacaaatggttaaatggactggctctatcaatttggaatctattgttttagtcgaaggtaaagtagctaaagttgaagaaaaaatcaaatctgccactgttcaagatgttgaaatccttattagcaagatttatactatccaagaaacgccagaacaattaccattgttgattgaagatgcttcaagaagcgaaaaagaatctgaagaattgggattaccaggtgtcaatttagatactagattagatgcaagagttattgacttgagaactccaacaaaccaagccattttcaagattcaatctggtgtttgtcaattgtttagagaattcttgataaagaaggggtttacagaaatccataccccaaagatcattggtgctgcttctgaaggtggttctaatgttttcgaaattaattatttcaaaggttctgctttcttagctcaatcgcctcaattgtataaacaacaattgattgctgctgattttgaaaaagttttcgaaattgctccagttttcagagctgaaaactccaatactcatcgtcacatgaccgaattcactggtttagatttggaaatggcatttgaacaacattatgatgaagtcttggaagtcttggaagaattgtttgtgtttattttcaccgaattgaagaccagattttctaaagagattgccactgttagaaaacagttccccgtggaagaattcaagattccaaaagatggcaaaatggtcaaattacactttaaagaaggtattgccatgttgagagaagctggtaaagaagttgatgatttcgaagatttgtctactgaaaatgaaaaattattgggtaaattggttcgtgaaaaatacgacaccgacttttacattttggacaaattcccacttgccgttagaccattctacaccatgccagattctgaagatccaagatactccaactcttatgatttctttatgagaggtgaagaaattttatctggtgctcaacgtattcatgatcctaaattgttaactcaaagaatgaaagaacatgaagttgatccaaatgttccaggtttgaacgattacgttgaggccttcacttacggttgtcctcctcatgctggtggtggtatcggtttagaaagagttgtcatgttcttcttagacttgaagaatattcgtcgtgcttccttattcccaagagatccaaaacgtttaagaccatag

SEQ ID NO: 6391 - DNA, 1524 bp, Candida albicans
atggatgactcagatgaggaatacatgggctctaaatcgccgtcctctaaacttccttcgactgctccagagaaaagtgcatcacctggaggagcaaagagtggtatgtcagcaagaactcgatcatcacgtcgtggtgaagtgagtgacttgaaaggggccaatgggtatgcctgggaagatgagtaccaaagatcatgggatattgtgaaagatgatgagcaaggaggcaactcatttgaagccatggtgcaatcgattattgaaaatagaaagaagaagataatgaaaaatcccagtacaccgtttcagagaggaattattcgaacattgattatcattatagacggatcactggcgatgagtgaaaaggatttgcgacccacaaggctatctatgacattgaattatctacaagagtttgttgttgaattttttgaccaaaaccctatatcgcgattgggaataatattgatgagaaatggtgtggccaatttagttagtgaggtaagtggcctgccacaatatcacgtcgacaaaataagaaatttgaaagccagacaacataatagatttgaaccaaagggagatccttctctacagaattccttggaaatggctaggtctttattgaagtttaatttcggttctacatccaataattcaaaaaattcaaaggagatattggtgatatttggagctttgtttacaagtgatcctggtgatatccacaaaaccatagacagtttagttaaagatgagataaaggcaagcgttatagggttatctgcccaggtggctatttgtcaagagttagtaaacaggactaataatgagccacgtaactctcaatcaaaacactacggtgtgatcatgaatgaatcacactttaaggaattgttgatggaatcagtgacccctttgccattgactgaaagtgaaaaacaaatacaagaatcggagcaaaacggtgttccagtcttgcgtatggggtttccgaccaaagtacaaccaacattgacatcagctattggtgggtccgactacatagttgagtttccgcacttgaacgcttctttcccaacccaaggctctgaagattccaaggatgttgtggaaattcaaacaaataagccagcagcggcagtagcaacaacatcttcttcagtaattgggtaccaatgtcctcaatgtaagtgtaaagtttgcaacttgcctaccatatgtcctgtgtgtgggctaatgctaatattatccacccatttagcaagatcataccatcatttagtcccacttgctccctacaaagaggtgaaagtgagcccaatatacgacagcacatattgctttgggtgccaattgaaattccctgaaggtgttaagctagggacacacaagggaactttagagtcgatgactagttcacgatataggtgtttaaaatgctcacaagacttttgtatcaactgtgatgtttttgtgcacgaagttcttcataattgtccaggttgtgaaaacaattaa

SEQ ID NO: 6392 - DNA, 630 bp, Candida albicans
atgaggatttatcaatgtcatttttgttcatcaccggtatatccattacatgggatcacatttgtaagaaatgatgccaaagaattccgtttctgtcgttctaaatgtcataaagcattcaaacaacgtagaaacccaagaaaattacgttggactaaagcatttagaaaagctgctggtaaagaattggtggttgattctacattaacatttgctgctagaagaaatgttccagttagatataatagagatttggttgccactactttgaaaggtatgagtagaattgaagaaattagacaaagaagagaaagagcattctataagaatagaatgaagggtaataaagaaagacagttggctgctgatagaaaattggttgctgataatccagaattattaagattaagagaagttgaattaagaagaaaagccgagaaattagctgctaaagaaaatgccatggaagaagatgaagaaatagaggttgaagaagaagaagaaggtgatgaagaaatgataagtgaagatgaagaaatggaaagtgaagatgaaagtgaaagtgaaagtgaacaaaaacgtgttaaacaaaaggttgtattgaaaaacaaaagaaaatcaagaaactag

SEQ ID NO: 6393 - DNA, 768 bp, Candida albicans
atggcggtgattaatcaaccaaatagtcagatcagacttacaaatgtttccttagtccgaatgaaaaagggaaagaaaagatttgagattgcatgttatcaaaataaagttcaagattggagactgaaagtggaaaaggatattgacgaagtgttacaaatcccacaagttttcataaatgtttccaaaggtcaagttgctaataatgacgatttacaaaaatgttttggcaccactaatcaagatgaaattatagctgaaatcttaaacaaaggagaaattcagttgaatgaaaaggaaagaaatgcaaatttacaacaaaagcaaaatgaattcttaaatataatttccactaaatgtataaatccaagatctaaaaagagatatcctccaagcatgattgaaaaggtattgaatgaagtcaaatttcatttgaatcctactaaaccaaccaaaattcaagcattggatgccatcaaattattagttgaaaaacaaatcatacctattgccagagctcaaatgaaagtgagaattacgttatctaaaaaagcatacttaaagacttttcaagatgaaataaaacctgttattgatcaaattgtggaggaagataacaatgggaaacaatatgagattgttgggattatagatcctataaattatagagtcttggtcacattaattgaaaatacagatggaagcaacaaagtcgctaaaggagaagggtctatagaagtattagatatgtctgccataaaagaataa

SEQ ID NO: 6394 - DNA, 1014 bp, Candida albicans
atgtctacgtctattcagaacagaacaatagagttccagcaatgtgtttctacatatgataagattaacaaaaagcataataaacatgtgaataatagtcctgccctatccactcccaaaaagtcatacttcagccaacaagctggtcttatagctaaggacatatctcatgtgactgaattattaagtaagcttgcagtattggcaaagaggaaacctattttcgacgataaaccaattgaaataggtgaattaacctacgtgatcaaacaagatatctttaaaatcgaaaccaacattcaaaatttgcaaaaatacttgaaaggagacacttcagtgtcaatagatgcccaaaccactcagttttccaagaacgtgttgactttattgaattctaaaatgaaaaatgtatctggcgaattcaagaatgtgttagaaattagacaaaagaatgaaataataaacaaaaaccgtacagaaaactttttatcttcagtgtcggcatcaagaagtagtaacaaccagtcgccattagtcgacaaccctaatgcctcattgagcaacttgagtgaaaatccatttttggcatcgtctccaccagaaaatctaccatacgacccagatgccgatccagatacaagctccccttacggagtgtctaataatggtgaatatttatcattaccttcgcaaacacaacaaatgttactaatggaagaacaacaatatggaaatcaacaatatttacaacaacggaatcgagcagtcgagagtatcgaaagtacaattaacgaggttggtaatttgtttcaacaattagccactatggtgagcgaacaaggtgaacaaatacaaagaattgatgctaatgtggaagatataaacatgaacataactggcgcacaaagagagttgttgaagtactatgctcatattaccagtaacagatggttatttttgaaaatatttggcgttttaatagtatttttcttcttatgggtattagttagttag

SEQ ID NO: 6395 - DNA, 624 bp, Candida albicans
atgacagaaataccaacaattatagaaacctctgaaactgaatcgttctcagaaagagcgcatgtacctgacgacactgcctcgctcgatgatttgtttgcagatttgaaaaaggaatcacgatctctcccaaccgttaaagacttcaagtcaattgaaaagtccatacaaagcttgcctagaataaatgccaacttagaaacagccctacaaaaaaaacctatcaggatccatgacccagtaataccaccgaaaaagaagactacagaaacgtctgatgaaagatggttcaatatgaaacagccagaaatgactcctgaaattaagagagatttacaaatcataaagcaaagaagtgctttagacccaaaaagacactataaaaaggataaatgggaaatcccgaaattcttccagatgggaacaatcatcgaaggtaataccgaattctactcctcgagattaaagagaaaagagcgtggtaaaactatggtcgaagagttgctacatgacgataccaccaagaaatacttcaagagaaagtatcatgaaatacagcaaacaaaaaccagtggccgtaaaggtttttataaaaaggttaaaaatgctaggaaaaaatattaa

SEQ ID NO: 6396 - DNA, 1779 bp, Candida albicans
atgccaactattcctgtagacaaagaagaccttttcaagttattgggtagatcatatactacagaagaatttgacgagttatgtttccaatttggtattgagttagatgaggataccactgaagatgtcaaaggtacagacgaaagaccacaattgaaaattgaagttcctgccaacagatacgatatgttatgtattgagggtattgctcaagctttaaatgaatttttaggtaacacatcagcaccaaattacaaattgagtcctagcaaaccagagatttctttgactattaaagaatcaacctacccaattcgtcaatatgctgccagtgcgattttgagaaacgtgaaactcgatgaaagagcctatgactcttttatttccttacaagataaattacatgcaaatttatgtcgtaacagaactttagtggctattggtactcatgatttagatactttgacaccaccatttacctatgaagccttggcacctaaagatattgttttcaaaccattaaatcaaactaaagaaatcaatggtgaagaattaatggagttctatgaaaaagataagaatattggtaagttcttgcatattattaaggattcgccagtttatcctgtcatgcttgatgccaatagaacagttgcttcgctcccaccaatcatcaatagtgatcactccaaaatcactttaaacaccaagaatgtttggattgatgtcaccggtactgatagaaccaaaactgaaattgttataaaccaattagtggccatgttttcacgttattgtaaggaaccttttgaaattgaaccaattcaaatcatttctgaacacaataatgaaactcgtgtatgtccaaatatcactccaagaacagctaaggctgagatttcatacatcaattcctgtgtaggattggattactcaggtgaagaaatctcaaagttgttgaaaaaaatgtcattagatgctaccccatctactgaagagagagacatactcgatgtgaaaatcccaataacaagatctgatatcttgcaccaatgtgatattatggaggatgtcgctattgggtacgggtacgataatttgaagaagaccaaacctaaggctgaaagtttagttgctgccccattacctgtaaataaagttgctgatattttaaggttggcaagttctcaagctggttatttagaagtcatgcctttgactttatcttctcacgatgagaattttgcttggttgaaacagaaggatgatggtaccaaagctgttaaattggaaaatccaaagacaattgaataccaagttgttagaactactttattacctggtattttaaaaaccgttaaagaaaacagaaaacactcgttaccaatcaaagtatttgaatgtggtgatattgttttgaagaatccagaattagaaagaggtgcttttaaccaacgtaattgggctgccttgtccgtaggtcagacttctggtttcgaaatggtccaaggtttattaggaaagatcatgcaaaccatgagaactccttggttagaaaatccttctaaggatcaaagaagaggttactggatagaggaagacaaagaaaacacaactttcttcccaggaagaggagccaagatttatttcagaaatgccgataatgctgaagccaaagctattggaagcattggtgttttgcatccagaagtaatgaataactttgacattccttatgcagcatcgtctgttgaaataaacgctgaagtatttttgtaa

SEQ ID NO: 6397 - DNA, 732 bp, Candida albicans
atgaattcaatatataatcatggtttaaaacaaacccaaactataactaaagatttaactcaattcgagaaaaacttatccacatcaccattatcattacaaggtgcaatcacaacatcattaactgcattcaggaaaactatcaaagaatatagtgatttattggaaaaaaatgtcaatgatacatcttataccaaacatgaaaatagattaaataaattcaatcaagatttaaatgaattcactctgaaatttgatactttaaaaaagcaacgtgatattcaagttcaagaagctaataaacaagaattattaggaagaagacacatatcaacaacagcaacagcagcattgggatcgacatcatcagataatccgtatgaatctagctcaaatccatctcaacaacaacaacagcaattacaagatgaacaaaacaccatgtcttatagagaaggattatatcatgaaaagaattctctagagagaggatcagaacaattggatcgaatcttagaaatgggacaacaagcttttgaagatattgttgaacaaaacgaaatattaagaaaagttcaaactaaatttgaagagagtttaatcactttaggtgtaagtcaaggtactatacgaagtgtggaaagaagagcaaaacaagataaatggttattttggttttgtgtggttgttatgttagtagtgttttattacattgtgaaattgtttaggtaa

SEQ ID NO: 6398 - DNA, 1041 bp, Candida albicans
atgtcacttttaaaggattctacagttgcagtcattaccgggacatcttcaaatttaggattcaatatagctgttcgtttgttggaggggcttcctgacaacaaagaaattactcttgttgttacttccagaacattaccaaaagtaaaggaagtgatttctgatattaaaaaatatattgtggcaaaaatcccaactaaagtaaacaaggtggaatttgactatttattggtggatttcactgatatggtatcaattttatcagcatattatgaattgaataaacgatacaaacatattgattacttgtttattaatgcggcccaaggagtatacggaggcatagattggactggcgcagttctcgaagttttgcaaagcccaattgaggcagtcactaatccaacttataaattacaaaaagttggagtagaaagtggcgataaattgggattagtctttcaagcaaatgtgtttggaccatattattttatccacagaatcaaacacttgttggaaaatggtgggaaaatagtgtgggtcagctcattaatgtcaagtccaaaatatttgtctttcaatgatttacaattattgagatcaccagcaagctatgaaggctcaaaaagattggttgacttgatgcattttggaacttacaacaagctagaaagagaacatggaatcaaacagtatttagttcatcctgggatattcacaagtttctcgtttttccaatatttgaacgttttcacatactatggtatgttatttttattctaccttgcaagatttttagggtcaccatatcacaatatttctgggtatattgctgcgaacgctcctgttgctgctgctttaggtcaaactaaacaaaactgcaaaactgcctcggcttgtactagatctggtaaagagtatttattagaagaagagattgacagcactggtctggacgacgttgtcctgtatttggacacacttactaaagagtgggacgaaaagttgaaggatcaaatagtaaatacacgtcaaccttga

SEQ ID NO: 6399 - DNA, 1368 bp, Candida albicans
atgtcaaatcgaggaagacaaccgtctggacctccacctagtcgtaaacgtgaaacaaaatggtctggaaaaccaaagagatatgccaattttggggcacaatcttttgatacggtgattactggtcatcttacccaagagcaattagatgcttaccaaagatactttagaatcgaagaaatcagtaattttttgagtgtggctaagcaacaacacaaatcaatagtggatgtattaccatctgcaaaggtcgacgagactgatcattacaaaagagacccttccccaccaccaaagtacgacaagaatggtaacagaactaataccagagaaaggagagttacagaggcattggaaaaggaaagacacgagctagttgaattggctgcctccagtataaaaaactatatgattccatccaactatcgtagaccatcaagaactgtcgaaaggttatatgtgccagtgaaagactatcccgatattaattttgttggatttttgattggtcccagaggaaatacattgaagaaactacaagaggatagtggggcacggttgcaaatcagaggtaagggatccgtcaaagaaggaaaaagttccgatggctttggctcttcacaaaccggaactgacattcaagatgacttgcatgttttgataacagcagactctccactcaagatatctaaggcagttaaattggttaatgaaattattgacaagctcattttctccccacagggaatgaactttatgaagcgtgatcagttgaaggagcttgctgttttgaatgggaccttgagggaaacaaaaccatttgatccagaagctcacgagaagaagcaacaacaacaaatggatatcacaaagattgtatgtaaaatatgtggcaacattggtcacattgccagggattgtaaacagaataatggaaaacgtccacttgatgacaacgctgagaatgaacctacaacaataaataagaaagctagaaccgacgtaccaccaccaccacctccaccaccacctccagcccctccttcttctagtacagaaatcctgaaacaagttcctccaccgcctccacctccacccccaccggcaccatctgctgcagcttctggttttgccactaccgaaaattacaaacaaggattggtacctcctccaccgccaccgccaccgccaccgcctcctcctgtacgactggcattggtaaattttgaaaacaattcaaaagttttattgacgaaggaaaaggaggaatctggctctagtgaattgaagaatacgggtgaatcgagttcgagctcttctggtgtaccacctctgcctccacctccatcttcgaatgttccaaggtga

SEQ ID NO: 6400 - DNA, 2106 bp, Candida albicans
atgaacgagacatcaaatcgagaccaccaggtcacaagcaaagagattcttgatgtggcgtttgaaaagagtaaatcaaaattcaccacaccacgacagacaatccaggataccgaggaattacaatcatatcaacaaaccaaaagaaaagagtttgaacaacatatcaacaaaaacagactaaaccttggccaatggacacgttacgccaagtgggagattgaaaacaaccatgactttccacgtgcaagatcgatattggaaagagctttagatgtgaatatccaacatgtacccttttggatacagtatattcagcttgaactatcccacaaaaatataaaccacgccaggaatctaatggaaagggctatcaatactttacctagggttaacaaattatggtttctatacgtgcaaactgaagaaatgcttaaaaactatccaatggtgcgagcagtatttgaaagatggcttgattggcaccctgacacttctgtgtgggatgcatatattaactttgaagcacgatatgaagaaaaagaaaacgtccgaaccatatttaagaaatacgttcacgaatttccaaatgcggggacatggtataaatggatcaagtatgaaatggaaaataatcgcgatgatgtgaacaccgttcgagctgtatttgaatcagctgttgataccttactttcgaataaactggaagaaaacgacgacgacgaagaatttgctaccataatttctagttggactagctgggaggtatcgtgtggagaggccagtagagcaaatgagatcttcaaattactactagacaacaaaactaataaattggagatttcagatcaaaccaaaagttcaatttacactgcatttgtggagtttgaaaagaactttggaaacaaggactcaattgaacaaagtgttttgataaagagaagaataaaatatgaacaagaaatccaaaatgacccttacgattatgattcttggtggaaatacatgacattattacaaaatagtctgaataaaagtgatttagaaaatgcattcaaaaaagtcacaggaaacgttgttcacgataaacataaaagtataaagtggaggcgatatataatgttctggatttggtatgctttttgggaggaaatgaccaataacaaccctgactcagcaagagagatatggaataattgcttaaaagttatacctcataagctgtttacttttgcaaaagtgtggattggatattctgaatttgaattaagaaacagtgaggatggattggccaaagctcgaaaaattttgggccgtgcaattggtcaaaccagtataaacaaacccaaaataaagatttttaagtactacattgatttggagaaaaagttgggagattggaaccgcgtgaggttgttatttcaaaagtggctagaagtatctcttttgacaacatcactgtctgaacttgttattgaaaagtatgttgaattcgagtcatcaattgaagaatacgatagatgtgacctgattttatcttctgcacgccagttatcagagaatccagagtatagttccagtttcaatttgcaaagattgttagagataacagtggaattttataaagaagaaatgcagtatgacaagatccgagaaatttaccgagctctattggacaaggatccgaatgctcataattggatttcttttgccttatttgaatcgagtataccctcagcagaacaattggaagaatacctacaaggtgataatgaagaatttgaagccacagtggacgagctgcaaattgagagcacaagaaatatatttgaagaagctatgacttatttcaaagacaaagacgacaaagagagtcgattggtaataattgaagcttggcgagattttgaagaggttaacgggtctgacgaaagtttgtctaaagtaaccaaaagattacctgtaattgtcagaaaaaggagaacagttggttctattgaggaagaatatatcgattatattttcccagacgacgaatccaaaaaattacctggtaaaatgagcaagtttttggccaacgctaagaaatgggctcaacaaaactaa

SEQ ID NO: 6401 - DNA, 2946 bp, Candida albicans
atggtcaaatcttataatcgttatgatcaagaaaaatgttttggtgtaattacatcccaagcaaacattgtttggttaccaccatcagaaacccaatcatcaacatcaatgggacgagccttgacttcgggattagaagaaattttaatttgggacatcaagactggagaaattatgaatcgaatgagtgatggattaactcctggtagctctaatgcatctactaccgttccaccttcaccagtgagctatttgacatatcaccaagaaacaaatatcattgctgctgggtataccgatggatcaatcaaaatttgggacattagttcaaattcggtgattattaactttgagggacacaactcatcaatcacccaattaaaatttgataaaaacggtacgagattagtatctgggtctagtgactcttcaataattatgtgggatttaattggagaagtggggatgttcaaattaaagggccataagggtccaattactggtcttgaattattatcagaacagcaaaatacacagcaagatggcgacaatgttgacgacgttgatgatatggatgattacttggtcagtgtatctaaagatggattaattaaattatgggaattgaaatctcaacaatgtatagaaactcatttggctcattctaatgaatgttgggcaatgggtataaatccaacaaaagatatgttgataacaagtggcaataaagatcaagttaaagtttggtccttggatctttctcttgaggatggattgaaaatcggcgaacgtggatctttcgaaaagacaagtaaatcaagaagcaatgaaattgcctttaaatctttgaaatcttcttcatcttcagcttcattgattcagttattttctattcagaatgctgatcgaacaatggagatattcagaatcaggtcggaagatgaaatcaaacgtggtatcactaaaagaaccaaacgtttgaaagacaaaggattggatgaacaagaaatattagagtctttgcaaagttcagaaataagtatgttgattacaccatttaccacaatgaggaccatggccaagataaaatctgcttgctggaccaataacattaagaaattggatatattgatgtcattaaccaataatagtattgaataccataccataccagttccagagacccctaaaaaggctcaatcagcagatttatattctgtaaaacagcatacaattgatttattgggtcacaggttcgatattagagccatggatatttccccacaagacaacaaattattggctactgcatctaacggagaattgaaaatttggaacaccagatcatataatgtgattagaacatttgttttagaaggtggttatgctttatgttgtaagtttctaccaggtgggacattaattgttgttggtttcaaaaatggggatttagaattgtatgatttagctacgtcatcgttagtggatagagtagaaaaagctcatagcgcaataactgttggtggtgctgctccttctaatgacgactcggccgccatttggtcgcttgatataactccagacgggaaaactttggttacaggtggtaatgacaaatgtgttaaattttggaatttcaaagttgagcaagatattataccaggaaccaacaccacggtttctcatttgaaatttgttcatactcaaacattggaattaaatgaggatgttctttgtgtcagaatatctccagatgctaaatatttagctatttcattattaaataataacgttcaagttgtgtttttagacactttaaaattattcctcacattatatggacataggttaccggtgttgtcaatcgatatatcacatgattccaaacttataattacttcatctgctgataaaaacatcaagatttgggggttagactttggtgattgtcataaatcaatttttgctcatcaggattcaattatgaacgttaggtttattggtgatacccataatttcttttccagtgggaaagatggcttgatcaagtattgggatggggacaaatttgaatgtattcaaagattacctgctcatcaaagcgaagtatggtgtatggccattagtgacgacggattgtttatgtgctcaacttcacatgatcattcgattagattatggctggctactgatgatcaagtattcttagaggaagaaaaagagaaggagttggatgagatttacgagaataaattattagatcaaattgatggagtcgacggcgaagatcacacgaatatgaaggatgacaatgacgaggaaattgatgaagccaccaaggtaagtaaacaaaccatggaaacattgaaagcaggtgagaaattaatggaagctttggatattggtgttgaagatatcgaagcaaataaggagtatttgtcattggttaaacagggcaagcaagcaattaaacctacaccaaactcgatactattggctttcaatatgactgctagtcaatatgttcttaatgtgttgagcaaaataagacccgcacaactagatgatgcattattggtattaccgttttcatactcgttgaaattgctacaatttattgaaatttggaccaataaagaaaatataacacaaaatgtggtgagcatttcattgatttgtaaagtgttattttttgtcattagttctaattcgaaagaattgatcagtcaaaaggatccacacttaaagaatcaattgataaaagtgaaagagcaattaagacaagagttactgaagacaagtaatcaattgggagttaatactcaaggtttgaaattcgttaaaaaacaatggaagttacagcatgctagtgaattcatagatgaagaagagcaaagacaatacgaagaaaaaagagcaatcaagagaacttatactactatatag

SEQ ID NO: 6402 - DNA, 321 bp, Candida albicans
atgtcagcaggtattccagtaagacttctaaatgaagcacaaggtcatataatatcaatagaattgataaatggagatacataccgtgggaagctattagaaaatgaagataatatgaatttatccctatacgaggcaactataacgcaaggcaaatcggggaaagtaagtcatatggatcaagtgtttataagaggatcaatgattagatttatatctgtgcctgatatattaaagaatgctcctatgtttttcatgaaacctggagataaaccaaaaccaccaataaggggtcctccaccaaaaagaaagagagtatga

SEQ ID NO: 6403 - DNA, 2016 bp, Candida albicans
atgccaacagaacaaactcataatgtcgtccatgaagccaatggcgtcaaattaagagaaacccctaaagaattttttgaaagacaaccaaataaaggtcacattcatgatgtcaatcaatacaaacaaatgtatgaacaatctattaaagatcctcaaggatttttcggtccattggccaaagaattgttatcttgggatcacgatttccacactgtcaaatcaggtactttgaaaaatggtgatgcagcttggtttttgggtggtgaattgaatgcttcttacaactgtgttgatagacatgcatttgctaacccagataaaccagctcttatttgtgaagctgatgacgaaaaagattcccatatattgacttacggtgatttgttaagagaagtttctaaagtagctggtgttttacaatcttgggggatcaagaaaggtgacactgttgctgtttacttaccaatgaatgcccaagctatcattgctatgttggctattgctagattgggtgctgcccattcagttatttttgctgggttctcggctggttccattaaagacagagtcaacgatgctagttgtaaagctcttatcacttgtgatgaaggtaaaagaggtggtagaaccactaacattaaaaaattatgtgatgaggctttggttgattgtcctactgttgaaaaagttttggtttataaaagaactaataatccagaaattcatttaactgaaggtagagattactattgggatgttgaaactgccaaattcccaggatacttgccaccagtttcagtcaactctgaagatccattgttcttattgtatacttctggttctactggtactccaaagggggttgttcattctactgctggttacttattgggtgctgctctttccactaaatacatttttgatattcatccagaagatatcttgtttactgctggtgatgttggttggattactggtcacacctatgccttgtatggtccattgttattaggtgtcccaaccattattttcgaaggtaccccggcttatccagattacggaagattctggcaaattgttgaaaaacacaaggctactcatttctatgttgctccaactgctttaagattattacgtaaagctggtgaacaagaaattgctaaatacgatttgagttctttgagaactttaggttctgttggtgaaccaatttctccagacatttgggaatggtataatgaatttgttggtaaaaaccaatgtcacatttctgacacttattggcaaactgaatctggatctcatttaattgccccattggctggtgttgttccaaacaagccaggttctgcttcttatccattctttggtattgatgctgccttgattgatccagtcactggtgttgaaattgaaggaaatgatgctgaaggtgttttggctatcaaggaccattggccatcaatggcaagaactgtctacaagaaccacaccaaatatatggatacctacatgaatccatacccaggttattactttaccggtgatggtgctgctagagatcatgatggatactactggattagaggtagagttgatgatgttgtcaatgtcagtggtcatagattatctactgctgaaattgaagctgctttaattgaagacaaaaaagtcagtgaagctgctgttgttggtattcatgacgacattactggtcaagctgtcattgcttacgttgccttgaaagaaggaaacagtgacgaggattctgaaggattaagaaaagaattggttttacaagttagaaaaactattggtccatttgctgcaccaaaatctgttataattgtccaagatttgccaaagactagatctggtaaaattatgagaagaattttgagaaaagtcagttctaatgaagctgatcaattgggtgatatttctactttatctaacccacaatcagttgaaggtataatttctgcctttggtgcccaattcggtaagaaataa

SEQ ID NO: 6404 - DNA, 1404 bp, Candida albicans
atgtttaaacgacttagtgcattgaagaaatacaacggtggtataaagtatcgtggtttcaacactgctgctgtgccatctccgacctatcagacatccattttgcctaatggattaactgttgctagtgaatcgatgccaggtaccagaacggcgacagtaggtgtttggattaatgctgggtctagagcagacaaccccaaaagtagtggaactgctcactttttagagcatttggcgttcaagggaacacaaacaagaccacaagcagctttagaattagaaattgaaaacattggaagtcaaatcaacgcttatacatccagagagaacactgtttattataccagatgccttgcatccgacataaaacaaaacattgatatcttgagcgatttgttgacgaaatcaaaattagaaaacagagctatagacaacgaaagacatgttattttgcaggaaagtgacgaagtcgacaaaatgtacgatgaagtggtgtttgatcatttacatgccgtcgcctttaaaaaccaagacttgggaagaactatattgggtccaagggaaatgatcaaaaccataaacagacaggatttagtggattatatcacaacaaattataaaggcgatagaatggctcttgttggtgttggatgtgtagatcaccaagagttagtgaaattaggtcaaaatttttttggaaacatcgtaaagtcggaggaaccttttaatcaaagtggcggtactttgccattattttatggcgacgaaatcagaattcaagatgattctatgcctactacacatgtagcattggctgttgaaggtgtcagttggtcagctccagatttttttgtagcctcagttgcaaatgggattgtgggaacatgggatagatcggttggtattggatccaactctccatcgccattggctgttactgctgcaactggaggaccaggaaaaaccccaattgcaaattcatatatggcttatacaacatcctacgcagatacagggttgttgggcgtttattttactgccgataaaaacgcaaatctaaaattacttgttgatgcaattcaaaaagaatggggtaggttgagtagaggagacataaccgatgaagaggtagaaagatcgaaatcacaattgaaagcctcattgctcttggcattagatgattccagtgctattgctgaagatattggtagacaggttgttaatacaggctatcgcttatctccagaggaagttttttcaagagtggaatcgataacgaaagatgacattgtcaattgggccaattatagattaaaaggcaaaccaatagctttggctgcagtggggaacgtgaagaccttaccttcacacaaagaaatcagcgaaggaatgtttttctag

SEQ ID NO: 6405 - DNA, 1440 bp, Candida albicans
atgtcatcaaaagaagattatatcattaagccagaatcggtatcaccatccaatgatacatctcaatggccattattattgaaaaattatgataaattattagttagatcaggacattatactcctattcctgctggttctgctccattgaatcgtgatattaaatcatatgtatcatcaggggttataaatttagataaaccttcgaatccatcatctcatgaagttgttgcttggattaaaagaattttacgagtagaaaaaactggtcattccggaactttagatcctaaagtcactggttgtttaattgtttgtattgatagagccactagattggttaaatctcaacaaggtgctggtaaagaatatgtttgtattgttagattacatgaacaattaaaagatgataaagaattaaatcgtgctttagaaaatttaactggggcattatttcaaagacctccattgatttctgccgttaaaagacaattgagagttagaactgtttatgattctaaattgattgaatttgataataaacgaggattaggagtattttgggcatcttgtgaagctggtacttatatgagaactttatgtgttcatttaggtatgttattgggtgttggtggccacatgcaagaattacgtcgtgttagatcgggtgctatgagtgaatcagataatttagtcacgttacatgatgttttagatgctcaatatgtttatgataatactagagatgaatcttatttaagaaaaatcattcaacctttagaaagtttattagttggctataaaagagttgttgttaaagattctgctgtaaattctgtatgttatggtgctaaattaatgattccaggtttattaagatatgaagaaggaattgaattatacgatgaagttgttttaatgactactaaaggtgaagccattgctattggtattgctcaaatgtcaaccgttgatttacaatcttgtgatcatggaattgttgctaaagttaaaagatgtattatggaaagagatacttatccaagaagatgggggttaggtccaattgctcaaaagaaaaaacaaatgaaagctgatggtaaattagataaatatggtagagtaaatgaaaatactccagaaaattggaaaaaagattataaagatttagatgaacaacctgctcctccaattcctgaatctaaattagttgctccagaacctcaattaccaaagaaaaaatctttgattgaagaagttgaagttgatattgatgttgaagataagagtgaaaagaaagaaaagaaggataaaaaggaaaagaaggaaaagaaagataaaaaagagaaaaaggaaaagaaggataaaaaagagaaaaagagaaaagctgaagatgatagttccaagagtgaaaagaaaaagaaatctaaaaaggattaa

SEQ ID NO: 6406 - DNA, 804 bp, Candida albicans
atgtctgaattaaaaaacggtacaagtgaacctaaaaaaaatgaaaccactcagctggattctaaaagtaaatccacctcagccaacaaatcatcagtcccaccagcatcattagttccagttcaacctacagcactcacatctcgtgacaagactactcaaagattaattgtcgttttatctcaagcatgcttagaaacatataagatgaattctgggggaccaggtggggatagatttgccttgttaaactgtgatgatcatcaaggattattaagaaaaatggggagagatatagctgaggcaagaccagatatcacacatcaatgcttattgacattattagattcaccaatcaataaagctggtagactacaagtttatattcaaactgccagaggtgttttaatagaggttaatccaagtgttagaattccaagaacttttaaaagattttctggattaatggtacaattattacataaattaagtattcgttcagaaaattccaaggaagtattgttgaaagttattaaaaaccccatcacagatcatttaccaactaaatgtcgtaaagttaccttatcatttgatgctgaacttaaacgtgttcaagattatgtgactactttagatgaaaatgaaagtatatgtgtttttgttggggcaatggctagaggtaaagataattttgctgatgaatttgttgatgaaaaaattggtctttctgattatccattatccgcttcagtagcatgttctaaattttgccatggttgtgaagacgtttggggtatctattaa

SEQ ID NO: 6407 - DNA, 1551 bp, Candida albicans
atgcctggattagattatcttctttttgaagaagctactggatatggtatattcaaagtattaattcaacaagatgacattgcatcaagactgaaagaagtccaagaagccgccaatgatttatccaaattttccaaaatggtggaattagtatcatttgctccatttaaaggtgcagctcaagctttagaaaatgctaatgatatttccgaagggttagtctcaccatatttacaatctattttagaattaaatttacctaaaacatcttctaaaaaaagaattgctcttggtgtttctgataaaaatttgggtccttcaatcaaagaagttttcccaaatgttgatgttttatctaatgaaattgttcaagatttccttagaggtatcagagtccatggtgctaaattattcaaagatttacaagaaggtgatattgaaagagctcaattaggtttaggtcatgccttttctagagctaaagttaagttttccgtacagaaaaatgataaccatatcattcaagctattgctttgttggatcaattagataaagatatcaacacttttgccatgagagttaaagaatggtatggatggcatttccctgaattggccaagattgttcctgacaattatagttatgccaaattaggcttgtccatcaaagacaaggcttcattgactgacgattcattgcatgatgttgctgccattttgaatgatgattcaggattagctcaaagagtcattgataatgctaaaatctccatgggtcaagatatcagtgaacaagacatggataatgttataacttttgctcaaagagtagtaaatctttatgaatacagacaacaattgtacaaatatcttactgataagatgcacactgttgctcctaacttgtcaactttgattggtgaagttgttggtgctagattgatttcccatgctggttctttgactaatttatccaaacaagctgcttctactgttcaaatattgggtgctgaaaaggctttgttcagagccttgaaaactaagggtaacacaccaaaatatggtttgatttatcattcatcttttattggtaaagctagtgccaaaaacaagggtagaatttctagatatttggctaacaaatgttctattgcttctagaattgataattattccgaagaaccaactactgcttttggtgaaattttgaagaaacaagttgaagatagattgaaattttacgacactggttcagctccaatgaagaattccgatgctattaaagctgctttggctttgaatggacaagatcttgctggtgctgaagaacaaaaagatgttgacatggtcagtgatgaagagcaagtgaagaaggaaaagaaagaaaagaaagaaaagaaagaaaagaaggataaaaaggaaaagaaggaaaagaaagataaaaaggaaaagaaagataaaaaggaaaagaaagataagaaagataagaagagaaaatcagatgatggagaagaaactccaaagaaaaagaagaagaagtctaaggattag

SEQ ID NO: 6408 - DNA, 897 bp, Candida albicans
atggtgacaattgggaatgcacatgacgatttgattcatgatgcagtattagattattatggaaagcgattagctacttgttcttctgacaaaaccatcaaaatatttgatcttgacggcacggataattataaattgattactacattaacagggcacgaaggaccagtttggcaagtatcctgggcacatcctaaatttgggtcaatattggcttcgtgctcgtatgatgggaaggcattaatttggaaggagcaaccagaaactcaacagtggtcaataattgccgaacatactgttcatcaagcaagtgtcaattctgtgtcatgggctcctcatgaactaggggctgttttattatgtacttcatccgatggaaaggtctcagtggtggatttcaacgatgatggtactacttcacatgtcatatttgatgcacatgcaattggtgccaattcagctacttgggccccagtatcaacctcatcaaaggattcggcagcattaaagcagcaacgtagaatagtcagttgtgggtctgacaatttagccaaaatctggaagtatgatgctgctaacaatacctatgtcgaagaagccaaattggaaggtcatactgattgggtaagggacgtagcttggtcaccatctaacttgatcagatcttacattgctactgcatcacaagatcgcactgtgttgatttggacacaggacagagatggcaaatggcaaaaacaattattaacagaagaaaagtttcctgacgtctgctggagatgctcctggtcattatcaggaaacattttggcagtgtccggtggtgacaataaggtgagtttgtggaaggagaacttacaaggaaaatgggagtcagccggtgaagttgatcagtaa

SEQ ID NO: 6409 - DNA, 2400 bp, Candida albicans
atggatgttctaaaaacaacatatgcacatactgacattgaaccaatttatgttggtgggacaagtgccagtatttctacttccaacggtgaattattattagccactccattaaatgaagatgttataattaccaatttagacaccaatgaaataatatacaaaattcctggtgatggagaagttatcactaatttaacaatcacccctgatgggtcctatttagcgatgatatcacaatctcaattattaagaatttttgatctcaacaaaggctcagtaattaaaaattttaaattaccatcaccagtatacatttctagtgttgattctacatctagtttatttgcctttggtggttctgatggggttatcactgtatgggatattgaaaatggttatgttactcattcattgaaaggtcatgggacaacaatttgttcattaactttccatggtgaattgaattctcaagattggagattagctagtggtgatacgatgggtacagttaaaatttgggatttggtgaaaagaagatgtattcatactttaaaagatcacaatacggccgttagaggagttggatttgatcaagatggtgatttattcatatcgggtggtagagacaatgtggtgattatttacaacaccaagaatttcaaaacaataaatacatttccaataaatgaacaaattgaagcagcagggtttgttagtttaattgatgatagacaatatttttatactggtggactggaaaatgttttgaaaatatgggatatcaaatcaggagaaatgataggtagatcacctatcccattaaagaccaatgaagaattattaattattgatgtcataaaattgtataataataatttatatttagtgattagtgatcaaactttgattgaactagatttacaagaattaacaccaggtcatggtcatggtcatggtcaagatgatgaaattgttgaattccccattgtgaaaagaattgccggaaatcaaggtattattgctgacattaaatatgttggtcctgaattcaatctcttagcaatggcaacaaattctccagcattgagaattgttgatattgagaaaccattggaattgagagtgtatgagggacatacagatattcttaatgctgttgatgtatctactgatggtaaatggatagccactgcttctaaagataatgaagctagattatggcgttggaatggtgaattacaagattttgaaccatttgctagattccaaggtcatgctggcgctatcactgccattagtttatctaaatcacaaaatgaacccaaatttttagtcactggatcgactgatttaacgattaaaaaatggaaaataccaaatacaccgaattccatagtgaaaacttcagaatacactagaagagctcatgataaagatattaattccattgatgtttcacctaatgatgaatattttgctactgcttcgtatgataagttggggaaagtatggcaaactgatagtggagaaactattggggttttaaaaggtcataaacgtggattatgggatataaatttttataaatttgataaattgatagtcactggaagtggagataaaacaattaaagtttggtcattattggatttttcatgtaagaaaacattagaaggacatactaattcggttcaaagagtgaaatttttcaatagagaacatcctcaattattatcatgtggtgctgatggattgattaaactttgggattataaacaaggagaaattattaaatctttggataatcatgatcaaagaatttgggccatggatttgaaaaatgatggagaatatttcactactgctgatgccgatgggaaattaagcttttggacagataatactgaagaagaggtcaaatttaaagaattacaagctaaagagaaaatagagcaagaacaaagtttgagtaactatatcaaaaataaagattggagtaatgcctttttattggcattgactttggatcattcaatgagattatataatgtgatcaaatctagtattgaaacaaatgaggataaggattctataattgggtcatttagcttagaaaatactataagtttattggatgatggacaattggttaaattgtttaagaaaatccgtgattggaatgtcaatttcaaattctttgaaatcagtcaaaagttattgaatgtggtgttgaacaattttgctgtggataaattaactgaagttccaggtttgatgaagattatggagagcattataccttataatgaacgtcattataatagaattgaggaaatggtggaacagacatatgttttggattatactgttgaacaaatgaataaactaattgcatag

SEQ ID NO: 6410 - DNA, 1704 bp, Candida albicans
atgttgagagttaattctaaatcatcaattaaaacatttgttcgtcatttgtctcataaagaacttaaatttggcgttgaaggtagagctgccttattgaaaggggtcaacactttagctgatgctgtttctgttacattaggtccaaaaggtcgtaatgttttaattgaacaacaatttggtgcccccaaaatcactaaggatggggttaccgttgccaaagccatcactttggaagataaatttgaagatttgggagctaaattattacaagaagttgcttctaaaactaatgaaagtgctggtgacggtactacttctgccactgttttaggtagatctattttcactgaatcagttaaaaatgttgctgctggttgtaacccaatggatttaagaagaggttctcaagctgctgtagaagctgttattgaatttttacaaaaaaacaaaaaggaaattactacttctgaagaaattgctcaagttgccaccatttctgctaatggtgataaacatattggtgatttattagctaatgccatggaaaaagttggtaaagaaggggttatcactgttaaagaaggtaaaactttagaagatgaattagaagtcactgaaggtatgaaatttgatcgtggatttatctctccatatttcattaccaacactaaaactggtaaagttgaatttgaaaacccattgattttgttatcagaaaagaaaatttctagtattcaagatattttaccatctttagaactttccaatcaaactagaagaccattattgatcattgctgaagatgttgatggtgaagccttggctgcttgtattttgaacaaattaagaggtcaagttcaagtttgtgctgttaaagctccaggttttggtgacaatagaaaaaacactttgggtgatattgccattttaagtggtggtactgtattcactgaagaattggatattaaaccagaaaatgccactattgaacaattgggttctgctggtgccgttactattactaaagaagacactgttttattgaacggagaaggatctaaagataatttggaagctagatgtgaacaaattagatcagttattgctgatgttcacactactgaatatgaaaaggaaaaattacaagaaagattagctaaattatctggtggtgttgccgttatcaaagttggtggtgcttcagaagttgaagtgggtgaaaagaaggatcgttatgaagatgctcttaatgccactagagctgctgttgaagaaggtattttaccaggtggtggtactgctttaattaaagccaccaagattttggatgaagttaaagaaaaagccgttaatttcgatcaaaaattgggggttgataccattagagctgccattactaaaccagctaaaagaatcattgaaaatgctggtgataggaaggtgctgttatccgttggtaagatttatgatgaaccagaatttaacaaaggttatgattctcaaaaaggtgaattcaccgatatgattgctgctggtattattgatccatttaaagttgtcaagaatggattagttgatgcctctggtgttgcttcattattggccactactgaatgtgccattgttgatgctccacaaccaaaaggttcaccagctgctccaccagctccaggtatgggaggtatgccaggtatgttctag

SEQ ID NO: 6411 - DNA, 1725 bp, Candida albicans
atgtcaacatcagcatcatcttcatatttagatgatgaaacaacttgggactcgtttaatttagatccacgtttattacaggctattgatcaattggggttttctaatcccacgttgattcaaagtagtgccatcccattggcattagaagaaaaaagagatattatcgctaaagcctctaccggttcaggtaaaactgccgcctattgtattccaatagtgaataatttgttaaccgatgactctgctcaaggcataaaaagtatcatattagtaccaactagagagttgtctaatcaggttttccaatttgttgaaaaattattgacatttagtactaacaagattaacgtcttgaacttgtcctccagttatagtgaccaagttttaaattcgttgttagttaataaaccagaaataattatttccacgccagcaaaattgattcaaattctagagaaaaatgaaaagaatattgacttgagtacagtgaaaaacttgactattgatgaagttgatttggtgttatcgtttggatatttggatgatttgaagaaattggagagttatttaccagtgaaaaagaatttgcaaacatttttaatgtcagctactgtgaatgatgatttagatgatttgaagcaaagatactgtactaaaccagctatattgaaattaaatgaagactcagccaatcaaaataatttggttcaatattatgccaaaacaacagaatttgataagttcttattagcatatgtgattttcaaattgaatttgattaaaggtaaaaccattgcctttgtaaataacattgatagaggatacagattgaaattgtttttggaacaatttggaatcagatgctgcattttgaatagtgagttgcccataaattcgagactacacattgttgaggagtttaataaaaatgtttaccacttgcttatagcaacagatgagacgaacgagttaaatgaagagcaagatgataatgaagatggtgatgaagatactaaggataaaggcaacgctgagactaaaccgaaaaaatcgaaaaagtcaaaattcaaacaagacaaagaatatggtgtttcccgtggtgtggatttcagaaacgtcgcttgtgtgttgaattttgatttaccaacctcttcaaaggcatatattcatagaattggaagaacggcaagagctggaaaagctggtatggcactttcatttgtgttgccgttgtctgaatttggtaagcataaaacagcatctttagcaagtgcaaagaaagatgaaaaggtcttgggccgtatagtcaaacaacaatccaaaaacggatttgaaatcaaaccttaccaatttgatatgaaacaagttgaagggttccgttatcgtgctgacgatgcattcagagctgtaacccaaactgctgtgagagaggccagagttaaagaattgaaaaatgagttgatcaattcggaaaagttgaagagattctttgaagaaaacccgcaagatttggcaagtttgagacatgataaagagttgcacccagctagaatccaatcccaattgaaaaatgttccgcaatatcttttacctgaaagtgctcgacaggatgtaaaaaatattggatttgtccctttccataaaaacaagatacataagcatagaaagggtaagggtaaaggtaggaaaaaagttgatccactaaaatcatttagaaagtag

SEQ ID NO: 6412 - DNA, 2352 bp, Candida albicans
atgaatgaacaaaacgagttttcggatgaagaaaatttcaagttctttggtcttgggggttgtaatgaagtgggaagatcatgtcatattatagaatacaaaaacaaagtgataatgttggattccgggatgcacccagctctaagtggacatgcatcatttccttattttgatgaatacgatatatcaaaagttgatatcttgttgattagtcactttcatgtcgatcactcagcttctttaccgtatgttatgcaacaatctaattttcgagggaaagtatttatgacacatgcaacgaaagctatctaccggtggcttatgcaagattttgttcgagttacatcaataggtaattcacgatccgaagatggtggcggtggtgaaggtagtaatctatataccgatgatgatatcatgaaatcatttgaccgaattgaaaccatagattatcattccacgatggagattgatggaataaggtttacagcataccacgccggccacgttttaggtgcgtgcatgtattttattgaaataggaggtctaaaagttttgtttactggtgattattccagggaagagaatcgacacttgcatgcagccgaagttccaccattgaagccagatattttgataagtgaatctacttttggtacagggactcttgaacccagaatagaactagaaagaaaattgactacacatatacatgcaacaatagcaaaaggtggaagagtgcttttacctgtgtttgctcttggtaatgctcaagaattattattaattttggatgaatattggagtcaaaatgaggatttgcaaaatgtgaatgttttttatgcgtccaatttggcaaaaaagtgtatggctgtttatgaaacttatacggggatcatgaacgataaaattcgtctttcatcagcatcaagtgaaaagtcgaatccctttgatttcaagtatatcaaatccatcaaggacttatcgaaattccaggacatgggaccttctgttgtggttgctacaccaggtatgttacaggcaggggtttcaagacaattgttagagaaatgggctccagatggtaagaacttggtgatattaaccggttattcagtagaaggtaccatggcaaaagaacttttaaaggaaccaaccatgatacagtcagccacaaatccagatatgacaatccccagacgtataggtattgaggagatctcgtttgctgcccatgtggatttccagcaaaactctgagtttattgaaaaggtttctccctcaaaagttatattagttcatggtgattcagttccaatgggtagattaaaatctgctttattaagtaaatatgcttctcgtaagggaaccgatcaagaggtgaaggtatataatccaaaaaattgtgaggaattgataattgggtttaaaggcttaaagattgctaaagttttgggttcgttggctgaagagcaattacaggtattaaagaaaatcatacaagatgaagtaagtgctgagaattctaaaataacagagctcactgaagaaaaagaagaggccgatgagataaaggaggacaatggtgaaacagatactactcaaaaaccaaacgagtcatctataaacgtgttaaaaactggccaagtggtgtctggtgtattggtgtcgaaagattttaatttgaaccttttgcaattacaggatttgcacgaattcactcaattgtctacatcaatagttaaatcaaagatgcatttgaaaataaatgcggatatttcgttgatggtttggcatcttgagcaaatgtttggttacataaatgttatcaatgatgacgacgaagaatgggaatgtgtaataatggatgtggtagatgttttcattgacagatcaaaaggacctggattgtttatcacagtggaatggatcaatgacaatcttatggctgactctttggctgatagtgttattgccatcttatactcgatagattcatcgccagcatccgttaagttatctagtcagaaccataatcatggcgataatcatatagtcaaaaaggaagattccatggaaattgatagaccagttgaagcacatgcgaaaactgacattaaaagtagaattgaaagaattgctttactattaaaggctcaatttggggattcactaaaagaattgccagaagaaaaagctattattcaaattgggaaaacagttgctaatgtggattacaagcgtttagaagtcgaatgttcatcaaaagtattaaaagatcgtgtggaaaacgtcataaaaagaggttgtcaattaactgctccattgagccagaatcccaaaattgcatag

SEQ ID NO: 6413 - DNA, 1098 bp, Candida albicans
atgtcgaaattgcttactcctgaaattctagcgctcatagacccagtggtgtctagtttgaaacgtcatcagcttgtggatgataaggagatagcattaacaattgcccagttgttgatgaaagtcatatcagcagcaagatggtctaatacatatgatttaattgaattgataagacaagttggtgttatatttaccgaagcatatcctagaaaagtcattccaggaaatattgtgagaagagtgttagctttaatacgtgatgaaaccgaaactgaaactgagacagagactgaacaaacagataacatcccaatgatgagctctatgtttagtttattggcaacacataacaaaaatgaaactataaaggaacaaacacaattacaactgaagaaacaaacaagcgatatgagagccataattatacaagggattagagatttagttgatgaaatttccaatgttaatgatgggattgaaactatggcggttgatttgattcatgacgatgaaatattattaactccaacccctaattcggaaacagtgcaacattttttaatcaaagcaagattgaaaagaaaattcacagtagttgttactgaaaactatccaaacgacatcaaggcagcccacaagtttgtaaagacactagctgaacacaacatcgaaacaattttaattccagacacaacaatttatgcagtgatgtcaagagttgggaaagttataataggtactaatgctgtatttgccaatggtggctgtttgtcaaattcaggtgttgccaatgtagttgaatgtgccaaagaacacagaacacctgtgtttgctgtggcagggttattcaaattatctccattgtatccatttacaagaaacgatttgattgaagtaggaaactccgggaaggttttgaactacgacgattttgaattggtgcaaaatgttgatgttgtgactaatcctttggaagattatatacctcctcaacatatcgacatttttatgaccaatattggagggttttctccttcatttatttatagaattgttttggataattataaagctgaagacaacaaacttgaataa

SEQ ID NO: 6414 - DNA, 645 bp, Candida albicans
atggctcaagaagttcctacattcaaattagttttagttggtgacggtggtaccggtaaaaccacttttgttaaaagacatttaactggtgaattcgaaaaaaaatacattgctactttaggggttgaagtccatccattaggattccacaccaactttggggaattgaaattcgatgtttgggatactgctggtcaagaaaaatttggtggtttaagagacggttactatattaacggtcaatgtggtatcattatgtttgatgtcacttcaagaatcacttataaaaacgttccaaactggcatagagatttagtcagagtttgtgaaaacattccaattgttttatgtggtaacaaagttgatgttaaagaacgtaaagtcaaagctaaaaccatcactttccacagaaagaagaacttgcaatactacgatatctctgctaaatccaactataactttgaaaaaccattcttgtggttggctagaaaattggttggtaatccacaattagaattcgttgcctccccagctttggctccaccagaagttcaagttgatgccgacttgatgcaaaaataccaacaagaaatggaacaagctactgctttaccattgcctgatgaagatgatgctgatttgtaa

SEQ ID NO: 6415 - DNA, 2628 bp, Candida albicans
atggatattcttcaaatattagaagctgctttgggtacagcagatccaaatcaacgaactcaagcagaaatacaattgaatgaagcagcaaataatcatttccccgaatatcttcaattattaattgaagctttagtcaatgaagatgctaaaactgaagtgagaatgttggctggtcttgccttaaaaaatcaattagttgccaaagataataaaacaaaattggctcaacaagaaagatggttaaaattagatggagaattgaaatctaaaattaaacaaacggctcttcaaggtttaaatataactgatcaaaaagttgccaatactgctgctcaattagttgctgctattgccgatattgaattacctagagcagaatggtcagaattaatacctacaattatggaaaataccaagactgataatccagaaaatgtgaaaagaagttcacttttggccattggatatatttgtgaaagtgctgaccctaatgatcccaacattttaagtcaagctagtggtattttgattgctgttgttcaaggagctcaaagtagtgaaccttctaaacaagtaagattaaccgcattgaatgctttagtaaattctttggaatttataaaatttaattttgaaaatgaaggtgaaagaaattatattatgcaagttgtttgtgaagctactcaagctgatgattcagaattacaagctagtgcttttggttgtttagcaagaatcatgtcattatattatcggtttatgtcactttatatggaaaaggcattatatggattaaccatttctggtatgcaaagtgctgatgaaaaagtttcatgcatggccgttgaattttggtctacagtttgtgaagaagaattagaaattgccttacaaaaacatgaattaggtttagattctttacaagcagctcaaaaccccgatttaataacttttaattttgcccttattgcatcaggtgaagtattacctacattattaacgttattaaccagacaaaatgaagatcctgaagatgatgattggtcggttgccatggctgctggtgcctgtttacaattatttgctcaaaacattggtaattatgttgttgaaccaaccatacattttgttggatccaatttagccaataaagagaattggagagctagagaagccgccgttatggcttttggatcaattttggatggacctgatcatgaacaattgaaacatattattgcagaagctttacaaccaatacttttattgattaaagattctgatttacaagtgaaagaaacggtggcttggtgtcttggaagaattgccgatatggttgttgatgccattgatattgaaacccaattacccaatttattgatggcattagttgatggattacaagatcatgctaaagtggccaccaattgttgttggactttgatcaatttagtcgaacaattgtgtactgattattatgaaaaagacagtactgtaatgtcaccatattattccaccataatccccattttaattcaaacatcagctagaaatgataatgaatataatgctagagcttctgcttatgaagctctttccacatttgtcacttatagtgcccaagatactatgccaattgtgcaaaacattgctactgaagtgttgggaagattagaatctagtattattttacaaagtcaagtcaccaccactgaagacaaggggaatttagaagaattacaatccaatattttgtcattattgaccaatgttattagaagattaaacagtgaagtgataatagcagcagataatttgatggatagatttattaaattacttgatgctcaagaacaaaattcattaattgaagaagatattttcattgctgtatctgctctttcaagtgccattggtggtgatttcattaaatatttagatgcatttttaccatatttaagaaaggctttacaaaatgttgaatcatcaacgtgtattactgcagttgggttagtggcagatttggctcaatcaataggatctcaaatgggtaattattgggaaaatcttttacaattacttggtaatgccttgacaaatgccgattccaaaaaagaattaaagcccgccgttgtatctgcatttggtgatattgccactgccattggtcctgattttgctccttatcttgaatttgtgttgagaacatgtactgaagcgggtaatattcaacctcaagatggatcaattgatacgttggattttgttttcaatgtaagggaatcagtattagattgttttgttggtattgttggaggattcataaatcaacctcaagctttagcaccagcaattgtcaccatattacaatatttacaaaaagttacccttgatcctcaaatgtcaagtagtgaatcggttgcacgttccgctgctggtcttttgggtgacattgctgcaatgtatccaaatggtgaatttaaacaagtatttactgaagaatgggtcactgattttattaaaagaactagatcaaatccattgtttgataataaaacaaaggatgcagcaaggtgggctagagatcaacaaaaaagacaacaacaacaactttttggtcaataa

SEQ ID NO: 6416 - DNA, 1440 bp, Candida albicans
atgagcggatttcgtgttttagatttggtgaaacctttcagtcccttcttaccagaagtcattgcacctgaacgtaaagttcaattccaacagcgtgtgatgtggaccatcataactttgttgatattcttggtaatgtccgaaatcccattatacggtattgcatctagtgattccagtgatccattgttctggttgagaatgatgttggcttccaatagaggtactttaatggaattgggtatctcccctatcgtctcctcggggatgttgttccaattgttgcaaggtactaaaatcatccatgttgatatgcaaaacaaaaacgatagagaaaccttccaaactgctcaaaaattattggctattttgttagctgtgggtcaagccaccgtctatgtgttgacaggaatgtacggtccaccaagctcgttgggtgttggtgtgtgttcgttattgatcttgcaattggttttcgctagtacaattgttatcttgttggacgaattgttgcaaaaaggttatggtttaggaagtggtgtctcgttgttcactgctaccaacacttgtgaacaagtattttggaaagcatttgctccaaccacttcaacctccgccaagggaaccgaattcgacggtgctgtggtcgccatgttccacttgttaggatcaagaaaagacaaaaagagagcattgatcgaatccttctacagaccaaacttgccaaacatgttccaattattggctaccttgttggtgtttttcgctgttgtgtacttgcaaggtttcagaatcgagttgccaatgaaatctaccagacaaagaggtccatacggactgtacccaatcagattgttctacacttccaacatccccatcatgttggaaagtgcattggcttctaacatctttatcatctcccaattattgtttatgagatggccaaataacttgtttgtcaaattgttaggtacatgggacgccagagctgggtcctcccaattatacgccaatggcggcttggcatactacatccaacctccattcaactttactgatgccttgttagacccaatcaagaccaccatctatattgcttttgttttagggtcttgtgctgttttctctactacctggattgaaatcagtggtacttccccaagagacgtcgccaagcaattcaaagaacaaggtttggtcattgccggtcacagagacacttctgcttacaaggaattaaagaaaattatcccaattgctgctgcttttggtggtgctactattggtgcgttatctgttgtttgtgatttaatgggtactcttggttctggtacgtctattcttttggccgtcaccactatctatggatactacgagttggctgtaaaagaaggtggattcaacaaatcaattgtcagtggattctccgatggcatttaa

SEQ ID NO: 6417 - DNA, 2301 bp, Candida albicans
atgtcatcgaaatcatcgtctaagaagaaaaacaatggggtatctactccagaactgtctaccgcaccagcaaagaaaataaaaataccaaagtcttttattgtcagacccaatgtgccaaccaacaacaaatccgtagccaatgtctatataaacccggaaatactatcagcaatggaacttaataatgggaacttggtgttagtgtcgtcaagtgatagtgggtctgctggggttgtggcaactgtttactcttctaacgatattgttgataaaaatgttattactatatccttcccgtacagacaactctgtggacttttgcttggtgatagagttgaactcgtcaaatttatgaatcagccacaatatgccagtgatatttccataagtggagttgaagaaactgttactgaagatgtgagactggcattgcttgatattggattagtttatcctgggttgcaaataaatgttgacaacaagagaattaccattgttgatgtaaacgacagtttggatgcatccatggacaaattatcaatcaaggatagtgactccttattgtctgttcacactgtgtcaccaccatatttgttctcaccaacaacgtctatcaatgtagcaacactgtcattccctgcacggtccaagtatcccaacttaccacaacaaatcacatacgatcaagttggcgggttatcaaagcaaattgaattgttaaaatcaactattgaacttccattgaataatccaactttattttctgattttgggatttcaccaccacgaggaattttattacatggtccacccggaacaggtaaaaccatgcttttaagatgtgtggcaaactctattactgaagcacatgtcttaacaatcaatggtcccagtatcgtctctaaatatttgggtgaaacagaaaacgccattcgagacattttcaatgaagctaagaaattccaaccatcgattattttcatggatgaaattgattcaatagcacccagcaggacttcagacgattcaggcgagacagaatcaagagtggtagcacaattattgaccgttatggacggaatgggcgataatggaagaattgttgttattggtgctaccaaccgtcccaactcaattgactcggcgttaagaagaccaggaagatttgatcaagaagttgaaatcgggataccagatgttgaagctcgtgaagagattttgaccaaacagtttgcaaagatgaattctgaaaagtgtcaaataactaaagaagagattgcaagtattgcttccaaaacccatgggtatgttggagcagatttgacggcgctatgtcgggaatcagtgatgaaagcaatcaatcgtggcctaactgttggtattccacaaaccgcgattaaagtgacagttgacgatgtgtaccatgcgttgccggaaatcagaccgagtgccatgcgtgagattttcttggaaatgcccaaagtacattggtcggatattgggggacaagaagaattgaaacggaaactaattgaggttgttcaattacccttggaagctagtgattcatttaaaaacttaggtgtctcttcacccaagggggttttactttacggccctccaggttgttcgaaaactttaactgccaaagctttggcaactgaatctggacttaatttcttggcggtcaaaggtccagagattttcaacaaatatgttggtgaatcagaaagagccattcgagaaatctttcgcaaggctagggctgcatcgccgtcgataatttttttcgatgagattgatgctattgctggtgatagagacggggatagttcaaccacggcggcactgaatgtgctcacgtctttgcttaatgagattgacggggttgaagaattgaaaggtgtggttattgttggtgccacaaataagccaacagaaattgatccagcattgttgagaccaggacgattggatcgtcatatatacgttgccccgccagactatgatgccagattgcaaatattgcaaaaatgcagtcgcaagttcaatttacaaagcggagacgaatctgtggatttgcaaaagttggcagaattgactgatgggtgctctggtgcagaggtaacattattgtgccaggaagcagggttggctgctattatggagaataaagaagcaaccacagttactaacaaacatttcgagcacgcactcaaaggcatatcaagaggtataactccggaaatgttggaatactatgaaaaattttcaaagaaaagtgggttaaatatataa

SEQ ID NO: 6418 - DNA, 681 bp, Candida albicans
atggaagaagataatcaacaggatcagaataaccagtatgtaatttatcaccccttcattctggaggaatgccatttttatttcattatttcttgtactaactcatttattagagtcgccttaaaaattggtttaattggggattcccagattggcaagacatcactaatggtgaagtatgtggaaggttcatttgacgaagactatattcaaacattaggggttaactttatggataaaaagatacaaattagaaacacaactataacgttctcgatatgggatttaggaggacaaaaggagtttatcaatatgctaccattggtctcaaatgatgcagtggcaatattattcatgtttgatctaacaagaaagtctacgctaaattcaataaaggaatggtacagacaggtgagaggattcaataagacggcaattccctttttagtggggacgaagtatgatcagtttattgatttatcatttcaagatcaaatagagattacacaacaagcaaagaaattcggaagtgcgatgaaagctccagtcatattttgttcaactagccattctattaacgtgcaaaaaatcttcaaaattatattatctaaagcgtttgacttaaagttaaaccttgatgaaattgttaacgtgggggaacccatattgatatataagtag

SEQ ID NO: 6419 - DNA, 1617 bp, Candida albicans
atggtcaacacagattttgagaaaatatatttgaatcaatcgagagcaggtggacgtatgcgtatagcagagtctggtcttggatggaaagcaagtgcatcaagtggttcaacatcacaaccatttcttttgccacgcgaagagatcttgattgctagttggtcaagaggatcgaaaggatatgaattaagagttcaaactaaaaataagggtgttgtgagtttggatgggtttgatcatgatgatttcactcaattgaaacaagaattgacccgtaatttccacattaatttagaacatagagagcattcattaagaggatggaattggggaaagacagatttagcaagaaatgagttaattttcaatgttaacaataaaccagcatttgaaattccttattctgatatcagcaactcgaatttaactggtaaaaatgaagttgctcttgagttcaatttggataataataagaatggtgatgaaattgttgaaatgagattttatgtaccaggtacaattgagaatgagaccacaatagtgaagaatgaaaccaatggtgatgttattgaagaggcagtagtcaacgaaactagtgctgctcaacaattctacgagcaattgaaagataaggctgacattggacaagttgctggggaagccattgtttcatttagtgacgtgttattcttgacaccaagaggtcgttacgatattgatatgtatccatcgtcattgagattgaggggtaaaacttatgattacaaaatacagtacgaacagattgaaagaattttcagtttacctaaacccgatgaaacacatcacttgatagtgttacagattgacccaccattaagacaaggtcaaactagatatccatttttagtattgcaatttgttaaagacgaagagacagagttggaattgaatgtcagcgatgaagattttgaaaagaaatacaaagatagattgaagaaaacatatgatgcacctacaaatgttgtcatgtcacattgtcttcgaggattgacagaacgtaaattgatcaccccaggtgcctttcagtcaagatatttacaagcaggtgtcccttgttctgttaaagcatctgaaggttacttgttcccattggacagatgctttttatttgtcaccaaaccaacactctatattccatacagtgaaataagcagtgtggtaatgtcgagaactggtgatggggtttctgcttcaagaacttttgatttagaggtgaatgtaattggttctaaccaaccacatgttttcagtaatattgatcgtgaagaacaagagtttattgaatccttctgtaaagaaaaaggtgttaaagttaagaatgaagaaaaaattgccaaggcaagattggccaaggctcttgaacaagaagccaatgatgacgacgacgaagatgctgatatgggaagtgctggcgatgaagacgaagatgaggatgtcgatttccaatcaggatccgattctgatgttgctgaagagtttgatagtgatgcagcaccttcaagtgatgatgatgaagaaatggctgatagcaaggaaaccgatgacagaccacctaagaaaaaggccaagaattag

SEQ ID NO: 6420 - DNA, 756 bp, Candida albicans
atggctgatagatattctttttcattgaccacattttcaccaagtggtaaattggttcaaattgaatatgcattaaatgcggtcagacaaggggttactgccattggtattaaatgtggcaatggagtagtattagccactgaacgtaaagccaattccccattaattagaaatgacaccaacattaaagttgaatatattacacctaatattggtatgacatatagtgggatgggaccagatttccgagtattagttgatagagcacgtaaattagctcacactaattataaacggatatataatgaatacccaccggtgaaaatcatggtacaagaaattgctaaagtgatgcaagaaagtacacaatcaggagggattcgaccatttggagtatcattattagttggaggatatgatgaatcaaatgaagggaaatttcaattatatcaagttgatcctagtggaagttatttcccttggaaagctactgctattggtaaatcttctaatctggctaaaacatttttggaaaaaagatggaatgataatttacaattggaagatggtattcatgtggcattattggcattaaaagaatgtattgatggagaattaaatggagataatttggatattgctattattagtgatcctcaagaacaattgttaggatttaaaggtactgatattcctggtccaagatttaaaaaattatctcctgaagaaataaatgatactttagactcgttataa

SEQ ID NO: 6421 - DNA, 2619 bp, Candida albicans
atggctcgtaataataaacaacagaaatctaaatccaagaacaacaagaagaaacaacagaatcatagaaaaaatgacgatgaaggaaatgaactctccatatatgataacaaaataagagaattcgaagatgggatattagatgctagaaaatatttacaatctgatgatattaaagttgatttagatgaagaaatcgattcagatgatgcattaggatcagatgatgattatgatgttttgaattccaaattttcacaaactattagagataaggctagaaagaaaagactgggtaaaaaggtcaatgaaagtgaaagtgaagatgaaggatatagtagtattgacgaagggcaattagtcactttatctgaagcttgggatatggatgatcgtgacttagatgagactttggggaacacatcccaaaatgatattgtgttgaatgatacatgggaaacagaatctagtgaagacgaggaggagggggaggacgatgatcaagacgaagaagacgaagacgaagacgacgactcttttgaagaatcaacagatgaggaagaaatatttggaaatcatgatgacgatgaagatattgatttattgaaaactgttgacagattacaatcgaaaattgcttccaggcaacccaaggaacgtaaaaagttgattgttgaaaccagacaagaaaatgaatataatttacccacagggggtaatcagttatcattgcaagacatgatggctaatattaatgaagatgaaaataataaagcgattttacttgataaagagtctaaagccattgccatcccattacctaaacgtattcaacaaagaaatgatcgtgcagctgcctatgaattatcaaagaaagaaatcagtaaatggaaagattctgttcaagctttgagacaagctgaagttttaaaatttccaatgatcaatcaagagcaagatactattcgggattcagcccttacttttagatcagataatgtgccgactactgaacttgaaaaaagaatcaataatgtgttaacagaatcttcgcttgttgacgacaagaaagaggcaacatttgaagaaattgctgtggctaagttgagtcccgaagagatgaaaaagagaaccaacgaattgagattgatgcgtgaattgatgttccgagatgaaaaaagagccaagagaatcaagaaaatcaaatccaaacagtatcataaaattcaaaagcgtgaacgattaaagaatcaagaaatggttgaaggtgaagattttgacatggaagatgaagaccacgatactaaaagagcaactgaaagaatgagtttgaaacacaagacacaatcacaatgggctaaatcgatgataaaaagcggattatcaaaagatgcctccaatagagctgaattggaagaaatgttaagacaaggtgaaaagttgcgtaccaaacaaatgggttttgaagacggagaccaaagcgatgaaaatgctgatgatattataaatgaatacgatcaagatgatatagacgatgaaaataacttgagaagcaaattgggtaaaggtgttatgaatatggatttcatgaaaaaagctgaagctcggaaaagagaagagaatttgaaagaattggaaatgttgagaaaattagagaatggcgaaggtgatttggaaattttcgaagaagacaatagcgcagttaatgtcactaagaatcaaggaagaagaatatatacaccagcagcagcatcccaaataaatgacaataccaatgagcaagcattagaagacattgaaaatgacaacgctaaatctttagataaaaaattagccaaaaaatacaaagtcattgataaccaagaaacaaaaacatcagctaaatcagaatctaaccctgaagttttgcctgtcgatgaatcaaatccatggttgtcatctaatactagtgctaataacgacaccacaaaaaagaactctgccaaaataactacagttgataaagagtcttcaaaattggctaaagcagctgccaaattagccaaatcaaaattgaaaaaacacaaatctagtgatgataataccttaattgatgtgaatgagacattggctgttaatgatatttaccaagatggttccgaggatgaagatgaatcggttccaacaatgtttaaacaaaaggatttgattaaacaagcttttgcaggtgatgatgttgttagtgagtttgagaatgaaaagaaacgtgtcatcgaagaagaagacgacaaagaagaggatttgacattacctggatggggtgattgggctggaggtgattcaaaacccaagaagagaaaagtggtgcgtaagattgacggggtaatggcaaaagatcgtcgtaaagataaaaacatgaagaatgtaatcataaacgaaaaagtcaataagaagaatttgaaatatcaaagtagtcacgttccatatccatttgaaactagagaacaatatgaaagatcattgagaatgccagtgggtcaagaatggacatcaaaagaaacccatcagaaattgactatgccaagagttattgtcaaacaaggtacagttatcgatccattaaaagcacctttcaaataa

SEQ ID NO: 6422 - DNA, 858 bp, Candida albicans
atggaggataaaagagaattactcaaacaaccaattcatggtatatatattccaatagggttaattttatttggtacctggatttttggttgggaatatatgccatattcaatcggattcattgttgtcatagtgtctatacaatattatggtgctttgaaacgtgcttcttctatgcatcaagttaaatggcaagaatttgagttgttggataagacattaattgcccccatgacatcgatttatcgtttcaaattaagaagagaagatgaagtgttagacattcctactggacattctttagcttgttgttttaatgttgatggtaaagatgaagtcagattttacactccgatttctaatcaatttgataaagggtttttcgatattttggttaagcattatgaacatggtgtcgttacaaaaaaattggctaatcttcaagttggacaaacagttcaatttagaggaccatttggaaaattacaatatgtaccaaatctggctaaagaattggctttagttgcaggaggcactggtattaccccaatgttacaagtcattactgctattatcactaatcttgaagatgatactaagatcaaattattatttgctaataacaccgaaagggatatattattgaaagatgaattggataatatggcacaaaaatatccaggattggaaattaaatatgttacaggtaaatttgttgataaaaaactgtttgaatttttgccttcaccaacttctgattcaaaaatatttatttgtggtccaccagcatttgttgaatatatcaatgaaatgactaaagacgctgggtttgaaaaagaccaagtgttttgtttttaa

SEQ ID NO: 6423 - DNA, 1356 bp, Candida albicans
atggtcatgactaactcaccacaaaacattggtatcaaaggtattgaagtatacattcctggtcaagctgtcaatcaatccgatttggaaaagtttgatggtattccacaaggtaaatacacaattggtttaggacaaaccaatatggcttttgtcaatgatagagaagatatttattctatttctttgaccgttttatctagattgatcaagaattattccattgataccaacaaaattggtcgtttggaagttggtactgaaacattgttggataagtctaaatccgtcaagtcggtattgatgcaattgttcccaggtaataatgatattgaaggtatcgacacagttaacgcttgttacggtggtacctcttcagttataaatgctattaattggatcgaatcatcatcatgggatggaagagatgctattgttgttgctggtgatattgctatctacgacaaaggtgctgccagaccaactggtggtgttggtgctattgccttattaattggtccagatgcaccaattgtatttgattctattcgtggttcatttatggaacacgcttacgatttttataagccagatttcaccagtgaataccctgttgttgatggtcatttctcattaagttgttatgttaaagctgttgacagctgttacaaaaattactccaaaaaaatcactggtgatgccaacaagactgttggtgtttatgatcattttgatttcagtgccttccatgtgccaacttgtaaattggtcaccaagagttatgctagattattatacaatgattacgtttctaacccatctaaatttgctgatttaattgatgaaaccaccagaaaacacattgacggtttaacttatgatgaaagtttgactgataaaatattagaaaagacttttgttggtttagccaaagatgaaacgaaaaaaagagttcaaccagctttgcaagtccctaccaatactggtaacatgtatacagcttctgcttgggtatcattggcctcattattatactatgttggttcagataacttgaaaaacaaaagaatcagtattttctcctatggttctggtttggcatctactttattgtctgtcactgtcaaaggtgatgtgtctgcaattactaaagttttagattttgattataaattgggtgatggtagaaaaattcaatctccagaagattacttggcagccattgagttgagagaaaaagcccatttgcaaaagagctttaaaccacaaggttctactgacaacttgagccaaggtacctattacttgactgaaattgatgacaagttcagaagagcttatgctattaaagaatag

SEQ ID NO: 6424 - DNA, 1293 bp, Candida albicans
atgccaattaatttaggattacaaagaatagctaaactattaggacatttaaataatcctcaaaatgcttataaatccattcatatagcagggaccaatgggaaaggctcaacattagcttatatctcatcagttttaactgaagctaaaatcaaaaatgggaaattcacttcacctcatatcattaattatcatgattgtattagtataaataatcaaacatatccaaaatcaaaatttgatagaattaatcaacaagtcattaaaattaataatgatttgaatttagaatgtactgaatttgaaattttgacagctacagcatttaagatttttgcattggaagaaattgaaatggcattagttgaagttggagttggtgggagattagatgctaccaatgttttaataccatatggtgagactatcggtactagtaaaggaggcgtggtggcaactgcaataaccaaaattggtctcgatcatgaaaaattgttaggtgggacattattagccattgcaaaagagaaatctgggattataaaatatggcattccttgttttgttgattcactgaatgattctattgtgttacaagcaattcgtgaaaaatcacgggaagtatcatgtccattaagtgttgttgaaccaattcaggccaacgacgacaaccaattcattaaatatagcccattaaaaggatcatatcaagccaataatctatcattggcagtggaaatattgaaatcattaccttatagaatatcggaagaaattttgataaatggtataagcaaaactaattggcctggtagattacaaactatacaacacaagagtctaggctcaatattattggatggtgcacacaatgaaagtgccgctattgaattgggcaaatatttaaatacaaaatatcgtaaacaagaaccagaagcaaatatgctggaaggcaatcatacacctataatacttgtcattggtatgactaaaggcaaagcaattggaaatttgttaaaacacgttatgtcagaaaacgatattgttatacctacaatgttcactcaacctgaaaatatgccctggattaattctgaactgatttccactttgacttcaattgccaaagattattgtcgtgatgtaagaaatattggtgatgatgcacatatacatcaagtatttcaatatttaaaaaacaataaaaacgacaaactgttagagaataaaccaatagtggtttgtggaagtttatatttgtgtggtgatgtgctaagagaaatagccaattga

SEQ ID NO: 6425 - DNA, 1554 bp, Candida albicans
atgtcaaaaagatcagctgaagatgatttaagtggcaatggatccaccagtcatactgccgttaaaactaataaagattctcttccaactactacaaatggaaaggaagaagaaccagacaatatggatattggggaatttgaagatccatacggtgatgaatttgaaagtgatgaagaaattatagaattagacgataacaatgatgaagaagatgatgaaatgattgatgaaaattcaacacaagccaaaattgaagaattagaagccaaagaacaagaacaagaacaacaatcatcaatatatttacctcataaatcaaaaccattaggaccagatgaagtcttagaagccgatccaacagtctatgaaatgttgcataatatcaatttaccatggccatgtttgactgttgatattttaccagattctttaggtaatgaaagaagatcatatccagcaacagtttatttagctactgcgactcaagctgctaaagccaaagataatgaattgttagctatgaaagcatcttcattggccaaaacattagttaaagatgaaaatgaagaagatgaggaagatgaagacgatgacgatgatgttgatagtgatccaatattagattcagaatctattccattaagacatactacaaatagaataagagtaagtcctcatgctcaacaaactggggaatacttaactgcttcaatgtcagaaaatggtgaagtttatatatttgatttactggcacaatataaggcatttgacacaccaggttatatgattcctaaatcatcgaaaagaccaattcatactattcgtgcccatgggaatgttgaaggttatggattagattggtctccattagtaaatacaggggctttattatctggagatatgtcagggagaatttatttaactaatagaacgacatcaagttggaccactgataaaactccattttttgcatcacaatcttcaattgaagatattcaatggtcaactggtgaaactacagtgtttgccacgggtggatgtgatggatatatttgtatttgggatacaagatcgaaaaaacataaacctgcattatcagtaattgcttctaaatctgatgttaatgtgatatcttggagttctaaaatcaatcatttattggcatcaggacatgacgatggtagttggggtgtatgggatttaagaaatttcacaaacaataccaccagtaatccttcacctgtggctaattatgatttccataaatcgccaatcacatcaatttcattcaatccattagatgaatcaatcattgctgtttcatcagaagataatactgttacattatgggatcttgctgttgaagctgatgatgaagaaatttctcaacaaagaaaagaagctcaagaattacatgatattccaccacaattattatttgtccattggcaaagagatgttaaagatgttagatggcatccacaaattcctggttgtttggtatctactggtggtgatggattaaacatttggaaaactatatctgtgtaa

SEQ ID NO: 6426 - DNA, 1053 bp, Candida albicans
atgagaccaataaagttgatgggacatgagcgttctttgactcaagttaaatataacagagagggtgatttattattttcagttgccaaggataatgcagcatctatttggtattcatcaaatggggaaagattaggtactttagaaggacaccagggggtaatttggtctattgatgttgacccagaaacacacttatgtgccactggaggaggggatttagccatcaaattgtggaaagttgaaaatggtcaatgtgtgtatacatgggattctccatccccagtgagaagagttgcattttcaccagatggtaaaaaattgttagccattgctgatcaagttatgggtcacattggtactgtttctgtatttgatataaacgatgatgacgccactctaagccagcaaaaagcagaaccttctttagtgattgaaactaaatctgaggggtcaaaggccaccgtagcgggatggtctggtgatggagattatatcattgttggtcatgacaacgggtacgtttctaagtacgattcgaaaacaggcaaattagtcacatctttacaagcccacggtatacataatgaagagaaaaacgtcagtatcaccgatatccaattcgccccagaagacagatcatattttatcacatcttcaaaagacaaaaccgccactttgattgacgttgacacctttgaaattctcaaagtatacaaagctgatgctccaatgaacacagctgccattaccccggtcaaagactttgttattttgggaggtggtcaagaagcaagaaatgttacaaccacagctgaatcacaaggtaaatttgaagccagattttaccataaaatttttgaagaggaaattggacgtgtcaagggtcatttcggtccattgaacactgttgctgttcaccctgatggtactggttacagtagtggaggagaagatggtttcattagagttcatacatttgataagtcatatcaagatttccttttcgatgcagaaagaactgaaagagctgctgctgcaggaactatttaa

SEQ ID NO: 6427 - DNA, 1296 bp, Candida albicans
atgtcacaattgccatttattgttggtgctccaggtaaagtgattatttttggtgagcatgcggctgtctacggtaaaccggctattgctgcggccttgagtttgagatgttatcttttggtttccccttcatctgattccaataccattagattgcaattccctgatatcaaattggatcactcttggaatatcaaagatttgccatgggaggagatcaaaccatatttgacttatgacagtgcaaacaaaccacaaataccttcagaattggttcctgaaattgtggacaagttatcaagttttttgaatggttttgataacaaaatgcattattatgcttgcttttgttttctttacttgttgatgaatttatgtgattcaaaagtgtcgggaatgaattttattgtcagatcaactttacccattggtgcaggattgggatcatctgcttctacatctgtatgtttatcatcagctttggcacttatgggtggttggatcaacaaaccgctgttgcatgaaaatgataagttggatacagctgatatacctgatttggagtttatagataagtggtctttaattggtgagaaatgtttccatggtaatccatcagggattgataacgcagtggctacttttggaggagcggtgatgtttcaacgaacatcaactccagaacaaccatcaatccgtacaaacatgagaaatttccctgcaataaaattacttttaacgaatactaaagttccgaagagtacagccgatttagttgctggtgttggcagattaaacgcagaatttaatctgatttcaacatcgattttgacagctatagaacatttgtcacaagaagcttacaaggttatgatgaatccaatgtttggcaaagaagaaacaaatgttttgagaaagttggtgaatattaatcatggtttattggtagcgctaggtgtatcacatccagcattggaaacagtaaaaattattggtgataaacatagaattggggcgactaaattgacaggtgctggtggtggaggttgcgcgatcactctagtgaacgacgatgtagaagaatctgtcatacacaatgctatcaaagagtttgaagacagtggatacgagagtttcgagacttcgttaggtggtaaaggagtaggtattttgttccatgaagatttagacgatgccacaaagttctcagagtcccaaatttgcaattacgtagatcgtgccgctattgaggattcgttaggaatggcaaatgtgaaagaatggaagttttggtga

SEQ ID NO: 6428 - DNA, 1833 bp, Candida albicans
atggcaccaccactatatgtcaaagggggtgtttggacaaatgttgaagatgagatattgaaagctgccatacaaaagtatggtatttatcaatgggagagaatttcttcattattaccaaagaaatctgcaaaacaagtgaaagcaagatgggttgaatatttatcacctcttctaaataaaacagattggacaaaagaagaagatgaaaagttgttaaatttacacaaaatatttcccaatcaatggagaagtatatcaaacattcttaaccgaactgcggtccaatgtgtggagcgttatcagaaactaattgatgaagctgctggaatcaaacctggagacgacgaggaaaatttggggttgtctggaccaggtatcgagacattaccggcagttggtgcttctagtggattggcagttggagaaatgaatttgaatccagaaagcaaacctgcaagaccagatgacgaagatctaccagatgatgagcgtgaaatgttggctgaagcaaaggcgagattaggaaatatccagggtaaaaaggcgaaacgaaaagctcgtgaaagaatgttagaagagagtaagcgtattgcattgcttcagaaaaggagagagttgaaatcagcgggaataaatgtgaagttaacaacacgaaataaaaagaaacggaaagaatttgattataatgccgatatacctcatgagattattcctcaagcaggcccttatgataccgcagaagaattgaaacagaatgattttgaaaagcaacaatttggccaacaagtgtcaacaaagggaattagtatgaaagatatagatgacagaattgccaaagaagaatcaagaaggaagaaggaagttgagaagaaaaaactggaaagaaaaagagaattcaatgcagcagcaagcctaatcagcgaacacgaagattctaaaagaaggaaattgaacttaccagaaccaggcacccacaattttgaaaagaccaagagtgatgttttaacccttactaaccaagccaacaacaaactatccgaaaaggagattgctcgaaatcagaataaaaaaagagctgcagtagcacaattaattaaagcaactttcgagagacttcctcctccaaagcatgaaactggagaaattctaccattcgtttccaccaatatccttgaattcagaaatgacgtaaatgctaatgatatatcggacattgcaggagcaaagttacctgatgaaactgcaacaaatgtaagtacattgatatctcgtgttgtgcagcgagaactaccaataccccatccaaataatctacgagatctaagcactgtaaaatttgatacattggtagacaaattgattgctgaggaatgtcatagattgatacggtccgactacaaacaatatcatgacactactatcaatggtgtttctactgataagtatgaccgagacttacttgaaaagatcaaccaagatattgataaagagtttgctcaaatggatgtttcaacagttcacagttttgaagattacgttcttcctaaaaactttaaagtggcagaatccataatagaaaatttacacactttccataatgagaatgaaaaattgacaaataaaatactacaatctacaaattatgaagatcaacgagaccaaaagttgcagcaattgactcatttatggcgtgaactatcagatgttaatttgtcttatctgatagaaaagaaattgtttgaacttgaaagttcagctattgacaaagaattgttatgtttgcgcagtgaaattgacaaattaaacaaaaagattgaaacacttcggtag

SEQ ID NO: 6429 - DNA, 1416 bp, Candida albicans
atggcaccaaaacggtcaaagaatcaactacgaagagagaaactaaagcagaggaaattggaaaagcaagcagaggaacctgataaaagtgtcaacgtagaagaaccaaagacagggccaaatagcacaacaatcagtatacaaattgacgatgatccattgtatgaacaatttcaatcagtattgaacaaattcaataatcctcaagaaattgaaattaccaaacaagaaagtacagaagattccaaggatttggtttatcaaaatggagactcatcggaaaacgaactggatgatgaagacagcagtgacgagaatgatgaggaaacgcaaaaacaacaacaacagctttcaaaacgtcaattacgtatacaaaacaaaattccattagcaaaattgaaatcatcggtgaaatcccctcaagttgttgaatggtacgatgtggactccaaagacccctatttactaattgcaatgaaatcccaaccgaatataatcccggtcccatcacattggagttcgaaaaggaattacttgtcttcacgtagaggtatagaaaaattaccatatcagttacccaaatatattcaagcaacaggaatttcagaaatgagatcaggtggacgtgatcacaggacattgcgtcaacaacaaagagaaaaagttcaacccaaaatgggtaaactagatatggattatgaaaagttataccaagctttttctaagttccaaataaaaccaagagtttttccctatggtgaattatttgaggaaggtaaacattccaatgatgaacttgttactaaagctgccaaaattaaacctggtattatttcattggaaatgagactggcattaagtatgccacagaatgatgggactattccaccagcttgggttaccatcatgagagatatagggaaacctccctcttacaaggacttggttatacctggactagatattaaatatagtaatgcagggtataaggatagaaatagcgattctagacgggaaaaattgaaacattggggagcactaaatactgctattgagtcttcagatggagaagatgatgaagaagatgacgatgggcaagatgaggaatctagtgttgctactgattctattgaggtaaacaccacattttatccattggaagaagatgaagtgtctgaagagccatcgttgaatgatatacttgcagggttgtcaagtgctaatgataaacctaaagaagagaagaaattgtataaaattattgaagagaggaaagttacagatgatgattcgttgacaggatatacatatgacttgaaaaatgatagcgtcgaggaatattcagaaaatgaggattccaaaaactctgaggacaccaagaattctgaggaagaacctgaagattttaaattctaa

SEQ ID NO: 6430 - DNA, 465 bp, Candida albicans
atgggtaaatcatccggtaaaggaaaaggaggtaaaaatagaagaagaggaaagaatgtcaacagtggacaaaaaagagaattaatctataaagaagagggccaagaatatgctcaaatcactaaaatgttaggtaatggtagaatcgaagtaagttgtttcgatggtattaaaagaatgggtcacattagaggaaaattgagaaagaaggtgtggatgggacaaggtgatattattttggtgtcgttgagagatttccaggacgaccaatgtgatgttgtccacaagtacaactctgatgaagccagaacattgaagaatgttggtgaattgcctgaaaatgccaagattaatgaaactgatacctttggtgctgatgatgatgaagaggtcaatttcgaattcggtggagccgatgaagatgaatctgaagaggatgaagagttggatattgacgatatttag

SEQ ID NO: 6431 - DNA, 3276 bp, Candida albicans
atgacagtgttaccggacgaatatcattctgcactcacacagcttttagagaatttgctttctactgacaatacaatcagagctgaagctgaaaagtcactcgaccagaactggacatccaaagacaatgttgaattattattagtatttttggctgaacaagcatgtcaaggaaataatgacactatacgtgcttttgcttcagttatgtttagacgtatggccataaaatccccgaaagaattgcaaagtgtcactgatagaacaattggtgttattggagagccagcaagacaacaaattagaggcattttgttagctggatttacctcaccacaatcaaatcaggtcagacacaaactttctgatgcaatttcagaggttgccaaagaagatgcttctcctgcaggaacttggaatgagttgatacctgctttatttgaagccaccagaaacgaggaccctagtttccgtgaatccgcatttagagttttttctgcatcacccgagttgattgacaattcctatattgatgaagtcttgcctgtgtacaatgctggatttgaggatgcaaacgatgatgtgcgtattgctgcttgtactgcctttgttgcatttttcagaaaactcccaaaaaatacttggaaattgttgtcaccattattacctaacttgttgaactcgttaccaagatttttgcaaaacggacaggaccatgcattggcttctgtattagaagctttgattgatttagtggagttggcaccaaagatgtttaaggatatgttccctactattattgagttttgttctgcagtggcaaaaaataaggatttagatttgaactcaagaatggcagcattggaattgctcagcacttttgctgaagtttctccttcaatgtgtaagttaaccccaacatacactgagcaaatggtactcatcacgttatcaatgttaaccgaagtctgtatagatgacgacgatgcagccgaatggaataacaaagacgatagtgaagacgaagacgaagaaccagaatatggtgccgccagacaggctttggatagagttgctttgaaattgaatgggcaagctttggcaggacctttatttcaatatttacctgctatggtactgtcttctaattggagagaacgtcaagctgctcttatggctctttcttctgctgcagaaggttgtgctgacgttttaatgaatgaaatcccaaagattttggacatgatattgccctcattagaagacgaacacccacgagttcaatacgctggctgtaatgccttgggacaaatgtctactgactttgctgacgttattcagagaacatctggcgatagaattttacctgctttgatttcaaagttgacaaacaaatctgttccaagagttcaagctcatgctgccgccgcattggtcaacttttcagaggctgctacgaaggaagttttagaaccgtacttggatgacttgttaaataatttgttgattttgttgcagtctccaaagagatacgtgcaagaacaggttttaaccactattgccataattgcagatgctgcagaaaagacgtttgtaaaatactatgacacattgatgcctttgttagtaaatgtattgagaaccgatgttggtgcagaaaacaaattgttgaaagcaaaatgtattgaatgttctacattgattgccttggctgttggtaaagaaaaatttgcaccacatagtcaagaattgatccagttatttggacacatccaacagagtgccactgaagacgacgatttggtaaaactgtatttggagcaagcttggggtagaatttgtaagattttggggaaagactttttgccttatttgccatctgttttgcctcccttgatgttgacagcaaaggcctcacaagatatttcattattagaagaggaagatgcagaggaattgaaactcaatgaagaatgggatgttattaatatatctggtaaatggatcggtgttcacacagttactttagatgagaaggtcactgccatggatcttcttagaacatacgctgttcaattaaaggaagactttatgccctgggtcaaggaaatagccgaggagattgccattcctggtttggacttttatttacatgatggtgtgcgtggatcggctgcgttgactttagcttctttgcttagatgttgcgtagcagccactggtaacaattcaactgaagcattaaccctttggtcaaaaatttgcaataaattaagcgaactgttgtgctcagaaccggttccagagttacttattgcatattatactacattggttgaatctattaatgtcttagcacccaacgctgtctcgggtacccaattgcaagctttatcaaaggcagttaatgccaacatgattgaaatctataatagaattaaagaacgtgataatgctgaagatgagtacactgaagacgttgaagaagacgaagaagaatatactgacgaggaactattagatgaaataaacaaggtcattgcagttgtatttaagaatgttaaatctaatttccttgaaacattgcaaatattgggccctacaatttcttcattcataaatgatgaaaatacaactgttaagttttgtggattgtccattgtcagtgatatattggagcattgtgggccagattcggttcctttcaaagaaatgttcgttaaagtgatttctgaatcggtaacttctgcaaatgctagtatccgtcaaatttgtacaaatgctattggtatggctgcacaatacggaggagatggttatgcggaattttgtctttcattgttagaacctatgttcaaaatggcaatggttcctgatgctagagcggatgagaatgtatatgccactgaaaattgtgtttctgcaatcgctaaagtttgccacagattttcaagttctgttccaaacttggatagtcttattgaccaatggatttcattgttgccaattgttcaagacgaatcagcagctccatttgcatacatgtttttgagtgagttaattgatagaaatcatccatctgttttgaaacaagttccgaaagtagtggagtctgtgcttcaagctttagcccatgcatcaatatcaggaaacactgctcaaaaagttgtaatttcaacaagaactttattgggatccattcctcatgaagaagctgttgcattgttacaaaagaatccatcagatttggatgttgtacaaaagttttttagttaa

SEQ ID NO: 6432 - DNA, 852 bp, Candida albicans
atgtttagaaataattacgataacgattcagtcacatattcacctacaggtagattattccaagtcgagtatgctttagaagctattaaacaaggaagtgcagctgttggtttaacgtcgaatgattatgttgtgttagtagctctaaaaagaaatgcagaggaattgggatcttaccaaaagaagatcataaaaattgatgatcacatgggagtggcattggctggtttggcaccggatgctagagttttatctaattttttaagaaaacaagcaatgcaatgtaaaatggttttcaatcgtccaattcaaacctataaagcagttttgtcaattgctgataaagcccaagaaaatacacaaacttatggatctaggccatatggtgtcgggttgttgattgctggatatgatgaaacaggggcacacctttttgagtttcaacctagtggaagcgtcttggaatattttggagccgccataggagcaagatcccaagcagctcgtacatatttagaaagaaatttagaagaaataaagaaatgtgatgacgttgagaagttggtactccatggattatatgctttgagagatacgttgtctcaagacgttgaattgacatttaaaaacaccagtgtttcaattgttggtaaagatcaaagttttgtatcgtatgacgatgaaaatgtgcaacaatggttggataaattagactctgtctcgaacgctagaaatagagatggcgatgatgatgaggatggtgatgaacaagaagagggtaatgcaacccaagctcaagaaggagaaggtactgaagcaccagcagaagacagaatggaaactgacgagtaa

SEQ ID NO: 6433 - DNA, 888 bp, Candida albicans
atggctatattgaactcaaaccctgaagttcttttacgtaaaagaaaaaatgccgataggaaaagaatcgaaaagcaagaacaaattcgtgaacgacaactcaacaaaaataaattgaagaaaaaaaatcagaataaattcattcgtgctgaaacattagttagtaatcataaatcaaatgaattagaaagaaaaagaatcaagagtttgattaaaaaacaaaagcaaacccaacaacaacaagaatcagcagcagcagactctggtgatgctaaattattatttcttattagaattccaaatcatacaaaaggattgaaacttccatcaaaagtgtacaaaattttaaaagatttgaaattaactagtgtgaatactggtacatttgtaaaagctgattctcaaaccatggattcattgaaatttattgctccttatgttcttgtcggacaaccatcattaacatcaatacgaaaattatttcaaaaaagagctagaataatggttcctgatgaagaacaagaacaagaaaaaaccacaaatgaacaagaagctggtcaactggaagattcagaatccgataccaaacaaaaaatcataaaattagacaacaatcaattagtggaagataaatttggtaatgatttaggattgatttgtattgaagatttgattcatgaaatttcccaactttcagataatttcaatagtataactaattggttattaccatttcaattgaatgctccagttaatggatggggaccacaagctaaattggctagattgcttaaagctgatgaaaataaacaaaaaatcagtcttgctcaagatttcaaattacaagaagttgaagatattgataagataattgatgaacaaaattaa

SEQ ID NO: 6434 - DNA, 987 bp, Candida albicans
atgtcagtcatattagcttctgcagggtatgaccataccatacgattttgggatgccttgactggagtgtgttcaagaaccattcaacatccagaatcacaagtgaaccgattagaaataacatcagataaacgatttttggcagcagcagggaatctatacgttaaattatatgatataagacaaacggggaattcgggaaatggggcaaacggtacaacaaatacttcagcttcaacaagttcatcaaatcagaacaattctaataacaacccagtaatgacatttgaaggacacaaaaacaatgtcacatctttacaattccaagctgataataaatggatggttacttcactggaagatggaacagtgaaagtatgggatgtgcggtcaccatcagtgcaaagaaattataaacatcaatgtcctgttaatgaagttgtcatccatccaaatcaaggtgaattaattagttgtgatcaagatggtaatattcgagtgtgggatttaggagaaaacctgtgcactcatcatttaattcccgaagatgatgtacccataaactcattatcagtggccagtgatggatcgatgttagttgcaggaaacaataaagggaattgttatgtctggaaaatgcaaaatcaaagagatgcaactgttttaacaccagtaacgaaatttagatcgcacctgaaatatataacgagagtattattactgacagatatgaaacatttggcaacttgttctgctgatcatacagccaggatttggtcaacagaacagaatttcaatttggaaactactttacaaggacatcagcgttgggtatgggactgtgcttttagcgctgatagtgcgtatttggtgacggcatgctctgaccattatgttagattgtgggacttgtcaaatagtgaaaccgtgaggcaatataatggccatcataaaggtgccgtatgtgtagcattaaatgatgtatag

SEQ ID NO: 6435 - DNA, 1857 bp, Candida albicans
atgggtagaagagcaaagaataagcaaggtgtgccaccaacttttgatgagtttcaggcctcaaaattgaaaaacgacactaaaagaaaaagaaatggtgctaaagaacagaaaaatgatttacccgtttctaaaaaaccaaagtcaagtacaagttccagcaaacaaactgatcgtgctgaaagttctaaaccaaagccaaagactaaatcaaaagtgactaaagatgttgaggttgaagaggaagtcgaaaatttaccagaagttgatcttgaagaattagcttctgctaagaaatccctttttgatgattcagaagaggaagagttggacgatgaatttgacgtcgaaggtgaagaagactttgattcagatgaaggagagcgtgccagacccatgttttcagatgacgaggatgaagatttggaagacttgaatgctgaaaatatggaactttattccaagagattagatgaggaagagagattggaagcagaagaggcagaaaaggaattgctagaagcagaaactaaacaacccagagcgaaagtcttgccaacagctgaagaagaagaagaaatggccaaaggtcctcaggatgtgactatggtaagaacaagaatgcttgaagttgttaaagttttggaaaatttcaaagagttggcagaagaaggaacatcaagaacagattacactaacagattgttaaaagatatatgtgaatattttggatattcggaatttttagctgataaattattcaatttattctcaccagcagaagcaatggagttctttgaagctaatgagattgcaagaccaataactataagaacaaacacattaaagacaagaagaagagatttggcccaagctttggtcaataaaggtgtaaacttgcagccaattggatcttggacaaaagttggtttacagatatttgattcccaagtccctattggtgctacccctgagtatttggctgggcagtatatattgcaagcggcatcctcctttttgcctgttatggcattggaaccacaagaaaacgaacgtatattagatatggcagcagcaccaggtggtaaaactacatatatttcggcattaatgaaaaacactgggtgtgtttttgccaacgatgccaacaaagcacgtacaaaatctttaattgcaaatattcatagattgggatgtaaaaacacgattgtatgtaattatgatgctagagaattccctaaagtgattggtgggtttgacagagttttattagatgccccatgttccggtaccggtgttattgccaaagatgaatcagtcaaagtgagtcgtacagaaaaggatttcatgcaaattcctcatttgcaaaagcagttgttattgtctgctatagattcagttgatgcccactcatctacagggggtgtcattgtgtattctacatgttctatcgctgtagacgaaaatgaggctgttgtcgattatgctttgagaaaaagaccaaatgttaagttggtggacactggattgaccattggtaaagagggtttcacgtcttaccgtggaaaacactttaatccgaaaatttcgttgactagacgttattatcctcatacctataatgtcgatggattttacgttgcaaaattcaagaaaattgctccttctccacacgatatttccaaagctggtgctaaggagaaagagaatgccgctagagcagaagctgaagaagagggtattattcatggagacttcgcagagttcgatgatgaagaagataaggaaattatggaaaagtcaaaaaagcatagtttaagaaaaaaaggtattaaccctaacgctactaaaaaatag

SEQ ID NO: 6436 - DNA, 4413 bp, Candida albicans
atgctgtccagatcagccagacgtaagactctacaacaattgaaagaagccagaaagacaggtagaaacgttaatgttgttgaatctgatactgatgattacaatgagatttatgatgaggtggacgaagacacttacagacaacacaagagaaatcagctaatgaatgacgattttattgttgacgataatggagaaggttatgttgataatggagctgacgactgggacgatgcttctagaccaaactattattcagatgaagaaaacgagtctatgggatccagaaaacgtagaaaaaaggaggacaagacaactaaagtagctaaaacatcacaaattagaaattttttcaagccaatgagtggtgtctcagattctaagaaaaaattggagacaaacatagatgatatcctcaatgattttggtgacgacttggacaaaaagaaaaacattcccaaagcattttcaaactctattaacaaggaggtcaataaccacaatattaataaaaagaaattaaagaatacttttagcttttcgacatctactaggaaaactgacaaaacaacaccaaaacttgatgctttcaatgcttcatccgactatactatggacattgataattttgaagatcaaccttcatcaccatttaagcttaaaagcgaggtgactccagaagcagaaactgaaaaggagaatattgatccagaaccgacaaaaaacgtttttgaaaacccatctgaatcattgaaaaatcaagaaaaagtcaatgacaacgatgacgaagacgattcagatgacgatattgtttattcgagaaaacccagagcagcagtggttaagaaaaaccaggtggatacggtttcagctgtcaaggccaaccaattaccttcatctccaatttccaaaccagtttataccaaattttctaatcacaccgaaaaggtatctaaagacaatattaaagacacatctgattcattcaaaatgttctggtttgattacgcagaggccgagaactctcttttgctatttggtaagatcatgaccaaggaaggcaaattagtatctggagtggtcaaagtcgacggaatttgccgtgaattgttttttctaccaagagagtatcgtattgtggatgacgaagaggataaaagcaagaagctcacagccattgacgtattagaggaaatacagccgcttttgttagctaattacaacttagaagaattgcgtgctaaacctgaggtcaagaaatatgctttcgagttagccgatatacctaaagaagccgagtatttaaaggttttgctcccattcaataatgagaccaatagaaacatcatgcctgcaaatattgaaggtagcacattcagacacgtttttgggaccaacgctaatatgtttgaatcatttataatgcaaagaaacattatgggaccatgttggttagagattcgtggtggtgattttgatgccatgcaaaatgcttcccattgtcaggtggaagttgtggttgacagaccttcacaaataagcaccattgacaaagatgctccatcttcgcccaatttaactgtcacggctatctcaatgcaaacaatgttgaatgccaaaaccaataagcaagaggttgtgtcggtgtctttggcaacttactttgatctacctcaagatgcccccatatcagaagatatcaaacctgatgatgtttttacgctagccagacctgtgggatctgtatctttcccgccaagattacagcagttggctgaaaaaggtgggtttcaattgcgaacttgccctagtgaaaaagtattgcttaatgctcttgctgctaaaataaagtctttggatccagacgtctttattggccatagattggaaaatatatctttagatgtgcttgtgcatcgtatgaatgataataatgttgttacgtggtctgctcttggacggagaaacagaaggcaatggccatatatgataaacaaaagtaattcaagttacaacaatagtcttctcattcgtgatgtttttcaaggacggttgttgtgtgatattgccaatgaaatgggacaatccttaacaatgaaatgtcagtcatgggatttgcatgaaatgtatgatgtcgtttgtcacaaaaagcattctccagtagaaattaactatcaaaacttaaagtatgctgaagatgcacatttatttttgatggcattgaaggaaaacgaactcaacgtcaagcaaactgcagaaattgcatttgctacccagatcctttcgctttctaagcagttgactaatattgctggtaacgcatggtctcatactttgagcggaacaagagctggtagaaacgaatacattttgttacatgaattcaagagaaacaattacattgtacctgataaggaggataaaacgcacaagaatacgtcttatcaacaagaggcaagagtggaaaatgccgaggaagatgcgacaactgccacatcgaacaagaaacccaagtatcaaggtggtttggtgtttgaacctgaaaaggggttgcataaaaattatgttttggttatggatttcaactcattgtacccaagtattattcaagaattcaacatatgtttcacaactgtgaacagagacagatttaacattactcatgacgaaaacaaggacatgccaattcttccagaaagagataccgaatccggtgttttgccacgattgttaaacactttggtttctcgtcgtcgagaagttaagaagctactcaaagatcctaagaatactccatttcaaaaagctcaatatgatatcaaacaacaggctttgaagttgactgcaaactcaatgtacggttgtttaggttatgtgaactctagattttatgctaaaccattggcaatgctagtgacaaataaggggagagaaattttgatggatacaagacaattggcagaatcatctagtttaagagttgtttacggtgatacagattcggttatgattgatactggtgccagcagctaccaggaagctattaagattggagagcaattcaaagtacaagttaacgagcgttataggttgttagagattgatatcgataacgttttcaagagattgttgttacatgccaagaagaagtacgcagccatgaatgcctcaataaataaagctactaacgaagaaacagctactttggaagtcaaaggtttggatatgcgaagacgtgaatactgtcaactttctaaagatatttcgacctttgtattgacaaaaatattgtcggacctggaccctgaaactgcacttcttgaagtgtacgactatttggatgacatgaaaggtaaaatacaaaacaatgaaataccgattgacaaatataagataaataccaaactttctaaggacccaaaaagttatccaaatggtaagtctatgccacaggttcaggttgctttgaggcttagagaagaaggaaaagtaatcaaagctggtagtgttatcacatatgtcattactgcggctaaagatgatggcgataattccacggtggcagagagggctagggctattcaagaattactttcaaaaaaagaccccgatttgaaaccagacgccaattactatttggagaaacaaatatttgctccagttgaaagattgttagaaagaattgagggaattgatatggtcagagtggcaacatcgttaggcattgatacaaaacgttacattttaagagtaaagaacagtgacgcaaacggagaaatacttccaattgaatcaaacatttctgacaaagagagatttagagctacaagttatttggtgttgcactgtaaatgtggaagttcattccgatttgggggaatcatggcagcagaaacatacaaagtcacattcaatggtgtttgttgcacaaagtgcaactatacatttccagctattaaattgacctcacaattggagtcaatgataaggaagcacattgcgttgtattatgctggatggttggtttgtgatgaccctgcctgtggaattacgacaaggcagatttctgtttatggtaaaagatgtattggtaattcaggtagagctatggattgcaaaggggttatgagatatcgctacaatgacaagcaactttataatcaattgctttatttccagtctatctttgatgttgataaaacaaaacgtggtgagctcaggcccttggtggatgctttggaggaatctaaagacaaacagttgcctaaattgccatcaggacaagtagaggcattggctgaacaaaatagggaactttttggcatttgtcaggaagtagtacagaagtatttgggtgaatgcggtcgtcgttatgtgaatatgggatctatttttgactttataaggaactaa

SEQ ID NO: 6437 - DNA, 396 bp, Candida albicans
atgtcagcagaagatatacaaatggaagatgccagtaataatagtgaacaagaacaaattcaagaacaagaatatgatataaataaaatcaaaattttaccaggaagttcagaagatggtacttcagcatcatttcaaatcatcgatgaagatcatacattaggtaatgcccttagatatataattatgaaaaatcctgaagttgaattttgtggatattctatacctcatccaagtgaaaataaattaaatattagaattcaaacttatggtaatataagtgcggttgaagcattacatcaaggattagataatttgagtgaattatgtggagctattgaagataaattcgatgatgctattaaagctggtggttattctaccaaagaaccataa

SEQ ID NO: 6438 - DNA, 756 bp, Candida albicans
atggttaacgctatcttatctaagaaaaagaaattagtagctgacggtgtcttctacgctgaattgaacgaattcttcaccagagaattagctgaacaaggttatgctggtgttgaagttagaaaaactccatctaaattggaagttattgttaaagcttctaacactcaaggtgttttaggtgaacaaggtagaagaatccatgaattaacttcattgattgttaaaagattcaaattatctccagaaggtattgccatttatgctgaaagagttgaagaaagaggtttatctgctgctgttcaagctgaagctttgaaagccaaattattgtctggtttaccaattagaagagctgcttatggtgttttaagatttgctatgggtgccggtgctaaaggtgttgaagttgttatctctggtaaattaagagctgctagagctaaatctcaaaaatatgctgatggttttatgattcattctggtcaaccaactagagatttcattgatattgccattagacacgttttaatgagacaaggtgttttgggtatcaaagttaaaattatgaaagatccagctgctaatagatttggtccaagagctttaccagatgctgttaaaattgctgaagctaaagatgaagatgaagttattccagctccaactgttaaatcttataaacaaactgctgaagatgaaactgaaactgaagctccagttgaagctgaagctgaagttgaagctactgcttaa

SEQ ID NO: 6439 - DNA, 1632 bp, Candida albicans
atggattcagacgccactaacagatttgttcctgaatatcgtcgtactaatttcaaaaacaagggccgtttccagagcgatgagttgagaagaagaagagaaacgcaccaagttgatttgagaaaacaaaagagagaagaagtgttagccaaaagaagaaactatgccaatcaaggcaacgaatctgaagatgaagaagaatataatcccaacgccaataacgatgaaaaccaattctacaacaagttgaaacaagatttgcccaagatgcttgaaatgatccaggcaccagactttgatagccaattagcagcaacagttaaatttcgtcaaatcttgtcgcgtgaacataacccacctattgatttggtcattcagagtggagtgattcccactttggttgagtttatgaaagaagaccaccccgatatgttacaattggaagctgcgtgggcattgaccaatattgcttcgggtgactcgtctcagacccgagttgttgttgaagccaatgccgtgcctttatttgtccagttgttgtactcgcaatcactcgaagtcaaagaacaagcaatctgggctcttggtaatgttgctggtgactcttctgacaatcgagactatgttttgagctgcaatgctatggagccggtcttgcaattgttcaactgcaccaaaatgtcattgatcagaaccgctacctggacgttgtcgaacttgtgtcgtggtaaatcgccacagccagactggaacattgtatcacaagcgatcccaactttggggaagttgatttattctgttgatgctgagactttggttgatgcatgctgggccgtgtcctacttgtctgatggcacctctgaagcaatccaagcagttattgatgcccgaatcccacaccgtcttgttgaattgttggggcatgaatctacattggtgcaaactccagctttgcgagccataggtaatatagttaccggaagcgactaccagacccagattgttatcaatgccggggtgttgccagcattagcgccattgttaaactctacaaaagacacaatcagaaaagaggcatgctggacaatttccaatatcactgctggtactactgaccagatccaagcggttattgatgccaacttgattccacaggtgattagattattgatccacggtgactacaagacgaagaaggaagcatgctgggcaatttcaaacgcttcttcgggtgggttgaccaaacctgaccaaatccggtacttggtaagccagggctgtatcaagccattgtgcgatttgttatcggttgccgactccaagataatcgaggttacattagattcgttagagaacattttgaagatgggagaaatggacaaggaggcccgaaacgccagtgtcaacgagtatgctttgtttatcgaagaagccggtggcatggaaaagatttttgagtgtcaaaacaaccccaacgaaaagatctatcaaaaagcatttggcatcattgaaaagtatttctctgatgacgacggtcaaatcgatgacgaaaacattgttcctgaaagttacggaaactcatttggttttgggatggactcgaatcaacaacaacagaactttcagttttag

SEQ ID NO: 6440 - DNA, 330 bp, Candida albicans
atgtcaactatccaaaacttaaacgcatttgatccattcgccgacactggtgattcagaagctcaaccaacaaattacattcatattcgtatccaacaacgtaatggtagaaaaactttaaccacagttcaaggtgttccaaatgaatatgatttgaaaaaaattttaaaagtcttgaaaaaagactttgcttgtaatggtaatattgttaaagatgatgaattgggtgaagttatccaattacaaggtgatcaaagagttaaagttagtgaatttttaactgctcaattacaattaccaaagaaaaacatcaaaatccacggtttctaa

SEQ ID NO: 6441 - DNA, 2346 bp, Candida albicans
atgaacttgaggtttttcttgccaaaaaggataatcagaatgtcatcaacaacaacaaccagtgctgcaaagaaaccaaccgttaaacaaccacaatggtatcaaccagaaaacaagaataattctaagcctacacttaagatctacaattcattgacacgttccaagaatgagttttatccaaataaaccaggccacattacgtggtatagttgtggtccaaccgtttacgatcattctcatatggggcatgctagaaactatgtttcaacagatatctgtagaagaattttgcaagattactttggctacaacattaaatttgtacaaaacgtcactgatattgatgacaagattattatagctgctcgtcaacaatatttatttgaagaaaaattggtcaagaattataaagagatcaacgatgagttgaaaacaaaagcaaaagagtatttgcagttctatgtttcaaaaaatttaccagaatttgaaggcgatttagctaaagatttcataacatggagcaatgatattaagaacttgagtgaaattgttaaggacaaaccaaaattcccaatgtatgtcaaggcagcaaaattggcacatgaatcaatttatgaaacaaaagacatttcgttagagaaattcttagatagcatcaaggatgttgctatgcctcatttagacaaagagtttggtgccactgtcactgatccacaagttttcagaaagttaccttcgtattgggaaaaaagatataacgaagatatggctagattgaatgtgttgccaccatcagtcactaccagagtttccgaatatatgcctgatatcattgaatttgttgacaagatagttactaatggatacgcttacaagactgatgatgggtctgtgtatttcgatactgtgaaatatgaacactcgcagcatgattatgctaaattacaaccatggagtaaaggagatatgagtttgattaacgatggtgaagggtcattgagtgtcagtaataccaaacgtaacgcttcagattttgctttgtggaaagcatccaaaccaggtgaacctgcttgggactcaaaatggggtaaaggtagaccaggatggcatattgaatgttcagtaatggcttctgatattactggagaaaatatggatatccactccggaggtattgacttatgtttccctcatcacgataacgaattggctcaatccgaagcttactttgataataaacaatgggttaactatttcatgcataatggacatttacatattcagggccaaaaaatgtccaagtcattaaagaactttatcactatagacgaagcattgaatgatttttcagcaagacagttgagattggtgtttgccttgaatgcttgggaaaaaccattggatttcaaagattctcttattagtgaagtgaaatctattgagtccacattttccaaatttttcacaaatgttcgtgcattaaactcggattataaacacaaaacagaaaatggtggatatgtatcaagaaaaattacagatattgaaaaacaattgttcaatgatttggaacaggctcaagatgaagttgatgctgctttcaatgataacttatcaagtggtcaagcaattagagttttgcaagatttgatttctaaatctaataattatattcaattgacttctactggacaaacagaattaagaattgaagttttgattcaagtcacgaactggattgttaaaatattagagattttgggtttcgaagccagatcagatagattaggctggatagatgaatcagaacaaacaagcgttaacggttctagtacagaggatgttgccttaccatatgtcaaagcattagctcaatttagagattctgtgcgtagtttagcaatcaacaaggctgaattgaatgaattcttaaaagcttccgatgccattagatcgctgttgattgggttaggagtttcattagacgatagaccagatggcacttctttggtcaagtttttgaatgctcaagaaaaacaaaatttgttagatcaacaagaagccaaattgagactagctgccgagaaagagaaaaagaaacaagaacaagcagctcttaatgcaaagaaagaagctgaaaagttggccaaaatgaaaatcaatccttcggatttgtttaaagatacatctttatattctgaatgggacgaacaaggattacctactaaagatgctaaaggtgaagaaataagtaagagcatgaaaaagaaattgactaaacaataccaacaacaggagaagttatacaaagagtatttgaagactgttgaagaagccaaataa

SEQ ID NO: 6442 - DNA, 2811 bp, Candida albicans
atgtccactctgtcgtataaaaaacaggatgcttattcaagcaatgttggaattcctgataaaatggcagttttccaggaatgtcttcaacagtgtaatgcttctccggttaatgcaaagaaatgtcgacaactattagccaaattattgagatggatgtataatggtgaatcattccctgctcaagagtcaaccactttgtttttctccatttcgaaattgtgtcaacataaagatcaatctttgagacaattagtgtatttgactatcaaggaattatcatctatatcagatgatatcttgatggtaacttcttcgatcatgaaagatattcaaggcaatgatgctgtttacaagccaaacgccattagaactctatctaaagttttagacccaactactgtaaatgcagctgaaagattgttcaagaatgccattgttgataaaaatccagttatttcttctgctgccttgatttcatcttacaatttgttaccacatgctaaagaagttgtcaagagatttaccaacgaaactttggaaactattcaatcttacaagctgttcccaccaactcaattccagttgcatgaatattacggaagctcgacttcaaacttgccatcaactagttacatgtatcaatatcatgctttgggtttgatttatcagttgagaaatcacgataaaatggcattaatgaaattaatcagctctttatcagaaggatcttctttgaaaaactctttgtcgattattcaattgattagatatatcaacaaaattttgaatgatgatcaatcattaatttctcacttgtacccgattttggctggatttttaaagcacaagtctgatatggttgaattagaagcttgtaaaactttgatcaacttgcaacacttgatcaaagacgatcaatttatggcaattgtgaatactttacaaaaattattgggtgtcccaagaacagcaaccagatttgctgccattagattaatcaacaagatttctatcaaacacccagaaaaaattattgttgttaacttggaattggaaggcttgattaatgacactaatagatcaatttctacattggcaataaccacattattgaagacaatgggtgctggtactgtcgatactggatctgttggtggtgagagtgtcgatagattaataaccaaaatgacatcattaatggatgaaataactgaagatttcaaaattgttattattgaagcaattgaaaacttggcattgaaattcccagctaaacacaagaaattagtatcatttttaactgatttattgagagatgatggaacattagaattgaaaagtagtattgttgacgcattatttgatttgattaagtttttaccagatgcaaatgccaaacaattgatcttaatgaacttgtgtgaatttattgaagattgtgaatttacagaattatcagttcgtattttgcacttgttgggtgacgagggcccacacacttcaaacccttcatactatatcagacatatttacaatagattggttttggagaattccattgtcagatcttcagcagttattgccttggctaagtttgctgcagtttgtggtggtgaagtatcgaagaatattgttattttattggaaagatgtttgaatgatgttgacgacgaagtgagagatagagctgccatttccttgaatttcatcaacaatggcaagaagaatttgattgtcagcgattccaaatatgatttgaatgccttggaaagtaaattagttcattacttgaacaatgaagagaacttttctgttaaatttgatatttcagaaattaaagttatttctagtgaagaattaaaatcaattgaatacgacagaaagattagcaaattagaaaattccaatgttgaaaataacgatactcccgaggttgaagaacaaaaagggggagctaaagttgaatctgctggtgataatgttgctaatgacttgttaagacaacaagaatatgctcaagaactagctgctattgctgaatttgaatcctatggaaaattaacaaagtcgacatctgttcctatatatttgactgacaaagaaaatgaaattgttgttagtgtcgtcaagcatttgtttgctgaatcacaaaaattggtgttacaatacaatatcaacaacacattaccacacaccgttttacaagatatttccgtcattgctcaaccagataatgaattataccaagaagattttattgtaccattggccgagttaaaacctgatcaaaccggtattgtttatgtttcattctcagccccagctatagaagatgaagaattgctttcggcatttggtaacaccgttgcttacactaacaaagatttggatgatgaaggtaatgttgatccaacagacgatggttggtctgatgaataccaaattgatgatttggaattgttggctggtgactttataattccattatacaactccaatttcacatctattttcgatcaattacccaatcaagattctggtgttgtgaatattagcaatgtggatactattgagaatgctgtcaataaagtaaagacggcattgaatatgatgccattagatggatctgattatgttccaagtgacataacctcacatacattaaaattattgggtaaagatgtttggggaggaaaagttggtgcttcaattagattggcttccactggtggtaaaattgttgccaaagtagaggcaaaaactgaaacagagaattttgcaaacgttatcatcagtagtgtatattag

SEQ ID NO: 6443 - DNA, 1089 bp, Candida albicans
atgtactctgcttctgtcacagcacccgtcaacatcgccacccttaagtattgggggaaacgagacaagtcgttgaacttgcccaccaactcgtccatctccgtcaccttatcccaagacgatttgcgaaccttgacaaccgcttctgcatctgaatcattcgaaaaagaccaattgtggctcaatggaaagttggaatcattagatactccacgtactcaagcgtgtttagcagacttgagaaagttacgtgcctctatcgaacaatcccccgacacccccaagttatcacaaatgaaattgcacatcgtctcggaaaacaatttccctactgccgcaggtttggcatcgtccgctgctggctttgcagcattggtttcagcaatcgcaaagttatacgagttgccccaagacatgtcggaattgtcgaaaatcgcccgtaaaggctccggctcagcatgcagatcgctctttggtgggtttgtggcctgggaaatgggtactttacctgacggacaagactcaaaggccgtggaaattgccccattagagcactggccatcactcagagcggtcattttggtggtcagcgacgacaagaaagatacacccagcaccacaggaatgcagtcgactgtcgcaacctcagacttgtttgcccaccgtattgctgaggtcgtcccccaaaggttcgaggccatgaaaaaggctatcctcgacaaagactttccaaagttcgctgagctcaccatgaaagattccaactccttccatgccgtttgtttagactcctaccccccaatcttctatctcaacgatacgtccaaaaagattataaaaatggtagaaaccatcaaccagcaagaagtcgttgctgcatacacttttgacgccggtccaaatgcggtcatttactacgacgaggccaaccaggacaaggtcttgtccttgctctacaaacatttcggtcacgtcccaggttggaaaacccactacactgctgaaactcctgttgctggtgtttcgcgtatcattcaaacgtctattggcccggggcctcaagaaactagtgaatcattaactaaataa

SEQ ID NO: 6444 - DNA, 375 bp, Candida albicans
atgaatgctccagatagattcgaacttttcatattgccagatggcgtggataaaataaaaataataccggatacaaaagtaccaaatgcagcaatagttaagattgaaagagaagatcatacattggccaatttattgagggctcaattgttaaaagatgatagagttttatttgctgcctataaagttgagcatcctttatttgcaaactttgtgttaagaattcaaactgaagacgattattcaccacgagaagctttgcaaaatgcatgttccggtttgatcagtgaattagatgtgataaaaagtaaattcaatgatgaatgggcacttaaggcacttttgaataatactgaagatgatttcgagtattag

SEQ ID NO: 6445 - DNA, 1116 bp, Candida albicans
atgtccagtgttgcttccaaaaagataataacatttgaagggcacaggaatttcagattaagattggtgctagccacattatctggaaaacctatcaaaattactaaaattcgttctcaagacttgaacccaggtttgaaagatcatgaagtttcttttcttagattactagaagccgtaaccaatggatcccatattgaaatttcatataccggtacaacaatcatttatagacctgggattataataggtggagatcttacccacaattgtcctgatacaaaatctattggatatttcattgaaccaatgttaatgttagcccctttttcgaaaaaaaaattcagcattattttcaaaggattgactaatatagcaggtaatgacactggagttgatgccattaaatgggggttattaccagtaatggaaaagtttggtgtgagagaagtttcgttacatattttgaagagaggatcagcccccttgggtggaggagaagtgcatttgttatgtagctctttgattccacaaccattgactattcacgcgttggacattcccaagttctctgccattagaggagttgcttattgtacaagagtttccccatcgattgttaatagaatgattgattcagcaagagcagtattgaagccaacaggatgcgaggttaatatcaccgctgatgtctggagaggagaaaattcaggaaaatcaccagggtttggcatcaccttagtcgctgagctgaagcgtggatggagaattgttaccgagaatgttggttcggctgggagtttacctgaagattctggtgagttaacagcttaccaattactagaagaaatatcaaatagtggagttgttgggagataccagttgccattagcacttgtgtatatgactattggaaaagaagacattggtcgtttgaaactccaaaaaagtgagatcgacgagaatttggtgtccgtgctcagagatattcaagaagtttttggcacagaagctttcttcaaagatgatgcagaagagcttgatagtgatgataaattcatgacagtttctatcaagggagtagggttcaccaatgtttctaaaaaaatagcttga

SEQ ID NO: 6446 - DNA, 972 bp, Candida albicans
atgtctaaaccagttacgttagaactaccatgggtagaaaaatatagacccaagaaacttgaggatattgttgggaacgaagagacggttgaaagattaaaattgattgttcaggatgggaatatgccaaacatgattatatctggattaccagggattggtaaaacaacctcgattcattgtcttgcctatgagttattgggggatgaacattaccatcaagctactatggagttgaatgcatctgacgatagaggaattgatgttgtacgtaataaaatcaaacaatttgctcagacaaagattctgttaccaccaggacgacaaaagatcattattctagatgaagccgattcaatgaccccaggtgcccaacaggctttgagaagaaccatagaaatttattctaatactacaagatttgcatttgcttgtaatcaatcgctgaaaattattgaacctttgcagtcacgttgtgcgattttgagatataacagattgtccgacgaagaggttttggcgaggttgttagaaattatcaagatggaagatgtaaagtataatactgagggtttacaggctttgatatttactgctgagggggatatgagacaagctattaataacttgcagagtactgttgctgggtttgggtttgttaatgatgtcaatgttttcaaaattgttgatcaaccgcatccacttgttatacagctgatcttgctcagctgcctcaaagacaaagatatagacaaagctcttgggttgcttgatgggctttggtacaagggatactctgctattgatattgtgacactgacattcaaagtggccaaaaccatacccaatatcagtgaacaaaagagattggatgtgatcaaagaaattgggtttgcccatatgcgggtgttggagggtgttgctacatatttacaattgtgtggtttgtacgcaaagatatgtgacctttaa

SEQ ID NO: 6447 - DNA, 630 bp, Candida albicans
atgtctgaagaattagctcaaaaaactgaagaattgtcattagattccaagactgtttttgattccaaagaagaatttaatgcaaagcatccattgaacagtagatggacattatggtacactaaaccacaaaccaacaagagtgaaaactggcatgatttattaaagccagttataactttctcatctgttgaagaattttggggaatttacaactcgattccaccagcaaatcaattacctttgaaatcagattatcatttgttcaaagaaggaattagaccggaatgggaagatgaggctaactcaaaaggtggtaaatggcaattctccttcaacaaaaaactggaagtcaatccaatcataaatgatttgtggttaagaggtttgttggcagttattggtgaaaccattgaggatgaagaaaacgaagtcaatgggattgtgttgaatatcagaaagcaagcttacagagtcggtatttggaccaaagattgtgatgaatccaaattaaagactgtcggtgagagattgaagaaagtcttgcaattaaacgatgaacaaaaagttgaattcatgtcgcatgatgcttccaatactagaggcgctgaacctcaaattgttttgtaa

SEQ ID NO: 6448 - DNA, 2907 bp, Candida albicans
atgggtgtcccagctttatttagatggttatctcgaaaatatccaaaaattatttccccagtagtagaggaagaagaccatgaaattggtggtgccaaatatgaaaaccccaaccccaatggagaaattgataatttgtatttagatatgaatggtattgttcatccatgttctcatcctgaacataaaaagccaccagaaactgaagatgaaatgtttttagatatttttaaatatactgatagagtgctcatgatggctaggccaagaaaggttttaatgattgctgttgatggggtcgcaccaagagcgaaaatgaatcaacaaagagcaagaagattccgtgctgctaaagatgcagaattgaaagcaaaacaactcgaaattgaagttcaagaaagagaattacgtggtgaaattattaatgatgcaatcaaggggaaaaaacaatgggattctaatgccattactccaggaactccatttatggatagattagcagaagctttaagatattgggtagcttataaattaagttctgatccaggttgggctaatttacaagttattattagtgatgcaactgttcctggtgaaggtgaacataaattgatgagttttattcgactgcaaagatccgatccccaatatgatccaaacaccaagcattgtatctatggattggatgccgatttgattttcttaggattggcaactcatgaaccccattttagagttttaagagaagatgtttttgcctcacaagataaaaagtttactatcaaagatcaaattgccgatgcaaattccaatggtgatacagtagcaaaagaagataaaaaaccattcttatggttacatgtcaacgtgttgcgtgaatatcttcaagttgaattattcactccgagaatgtctttcccgtttgaattagagcgtgcaattgatgattgggtatttctttgtttctttgctggtaacgatttcttgcctcatttaccaagtttagatgttagagataatggtattgacactcttgtacaatgttggaaaagaagtttgccaattttaaaagattatgttacatgtgatgggaaattgaatttgaaaagtgttgaagttttgatgtctaatttggcttataaggaaagcgagatatttaaaaataaacatgctgcagaacaaagaagagaagaaaacaataagagaaggaagttggctcaagaacaggaacgagctcttaagcgtgtttatctgtcgcaagtgtcaaaagggaaagataaagcacctctaactgccgatgtcaatatgccattgatggatacgctgggtcaaaatgtggaaggatacgccaatttaacaaatagtgatattgttcaaaatagagctattttgactaaagccaacttggctaatagtgatgctgcagccgaattgaaaaaattgatcgattccaaaaagactcaagtcactgttgttcaagatcaaatagctaccgattcttctgctaattcagaaacaactacttcagaatcagaattggaagaaattcaaagcgacaactctctcaaaagaaaattggaacctgaagaagacaaacagacacaaagtgatgatattaaattatgggaaccaggatacaataaacgttattatgaagccaaatttcactatcaatctgatgaagaaatcgaacaaacaaaaagagatgttgtaagacattatgttgaagggattgcatgggtagcattatattattatcaaggatgtccatcttggaactggtatttcccctatcattatgctccttttgcagcagattttactaacctagaggagttattcccagaaggtgtaaagtttaaattaggtgaaccatttagaccatttgaacaattgatgtctgttttaccagctgcttctggacataccttacctcaagttttccgtgatttgatgtcgaatcccgatagtgaaattattgatttttatcctgaagaatttgaaattgatatgaatgggaagaaaatgagttggcaaggtataccgttattgccatttattgatgaaaaacgattgttagatgcggtacagaaaaaatatgaattgttaactccagatgaaaaatcaagaaatactaataaggaagcagaattatttatatctccagcaaataagaatttttccaaattttcagaaaaattatataaagaaaatgaaaatgaagtgactttcaaatatgcaaagagtggactttctggaaaaatttttaaattgggaacgttcaatcccgaaggggtgtttaattttcccttgaatgaaggttatatgcccaatgtcaataatagtgactatttccaagctatttatcatttccctaaaaccaagacgggtaaatcaatgatattgaatggacatatagcaccattgcccgcattgacaactgcggataagaatgatcttctatatcaattggacaagttcaataatagaagaaatggtggaagatttaattctactctagataatagtgattatatcaacaagggtcctgctggtaaagaattatacaagacttattctatgagaagaggtgggtatagatcatatttacagtacttaactaacggacatcatcctgatcatcaactgcaaaatagtcagtatttgtcgtatggtcaacaaaagccatatggcggacaagggtcatataatcaacagggttattataatcaacaaggtcgttataatcaacaggggaataactacaatcaacaaggtcgttatagtcaacaaagtcaatataatcaatatcgatccaacacccaaagattcaacaacaaccaaaactacaatcaatcatcaaacaattcaagatctggttatcttcctcctagaccacaacgctag

SEQ ID NO: 6449 - DNA, 1401 bp, Candida albicans
atgtctgaaacaaaaaatattgagtctttgattttggatgctggtccattgattacacagccagctactactttgcagcaatacgccactgcatattataccacaccaggggtgcatagtgagttaaaagatgaatatgctagacaacaattagcaatttggggtgatagtttaaaaattaaacagccaaaacaggaatatattgatagagttgtcaagtttgcgaaattaacaggtgattattctgtgttgtcagtgaacgatttgcacattgttgcgttagcatatgagttggagtgtttgaacaatggagaagacaacttaagaagttttccaggtgaagtcttgaagaatcaacaagctgaaaatgaaaatggctcaaacaaaatgtcaaacataataggggatgacgatgggttcgtagttgccacaaaaagaagaggaggtagaagacaaagagagaaggcagagttaaggaagaaagggttgttgccaacgttttccccaaaaccaaagggtggcctggaaacagaagaacctaatgaactgtcaaatgataaaactatagatgaaacacctcaaacagacttgatcaaaggtgttgatgtgcaagaacaggaatcccaagaagaaccagtatctgaatctaatactgttggtctagatgaaataactgaagaatacaatgaagacgatgatgacggggaatggattactccagaaaatttacaagaggagataataaaagacaaaaatgaacaagtccaagagtctaataccaatggtccgcttattaaagtggctcttgcaactggtgattttgcctgtcaaaatgtggccatgcaaattggtataaagttattgaacgcgatgtcagggaaacagattactcgggttcgtaattacatgtatagatgccatgcttgtttcagattgacgccaatgagtaaagatggtagaccgaaacatttttgtccaaaatgtggtggcaatacattattgagatgtgctgtatctgtcgacaacaagacgggaaaaataactcctcatttaaaacagaactttcagtggatcagacgtggtgaacgatactcgttaccatcaccattgagtaagaaccaaaagaaattacaaggtaacggaggctatcagcataataaagaaaaccgtcacaagtcattgcagacaccattgatattgaatgaagaccagaaggagtatcaacgggcgttaaaaaatgacgagtgggaaagaaaacaacaagataaaatgttacaagaatggattggaggaggcagtgctgacaattttgtttctccttttgggaacacgattagaaactctggtgtcaaagtgggacgcggaagatatgcaaactcttccaaaaagaaaagaaagtag

SEQ ID NO: 6450 - DNA, 1170 bp, Candida albicans
atgtcccacagaaagtacgaagcaccacgtcacggttccttaggtttcttaccaagaaagagagctgccaagcaaagaggaagagttaagtcattcccaaaggatgtcaagtctaagccagttgctttgactgccttcttaggttacaaagctggtatgactactatcgtcagagacttggacagaccaggttctaaaatgcacaagagagaagttgtcgaagctgctactgttgttgacaccccaccaatggttgttgttggtgttgttggttatgttgaaaccccaagaggtttaagatcattgaccactgtctgggctgaacacttgagtgaagaagtcagaagaagattctacaagaactggtataaatccaagaagaaagccttcaccaaatactctggtaaatacgccactgacgccaaacaagttgaaactgaattggccagaatcaagaagtacgcttctgttgtcagagtcttggctcacacccaaatcaagaagactccattgtctcaaaagaaagctcacttggctgaaatccaaatcaacggtggttccgtctccgacaaagttgactgggccaaagaacactttgaaaaagaagtttctgttgactctgttttcgaacaagatgaaatgattgatgtcattgctgtcaccaaaggtcacggtttcgagggtgtcacccacagatggggtaccaagaaattgccaagaaagacccacagaggtttgagaaaggttgcttgtattggtgcttggcatccagctaacgttaactggaccgttgccagagctggtcaaaacggttaccaccatagaacttctatcaaccacaaagtttacagagttggtaaaggtaccgatgaagctaatggtgccaccgaatttgacagaaccaaaaagaccattaacccaatgggtggtttcgttagatacggtaacgttaacaacgactttgtcttattaaagggttctatcccaggtgtcaagaagagagttgttactttgagaaaatcattgtacgttgacacctccagaagagctgttgaaaaggttaacttgaaatggatcgataccgcttctagattcggtaagggtagattccaaaccccagctgaaaaacacgctttcatgggtactttgaaaaaagacttggaaaactaa

SEQ ID NO: 6451 - DNA, 516 bp, Candida albicans
atggcgaaatcagcatctaataagaaatcaatccctaccacttcttcttcctccacaacaacttctgcagcttcatcatcagtggtattaaaagaagtgaaatcaactttaaccaccaccattaataattattttgatactatatcagctcaacctcgattaaaattaattgatttatttttaatttttttagtattattaggaatattacaatttatttatgtattaattattgggaatttcccatttaattcatttttaggtggatttattagttgtgttggacaatttgttttattagttagtttaagattacaaatcaatgatagtactacaactactacaaacaaagaaagtgatgatcaattggaattggatgaagataaaattgagaatggaacaactggtggtggtaatggtagactttttaaagaaattacaccagaaagatcatttggtgattttatttttgctagtttgattttacattttattgttattcattttataaattga

SEQ ID NO: 6452 - DNA, 4347 bp, Candida albicans
atgaaagaagtagttgttgatatagctcctaaatgtattaaaggtttggagtttggggctttatctgcaaaagatatagtagctcagtccgaagttgagattcaaaccagagatttgtatgatttggaaaaagggagagtacccaaagagcacggggcccttgatactaaaatgggaatatcatcaaatgcacaagaatgttctacttgtcatggtaacttggcctcttgtcatgggcattttggtcacattagattagcattaccagtgtttcatgtgggttatttcaagagtatcatttctgttttgcagtgcatttgtaaaagctgtgctgcagttttattagatgaacaaagtaaacgacaatatttgaatgatttgcggaaaccacatatagacaatttaagaagaatgaaaattatcaagaaaattattgaacagtgcaaaaagcaaagaagatgtctcaaatgtaatcacatcaacggtgttgtcaagaaagcagctagtggtgctggtcctgctgcattgaagattgtgcatgacacgtttagatggattggtaaaaaggaaactcttgaaaagacaatttgggacgaggagttggatcaagttttcattagaaatcctgagttggaaaagtttgccaaaagaatccatgatgatttgaatccattgaaaacgttgaatttatttaaacagattactcctcaagattgtgaattatttggattagatcctgccaaaggtggtagaccagaaatgtatatttggagatatttacctgcaccccctgtttgtattagaccgtctgttatgatggattcccaatccaatgaagacgatttaactgtcaagttgacagaaatagtgtggacatcatctatgatcagagcaggtatagttaaggggatttctattaataatttgatggaacagtgggactatttgcagttgtcggttgctatgtatatcaactcagactctgccaaccctgcgttgctgactggtggtggtggtgcaaaatcatcgaaaccaattcgagctttctgtcaaagattgaaaggtaagcaaggtcgttttagaggtaacttgtcggggaagagagtggatttttctgggagaacagttatttctccagatcctaatttgaaaattgatgaggttgctgttcctgatagagtggcaaaggtattgacatatcctgaaaaatgcaccagatacaacaagaaaaagttgcaaaaattggttgttaatgggccagatattcatccaggggcaaactatgttatgaaacaaaacgaaccaggtaaaagaaatttgagattcggtgatagggtaaagttagcgaaaacattacaaatcggagatgttgttgagcgtcatatagaagatggagatgttgttttgttcaacagacagccttcgttgcatagattgtcgattttgtcgcattatgccaagatcaggccatggagaactttccgtttgaatgagtgtgtttgtaccccatataatgctgattttgatggtgacgaaatgaatttacatgtaccgcaaacagaagaggcaagggcagaggctatcaatttgatgggtgtgaagaacaacttgttgactccaaaatccggtgaaccaattattgccgccacccaagatttcattactgggtcatatttgatttcccacaaggactcatttttcgaccgtgctacattagtacaactcttgagtatgatgtctgatgcagacattcagtttgatattccgccaccaacaatttttaagccagtaatgttgtggactgggaagcaagtcttttctttgttgatcaaaccaaacaaaaaatcaaatgttgttatcaacttggatgctaaaaacaaaacattccatcctccaaagaaaggtttaccaaatgaaatgtcgccaaatgatgggtttgttgttattcgagggtctaaaatattgagtggtttgatggacaagtccactttaggtgatggtaaaaagcattcagtgttctacacaatccttcgagactatggtccccaagaagctgctgcagcaatgaacagaatggccaaattgtgtgcgaggtttttagggaatcgggggttctctattggtatcaatgatgttacccctgccgatgaattgaagcaaaagaaagagttgatggttgaacaagcttatttgaaatgtgaccaattgattgatttgtacaatcgcgggaaattggaaacacagccaggttgtaatgaagagcaaacattggaggcaaagattggggggttgttgtctaaagtcagagaagaggtcggggatgtttgtatcagagagttggactccttaaatgctccattgattatggcaacctgtggttctaaaggttctacattaaatgtgtcgcaaatggtggctgttgtgggtcaacagattatttccgggcatcgtgttcctgatgggttccaagatagatcattgcctcatttcacaaagaactcaaagactccacaatcaaagggttttgtgcgaaactctttcttcagtgggttgactccaccagaatttttgttccatgctatttctggtagagaaggtttagttgatactgccgtcaagactgctgaaactggttacatgtcaagaagattaatgaagtcattagaagatttgtcttcacagtatgacaacacagtacggaactcgtctaatggtatcgttcaattcacttatggtggagatggtttagacccatatgatatggaaggtgacgccaaaccagtcaattttaatagacaatgggatcatgcttataacttgacgtacaatgtcgacgatgccagcttgttgccttatcaaatagaagagttggtggattccgttttggcaccattggagaataagttgataagatatgataatttgggtaatgctttgaatgacaaagaaaaggaacaaaaaatagaatacattgaccaaaatgatggtgaaagagacttttacaaatcaattcgtgatttcctcacaaagaagtcgatcaggttggctctacttagggaagaaagaggtttgaaggcatactttactgcccccaccgaagacgaaattgttatggatgaagatgcagttaaagtcaaagcaattgatcagttgctgaagatttctctgaaggcggtcaaaacatttttggaacaatgtctttacaaatactcccgtgccagagttgaaccaggaactgctgttggggctattggtgcccaatctattggtgaaccaggtacgcaaatgaccttgaaaactttccattttgctggtgtggcatctatgaatgttacgttgggggttcctcgtatcaaagaaattatcaatgcatccaaagttatatcaactccaattatcaatgcagttctagttaacgatgatgacgaaattgcggctcgtgttgccaaaggaagaattgaaaagacacttttagaagacgttgccttttacattgaagatgtttacaaggacaatcttgcatacttgtcgatcaagattgatttggaaacaatcgataagcttcagttagagcttaatctagaaaacattgccgttgccattgctaatgctcctaaattaaagattgctcagagtgatgtttcagtgactggtaaggacagaatcaatgttttagttaacatcaaagagaccaagacagagagtttgagaaacactgttgaccctaagaacgcattgtttttcagaatgcagtacttgaagagggccctacctggtgtttgtattaaagggttgcctaatatcttccgtgcggttatcaacataaaagacgatggtaaaaaggagttgttagtagaaggttatggattgaaggatgttatgaataccgaaggtatagttggaaccaagactactacaaatcatgttttggaagtgaatcaaatattaggaattgaggctgccagaggatctattatcaaggaaattgattatacaatgagtaatcacggtatgagtgttgatcctcgtcatattcaattgttgggcgacgttatgacatataaaggtgaagttttgggtattacgagatttggtttgagtaaaatgagagattctgttttgcaattggcttcgtttgagaaaactactgatcatttatttgatgctgcattctttatgaagaatgataaaattgaaggggtttcagaatgtatcattttgggacaaacaatgctgattggaacaggttcgtttaaattggttaaatctagtaattgcgaaaagaaggcgttgaagaagaaaccaactttatttgaatcatgttgtgaagtagcagccagtgcttga

SEQ ID NO: 6453 - DNA, 1293 bp, Candida albicans
atggttaccttagaagatttagaaaacaatcagcaacaagaagaaaatgttatagatcaagaaattttgaattcgtctacttctgatataatcaatagaaccaaattgttggataatgacattaaagttatgagatctgaatcacagaggttgaaccatgaaaagaccgtgatgttggaaagaataaaagacaatcaagaaaagataaacaacaataagcaattaccttacttggtgggaaatgttgtggagttattaaatttggatgctgacaaagaggccagtgagcaaggagccaacattgatatcgacgcagctagagctggtaaatcagcggtaatcaagacatcaactagacagactatatttctaccaatgatagggttagttgacccaagcaagttaaaaccaaatgatttaattggcgtgaacaaggactcttatcttgtgttggatactttgccttcggaatatgattcgagagtgaaagcgatggaagtggatgaaaaaccaactgaagactattctgatattggtggattggacaaacaaattgaggaattgattgaagccgtggtgttgcctatgaaacaagcagacaagttcaaaaacttgggtatcaaacctccaaaaggtgctttaatgtatggtccacctggtacaggtaaaactttattagccagagcttgtgctgcccaatctggtgccacgtttttgaaattggctgctcctcaattggtgcaaatgtttattggggatggtgcaaagttagttcgtgacgcatttgctttggctaaggaaaaggctccaacaattatatttattgatgagttggatgctattggtaccaaaagatttgactccgacaaaagtggtgatagggaggtgcaaagaaccatgttggaattgttgaatcaattggatgggtttgggtctgacgacagagtcaaggttttagctgctactaatagagtcgatacattagaccctgcattgttgagatcaggtagattggataggaaaatcgagttcccattgccatcagaggaagccagagaatctgtgttgaaaatccatgcaagaaaattacactgtgacaataactcggttaactggagagaattggccagatctactgacgagttcaatggtgcccaattgaaggctgttacagtagaggcaggtatgattgctttgagaaatggtaaatctataatcaaacatgaagactttgtggaagctattagcgaagtgcaagccagaaagtccaagtcagtcaatttctacgcataa

SEQ ID NO: 6454 - DNA, 3705 bp, Candida albicans
atgtctgctgatgaatctatggctgatccatatcaatatgatagtatagatgaacctattactcaagaagattgttggacggttattacttcgtttttccaagaaaaaggattggtatctcaacaacttgattcatttgatgaatttgttgaaaccagtattcaagaattagtttgggaagattctcatttaattttagatcaaccagctcaacatacttctgaaaaggatcatgaaaataaacgttatgaaattacgtttgggaaaatttatatttcgaaaccatcacaaactgaaggtgatggttcaacgcatgctgttttccctcaggaagccagacttcgtaacttgacatattcttcacctttatatgttgatatgactagtaaagttttcaaatcagatgataacaaacggaaagataatgaattagaatggattcaagaagaacccgataaagatactgaaactaaagttttcttggggaaagtccccatcatgttaagatcgaaattttgtatgttgagagatttggctgaacatgaattttatgaattgaaagaatgtccttatgatatgggtggatatttcgttattaacgggtcagaaaaagttttgattgctcaagaaagaagtgccgccaatattgtccaagtgtttaaaaaagcagctccatcacctatatctcatgttgctgaaatcagatcagctattgaaaaggggtctagattgatttcttcaatgcaaatcaaattatacggtagagatgaaaagggggtttctggaagaactattaaagcaaccttgccatacattaaagaagatattcctatcgtcattgtattcagagctttaggggttgtccctgatggggatattttggaacatatatgttatgatgccaatgattggcaaatgttggaaatgttgaagccatgtgttgaagaagggtttgttattcaagaacgtgaagttgcccttgatttcattggtagaagaggggtattgggtattagaagagaaaaacgtattcaatacgccaaggatattcttcaaaaggaattattaccaaatatcacccaagaagaagggtttgaaactagaaaggcattctttttaggttatatggtgaatagattattattgtgtgccttggaaagaaaagaacctgacgatagagatcattttggtaagaaaagattggatttagcaggtcctttattggcaaacttgttccgtattttattcaaaaaattaactaaagatatatataattatatgcaaagatgcgttgaaaatggtggagactttaatgttactttggctgttaaatcacaaacaatcaccgatgggttaagatactcgttggctactggtaattggggtgagcaaagaaaagccatgagttctagagctggtgtttctcaagttttgaatcgttacacttactcatctactttgtcacatttaagaagaacgaatactccaattggaagagatggtaagattgccaaaccaagacaattacacaatactcattgggggttggtgtgccccgcagaaaccccagaaggtcaagcgtgtgggttagttaagaacttatcattaatgacatgtatttctgttggtactccatcagaaccaattttaggatttttaagagattatggtttagaagtattggaagattatgttccatcaaatgctccagattcaactagagtgtttgtcaatggtgtttgggttggtgttcatagagatccagcagcattggttgatttcatgcgtgaattaagaagaagtggtgacttgtccccagaagtatctattattcgagatattagagaaaaagaattcaaaattttcactgatgctggtcgtgtttaccgtccacttttcattgttgacgataatccagattcagaaaccaagggggaattgaagattaccaaagaacacgttaaacagttgttgagatccgatgaattggatgaagatgacgaagactatgaaaactcaagatacacttggtcttctttagttgccgatggtattgttgaatatgtggatgctgaggaagaagaaacgataatgattgctatgacaccagatgatgtaaaggcttccaagaatagtgtatcagagtctgaacaacaaaagatacaattggaagaacaggaactcgacccaggtaagagaattaagccaaccaccagtggcaatactcatacatacacacattgtgaaatccatccgtctatgatattgggtgttgccgcctcaattattccgttcccagatcataaccaatcgccacgtaacacttatcaatctgcgatgggtaagcaagctatgggagtgtttttaaccaattattctgtaagaatggataccatggcaaacatcttgtattatccacagaaaccattgggtaccacgagatcaatggaatatttgaagttccgtgaacttccagctggtcaaaatgccattgttgctattgcatgttattccggttataatcaagaagattccatgattatgaatcaatcatccattgatagaggattgttcagatcattgtttttcagatcttatatggatatagaaaagagacaaggtatgaaggcacttgaaacttttgaaaaacctactagatctgatactttgagattaaaacacggtacatatgagaaattagatgaagatgggttgatcgcccctggggtcagagttagtggtgaagatattattattggtaaaacaactcctatacctgcagatgcggaagaattgggtcaaagaacacaatatcacaccaagagagatgcttcaacaccattaagaagtacagaatccggtattgttgaccaagttttgttgactaccaatggtgatgggtctaaatttgtgaaagtgagaatgagaacaactaaagttccacaaattggggataaatttgcttcgagacacggtcaaaaaggtactattggtgttacctatagacacgaagatatgccttttacagcagaaggtattgttccagacttaatcattaaccctcatgctattccatctcgtatgacggttgcacatttaatcgaatgtttattatcaaaagtgtcgtcattgtcagggtttgaaggggatgcttcaccatttactgatgttacaacagaacaaatttccacattgttaagagatcatgggtaccaatcaagaggatttgaagtcatgtataatggtcatactggtaaaaaattgatggctcaagtattctttggtcctacttattatcaaagattaagacatatggtagatgataaaatccacgctagagcaagaggaccagtgcaagtcttgaccagacaaccagtagaaggtagatctagagatggtggattgcgtttcggtgagatggaaagagattgtatgattgctcatggtgctgcggggtttttgaaagaaagattaatggaggcttctgatgcctttagagtacatgtatgtggaatgtgtggtttgatgtctgtgattgccaatttgaaaaagaatcaatttgaatgtcgatcctgtaagaataaaaccaacatttaccaaattcacattccatatgctgccaaattattattccaagaattgatggccatgaatatatcaccaagattgtatactgaaagatctgtgtctggtatacgtgtttaa

SEQ ID NO: 6455 - DNA, 819 bp, Candida albicans
atgcctggattaaattttgacaattatcaaagaaatgcattcttgacctccaaggggtttgctacacccaaagcaacatccactggtacaaccattgttggatgtaaattcaaagatggggtggtgatagcagcagataccagagcaacttcgggtccaatagtagcagataaaaattgcgagaaattacatagattagctccaaagatctggtgtgctggtgccggtactgcagcggatactgagatggtcactcaattgattgcatctaatttggaactacatgcattatcgcaaaacagacaaccaagagttattgcagcacttactatgttgaaacaacacttgttcaaataccagggtcacttgggggcgtatttgattgttgctggtgttgatccaactggagcccatttgatgtcagttcaagcacacggatctaccgatatcggtaaataccagagtttgggttcaggttcattgaatgccatggctgttttggaaaccaattttaaggaagacatgactagagatgaggctataaagttgtgttcagatgctattttggctggtgtttggaatgatttgggatctggttccaatgttgatgtgtgtgtcatggaagttggcaaggatgcagaattgtacagaaactatattacaccaaatgtgagaatcaagaaatgcaaagattacaaattcccaagaggtacaactgctgtgttgaaacaaagcattcgtgatatttgtgatgttgaagagactgtggtgaacttcaatgataatggtgacaatatggaagttgatacacaggcttag

SEQ ID NO: 6456 - DNA, 261 bp, Candida albicans
atgtcatcaaaacaaactaagcaaactaatcttcctcctatcaatcttatatttaagtttttacaacaacagtcagtggttactatatggttatacgagcaaacacaatctagaattcaaggcaaaatcagaggatttgatgagtttatgaacattgtcattgatgacgcagtggaattgtcaaatgggaaaaagtccgaacttggtcgaatactattgaagggtgataatattactttgatttcaagcttggatgtatag

SEQ ID NO: 6457 - DNA, 2400 bp, Candida albicans
atgtcaacaaaaactgatatttctactgaagaattggtttccttattcagtaaagctggatttgaagaaaaaaagtctgcagagatagtcaagaataaaaaagttgcctccgctttatataatattttaggctccaacttccccaaaactgatgataaaaaattatctttgttacatcaattggctatacatgaaagtaaaaatggaaaagtaccaaatcatgactttatcattgatggaattcaaaaaggggacttgaaaactgctttgcaagtaactgaaggtatcaagtatttacaaaacaatgcaacagttgataaggaaaaatttgatgaagccagtggtgtaggtattgagattactcctgaagaagccaaggtagaaatttcaaagtaccttgactctattaaaactgatttggagagtaaaagatattcaatcttacctaaagttctaggtgaagtgaaaacccagccatctttgaaatgggcaccacctaacttattcaaaccaattttagatgaagagtttttggccagattgggtccaaaagatgaaagagatgttaaaaagaaggaaaaaaaagccaagacaccagctaatgcagctgccaccaaaaagcaagatactggttctgaacctgaacgttctatgttttctgaagggttccttggggatttgcataaaccaggtgaagaacctcaaatgtaccctgaattgttagaagagcataaaaagtttatttgtgataaagtctacacccgtttcccacctgaaccaaatggatttttgcacattggtcactctaaggccattatggttaattttgggtacgctcaattcaacaagggtaattgttacttgaggtttgacgatacaaaccctgaagctgaagaggaagtctatttcaattccatcaaagaaatggtttcttggttgggttataagccatggaagatcacctattcttccgactatttcgatgaattgtacgagttggctattaagttgattaaatcagacaaggcatatatatgtcattgtactccagaagaagtgaaggcttctcgtgggttgaaagaagatggtacattgggaggagaaagagtcgcttgtaaacacagatttcaaactgttgaacataacttgcgtgagtttgaaaacatgaaaaatgggaaatacaacgttggtgaagccacattaagaatgaaacaagatttgaattctccatcacctcaaatgtgggatttggttgcctaccgtgttttgaacacaccacatcaccgaactggtgataaatggaagatttacccaacctatgattttacgcattgtttggttgattcttttgaaaacattacccattcattgtgtaccaccgaatttgtcttgtctagagaatcgtatgagtggttgtgtgatgcattacatgtttatagaccagcacaacgtgaatacggtagattgaacttaactggtaccatcatgtccaagagaaagattgctaaattggtcaatgaaggttatgtcagaggatgggatgacccaagattatacacattagaaggtatcaaaagaagaggtgtccctccaggtgccattttgtctttcataaacaccttgggagttacaacctcgacaacaaatatccaaacggtgagatttgaaagtgccgtgcgtaactaccttgatcaaacaactccaagattgatgatggttttgcacccaattgaggttgttattgataatttggatgaaagctttagtttggacgttgaaataccatacaagccaggtaaagatgaaaagtctatgggataccgtaaacttacattttccaaacatatttacattgatgaaaatgatgttagagctgaacctgccgataaagagttttatagattggctccgggccaaccagttggtttgatgagagttcctttcaatatcagtttcaaatcaattgaagaaaaagatggaaagaaaatcgtccatgttaactatgacgaaggtgtaaaagctaaaccaaaaacctacatccaatggattcctaaagacactgctgttcatattaaagaagttagaatctacaatcaattgttcaaaagtgaaaacccttctgcacatcctgaaggttatttgaaggacattaatcctgatagtgaagaagttttgcgtaatgcagttgttgaagaaaatcttaaagacattgtggcaaaatctccaatgaacattgaaattccaggaagtgcattcaacattaaagaaaacaaaggtaataatactgtcagattccaagcattaagagaaggttacttttgcttggacaaagattccaaagaagatggtttgattcttaatagaattgtcagcttgaaagaagatgctgctaaaaaatga

SEQ ID NO: 6458 - DNA, 828 bp, Candida albicans
atgtccaatactgaaacaagtaaattatatgaaagtgtcattgaagatgtcataaatgattcaagacaagattttgaaaataatggtattgatgaaagtacattacaagagttgagaagaatatggtgtgagaaattgacacaatccggagttgcaaaattctcatgggatgaagaagaagaggaagaagaaccagttgaacaagtagatgtagatgttgaagttggacaatcagcacaacaagcagcagaacaaccacaagctgcaattaatgacactggagcaactgaaagtaatacatctgctacaactgaaactactgtcaaaaaagaagctactgccagtaattcgggattacctgatgctcagttatcttataacaccactgatagtctaggaatagaaataccatcgatactgcgagagaaagccaatggtacagaaggaaccgataaaaatggtgatggtgatggcggtgataatcatggattaattgttccaaaaattgaacaagctgatggtccaatttttttcgacaataaacaattcaaatccaataaaaaattgagtcaagttgatggtgaatcagaatttgatgaatttgaatccgatggtgatttatctgatgatattaattctgaacttgattctgattctgataaagaagaagaagatgatgatgaggaagaaaccaattttgctctttgtctttttgataaagtacaaagaattaaaaataaatggaagagtacattagttgctgggattgctaatattaatgggaaagattatgttttccataaagctaatggtgaatcagaatggtaa

SEQ ID NO: 6459 - DNA, 3474 bp, Candida albicans
atgcctcctaaaagaagacgtacattactgacaggggctcatgatgctgcctttaacgagttattaaaaccagagtataagggtaaaaaattgacagatgagatcaatactgccaaagacaaatggaatttacttcctgcatttttaaaagttaaaggtttggtcaaacaacatttggattcctataactattttgttgatgttgacttgaaaaaaatcatcaaggcaaatgaattagtcttgtcagatgttgacccagaattttacgtcaagtatttggatatcagagtaggtcacaaatctacatcgaaaccaggtgtgaaagaagttattttgcctcctcatgaatgtagattgagagatttaacttattcagcacctatctacgttgatgtcgaatacactagaggtcgtaaaattattagacacaatgatttggaaatagggagaatgcccgttatgttaagatcaaacaagtgtatgttggaaggtatgtccgaagcaaccatggcccaagtagaagagtgtcccttggatccaggtggttactttgtggttaatggtaccgaaaaggttatcttagttcaagaacaattgtccaaaaatagaattattgtcgaagcagacgagaaaaagggtatagtccaagcatctgttacgtcatcgactcacgaacgtaaatcaaagacttatgttattaccaaaaatgataagatttatttgaaacacaattctattagtgaagatatccctattgtcattattttaaaagcagctgggatagtttccgatttagaaattttacaattagtttgtggatccgactcaaactatcaagatttgtttgttgtaaactttgaggaagcagctcggttggaagttttcactcaacagcaagcattgtactatgttggtaaacgtgtgaagacgattagacgtgccggagctcccaagttatcacaactccaagaaggtattgaagccattgccaccacaattattgctcatttaactgtttctgatttacaatttagagaaaaagctctttatatcgccaccatggccagaagagtggtcatggccatgcacaacccaaagatggttgatgatagggattatgtcgggaataaaagattggaattagctggtcaattgatgtcattattgtttgaagatttgttcaaaaaattcaattcagattttaaagccaatatcgacaaagtattgaaaaaaccaagcagaacttctgagtttgatgcattattatcaatcaacattcattcaaataatattaccatgggattgaaccgtgccatttctactggtaattggtcattgaaacgtttcaaaatggagagagcaggtgtcacacatgttttatcacgattgtcatatatatcggctttgggtatgatgactcgtatttcctctcaatttgaaaagtcaagaaaagtctctggacctagagctttgcaaccttctcagtttggtatgttgtgtactgcagatacaccggaaggggaggcctgtgggttagttaaaaatttagcattgatgacacacatcaccaccgatgatgaagaagctcctgtgaagaaattgtgtatagctttaggttgtgagcctatctttgcattagactcggccactttgcacgtggatgggaactttggtgtctatcttaatggtactttgataggtaccacaagattcccagtgaaatttgttcatgatttccgtcacttgagaagagttggaaaagtatctgcatttatttcgatttatacaaacacccaccaccaggccgtgcatatagccaccgatgggggaagaatttgtcgacctttgataattgtggaaaatgggaaatccaaagttacagcagaacatttggcaaagttaatcaatcaagaatggtcttttgatgatttcttaacacacggtttagtggaataccttgatgtcaatgaagaaaacgactctttgattgcattgtatgaggatgatatcactgctaatccaggagcaatagtcactcatttagaaattgaaccattcactgttttgggtgctgtcgcagggttgattccatacccacatcacaaccaatctccaagaaacacttatcaatgtgcgatgggtaagcaagctattggtgctatagcatataatcaatttagaagaatagacacattattgtattttatggtgtatccacaacaaccaatggtgaaaaccaaaacaatcgagttaattgaatatgacaagttgcctgctggtcaaaatgctactgttgcagttatgtcatattccggttatgatattgaagatgctttggttttgaataaggcatcactagatagaggatttggtcgttgtcaagtggttcgtaaaaacacggtgcaattgaaaaaatatcctaatcatactcaagatattcttgccggtatgagagtggacgagaacaataaacctattttccagcatcaagcattaggtccagatggacttggggaagttggaagtagaatctttaatggtcaagtttttgccaacaaatgtgttcctacaaactctggtgattcaacattaggtgctcaacaagaacaaagggctgcagaaagccaccgtgaagcaccagcattttacaagggtcctgaaccatcatatatagatcaagtgatgatgtctgttagtgataatgaccaagcattaatcaaggtgttgttaagacaaaccagaagaccagaattgggagataaattttcctctagacatggacaaaagggggtttgtggtattattgttcaacaagaagacttaccattcaatgattctggtatttctcctgacattattatgaatccacatgggttcccctctcgtatgacggttggtaagatgattgaattgatctcgggtaaagctggggttttgaatggttcacttgagtatggtacttgttttggaggatcaaaattggaggatatgtccaaaatattgatcgaaaaagggttttcgtattcaggaaaggatatgttgtattctggtataactggtgagtgtttgcaagcatatattttctttggtcctatttattatcaaaaattgaaacatatggttttggataagatgcatgcaagagcaagaggtccaagagcagtattgacaagacagcctaccgaaggtagatcaagagatggtgggttgagattgggtgagatggaaagagactgtgttattgcttatggtgcttcgcaattgttgttagaaagattaatgatttcatcagatgcttttgaagttgatgtttgtaataaatgtgggttaatggggtacaatagttggtgtacaacttgtaaaagctccgagaatgttatcaagatgacgataccttacgctgccaagttgttgttccaggagttgttatcaatgaatattgctccaagattaagattaggtgacgtgttttaa

SEQ ID NO: 6460 - DNA, 219 bp, Candida albicans
atgattattccaatacgttgtttctcatgtggtaaagtggtaggtgataagtggcaaacttatttggattatttacaagatgaaaccctcagtgaaggtgatgctttggacaaattgaaattgaaaagatattgctgtagaagaatggtgttgacacatgttgatttaattgaaaagtttttgagatacaatccattagagaagaaagatattaattaa

SEQ ID NO: 6461 - DNA, 2667 bp, Candida albicans
atggtaaacatcagtgattttttcaaaaataattctcaatcgggttctaaacgtaaggcacaaagtgcaacttcactgaatccgactaaaaaagccaaacctgcagctccccaagcagaaagagaagttattgtcttggatgatgaggatgacgacgatgatgatgtgcaagtaatttctaaacctgcaaagaaggaaacagatagaagactcacaaaaagaaaagcatccgcaatcaatgatgaagatgacgatgatgatgacacgcgtaacaagctgcatgtccaaagatcaccaaagaaagagacagcgtcttcggtaccgaaagcgtcaccgaaaaagaagacttcttcaacattaaaatccactgcagctaccaaaaaatccaaagtgccagcaggtggtgactcgactgctgacacagctcaagagattttagcaactatccctgatgcagaattaccagaagttgaccctacgaaaaaggttaacttctttgctctaaatgcagcacgtaacgagacaacacaaacttcagtagagcttccagaggcacaaccaaattgtttgacagggttaacaattgttttcactggtcaaatgcctaatttagatcgtggtactgcagagcaaaccgcaaaacagtacggtgctaaagtaaccaaatcaattctgggtaaaacaagtttagttgtacttggagcagatgctggtccttcaaaagttcagaaaatcaagcaacacaaaatcaaagcaattgatgaggcgggatttattaaattgttggaactgatgcctgctgatggaggatcgggtgcagcagcagaagcagccaaattgaaacgtgaacaagaagaagctaagatcattgaacaagcaaaggaggaagagagaaaagaaagagaggctgaaaaagctagagtcgcagaaagagtcaaagcgacagtcaaccccaaaggtgaaacatttggtttccagaagaaagaagttgcccctcaagataaattgtggacagatagacatgctccaaccgatctcaaccaattgtgtggtaataaaggacaaatccaaaagttgaaaagttggttggaaaattggtttgacaatcaggcaagggggttcaagggaaatgcatcggatccagattctttccgagcagttttgatcagtggaccaccagggattggtaagacctctgctgcacatttagttgccaaaagtcttgggtttgacattattgaaagaaacgcgtcagatgttcgttccaaatctttgttaaacgccaatgttaaatcgattttaaacaacacatcagttgttggatactttaaacatcgtggtgatactgagaaaaattcaaacaacaaaagattctgtataattatggatgaagttgacggtatgtcgagtggggatcatggtggagcaggggcattatctcaattctgtaagattacaagcatgccaatgatcttgatttgtaacgacaagtccttgcctaaaatgagaacatttgatagaactacttatgatttgccattcagaagaccaagtgagaacgaggtcaagagcagattaatgactattgcatttagagaaaaagtcaagttggatccaagtgttattggacaattggtacaggcaacttcgaatgatattagacaaatgatcaatttgttatcaactgtttctaaaacacaaaagcaaattggtgcaaactcaatgaaagaagttaaagaaagttggcagaagcaggttgtattgaaaccttttgatattgctggcagattattgaatctgggtatatggtcagatccaagactgtcgttaaatgacaaattaaatttgtattttaatgattttgatttttctccgttaatgattcaagaaaactatttgataactaatccaagattacctggtaaacaaattgaacttgttgctaaggcagcagaggacatcagtatatctgatactgttaactcattaataagatcgggtgaacaacaatggagcttgttaccgtttcatggtattatgtctactgtcaaacctagttacgagatagcaggtcaaattaccggtcgattgaactttagcagttggttaggacagaattcaaagcagatgaaatatcaaagaatgctacaagaattgcagtaccatacaagggtaagaacttcaaccaccaagcaagaattgcgtctcgattatttggatgcattgtggcaaaaaatagtcaaacccctttgtgacagtggagaagatggatttgacgaagcaattgaaactatggatgaatattatttgacaaaagaagattttgataatatcggtgatatgatcaaacaagatttgaaattacctacacaatccaagtccgcgtttaccagaaaatacaatagtatgatgcatccaaccattattttcaaaactggtaattctttgaatgttggtggtaaaagagctgcagcacctaaagttgattttgaagatgtaattgatgatgatatggaggatgttccagacgatgatgaggatcaagatagtgataaaattgacactaaaaaagacaagttgatcaaagtggttcccgttggaaaatcaaagtcaaaatcaaaatcaaaagcgtctactggaccagcaaaaaaaaaacaaaagagataa

SEQ ID NO: 6462 - DNA, 447 bp, Candida albicans
atgtcaggaatattatttgaagatatgtttattgtggattcaacagatccaggaagatacaataaagtatgcagaataacagggcattcatcaacatcaaaagatattaccatcacattagatataaataaagaattattcccggttcaaaaccatgattcattaactattacattagcatcttcattaggtaatgaatcatcaatgattacttcaaatggatcatggagaccacctaaacctgatgaaagatcattagctgatgattatgattatgttatgtatggtactgtttacaaatttgaagaaaatgctgataatgataaaatggcagtttatatttcttttggtggattattgatgagattagaaggtggttatcgttcattatctaatttaaaacaagaaaatgcttatattttgattcgtcattataaagacaattaa

SEQ ID NO: 6463 - DNA, 729 bp, Candida albicans
atgcatagagctttatataattcattgacaaaaacggcaaatgcttgttgtgtgtctcgttctgtgagatttgttgctccccaagtttcagtttgtaatcctcaaagattggccttccgtttcaattcaactaatgcttccaaagaagctgccaaggaagaagcccctaaagaagaagttaaatctgaagaggaacaatcctctggagctgaatcagaagctcaagaagctgatcctttggccgaattaaaagataaattggaaaagaaggacaaggagttggcttcaatgaaaaatcattatgctagagccattgctgatttccgccatttacaagaaactaccaagactgaagttcagaaagctaaagattttgctttacaaaaatttgctaaggatttgttggattcccttgataacttcaacttggcacttggtcacgttaaagaagatactttgaaattaaatgatgaagtcagaagcttgtacgaaggtgttgacatgaccaagactgtctttgaaaaaactttgaacaaatacggaatagagaaaattgatcctattgaccaagtctttgatccaaatttgcatgaagctactttccaaatggccaatccaggcaaggaaccaggtacagttttccatgttcaacaagttggttacactttgaacgaaagagtcttgagaccagctaaagttggtgttgtcaaatctgaagatgacaattga

SEQ ID NO: 6464 - DNA, 1287 bp, Candida albicans
atgagtgccgatgaaaatgatccattgttacaggcattaaatgctgataccaataacaaccaagattccaacaacgcaaatgctggatctacaacaaccagtgcaccagccgagccaattgatccagaaagagaaagagctttatcgaaattcaaggataaattattagagcacagaaagtgggatgccagattgaaagatcttagattaagtatacgagatttggacaaggattatgagaaaactgaaaatgatataaaagctttgcaatctgtgggccagatcattggtgaagtattgaaacaattggacgatgaaagatatattgtaaagacttcttcagggccaagatatattgttggatgtagaaacaccatcaaaaaggaaaatttgaagaatggtgttcgtgtttcattggacatgaccaccttgacaataatgagaattttgccaagagaagttgatccattggtttataatatgactacatttgaaccaggtgaaatttcatttaatggtattggtggtttaactgaacagatcagagaattgcgtgaggtcattgagttaccattaaagaatccagaattattcacaagagttggtattaaaccgcctaagggggtgttgttatatggtccaccagggactggtaagaccttgttagcaaaagcagttgctgccacaattggtgcaaatttcatattttctccagcatcagctatagtcgataagtatattggggaatctgccagattaattagagaaatgtttgcatatgccaaagagcacgaaccttgtattatatttatggatgaagttgatgccattgggggtagaagattcagtgaaggtacttctgcagaccgtgagattcaaagaacattaatggaattgttgaatcaaatggatggatttgatacattgggacagacaaagattataatggcaactaacagacccgatactttagatccagcattgttgagagctggtagattggatagaaaaattgaaattggtttacctaatgaagctggaagattggaaatcttcaaaatccatacatcaaaagttgctaaacaaggtgagtttgattttgaagctgccgttaaaatgagtgatggttttaatggagcagatataagaaatgtagttaccgaggctggtttttttgcaattagagatgatagagattacatattacaaaatgacttgatgaaagcggttagaaaagttgctgacgtcaaaaaattggagggtaaattggattacgaaaaattgtaa

SEQ ID NO: 6465 - DNA, 993 bp, Candida albicans
atgtcaacaactgcaactagcacaaatgaattggcccttttggataagtcagtagtagtttctccgttggttttactatctgtggtggaccattataatagagttgccaaagattctaagaagagagttgttggggtaatattaggagataactctactgacacaatcaaagttacaaactcgtacgcaattccttttgaagaagacgagaagaaccctggagtatggtttttggaccacaattttatagattcaatgggagaaatgtttaaaaaaattaatgccaaagagaaattgattggctggtaccattcaggacctaaattgaaaccatcagatttgaaaattaatgaggttttcagaagatacaccgacaacccattgttgttaattgttgacgttcaaccaagagaagttggtattccaacagatgcatattttgccgttgatgatattaaaaacgatggctctgctgctgaaaagacatttattcatgtcccttccttgattgaagcagaagaagctgaagaaattggagttgaacatttgttaagagacatcagagaccaagctgctggtaacttgtccttaagagtttctgaaacacatcaatcattattgggtttacatcagaagcttggagaaattgcaaattatttggataaggtttaccaaaagaaattacctatgaatcatacgattttggggaaattacagaatgtttttaatttattgccaaacttgatgcaacaactggggagtgatctcgatggtggctcagactcgtctcatgcattagccactgcatttactgtcaagacaaatgacgaattgatgatcatatacattagtacattagttcgagctattattgcattccatgatttgatcgaaaacaagttagaaaataaaaagttaaacgaaaacaaagcacaagcttccgtggctgaactgtcattaaatagcgaaaagaaagattctatagaagaataa

SEQ ID NO: 6466 - DNA, 1401 bp, Candida albicans
atgtcatcaacaggggagaataaaaaccaaataaagataaagttcttcacaaatgaagaagacgagtcattacaagttgctgatactcctctctatgtgcctgtcactcttaaaagatttgggttatcagaagtggttaatcatcttttgggaaactttaaaggtgaagatgaaacaaaagctcctatcccatttgatttccttatagatggtgtgttgttgcgtacttcaattgaagattacttgacgaaaaatgggttatctaatgaagcgtttcttacattggaatatacaagagcaattttaccaccttcatttttggcttcttttaataatgatgactggatatcttctatagattcaattaacccgaccaccaaaatagtcacatcttctcaattatctatatcacagccaaaaattttgtcagggtcatacgatgggatcgttcgtacctataacatgtcagggaaagttgaaaaacaatatgttggtcattctgctcctgttaaggctgtgaaatggatatcaccaacaagaattgtctctgcaggtaacgatagacaagttagattatggaagacttcatacgaggaaataatagacgaagatgaagaagaaatcgaggatggtaaaaccttggcacttttagagggccataaagctccagttgtggatttagctgtggatacacaaacaaatagaattttatctgccgggtatgatcaaaatattgggttttggtctaccaactacaaagaaatgacatctatccaaccgttggaatatgattctaatgttgtttcttcatcgtctaaaaaaagaagaaaaatggctgtccaagatgctacaattagacgtcgtgccccattatcattgttgcaagggcatctggaacctgtagaaggagtcatatttgatgctaaagattctacagtagggtactccgtttctcaagatcatacaatcaaaacctgggatttggtcacttcaagatgtgttgacactagaaccactggttattcattattatcagtgttgcaattgccacaggttaaccttattgctagtggttcttctgctcgtcatataaatttgcatgatccaagagtaactaccaccagtgatcaaacaattagcaagttagtgggacatacaaactttgtcgtcggcttgactgcttctcctcataatcagaatatgtttgcttcatcctctcatgatggtactgtcaaagtttgggacgttagagcagagaaatctttgtacacaataacaagacaagatgggtcaaccaatgccaaaatatttgatgtttgctgggatgatcgtatcggtattataagcggaggtgaagacaaaaagcttcaaatcaacaaaggatccgatatagccaaatag

SEQ ID NO: 6467 - DNA, 618 bp, Candida albicans
atgtcatcagaaaaagaatataaaccagtgacagttgataaaccaataccaaacacttatgatcttggtaatttagcaacatttgatcctaatccattagataatgaaaaattattatccaaagatgaatcaataaaagaagatcatcttcaatcagtaactagagataatgttcaattattgataaatcaaatattatcattaccagtgaaaatcactactgaaactcatggatcttccacgggacaaaactccactatgactttaattcaattaccagaaccaacaacaatattacctagagaaaaacctattccaaaggctaaaccactcactaaatggcaacaatttgctgctagaaagggaattaaaccaaaggctaaagatgggaaaatggtttatgatgaagatactggtgaatgggtacctaaatgggggtataaaggtaagaataaactgattgatgatcaatggttagttgaagttgatgataaagtgaaaaatactgaagatgaattgattgatccaagaactttgaaacgtgctgaaagaaagaaattgattaaaaagaatgaattacaacataaacgaaatttaagaaaccaaggtgctgtttaa

SEQ ID NO: 6468 - DNA, 1551 bp, Candida albicans
atggcttacgttttaactgaaacagcagcaggatatgccttattgaaggcagctgataaaaaaatccacaaatcttcttctttagttgaagacttgaacacagccgaaaaagttgctgaacaattcaaaattcaccgttttgaaaaatttcagtcagcagcaaatgcattagaagaggctaatgccattattgaaggtaaagtttcagaaaatttacaaaaattattagaagatgccaaatcagataaaaaggctactttgattgtctcagaagccaaattgggtaatgctatcaataaattgggtttgaactttcaagttgtaagcgatgctgcatctttggatttacaaagagccatcaaacaatttttgccagaattattacctggtttggatgattcagcattaaaacaaatgtctttgggtttagctcactctatgggtcgtcataaattaaaattctctgccgataaggtagacaccatgattattcaagctatagccttattggatgatttagataaagagttaaatacctatgccatgagatgtaaggaatggtacggttggcatttcccagaattggccaaaatgattactgattctgctgcatacgctagaattattttgaccatgggtgttagatctaatgcttctgaaaccgacttatctgaaatcttaccagaagaagttgaagaacaagtcaaagctgctgctgaagtgtctatggggactgaaatcactgaagatgatttgaataacataaaggcattggccgagcaaattgttgattttgctgcttacagagaacaattatccaattacttgtcttctcgtatgaaagctatcgcaccaaatttgactgctatggttggagaattagtcggtgctagattgattgctcacgcaggttcattgacatcattagctaaagccccagcttcaactgtacaaattttgggtgccgaaaaggctttgttcagagctttgaaaaccaaacatgacacaccaaaatatggtataatctaccatgcttcattggttggtcaagccagtggtaaaaacaaaggtagaattgctagaacattagctgctaaggctgctgtgtcattgagatacgattgttttgacgaagaaagagacgaatcagatgactttggtttagaaaacagagccaaggttgaaggtagattgagtcaattggagggacgtgatatgagaaccacctctaaagttgtgagagaacaaccaaaagtggaaataaccgaagcccgtgcttataatgcagatgccgattctactgctgctgcagctgctgctgccccaactgctgattcagacgacgaagagtccgagacagaagaagttgaagaaaagaaatctaagaaagataaaaagaaggataagaaagaaaagaaggataagaagaaggacaagaagagaaagagagatgacgataaagaagataaagaatcttctaaaaaactgaagaaggacaaaaaggaaaagaaagagaaaaaggaaaagaaagcaaagaaggaaaagaagtaa

SEQ ID NO: 6469 - DNA, 2910 bp, Candida albicans
atgataaagacattgctccgaagaatgtcaagtaataccactataccaactccaaatggctccaatcattggactgcctcaaaagttagatctacatttttagactatttcaagaaacagcaacacacttatgtcccatcttcatcagttgttcctcacaatgacccaactttattgtttgccaatgctggtatgaatcaatataaaccaatttttttgggaacagttgatccagctagtgattttgctagtttaaaaagagctgccaattctcaaaaatgtattagagctggtggtaaacataacgatttagaagatgttggtagagactcttatcatcatacattttttgaaatgcttggtaattggtcatttggagattatttcaaaaaagaggccattgactattcatgggaattgttgaccaaagtttatggattacaagaagatagattgtatgtcacttattttggtggtgatgaaaaacaaggattagaaccagatttagaagccaaaaatttttggttaaaggttggtgtaccagaggatcatattttaccaggttcagttgaagataatttttgggaaatgggtgatcaaggtccatgtggtccatgtagtgaaatccattatgatagaattgggggtagaaatgcttctgctttagtcaatatggatgaccctaatgtgcttgaagtttggaatgttgttttcattcaatataatcgtgaagctgatgggaacttgcgtacattaccaaacaaacacattgatactggtatgggttttgaaagattggtgtcaattttacaaaacaaatattcaaattatgatactgatgtgtttttaccaattttcgacaaaattagagaaattactggtgttagaccatatacaggaaagtttggtaatgaagataaagatggtatagatactgcttatagagttattgcagatcatgttagaactttgacatttgctatttgtgatggtggtgttcctaacaatgaaggtagaggttatgttttgagaagaattttgagaagaggttctcgttatgttcgtaaatatatgaattatccaattggaggatttttccaacaattggtcgatgttgttattgaacaaaacaaggaaattttcccagaaatttctagtggtgcccaagatttgaaagaaattttgaatgaagaagaattatcatttgccaaaacattagatcgtggtgaaaaattatttgaacaatatgctattattgcttccaagactccagaacaaactttatctggtaaagatgtttggagattatatgacacttatgggttcccagttgatttaacgagattaatggctgaagaagctggtttgaaaattgacgaagaaggttttgaacgtgctaaagaagaatctagagaagcttccaagggaagtggtactaaagatggtaaaactttggtgaaattagatgttcatgctctttctgaattagatcaaaatgatgctattcctaaaaccaatgacgaatttaaatatggtcttgaaaatgtcaaggctaaagttgttggtatttatgatggttccaagtttgttgattctattgaagatccaagtattcaatatggcatattgttggataaaaccccattctatgctgaacaaggtggtcaagaatatgatactggtaaattagtaattgatggtaaactggaattcaatgttgctaacgttcaagtttatgctggttacgtgttacacactggtaatattgttgatgggaagttaaatgttggtgatgaaattattgctacttatgatgaattaagaagatggccaattagaaataatcacactggtactcatattttgaattttgccttgagagaagtccttggagatggcgttgatcaaaaaggttcattagttgctccagaaaaattgagatttgatttcagtcataaacaagctgttaccgctaaagaattggaaaaaattgaagctatttctaacaaatacattaaaaacaatgataaagtttattataaagatgtttcattgaccaaagccaaagaaatcaatgggttaagagctgtttttggagaaacttatcctgatccagttagagttgtttctattggtgtactggttgatgatttattagctgatcctactaataccaaatggcacgaaatatctatagaattttgtgggggtactcatgttgccaagactggtgatattaaagatttagtgattattgaagaatcaggtattgctaaaggtattagaagaattgttgctgttactggacatgatgctcatcatgttcaaaaagttgctaatgaatttgaacaagaaatcgacaatgcttcaagtttaccatttggtgttgctaaagaatctaaatctaaagaattgggagttgcattgaaaaaattatcaatttccgtgttggataaacagagattgactgaaaaattcaataaattggataaatccatcaaagataatttgaaggctaaacaaaaagaagaaaccaaaaaaactttagatgtggttaataattggttgaatgataaagaaaatgcttcatcatttttggttgctcacgttccaattactgctaatgccaaggcaatcactgaagccattaatttgattaaaaagcaagataaaaccaaatcaatttatttattgactggtgaaaccgataaagttgctcatggatgttatgttagtgatgaagccattgccaagggtattaatgctaatgagttggctaaagctgtatcagaaaatataggtggtaaagctggtggtaaaggtaacattgttcaaggtatgggtgataaaccacaaggtattaacactgctattgaagaagtaactaaattattcaaagagaaattgtag

SEQ ID NO: 6470 - DNA, 4998 bp, Candida albicans
atggatatttctaaaccagtaggttcagaaattacttctgttgattttggagtgttatctgacgaagaaattagaaaattatccgccaaacaaatcactaatccaatcgtatttgataatttgggtcatccaataaatggtgggttatatgatttatcacttggtgcatttttaagaaatgtatgtacaacatgtggattagatgaaaaattctgtcctggtcatttgggacatattgaattacctgttcctgtttataatccaatgtttttcaaccaattatatattttcttgagaagtgcttgtttgtattgtcacaaattcaaacttaatcaattagaagtgcacaactttgaatgtaaattacatttgattcaatatggattgttattggaatgtgttgagttagataatattatggctaaatcctctaaatccagtagtgtaattgatgttgatggcgaagacaatgatgatgaagaaggaggaggatcagtagatgaaaaatctaaaaaagaccttatgaaacgtcgtgaattatttgttaaaaatgctattgaaagtgccttgaaagacggtagaactaatcataagggagttgtcactgcttctgtttctgaagaaagaaaagcaactattcatgaattttataaaagattattgagtagaccaaaatgtaccaactgtggtatgtattcaccaggtttcagaaaagatgggtttaccaagatttttgaaaactcattaactgataaacaaataacaaataatcgtgtaaaaggtttgcaacgtccagatatgatcaagaaaaatgccggcaatggtaatggtaattctagtagtactggagcagcaagtgatcttccaaatataaaacacaagggaggatccaaatatgtgttatcaactgaagttagaaatattttgagatcattattccacaaggaacaagcaattttacaaaaagttttccattcgagaccttaccaacacgacccaattagtggagacctttttttcaaacaatcagttttagttcctcctactagatttagattgccatctaaattaggagatgaaatacatgagaatgctcaaaatgaattgttatcaaacattattaaaacatctgttctcataagagatttgaacgaaagaattaccaacatgtacaaagagaaaatcagtggtgaagacaagaaaatcattttcaatagattgatgaatgcatttgtgactttacaaaatgatgtcaatgcctttatcgactccacaaaaaaccagaatgctccagcagggaaaataccaaatccaggtattaaacaagccttggaaaagaaagaagggttatttagaaaacatatgatgggtaaaagagtcaattatgctgctcgttcagtcatttcccctgatcctaatttagaaactaatgaaattggtgttccaccggttttcgccaaaaaattgacttatcctgaacccgttacctcttataatgcttctgaattgagacaagcagtcataaatggtccagatacctggcctggggccatccaagtgcaaaatgaagatgggtctttgatttcattgattggtatgacattagaacaacgtaaagccattgccaatcaattattgactcctaatggaggtaattcagttgttggtaaaaaagtttatagacatatcaaaaacaatgatgtggttattatgaatcgtcaaccaacattgcataaggcttctatgatgggtcataaagtgagagtattaccaggagagaaaactttaagattacattatgccaatactggtgcatataatgctgattttgatggggatgaaatgaacatgcatttcccccaaaatgaaaatgctagagctgaagctttaaatttagcaaatactgataatcaatatcttactccaacttcaggttctccattgagagggttaattcaagatcatatttctgctggggtttggttaaccaataaagatacatttttcaatagagaaacttatcaacaattgatatatggttgtattagacctgaagatggccatacttcgaaaaatagaattgtaacggttccaccagcaatttataagccagaaatgttatggacgggtaaacaagtgattactaccgtattacttaatattaaaccagataatgttcctggagttaatttgatatctaaaaacaaaattaaaagtgattattggagtgaatcaagtactgaaaatgaagttatttttaagaatggtgaattattatcgggtattttagataaatcacaatatggtgcttctcaatttggtattgtccattcattacatgaagtttatggtccaactgttgctggtaaggcattgagtgttttaggtagattatttaccaattatatcatgatgacggcattcacttgtggtatggatgatttaagattgactgatgaagggaacacttggagaaaagatatattgaaacaatcggttgacattggaagagttgcagctactgaagttactaatttggatgaagacactaagaacaacaataaagaattattaagaagattggaagaaattttaagagatgataataaattaggtattttggatgctcttactcaatctaaagtcaatgccattacgtctcaagttgtttctaaatgtgtccctgatggtactatgaaaagattcccttacaattctatgcaagcgatggcattatctggtgctaaaggttctaatgttaatgtttcacaaattatgtgtcttttaggacaacaagctttagaaggtagaagagtccccgttatggtttctggtaagacattaccatcttttaaaccatttgaaactgatgctagagctggtggttatattaaacaacgtttctattctggtattagaccacaagaatattatttccattgtatggctggtagagaaggtttaattgatacagctgtcaagacttctagatcgggttatttacaacgttgtttgacaaaacaattggaaggtgttcatgtcagttatgataattctgtaagagatgctgatggaacgttgattcaattcctttacggtggagatgccgttgacactactaaacaatcacatatgaatcaattcaaattctgtgttgacaattatgatgccttgttgaccaaatataatcctggagatatgacagaaaacattgatactgatttggcattatcatattccaagaaagtacgtaaatcgttgaagaaacaaaaagatgtaccacattatgatcaagttattaaatatgatccagtgttgaatgtttataatccagctaaatatttgggatcagtatcagagaaattccaagaaaaattggatacttatgtttctaagaatccaaccatatttgctcaatcaaaagaagaagctaaatctactggtaagatcactgaaaagaaatttagagctttgatgcaattaaaatatatgagatcattaattaatcctggtgaagccgttggtattattgcttctcaatccattggtgaaccatcaacacaaatgacgttgaatactttccattttgctggtcatggtgctgcaaatgttactttgggtattccacgtatgagagaaatcattatgactgcctctgctagtattaagactccccaaatgacattacctattttagctgatgttaatgatgaacaagccgatgcattttgtaaatcggttgctagagttgttatgtcggaatttgttgataaagttgttgttactgaaactacatctcaagatgttgatggatctaatagtagatcatatgtcattgggttgaaattctatactaaagaagaatatgaaactgaatatgatatttctcaagaacaattggaagatgtcattactagtaaattcttacatgcattagaaggacaaattgttaaagaagtcaagaaacaaaagaaacctgattatatgccaactgttggtaaatcagctggtaagaccgatatggaaactgtatctgggaagataaaagaaatagacaatgacgatgatgatgaagataatgaagttgatgaagatcacgatgaagaacaagctaaacaaaatgtcaaacaacaagtctcatatgaaggaccagatgatgatgaaattgaaaccatgaaaaaagctgaagaaacaagtgatgaagaaatggatggtgacaattcttctagttctgatgattcagatctggatagtgataacgaagaagatgccgatgccgatgttgatatggataaaccatctaaatcagaattatcacgttctgctaaagatcgtcaatctgaagttatagcatcccataatatggtgacacaattcaattttgatgatgaattgggtgaatggtgtgaattcaaattagaattaaatggtaatgaaactcaaaaattgttgatggttaatattgttgaagatttattacgtaaagttgttgttcgagaaattcctcatattggtagatgtattcgtcctgaaccagatgctaaaactggtaaaagaatattaactactgaaggggttaatttccgtgccatgtgggatcaagatgattttattaatgtcaatggtatcacttcaaatgatgtttatgccgttttgaaaacttatggtgttgaagctgccagaaataccattgttaatgaaatctatagagtgttcgatacttatggtattagtgtttcttcccgtcatttggatttaattgctgatatgatgactagagaaggtacttatttggcattcaatagacaaggtattgatagtagtacatcggcatttatgaagatgtcttatgaaacaacttgtcaatttttgactaaagcagtgttggatggtgatcgtgaagaattggaatctccttctgctaaaattgttatgggtaaattatcaaatgttggtactggttcatttgatgtatttgctcaaatgccaagattatga

SEQ ID NO: 6471 - DNA, 603 bp, Candida albicans
atgtcattaaatatatctttatacactatatctgctgttctaatattagacaatgaaggtaatagactatttgcaaaatattacaagtcatctttaggtgaagattcagctaatccatcaagtaaattccctcatcaatttgacactcaacaacaacaacttaattttgaaaaatcattattttccaaaacctacaaggtgaatcaagacatattattatatgataaccatttaattgcatacaagcaaactaacgatcttttattgtatttggttgcgccattaaatgaaaacgaaagtttgatttattcaaccatgaataatttatttgaagcattgactatattattggataatactgttgataaacaaaccattttagacaaatacgatatggtctgtttagcaattgatgagactatagatgacggaataattattgagtatgatcctgcaactatcgtgagcagagttactaatccaccgtctgcagtttacgagaacgtgaacttgaagaatattgatattagtgaaaaggggttgttcaacgctttatcgtttgcttctaagaaattgggtgaaagattacaacaaggattgtag

SEQ ID NO: 6472 - DNA, 915 bp, Candida albicans
atggaagaaatacatataagctcttccattttgcaagatagtgattcagctcccccaaaccattttcagcatgctcaacagcaagagcaaccatcatggaagaaattgctatacttgcaacaaccatttccagacaattacactgatcaatcttttctatctcaattgaagagaaacacaactgttgccaaatattcctacaaaaatttggtacaggcgttttcatttattgttttctatatctcgtgcatccttttagttattttgatgtttattggaatatatgagaagcaatgggaccccataatacccacattaattagcaccggtatttccctagtcggttttttcagtttaaagaatctatcaatgaacatgaggtcgttgatggtaattacatttatactccttattgtgtctccaatattgaaatcgctaacaaaatccacttcatcggactcaatttgggcaatttcctgcgtgttgtgtttagcaaactcgatatttcatgactattcaatgaaagtgagttatcgtccaatagtttccacaaacatatctttatcaaacgctattgtgttggcgtctagattgagcacgacattagacgtatttttgtttgtgttgttcgctattgaagttaatatactactaccgttatttgatgcaaagatccgactcctgggtctagaaactattcattggccaatagcatttctaacttttaatttgaccagttatttgatgtatattttgttaaactataagtttttggtttactggattttgtctgtttttgtgatggtggtcatcatgcctatatatttcttgtccttgcagaggtataaaaacgagatacaaggaccatgggatgtggcgaaaccaaagttaatgaagtcaagtatacaaagctga

SEQ ID NO: 6473 - DNA, 882 bp, Candida albicans
atgtcggcacccacccctccacaaactggccaatttcaagttgctacttcagctcaaagatcaccagtagctgtgaatattgtcaactacttgtttcaaaatcctatattgaaacaaagaacaggtttattagataacacaaatgatatcgagtttttcagattcaaaagattgcaaagagcattattgagcgatgactataaacagaaacaacaaaatcccaagaatgggttgattcctgttgcaaataatgaagatgtacaaaaagtttttgttttgttgatccagaaccaattgctcttaccacttcagaaattgcattacgccgaagttaaagcagtcaagggctggaagcctaataaagagaaaccaactttgaaaagggccgacaaagcagtaatggatcctgatgtttattatggttggttgtaccaaaaacctaacccatacatcttgctttacagttttttggctatagctggtgtgtttgccgttatattatttccactttggcccaactttatgaagagaggtgtttggtatctttctatgggtgcattagggttgattgctttattttttgccactgcaattgtaagattgataatctacattatttcattagtggccttccctaagccattttggttattccccaacttatttgaagattgtggtgttattgaaagtttccaaccagtctacgcctgggaggaacctaagaaaaagaaaggcaagaagaagaaggaaccaaagttggaggttgttgaagagaaagttggcagttcttctggggacgtgaaagtcacaggaagtgaactttcgaatggttcttccacaactggcaagagaaaggtaactttagaggaagttgaagaataa

SEQ ID NO: 6474 - DNA, 855 bp, Candida albicans
atgtcatcagaatacgccaagttagttgctagtctttctaatcaagatattttaaccaaatggccagaagttacccccttgaagaagatttctggtattccaagatctgctggatctgacagcagtgattctgatttatttgatggtcatgatgaagaacaaattagattaatggaagaattgtgtatcgttttagattatgatgacaagcctgttggtgcaggaacaaaaaaattgtgtcacataatggataatattaatgctgggttgttacatcgtgcattttctgtgtttttattcaatgaagatgggaaattattattacaacaaagagctgatgaaaaaatcactttcgcaaacatgtggacaaacacttgttgctctcatcctttatgtgttccaagtgaattgggtgttgattcgtcattggaaggttctaaagatgtcaacaatttgactaatgctgttaagggtgctaaggttgctgcacaaagaaaattggaacacgaattgggaataccatttgaagatgccccaatagaaaatttcacctacttgactagaatccattacaaatcaccaagtggtgacgaatcttccaaatggggggaacacgaaattgattatatattaattttgaaaactaaaaatgatatcactgttaatgctaattataatgaggttaaagatttcaaatatgtcagtgctgatgaattgaaagtcatgtttgaagatgactccttggtgtttaccccatggttcaaattgatttgccaatctttcttattcaaatggtgggataacttggacaatttagatcaattcaaagatgaagaaatccatcgtttactctga

SEQ ID NO: 6475 - DNA, 1485 bp, Candida albicans
atgtcgtctcacttgttcaaggcgacggtaaatgaatatctcgaaggactcccgaaaacagtccaatccaaactatatgaagcaccagctacgtgtttgtcgatattccgattactttcgccaatggccaaattctacatcatgtcaatgatattcaatgaaaaaccaattgcattaagagatttagacaaatggtgtaaaccactggcgaggaaattggaatttgaagcattgaaaagattggaatctctacatttaatagaatatgatagtaaaggttctcatgtcagattgcattctattttcaggaaaaactttcgtgattgtttgacaggatcacaaaatccaaatgcatttggaagtataagtaccacagtggataaacataaagttgatataccattcctagatttgtttgcatcgcagaaatgggaaactattttacatttcatggtgggtaccgaatcaacggccactccttctgattcagttttaagtctacttaaattgggtggattaatggaaggccccaacaatgatttaagaattacaaatagtgggttccagtttttgttacaagatgttaatgcacaaatttggacattgctattacaatatttgaacttgacacaggaattgaatatggatccagttgatgtgttgaattttatatttgtattggggtcattggaattgggtaaaagttactctgtattaagcttaagtgaaactcaagtgagtatgttggcagatttaaaagattatgggttggtttatcaacgatcagacacttctggaaggttctacccaacaagattggcaaccacgttaacttctgattcagcagcattgaagacgccatctatggcaatggatgaggaagaacaacaagttgcaacaaaggaatcgattatcacagaaacaaatttcaaaatttatgcatacacaaagtcaccattagaaatagccattctaaatttgtttgtgcattttaaaaccagatttgccaatatggtatgtgggcaaattacaagagaatctataagaaacgctttatataatggtataactgcagatcagattatcaaatttttggaaacccatgcacatccacaaatgagaatattagcaaaagagaaattggataaaaaaattgaattcgataccagtcacaatatcaatactgctggtggtgctcctcaaagtaaaactgatgggatggtttcacaacataagttggaaatactccctcctaatgttgttgatcagatcaagctatggcagttggaattagatagaattcaaacttttgacggatacttgtttaaagatttctccaatcaacaagaatatgatatattatctaattatgcttctgagctaggggtattgatctgggcagataaagtgaagaagaaattctttgtcactaaagacggcatgactcaagttgctgattttgcaaacagaaaattgaaacgttga

SEQ ID NO: 6476 - DNA, 897 bp, Candida albicans
atgcctatgcaaaaagaattcagaacctctgcttaccactcccgtttccaaactcctttccgtagaagacaagaaggtaaaaccgactactaccaaagaaagagattagtcactcaacacaaggctaaatacaactcaccaaaatacagattggttgttagattcaccaacaaggatatcattgctcaaattgtcagtgctcacattactggtgatgttgttttcaccgctgcttatgctcacgaattaccaagatacggtatcaaatacggtttgaccaattggtctgctgcttacgccgttggtttattggttgccagaagagctttgcaaaaattaggtttggatgaaacttacactggtgttgaagaagttgaaggtgaatttgaattgactgaagccgttgaagacggtccaagaccatttaaagtctttttggacattggtttgcaaagaaccaccactggtgccagagtctttggtgttttgaaaggtgcttccgatggtggtttgtacgttccacactcaccaaacagattcccaggttgggatatcgaagccgaagaattggatgctgaattattgagaaaatacattttcggtggtcacgttgctgaatacatggaagaattattggatgatgatgaagaaaaatacaaatctatcttcaaaaactacatcgaagaagaaattgaaagtgaagatgttgaagaaatctacgctaacgctcacgaagccattagagctgacccatctttcaaaccaactgaaaagaaattcaccaaagaacaatacaaggctgaatctaagaaatacagacaacaaaaattgaccagagctgaaagacaagccaaagttgctaagaagattgctgaattcaaagctcaacaagaataa

SEQ ID NO: 6477 - DNA, 546 bp, Candida albicans
atgagaccacttacagaagaagaaaccaaagtcgtatttgaaaaactagccaattatataggtagaaacatttctttccttatagataatccagaaaatcctcatgttttccgacttcaaaaagatcgagtttattatgttcaggaatcaattgctaaatttgctactagtgtatcacgtcaacaattaatgtcattaggtacatgttttgggaaattcactaaaacggggaaattcagattacatattactagtttaccttatttggctcaatatgctaaattcaaaatttggattaaacaaaatggtgaaatgccatttttatatggtaatcatgtattaaaagctcatattgggagaatgtccgatgatattccggaacatgctggggttattatatattcaatgaatgatatacctttaggatttggtgctagtgctaaaagtactgctgaagcaagaaatttacctccaactggtatcgttgcatttagacaaggtgatataggtgaatatttaagagaagaagatacattatttacttaa

SEQ ID NO: 6478 - DNA, 1497 bp, Candida albicans
atggcaacaaatactatcactaccactaaagtgacaacaaccaccacagatgtcacaggcttatcattgattgccgcacattctcatatatcaggactaggattggacgacaacttacaaccaaaggaaaatgctcaagggatggttggacaattatctgcccgtaaagcagccggtgttatcttaaaaatggttgaagccgggaaaattgctggaagagcagtgttaattgccggacctccatcaactggtaaaactgccatcgccatgggattatcacaaagtttgggtaatcaagtgccatttaccgctttagcagcatcggaagttttttcattagaattatctaaaactgaggcattaacccaagctttccgtaaatcaattggaatcaaaataaaagaagaaacagaaattattgaaggggaagtggttgaaattcagatcgatagaacaatcactggcggccacaagcaagggaagttgaccattaaaaccaccgatatggaaacaatttatgaattgggtaataagatgattgaagggttaaccaaagaaaaggttttggctggtgatgtcatctctattgataaggcatccggtaaaattactaaattaggaagatcattcactagagccagagattatgatgccatgggaccagaaaccaaatttgtccaatgtcctgaaggtgaattacaaaagagaaaagaagttgtccacactatctctttgcatgaaattgatgttataaattctagacaacaaggattcttggctttgttttctggggatactggggaaattagaccagaggttcgtgaccaaatcaatactaaagttgccgaatggaaggaagaaggtaaggcagagattgttcctggggtgttgtttatcgatgaagttcacatgttagatattgaatgtttttcattcatcaaccgagcattagaagatgaattctcccctattgttattatggctaccaatagaggtgtttctcgtatcagaggcactgattataaatcaccacacggtatgcctatggatttattggacagatctataactatccataccacgtcatatactgccgatgaaatcagaaccatcttatcaataagagcaaccgaagaagaagtggaattatcaggtgatgcattggcattgttgactaaaattggacaagaaactagtttgagatatgccgccaatttgatctcggtatcacaacaaattgccttgaaaaagaaaaacaatacagttgatctacaagacatcaagcgagcatatatgttgtttttagattctgatagatcagtgcaatatttggaagaaaacgctgatcaatatatcgatgattatggaagagttactattggtcaagaaagtacagatgggtcaactcaacctcaagcaaaacaacaagaagtagcccaaccagaagcaacccaaccacaatctcaaccagaagatgataaaatggaaacagattaa

SEQ ID NO: 6479 - DNA, 612 bp, Candida albicans
atgactgaaaaatcaagccaatttcagttcccaatctctttgtcatcaccaaaactgaaaacagttaatacaccaaggatatcaaaacttcgaagtagcatcatgtttagattaataccaagattaaaaccaataataccatcaataaatcgtatttctttgtccgttaaaccacaaccatcaacttcacaacattgtcacacattgcgagctttccatacatcaccaatttcccttcatggacacctcaaaaaacctaatccaggtgaagaattgcatattacatttataactaaggatggcaaacaattaacttatgaagttgctgaaggtgataatattttggatatagcacaagcacataatttggatatggaaggagcttgtggtggttcatgtgcctgtagtacatgtcatgttatcgttgatccggaatattatgatagattagaagaacctgatgatgatgaaaacgatatgttggatttagcatttggattgacagaaacttctagattaggatgtcaagttaaaatgactaaagaattagatggaattagagtggcattaccggctatgactagaaatttgcagtctcgagattttaattaa

SEQ ID NO: 6480 - DNA, 2733 bp, Candida albicans
atgtcttcacctccacaaagtactaatcaaaataattccaatccagctcaagattcacttgaaagagaatccgggtccatctcccaaagtcaacaaccaccaattgtttcttcaccattatttttcaattcatcaaatccaggttcagatattggtaattttaactctcaaagtcaaagtcaaagtcaaagaagaaatgatatatcatcaccattacattacacttcctcagcacaacctacttctgatattggtgggtttgattctcaaagatctgctagagtacaagatgttggtagaataatgagaagagcacaaagaagtgatgtcactgattcagtatcttcacctcaacgtagtagaagatattttactcagggaagaggtaatggaccttcgaatttaaactctagcacttcagcacaatttagtactgatccagcagaacctaatgatgaaccagtgagagtcatttggggtacaaatgtttcaatccaagaatgttctaatattttcagagatttcttattatcattcaaatataaatacagaagagaattagaagaacaagcaattgaaccggaagaccatgaattatactatgttaatcaattgaataatattattgaattgggattaaccaatcttaatttagatgccaaaaatttattgagttatccttcaacaagaaaattgtattatcaattgattaattatcctcaagaaattattcctattatggaccataccataaaggattgtttaatccaaataataaatgatgccaatgccaccactagtccagcacaatctaaacttgatgaaattgaaactaatgtttacaccatacgtccatacaatgtcaatttggttgaaaaaggtattcgtgaattgaatcctaatgatattgataagttagttagtgttaaagggttaacattacgttctacttctatcattcctgatatgaaagtggcatttttcagatgtaacgcctgtggtcatactgttggggtggaaattgatcgtggtgtaatttccgaaccaacaaaatgtcctagagaagtatgtggtcaaaccaattcaatggtacttattcataatcgttcatcattttctgataaacaagtgattaaattacaagaaactcctgatttggtacctgatggtcaaacccctcattctatcaatttatgtgtttacgatgaattggttgattcttgtcgtgctggtgatcgtgttgaagtatgtggtattttcagatcaactccagttcgagcaaatcctagacaaagagctttaaaaaacttatataaaacatatttggatattgttcatgtgaaaaaaatcgataaaaggcgattaggtggtgatgttaccactttagaacacgaattggctgaaaaggatcaagaagttgaacaagttcgaaaaatcactgctgaagaagaagctaaaatcaaagaaatttctgaacgtgatgatttgtatgaaatattggctagatcattagctccatctatttatgagatggatgatgttaaaaaggggatcttgttacaattatttggtggtactaataaaacatttacaaaaggtggtcgttatagaggtgatataaatattttattatgtggtgatccatctacttctaaatcacaaatcttacaatatgttcataagattgctccaagaggggtttatacttctggtaaaggttcttcggctgttggtttgacagcttatatcaccagagatattgatacaaaacaattagtattggaaagtggggcccttgtgttatctgatggaggtgtttgttgtattgatgagtttgacaagatgagtgatgccaccagatcagttttacatgaagtcatggaacaacaaactatttctattgctaaagccggtattattaccacattaaatgctaggacatctattttagcttctgcaaatccaattaattctcgttatgatccaaatttgcctgtgacgggtaacattgatttgccaccaccattgttatcacgttttgatttggtttatttgattttggataaagttgatgaatcaatcgatagacaattggctagacatttgactgatatgtatttggaagatgctcctgaaactgttaatgccaattcggtattacccgtggaattattaacactttatattcaatatgctaaagagaatttcaatcccgtgatgacagaagaaggtaaaaatgaattagttagatcatacgttgaaatgagaaaattgggggaggatgctagatcatcagaaaagagaatcaccgctactacaagacaattggaatcgatgattagattgtctgaagctcatgctaaaatgagattatctgaaagagttgaattgatcgatgttaaagaagcagtaagattaattaaatcggccattaaagattatgctactgatccagttactggtagaatcgatatggatatgattcaaactggtactacggcacaacaaagaagagtacaagaagatttggtcagtgaaattatgaaaatcatcgaagaaaataataatttaattagatttaatgatcttagtgttaaattgaatgaacgtagttcatttagagtggaaaatctggtgattaatgaagggttgagacgattacaacaagaaggtaaaatcatggaaactggtgatagtcatagaagaactattagaaaaattgctattgtataa

SEQ ID NO: 6481 - DNA, 1188 bp, Candida albicans
atgagtgaagtaaagaatgaattggagacagagacgactccagcaccagctaagaagcaaagactatcaaatgatgacttgtatcgaaattcaactcaatacgagttatggtcatttacccaagaaacattacaagatgccaaacgagaggcaaatgaaaagggggtcaaaatttcaaaagagagattcaaatctgcctttgagaatgcaaagaaagaacatccagatgcttttgaacaatttccagatgaattgaacgaaaatatggtcagtctattaacactagaagaagaatccacctatcttgatttttacatacaaaacattactacgacatgtaatttttttaaaatgccaactcaagttcgattaacagcagcttcatttttcaagaaattttacctagtcaactccgtaatggaatttcatcctaaaaatgtattatatacatgtatatttctagctgcaaagtcggaaaattatttcatctcgatagagtcatatgttaaggcattaaagggaacagatacatctcatattctagatttggagttcattgtgttgcagagtttgaagtttacattgttggtacatcatccaatacgagcattatatgggtttttcctagattttcaagctgtattattacatccagaacaagtgatgtatgatgtatcagtagatactttggggaacatgtataatcaagcaaaggaatggctcaataagtattttatggtcagcgatgtggcgtttttgtttacgccgccgcagattgcacttgcagcaatgtacgatactgataaaaggattactgataaatacttgagacgaaaatatcttggcaatgaggaaaagttggatccgataaaagaacaggagaatgaaaatgaaaaacaaaatggcgaagataaatctgtagttgcatcagaagaagcttcaaaggatgttagcaaggaaaagactaaatcttccaatagacagcaatatgaaacattggttacattattgagaaagtgtgtaaaacttgcgaaacagtcacgggttgctgatcgtgaagcaagtaaggaaattgataagaaatgtttctttgcattaaatccgaaaaaattaattgataaacgtatcaaaagattaactttggggaatcaggatgttgcgaaagaaagtacagttgaacctctgtaa

SEQ ID NO: 6482 - DNA, 1287 bp, Candida albicans
atgacatacactgccccagccgttgtgatagataatggttcatatactaccaaagctggattttctctggaagatttaccatctttagtatttaattctaattacatgaaacatgacaaaacacaacaagttataataggtgatgaactgatggaaaataatagcgaacaacaggttatgaaattgttggatgatggtttaatttatgattttgataatatagtttataattggcagtatgtctttgataatgttgacaataataatcctatcaattctagcgagttcccattagtggtcactgaacaaccttggaacacatcgaaaaacaaagttaattcatgccaagttgcatttgaaacattgcaagttccgatatttagtttggtgaaaactccattagcacagttgtaccgatgtggcaagtcaaccggattggtgatagatataggatccagtgtaaccagtgtgacaccaatcttggatggggttattcagctgaaatgttcctaccattcaaaatatgcaggcgattttgtgaatttacatgttttaaactatttggagagtaaaactgcaattaatagcttgctcccatccaaatttgccaactcatccgaatcatttaagcaatactatataagccgcaacatcttgcaagagtataaaaacttgtctttgaactatcaaattaaagattaccaattgtataatcatgaattcatcaatgtctcggaccaacagaattatttagaaaatttgtttgacccaactttgaacaaactaccaaatattcacattccagagccaagcatagataagccaggttcccatggtttgaccaatttggtgtttttggcattgaagaatttagagtctacattgttgcctcaaaataccaacgacaatacatcacaaaatagatatcagaagttcattgaaattttcaaattgttattgtccaatgtcttaatcactgggggtacgtctgcagccaatggcttgcccgatcatattatcaatgacttaagagctttgactcaaaagtacttcccaaactatccattctcctatgctgtgcaacaaatcagaccaagtaacacagaaaatgcagaaatctgggatcgtcaatttggtgcttggtttggtgcatgtaatttggccagcatgctcaatgacaacgacgaaaagtctaatagtgctaaaattgccttggacaattggttcataacaaaggctgattacgaagaattgggtgaagatttagttgcagaaaagttcaaataa

SEQ ID NO: 6483 - DNA, 3324 bp, Candida albicans
atgtcgataagaagatattctggtaattctcctaggatcaatgattatgatctgcgcacagttgacgaatccctttattccttgaaagaagtctacaatacaataaaatatgattggcctcaaatgcttcgagaagatgccaatccaattgaaatggcagtggcattgttagatgatacttcagttgggttagcccatagattacaagaattcaacatgttgaaagagagttccgaacaagctttacgtagtgtggtgaacgaacattacgatttattcaacaaaagtatgggatcatataataccttactatctacaatgaaaaactctcaggaagactctttggaaatcaagaactttttggaatactccaataaagaagtgcacgatcgatcagcagtgttgggtgaattatcactggcttctgccaagtattcagagatgattgaagtattggatgcaatgcctgaaatgaacgaaatacccgggaaaattgatcaattggtcattgacaaaaagatacacgaggtttacgacgtgatttccgaaggatacaaaacggcagaaaaatataatttgtggtcattaccggcaatgaatgggataaaaacatatcttgaagagcagtctaacaaactatttgatatgattattgatgaactacagaatgagatctatttgaaatacaacagaaacccacaagaaggagccattgcatggcagaatattattcattccagtaatccacaattgacttcctttgtgactttgttagatctgaagaatttagaacaatttattttcaattcagcaaatttggatatatcggaagtggtcgattttttgacttctccagtgaaaaattttatagttaatcaattgcctgacctccatgctcataatagtaagaatgatggagtcatcgattacaaaatcttgttagattcaactctgaatccaaacacagagtcattctattacatttatatgcttttgcttacagcatccaaactcaacaggttgaatcaagcagttgaagttttacttgacactaatcaactggaattgcatggtctaattaacagaaccacagaggcagttaagctgcgaaatgggcatgcgttatcgaagttatctaaaatgcagcaccttgatcatggctcattgtttgacgttattgtgcatggttcatttagtgattcggctgttgttcttttgcaagacttgtttggatcaatctttatcaggtgtttggctactttccaaagacataaagtaataactcaaattgtgacattattgcaagaaggaaaagcgccgtcaacaccaaaggctgttgctgaaagcacacctacttttgatagtcctcaaatggggagaccggatactttccatgcacgtaatttgtttacaatttggaagacaatccaaaaggagttgaaggcattaatgttgaattacatttatgacgaccacaattataagttacattctttggcagacactactggtgccaccaatcgtaataagatttcaaatgcattagggaaaaaagagttgttcaaatttgaagatgtgacttataacccttccaataaaacaacaaaagaaattcttgatgttttggccgatgtgtttcccggatatagtatttcggacgataataacaatggagctattatagaaaccgctactccgtatgtcaaacatgagtcatttaatgcaactgttgaagtgttggttcccaagaatttgttcaatatgagaatcattttagaattttttttaattttcattgatgggtcacaaagaattttttttgactttgaagatgaaaaaaccagaggtgttcatgccagaacatcatttcatttctttgaggattttatgaaaatatcctttttgtcatatttacgaaacactattgagttcaattttggagaacaagttggtggtgcttattctatgaaaattgaacaagcaatgccggttaattcaggattaaaactagatttaatatctttaagtcaagattcaaatttcaaaattcttggtaatgcagttagcaatgttgaatccaatttgatcatttatgaaaatgcatataatttcaaaaaaatgtttcttgaattgtgtttaatattaaacacttcattgtcatatcgtgagaatttctcaggggccgtcttaaagacgttagagaatttttctaatgagtacaacaagttgtatcaagagttattgtccactggtgaaggtacaaacattgtgcgaccacctctgagagtaagtaaatggatgaagatacctgtgttaactgagatcagtggtaaaattcttcaacgtggagtacaaggtgaaactgctaacgaattacaagaactaattgaatcagaatctaaagttgttttacatgatgaaaccgtgacacaccaagaagatttgttagatcacgaggcatatgctcagattgtgtatttgttgttaactaccacctggatactttcttggttacctttggttaaaaaggaatccaattatagcatttatgatgatgagcaaaacaagactatcaaagtttcgacagtggacaaattaagatacaattggtctttcttagaaaacggaagacaggcaatcaactttaccccagatggaactgatattgtacaatataacatttaccttgccttgaattcagaaaaaattggtgagtttaataatattatccataactttgaatcgattagagacaaaaccttgttggccttgagatatgaattgaggtgtaaagcagtatattttgtcactatgtcttttaaacacgttgattggtgtcctgtaactgaaccaggcgatgctgatcattttattgtcaatttgaatcaagaaatatttgccatggataataagttatctaaaactgttagtgacattgaacgagaaagtatatttcttgggttttctcaattccttaatgatttgataatcactagatccaaagctgtgagaaagattaatagcaatggtattaagagaatattgttaaacatttcaacagtacaacaaatgttaagaaacttatcgtctaatccagagacaattgatttcacaaaggcatctgaatattttgaaatgtttactatgaatgaattcaatttacttaaatttatcaagagcaaacgagacaactacactaaagacgcataccatacattggcaagattgatttatagtgaaaaattggctgatggtaatggttcactgttcaataaagggaaatataatgatttgattaagaaaattgacggaatatttgattag

SEQ ID NO: 6484 - DNA, 1092 bp, Candida albicans
atggaagccatatccgatagactatttaatgagaatgcaaacacgatagaatcagggaatgatgacccatcattattgactataatactagatctttcaatgaaaggatggtataacatcaaagaaatgatttcaatacaagatatcaccaaatcattactagttttcttgaatggacatttgtcattaaacaatagtaatcaagtggcatttttagtgagttctactatgggttctaaatttttatatcccgatttaactatggttggaaaccccaacgtgagtgaacattctgaacattttcctgacatgtatcgactgtttaaaatggttgaccaatctgtgctacaacaattgaacgagtatattgaagagattatcaaattcgagacaaggaatgaaaaaaagggtttcaattgcttgactggagcaatcagtatggctttaacgtacacaaatagaatgttaacgttggatcaatcaatcaccaccacaactgctgctgcaatgacagcttctacgcttgaaagtacatccaacaacaataatactagtggcactagtggatcatctagtacctcatctagcacatcgatgaaatcaagagttttgattgtgtctgctaatgatgatgacgatcttaggtatattccattgatgaattgtatatttgctgcccagaaaatgaaagtgtctattgacgtagcaaaattgggtcataacaactcatcctacttacaacaagcttctgatgccaccaagggggtttatttacacattgaagatccaaagggaataattcaagtgttgtcaaccgcattttttatagaacccaacctacgaccatacattattttacctacaaattcaaatgtcaattatcgagccagttgtttcattactgggaaatcagtagatttgggatatgtgtgttctgtttgtttatgtattatgtcacaattgcctcaaagtggtaaatgcccagcttgtgattctgaatttgataaaaagatcattcaagatttaaatagagaacctccagttatttcaaaaaagaaaagaaaacttgaaaatgggagtctgactaaatag

SEQ ID NO: 6485 - DNA, 447 bp, Candida albicans
atgggttcggtatttctcccacatttaaagacagcatggcacgttgatcaagctattctttctgaagatgatagagtagttgttataagatttggtcgtgaagaagaaactcaatgtatgataatggatgaaattctattttcaatatctgaaaaaattaaaaattttgctgttgtatatttagttaatttagacaaagtacctgatttcaatcaaatgtatgaactagatcaaaatcccctagagccgtttacaataatgtttttctatcgaaataaacatatgatgtgtgattttggtacggggaataacaacaagttgaactttatgatatacgacaaacaagaaatgattgatattatagagacagtataccgaggcgcaagaaaaggtaaaggtttagtaatgagtccaaaggattatagtcgttcagctaaggatatatag

SEQ ID NO: 6486 - DNA, 858 bp, Candida albicans
atgaatagtattgctcaaagatatagtcatgccagtcaaaatgatattgttaaagaaataaattccgttcatgaatcactttcatcatcatcaaacattcctcaattagaattagctccatcaattgccatcccgccaatttctcaaccaacagattttttaagagctcatactgatgattctgttaatccagattgtaaaatcaaaattgctcatggtacaacaactttagcatttcgtttccaaggtgggattattgttgccgttgattctcgtgccacagcaggtaattggattgcttcacaaaccgtcaataaagtgattagaattaatccatttttattgggtactatggctggtggtgctgctgattgtcaattttgggaaacttggttaggtactcaatgtagattacatgaattaagagaaaaggaaagaatttctgttgctgctgcatcgaaaattttaagtaatttggtgtatcaatataaaggtatgggattaagtatgggtaccatggtttgtggtcatactgctaaagaaggtcctactatatattatgttgatagtgatggtactagattgaaaggtgatgtgttttgtgttggttctggtcaaacttttgcttatggggttttagattcagaatataaatgggatttatcggttgaagatgctttatatttaggtaagagaagtatattggctgctactcatagagatgcttattctggtggttcagttaatttatatcatgtcactgaacaaggttggacttatcatggtaatttcaatgttggtgatctcttttgggaagttaaagaaaaggaacaatcatttgtaaatgtagatggataa

SEQ ID NO: 6487 - DNA, 648 bp, Candida albicans
atgctacagctgaatccagtaatacatccaaatacatcaaacagacattttaagtttgaaccatttttacgtcaggaatataattttggtcttgatcctgatcgtccagtatgtcaattctacaacccattaaatcctgacaattcttgtccccagggcaacaactgtcctaataaacacgtatctgcaatgtattccaataagattgtttgtaaacattggttaagaggattatgtaaaaagggtgatcattgcgagttcttacatgaatacaatttaagaaaaatgcctgaatgtttgttttattccaaaaatggctactgtactcaaacatcagagtgtttgtatctacatgttgatcctcaactgaaaataccagaatgcttaaactataatcaagggttctgtagtgaaggtcccaattgtaagaatcgtcatgtcagacgagtgctatgcccgttatatctttatggattctgtccaaaaggccctgaatgtgaatttactcatcccaagtttgatttccataatttgaatttaagaattagacccgataatttgatacaaatgacaagtaaacatgtggataattcaaaggaagaatcagataagaaagaagattcagaaccgaaggaagaaagtatatag

SEQ ID NO: 6488 - DNA, 1203 bp, Candida albicans
atggaaattgaatcagatatcccaaagatccccgattttcaattatcagagaagcaatttttattgcaacacactgacttggaagagaaggaccgtcaacacattatagaggaaatcctccaagcaatcaaaaaagatcaccttgctccatattatcattatttacataccgaaatctccgacttcccttacgacgagagtttatatcgtgaattagcttctgaaaacgaaaaggtgattgaagaattgaaactgaaaatcaaggaggctgaagatgaggaagacacagagttggacgtggcatcaacaacaacaaaattagcagaatactacactaaaattatcgatagaaaaaatgctacagagacatttaagaaagtgttagaattgactccaaatactggtagcaaaattgatcatttgttgacactaacaagaatagattttttcttcaacgatttgccactggttcaaaagcatttggaacaaattggccaattaagtgagaagggaggtgattgggaacgtcgtaaccgtttcaaagcttacaatggcatttatatgttggcaacaagaaactttgctgaagcggcaaagttgttaattgattctttggctacatttacatctaccgaactctgttcttatgaagcaattgctcactgtgctatcgttgccggtgttttgtctttagaaagggttgatttgaaaaacaaaataattgattctcccgagattttgtccatcgcatccacaacacctaatttagaaccgttgttgaatttgacaaattctttatatacttgcgagtacaattgctttttccagtatcttttggaatcgtatgaaaagttgttgttgccaaataaatacttgtacaaacatgctaactttttccttagagaaatgagatgcaaagcttataaccaattgttggaaagttataaatcattatccttgaaatctatggcaactaatttcaacataagtgaagagtttttggatcaagatttgtgcaaattcatccctaacaaaaagttaaattgtacgattgataaggtgaatgggataattgaaacaaatagaccggataacaagaacaaccaatatcatgccttgattaaacaaggggataacttgttaaccaaattacaaaaatacggtgcagcagtcaagttgagtggggcagaaagagttgcttaa

SEQ ID NO: 6489 - DNA, 1011 bp, Candida albicans
atgtcagataataacattgttgggatagaatataatagagtgacaaacactacttcaactgatttcccaggtcatcaacaaaatggagattattcatgggacattgaaaaatttaaaaacaagtttgaaatcaaaatcacaaatttgagtgaaaggacggggacttttgatttgatacatattgatacatcaatagctaatgcatttcgtcgtattatgattgccgaagttccttcagttgctgctgaaactgtatatatgtttatgaacacttcagttattcaagatgaagtattggcacaaagaattgggttaatcccatggaaaatcgaccccgataagttgacttgggtagatgaaactgttgatatcaatgatcgtttcacagaagataatacaattgtgttatcattagatgttgcatgttcgaaaaaccctcatgcacctaaaaattctactgatcctagagaattatataaaaattctcatgtttatgctaaagatttcaaatttgaacctcatgggaatcaagaagaaaaatttaaagatactccagtggtgccttgtgatcccgatattttattggctaaattaagaccaggtcaagaaatttcattaagagctcattgtgtattgggtattggatctgatcatgctaaattttctcctgtggctactgcatcttatagattattgccagttatagatattaaagaaccaattacgggggaattggctaaaaaattccaaaaatgtttcccaccaggagttattggtatcgatgctaatggtaaagcatacgttaaagatgccagaaaagatactgtttctcgtgaagtattaagacatccagaatttgatggtaaagtccaattaggtagacaaagagatcatttcatattcaatgttgaaagtaccggggctatgcctccagcagagattttcttcaaatcagtaagattattgaaaaataaagctgaatatttgagaaattgtccaattggtcaataa

SEQ ID NO: 6490 - DNA, 693 bp, Candida albicans
atgccatccgccaaatcgtcagatctttctcctacgaaaactaattttgaatcgactactaaacaaaaagtttcagttcaagatatttttttatacattcctaatttgattggatatttaagaataataactgccattatatcatttttatgtatggctaatcatccagtggccaccttaattttttatggaatttcgggatttttagatgcatttgatggatatgccgctagaaaattcaatcaaggtactagatttggtgctgtattagatatggtaactgatcgatgtgccactagttctttaattgtttatcttggagtgttatatcctcaatacacggtattttggcaaatactagtcagtttagatttatcatctcattatatgcatatgtatgctatgttatcagctggttctacttcacataaaaatgtcgatgaaactcaatcgaaattattatcattatattataataatcgattggtattattttttgtttgtcttataaatgaattgttttatatggcagtttatttacattattataaatttttttggttaggtacagtcatgctagtggcaagtactccaatttggttattcaaacaaattgctaacattatacaattgaaaaacgcatcattaatattggcaagaatggatgctcatgatcatagtaaaagagattag

SEQ ID NO: 6491 - DNA, 1026 bp, Candida albicans
atgtccaatttaccgccagatgaaaaagttattctatttgataaatccaaacatgtgcaatatatagtggaacaggaatcgcatcgatcctttgaatattggttgagtgagcatttacgaatgaatggattatactggggggtgactgccttgatcacaatgaatgaactatcagcattggcccaacaagatgtgattgattatattatgttatgttgggatgataaaacaggtgcatttggatcatttccaaaacatgatggtcatatattgtcaacattgtcagcattacaagtgttaaagatttacgatcaagaattaactgtgttaaacaacaacaatgaatctttgaatggcaacaaacgtgaaagattgataaaatttattactgggttacaattgcctgatggtagtttccaaggagataagtatggtgaagtagacactagatttgtctatactgcagtctcatccttgtcgttattgaatgcgttaacagactccattgctgatacagcaagtgcattcattatgcaatgttttaactttgatggtgggtttggattgattcccgggtccgagagtcatgctgcacaagtgttcacgtgtgtgggggcattggccatcatgaataagttggatttactagatgtggaaaataagaaggtcaagttaattgattggttaactgaacgacaagtgttacctagtggagggtttaatgggcgtccagagaaattgcccgacgtatgctatagttggtgggtgttgtcctcattgtcaattctaaaacgcaagaattgggttgatttgaagattttagagaatttcatattgacttgtcaggatttggagaacggcggattcagtgaccgccctggtaatcaaacagatgtatatcatacatgttttgccattgctgggctaagtttaattgattacaagaaatacggatttaaagagattgatcctgtttattgtatgcctgtggaagtgacatctaaatttgtacgtaggctggcttga

SEQ ID NO: 6492 - DNA, 720 bp, Candida albicans
atgacccaaaacaagtattcagttatattgccaacatataacgaaaagagaaatttaccaattttaatctacttgttgaacaagacatttactgccaacaaattggattgggaagtaattattgttgacgataattcaccagatggaactcaagaaattgccaaaaaattaattgatatatttggaccagaacacattcaattaagaccaagagctggtaaattaggtttgggtactgcctatgtccatggattacaatttgttactggtaatttcgtaataatcatggatgctgatttcagtcatcatccagaagccatacctgaattcattgccaaacaaaaatcacaagattatgacattgtcaccggtaccagatatgctggtgatggtggtgtctttggatgggatttcaaaagaaaattgatttctagaggagccaactttttggctagtgttgtattgagacctcatgttagtgatttaactggttcattcagattatacaagactgacgtgttgaaaaaaatcattgacgtcactcaatcaaaaggttatgtttttcaaatggaaatgatggttagagcaaaggcaatggggttcacagttggtgaagtgccaatcagttttgttgatagattgtacggagaatcaaaattaggtggtgatgaaattgttcaatatgccaaaggtgtttggactttgtttacaagtgtttaa

SEQ ID NO: 6493 - DNA, 1239 bp, Candida albicans
atgagtgaaagtgacgaaaccaaatcgatatcatctttaatatcttcttcttcttcatcacgtcccaaaaagtatatttgcacatatgaagggtgtgataaagcctataatcgaccatcattattggagcaacatttaagaacccacagtaatgatcgaccgtataaatgtacagtggaggattgtgataaagcatttttcagaaaatcacatttggaaacacatattgtatcacattccgaaaaaaaaccattccattgttcagtgtgtggtaaaggggttaattctcgacaacacttgaaaagacatgaaatcacccatacaaagtcatttaaatgtacatttgaaaattgtcaagaagcattttataaacatcaatctttaagacatcatatattatctgttcatgaaaaaacattaacgtgtaaacaatgtaataaagttttcactcgaccttcaaaattagcacaacataaattaaaacatcatggtggatctcctgcttatcaatgtgatcatcctggttgttttaaaaatttccaaacttggtcagtattacaatttcatataaaacaactgcatccaaaacttaaatgtcctaaatgtggtaaaggttgtgttgggaaaaaaggtttatcttcacatatgttaagtcatgatgattctaccatgatcaaaatatggacttgtgattattgtgatgtggggaaatttgcaaagaaaaatgaattagttgaacattataatatcttccatgatggtaatatccctgatgatttattaaaggaaactgaagtgaaaaaattagagaacctattagatcaaggatcgaaattaaataatttgcatgaattagaaacagagaaattaaaagtggaagaagatgaagaagatgaagaagatagtctagatgaaaaaagaagtgatgttagatcagactcaatgtcagctcaaagatcaataaaatcatttactgcttctttggaaggttcaaagagtgtttctaaacttattctgaatagtgggaagaagatcaattgtcctaagaataattgtgatagaatgttttctagagaatatgatttacgtcgacatttgaaatggcatgatgataatttacaaagaattgagtcattcttaaatagtatagaaaaagaagaaactccagaaggtgaaccattggttaaaaaagccaggatggatttattgccaaatgaaacatcagtgatttctcgataa

SEQ ID NO: 6494 - DNA, 474 bp, Candida albicans
atgtctgattacgaagataatgcttttaatgaagtagctgaaaattttgaagattttgatgctccagaccatttttctgataatgaatatgacgatccatcagcaaatggtggtgatgccgctttaaaaaccactgatggaagaacaattataaatggtggatttggacctgatgatgctcaagcagctggtcaaccaagaaagaaaaccactaaagaattggctattccaaaggaaaagagaactaccactccgtatatgaccaaatacgaaagagcaagaatattgggaactagagctttacaaatttcattgaatgctccagtattggttgatattgaaggtgaaactgatccactacaaatagctatgaaagaattggcacaaagaaaaatacctttggtgataagaagatatttacctgatggatcttacgaagattggggttgtgatgaattaattgttgatcaataa

SEQ ID NO: 6495 - DNA, 750 bp, Candida albicans
atgtcagctgaagccccaaaaagacaatttggtgatagaagaagaggtggtagaagaggtggtagaagagatggtgaagaaaaaggttggactccagtcaccaagttaggtagattagtcaaagctggtaaaatcaccagtgttgaacaaatctacttgcactctttgccagtcaaggaataccaaatcattgatttgttattgccagacttgaaagatgatgtcatgaagatcagatctgtccaaaaacaaaccagagctggtcaaagaaccagaatgaaggctgttgtcgtcattggtgactctaacggtcacgttggtttgggtatcaagaccgctaaagaagttgcttctgccattaaagctgctattgttattgccaaattatccatcatcccaatcagaagaggttactggggttctaacttgggtcaaccacactctttgccatgtaaagtcactggtaaatgtggttccgttgccgttagattaatcccagccccaagaggtaaaggtattgttgcttctccagttgtcaagagattaatgcaattggctggtgttgaagatgtctatacttcctcttctggttctaccagaactaccgaaaacaccttgaaagctgcctttgctgctatcggtaacacttacagtttcttgactccaaacttgtgggctgaaactccattagctgcttctccattggaagtttacgctgaagaagcttctgctggtaaaaagagatactaa

SEQ ID NO: 6496 - DNA, 2043 bp, Candida albicans
atggcattagacaaattagatttatacgttatcgtgacattggtggttgcagtagcagcatactttgccaagaaccaattccttagcaaaccacaagacactggatttctttccaatgatggtgctggtggaagttcaaggaacatattggagacgttgaagaagaataataaaaacacgttattactatttggatcacaaactggtactgctgaagattatgccaataaattgtctcgtgaattgcattccagatttgggttgaacaccatggttgccgattttgctgattatgattttgataattttggagatatcacagacgatatattggtgtttttcattgtcgctacttatggtgaaggggaacctactgataacgccgacgaattccacacttggttaaccgatgaagctgatactttgagtactttgagatttactgttttcggattaggtaactccacttatgagttttataacgccattggtagaaaatttgaccaattattggaagaaaaaggaggtgaaagatttgctgaatatggtgaaggtgatgacggtactggtactttggacgaagatttcttatcttggaaagatggtgtttttgattcattgaagaataatttgaattacgaagaaaaagagttgaaatatgaaccaaatgtcaaattgactgaacgtgacgatttaactgttgacgactctcatgtttcccttggtgaaccaaataaaaagtatattaactctcaaggcgttgatttaagcaaaggtccatttgatcacacacacccatatttagccaagataacgaaaacaaaggaattattcaattctaaagatagaaattgtgtccatgttgaatttgatatttctgactccaacttgaaatacagcactggtgatcatttagctgtttggccatctaattccgatgaaaatatcaaacaattccttaaatgttttggtttagaagacaaggaaaacaccgttatagaattgaaggcattagactccacttattccattccattcccaagcccaattacctatggtgctgttatcagacatcatttggaaatttctggaccaatttcgagacaattattcttatccattgccgggtttgccccaaatgaagagacaaaggctacattaactagaatcggtaacgataaacaagagtttgcttctacaattacccgtagaaagtttaatattgccgatgcattgttgtttgcttccaaaggtaaagcttgggttgatgttccatttgaatttattattgaaaatgttcaacatttgacacctcgttactactcgatttcttcttcatctttaagtgaaaaacaattgatcaatattactgctgttgttgaagctgaagttgaaagtgacggtagagctgttactggggttgttactaatttattgaaaaacattgagattgaacaaaataacaccaacgaaaccccagtagttcattatgatttgaatggtccaagaaacaaatttagcaagtttaaattacctgttcacgttagaagatccaatttcaaattaccaaagaatactaccactcctgttattttgattggaccaggaactggtgttgctccgttgagaggattcgttagagaaagagtccaacaagttaagaatggcgtgaatgttggtaaaactattttattctatggttgcagaaacgaacatgatgatttcttgtataaacaagaatggtctgaatatgctagtgtattaggtgacaaatttgaaatgttcaatgccttttcaagacaagatccatcgaagaaagtatatgtacaagataaaattgtggaaaattacaaaattgttaatgaattgttaaacaatggtgccactatctacgtttgtggtgatgccagtagaatggcaagagatgttcaagcagcaattgctaaaattgttgccaaagatagagatatctcacaagaaagtgctactgaattggtcaaatcttggaaagtacaaaacagatatcaagaagatgtttggtaa

SEQ ID NO: 6497 - DNA, 477 bp, Candida albicans
atggtatctgaagattggagaagcatagatattgatgcattagaaccagacgcccatttaacaaaggaagacttgcttccaactgatattcctccaactaccaatgaacaagtccaacaagttgccaatcaaatccgatctaatttatcatcaggacagtttcaacaagcattgagcttggcattagacaatgttccgtatgtggctgacctgagtacaaaagaattacattcaaagactgtatttgaagtgttgtgttcaattcgtaataataacaatttgaatgatttgactggattcgtcaaatcgttgagtagtgaacaacaagatgttttggtcaaatatttatataataacatgtcaagtccttatggtcagaagcaaggtggattgttattgaattggtttgagaagacaattgaggtgactggtgttggttctattgcccgatacttgactgacagaagaactgtttaa

SEQ ID NO: 6498 - DNA, 2322 bp, Candida albicans
atgccagaatataccaactttgagagcaagtttgatgacattgacatgcttgaaatacctgaggatgatgatggggaaaacagcattgataactcaatttcatctgaaactgaaggtatttctgattcttccgactcaagcaaaagcagttacgaccaatggagtccagtagcaatattcaaatcagataaggagtacattgacttatcagactggttgaacactcaaaaatctttagaatttaagtttgatgttcaaaagtataggaagggaatagaaaaatctagaccatttgatgagaaatatatcttgtacgtcaacaacatgttcaaaatcattcaaaaacttactgaggatgacatcactagatttgacttggaggaagacgattctcctataggcttggttatggatctgatgggatcaaaggccaaacaggtgcggaaattcaaaaagattgatgaagcattgagagagataattgattatttgcaagatttggtaaattctataccgaaggaggaacaagaatcttatgattcccaatgtttacaacatgtgttatatattttagaatgttttgaagccaacaatttctattttgatatccagcaaaaaccggaattgattatcaagtgggtaaatacttttgatcccaaaccggacccagaattgttgaatgacgttattgtgaacacaccacaaccttatttgcatcctcggttttggaacacttgtatatctcagcttcttacaagaggattgtttactcagattcacgaagtaattgagcattcacagtaccaggaattaaaggaaaagtgtccggaattgtatgctgtgattggtgacatggatactttgttatcgaattacacttcctactcctccaaaggacaatttaccgcatggaagcttttggcatgtgaattccgcgattctttgtcatcagtgagaaatgaaagtatcaccgaaactaagcacaaattgattatagatcaaatttacgatttggcatgcatttttacaggattacctaaaactatttctagctattgcgatacatggtatgaagtgtatttggcattatcgttgtaccaagtacgagacagcaacgaagtttatattgattactttaaaacagctgtttccgaaaagccgccttcggacatatttgatgacgaaaacgagaacttagacgggttaaccgaagcatgctttttgaatattttggaaaataactttttgaaagttttagaaactttacatgagttggatcctccaacaacagcttatttggccgagctaatggaattgaggtttttacttagaggctactacttcgatgtcactgtgacctcttcagcaagttttgaagatttacttaataggaggatagtatctgagtacttcttaactagacatgcatacgactgtttaaatattcatgaattggtaccagtgggtattggtcttctattgaataacgtagtatgcacgtccaacaatgctgtttctgccaacagaaaagttatcgcgacatttttacccaactatatctgtaatactaatgatgatcttgaatgggccttgactatatgtgccaatttgaatttggtgtcgacggctagacaattgtactatcaggctggtttgaagtctttggaagaaggttacatgtacgaagcattgaataattttgtcaattgctacgatccaacattattgagtggtgaaaatcacagtgaaggtatgaagaaagtgcattatattgtgtgggatttaatatttgcaaattgtcttgttcataaccgaccaataaaggatgaactaatcaacaacatcgttgacaagaaagttgatcttaatttcaaaatacaccctgtcattcaacaatgtcttgctccatatgctgtattgaaggagttttatgaaacattaccacaaagggatataaagctctctaataaactttcgaaattgattcatctattaaaattcaactacttgccaaaaaaatttgttccattgttactatcacaatctattccgtttttaagtgaaccaaacacagctttccagttgcctgatttggttattattattgaattgcttgacaactacgaaagcgatagaaatgagaaagaacttaaagagggtgccgatttgtatttgtactcaattaataatattgagtcagatgctgatgaaaacgactggcgaaaactagtgggtaaagacaatttgccaaaagatattgatctgttcacaagattgttgagaaacctaattgcagcaaaggttggtaaagtgtttatatag

SEQ ID NO: 6499 - DNA, 372 bp, Candida albicans
atgtcggtagttggatctttaatattttgtaactattgtggtaatttactagattctcatagctcatcatctgaaataaaatgtacagtctgttcagcagcttatcccaaatcaagatttgctaacttaaaggtcgtgacaaaatcatcagacgatgccttcccatcgaaattaaaactggctagatccgtagtgaagacttcgttaaagaaggatgaactagacgaaggtgcaacaattaaagaaaaatgtcctaaatgtgggaatgaagaaatgcaatatcatactttacaattaagatctgcagatgaaggtgctacagtgttttatacatgcaccaactgtgggtaccgtttcagaactaacaattag

SEQ ID NO: 6500 - DNA, 1209 bp, Candida albicans
atgaattattctactgaaaatgtatcatctgccgctttgagaaagagaaaaacattgaagaaatcaatcaacttctccatcatgataattggcgagagtggttcaggtagatcaacattaataaacactttgtgtggtggtaactcaatagtccctacttccctgacagctacacaggacccattcaccaagaaattgactttgagacatgaaaacgtcgagttggaagataatgagggccacaagatatcccttaatatcatcgacacgcctaactttgccaacctgatcaactgtgacgacgacttcaagatcattgttgactttataagacaccagtttgatgaggtattattggaagaaagcagagtcaagagaaaccccaggttcaaggacggcagaatccatgttttgatctatatgattaaccctactggtcatgggttatctgatatcgacgtaaagtttttgcaacacgtcaacaacttggtcaacattatccctattatatccaaagccgactcgttaacgcctaaggaattgaaattgaacaaggagttaatcttggaggacttgaacaactacggaatcaacttttacaagttcaacgaatacgactacgagcaggactatatcgacgaagagattatcgaatacaacaagtacttgaactcgttgatcccatttgccattattggcgctaacgagtacagatctaaccccaacggcagcgaggacgaggacgatatcttgaaattgagaatattaaacaaggactttaagcctatcgatatcgacaatgccgagatcaacgatttcacaatcttgaaaaatgtcttgttggttacccacttgaacgaatttaaagacatcacccacgactcgatctacgaaaactacagaaccgaagccttgctgggtaaacagttccaatacgtcaacaaggatagtgcaaaacaggaaatcagcgaatccgactaccttatgaaagaagaacaaatcaagttggaggaagagagattaagaaagttcgaagagcgtgttcaccaagacttgataaacaagagaaaagagttgttggaaagagaaaacgaattaaaggaaatcgaaaagagattgttggccgaagggttaaagtttgatgaaaatggtgatgtagttaaagtacacgaagaggagtcttcagaaaatgaagtaaaagtaatctaa

SEQ ID NO: 6501 - DNA, 522 bp, Candida albicans
atgtcacaatcattaaaaccttatcttacggccgttcgagcatcacttaccgctgctatatgtttagaagatttttcttctcaattaattgaaagacataatcgaccagaaatagaggttgattccaaatcatgccataatcccgaattaattttaaatcccatgattattgctcgtaatgaaaatgaaaaaattttaattgaatcaagtataaattcaattcgaattctgattaaaattaaacaagctgatgaaattgaaaatattttagttcataaatttactagatttttaactagtagagcagaaaatttttttatattaagaagaactccgataaagggatatgatatatcatttttaattacaaattttcatactgaacaaatggttaaagataaattagttgattttattattgaatttatggaagatgttgataaagaaattagtgaaatgaaattatttttgaatgcaagagctagaattgttgctgaatcatttttgattccctttgattaa

SEQ ID NO: 6502 - DNA, 1839 bp, Candida albicans
atgatttcttcaagtgcttgggttccaaggggttttgctgcagaattcccagagaaatatgaattagatgatgaagaaatggaaagaatcaatgccatggccaatttagaacttaatgatgccaaagaacaattagcagaagcagaaggtgaagaagaaacagaagacaatgattcggggaatgccccaaaaacatctaaattagttgaacaaattgaaatagatgatgatttaaaagaatatgatttagaaaattatgataatgatgaagaccaggatgatggaaataatttaggaaatactaaaatctccatgttcccaggtttatccaatactgatgctaaattattacaagatgaaagtggagaaggtgataaatatttatctttaccaactgaactagatgaacaagaagaaaagaaagaaaatcaaatttatccaactgataatttagttttagctactagaactgaagatgatatatcttggttggatatttatatttatgatgatggtgctggtgctccaattggtgctgaagaagaagaagaagataaactagacattgatgttgccaatggtatgattagagaatcaaatttgtatgtacaccatgatatcatgttacctgctttcccattatgtgttgaatggattaattataaaccaggtcaagaatcatcaaatattggtaattttgctgctattggtacttttgaccctcaaattgaagtttggaatttagattttgttgataaagcattccctgatgttattttgggtgaaccaaataaaaattcattcatagctaaaaagaataaaaaatccaaaaaaaagaaaaagggtggtcaacatattactactcatcatgtcgatgcagttttatccttgtcacataataaaatccatagatcaatattggcatcgacatctgctgataaaactgtgaaattatgggatttgaacagtgctactgctgtttgttcgtttgataaaattcatcataataaaactgtttcatcttctcaatggcattcacaagaagcatctattttattgacaggtgggtatgattctactgctgctgtcactgatgtaagaatatctgcatctgaaagttcatcatcatcagattcttctaaacattattccgtggttgcaggagaagaagttgaaaatgttagatgggatctttctaaaccagaattattttatgccggtactgataatggtaatgtatacagttttgatatcagacaggattctaagccattatggactttacatgctcatgatgccggaatttcttcattggacgttaataattatgttccaggtatgttgattactagtgccatgggtgaaaaagtagtcaaactttggaaatgcccttcatcgtctgatgaaaataacaccaccaaaaaacaaggtccttccatggttttgtcgagagattttggtgttggtaacgtgttaaccacaagttatgctcctgatattgaagttgctggtaatgtagtcattggtggtataacaggaggattgaaaatgtgggatgcattcagtaatagctcagttagaaatgggtttagagaagaattaaaagtattacaaaataatgctagacaagaagcaaagaaaaatggacgtgcttctcgaattgctagaaaatataacagcaatagtaataaagaagaaatcatgactgttgaagccggtggtttgaaagatgaatcggattctgatagtgatgaaggtgaagatgtacctatagaaatgcaagaagaagaagaagatgatgatgatgatgatgacatgtcagatgatgatgaaaattaa

SEQ ID NO: 6503 - DNA, 3519 bp, Candida albicans
atggattttagcctctcatcatattttaacgcgtttgatgttgataaggattatcaaatagagttttctgacgtggattccaaattagaatcaattacagattcattggcaaacaatccagaatccctaaattttaaccaggaattattggaagatcttattgagttgacacatgggtttagagaattagaagagaaaaagcgtcatcagctagcgtatcttgttacttcttctttgaatgcagtggggcaatcatatggtaacatgttccaaagtggtgattttcatgataatgttgatacaatcaaatcaactttagagaggtatggttatttgatgtttgttcttttgaaatatctcgggaaagaggatttctcacaagttggtaatgcaagatcgcagaaatctgtacctcgagaagtctcggctaggtggaaatcaaattgtaccgaagtcgagaacggtttaactgctgtaataactgttttgagccttgatttaagtaaagtatttgttacaacccctgagagagattcatttgtggaattgttttcacgaccgataatcaatttgatggagagccccgagagaatgaagttggttcctataaaattattgattttcagggccttgtgtattgcggtcaccaaacataaacatggatcgatgcttcagcactccattattcaatgtcttacgtactatgctcatttgccacagtatatggcaggattactacatacattaactgaaaaatacgattatatggttttaactgaagaaatcttacgagagatttcgcaaacgcatttcaactcaaacgatacaaatggtccaaaagcagtatctgaatttcttatcaagctatcagagttgagtccaaggttgattttgcgtcagatgacaagtatctcccagttattggataatagtaatcaaacgttaagatgctctgtagtcgaagcatgcggtaatattgttgttgatattctaaagaacagtactagagatcaaggtgaggatgaagacgcagactattatagacaccaggttgccaaactcttgaatttgttggaagagagattcttggaccagaatccctatgtgcgtacaaaagcgttccaagcattgtctaaagttgctgatctaaaagtcaaattgactgaacgaagacagaaaatgatgatgttggcggtaaggtcacttgaagatagaagtactttggttagaagaaatgcgattaaattgatgtctaaattgatacttaatcaccaatttcaaggttcacatggaactcagttggcattgacattctggaaacaaaaattaaaagatgcagaagctgaattaatgaaatatatacctgcagatgtccaagctgggcctgaacagcaatccgatactagtgacgttgaagatgatggagatgaactggataaagtagaacaagagaataatttgaacggacaagcagaagccactaagaaagatgaaccaactatggatattgacaaagaggatgtcctggaagaaggtgaccgtgaaggtgaaagtgatattgtcgctaacacatcatctttcaatgataatttacctgatgcaactgtcttggcaagggtcaaattaacagccaattattataaagatgctgtggattttgttgaagctgtccaacatggaaccgacgttatttctgggttattattttcaaagaatagaaatgaggcgatagatgctatggatttcctagttttagcagatgcgtacggagttgaaaactcccatgttggtattagaaagatgcttcatttggtttggatgaaagggtcttctgatgaaggaaaatcagtacctgctcatctcattgattgctacaaatcattgtccttgatagctccaaattctgccagcaagattgagaaagctacttatattgccaagaatttgattggtttgacattgaaagcgtctgtagctgatttggcttcgttagagaagttgttgggtctcatgtatgcggcaatgatgatcaattttgaagtcatcaacgtattgtggcaaatctataaccttagtgatcgcagtgaggaggtgaggagacagaaacgaggagccattattattttggggatgctttctcttgaagacaatcaaattgctattaaaggatttgactccttattgaatattggattgggcgatgaaggtaaagatgatttgatccttggtaggtatacatgtattgcgttacaacgtgttataccagcagatgcaaagaagaattctactatggtcaaaataccaagagaagaagaagctataactaaatttaaacaaattttaattgactacaatgaaaacccagaatggtattctattagcgaagaaacgattgatgcaatttttcaactctcgtcggagccagacagggtttgttcggatgtcatcaaaactaaagcagttgctgttttcggtgacaatagagcttctgtggaaaatccggatgttgcattatctcagttgttatttattgttgggcatgtagccattaagacaattgttttcctagaaaaacttgaaggtcaattcaaaaagaaaaaacatgaagctgaatctaaaaagggtaccgcaaattccaacaatagtagtactgctgcagatgctcaagaagaagcagagggagagaacgaattggaaatgattggaggtacttctgaagatgattttgctgatgctgttgtgcatgttaaagaacgagaattactctatggcgactattcattattgggcagatttggacctttggtgaaagaaatttgtgcacaccccaaacagttttcaaacttgaggttacagcgttctgctgtgctttgtttgactaaattgatgtgtgtttcatcaatatattgtgaggaaaatttaccactattacttcaaattatggaaaaatcagatgatcctgtcacccgatgcaactgtgtacttggtttgggagatgtggcagtttgtttcaataacattgttgatgaaaacacggaatacatatacagtcgtcttacagatgagaatattatggtgcaaagaacatgtttgatgacagtcacatttttaattctcgctggtcaagtgaaggtaaagggtcaattgtcatctatggccaagtgtttggagaatccagatcaaagtataagtgatatgtgtagattattctttgcagaattggctaccaaggacaatgcaatttacaatggatttattgatattttcagtgggttgtctaacgatgaaactttggctaaagatgagatgaaaaggattatacgtttcttggttgggtttatcgataaagaaaagcatcagaagcaattggcagaaaagttgttggcaaggttgccaaaatgtcaactggaaaatcaatggcaagatgtggcttttgtgttgcaaaccataccctacaaaaacgatgctatcactgctgccttggaagaaggatttaccttggttctggccaaacattag

SEQ ID NO: 6504 - DNA, 1041 bp, Candida albicans
atgttacatattgaacaaaataatttattaattgagaaaactttaacggaaagattatttcctaatccatctgaaagttcattgaaatccttagatagaattgtgtctgattttgatttcactacatttcatttactgacattacccggggagaaacatttattattaatatctctttcattaagatgttggccagatttagttaaacatgatgttgtcaaatatcttaatgataaatatcaaccattcaatgaagtattgacaatattatctactaatgatgttgaacaaggttatgattattcattagttttagatacttcaactgctacaacttcttcgaattacgacgaagattttaaattacaattgattaaagaattatcaaatttgaaaagaaatgccatggcagctccatttgaacaagcatttaatagatatgatgaattactgaaaaaatatgctaatgctaatacttattcagaagaaattcaacaagaattatttaatgaaccagtatcagtaattaaatatcgtggaattgatgaatgcatttatttaaaaccatcatttgatagagtaacggtgattttctcgaccgtgttccaagatgaaactgataaaatctttggtaaagtttttttacaagaatttgttgatgctaggaaaagatcagttcaaactgctcctcaagtattatattctcatatcgaaccaccattagatattcaaagtgtcactactactactaatactaccaataagaaagataattatggatatgtgacatttgttttattccctcgtcatcttgttttaaacaaacgagaaaattgtatttctcatattgaattatttagaagttatttccattatcatatcaaatgctcaaaagcttatatgcattcaagaatgagatttagagttaaagaatatttgaaaatattgaatcgtgctaaaccagaaaatcttgatgatgaaggtaaagttattgaaaatagaaaaaccgctagtggtagaagatttgatattagagcgtaa

SEQ ID NO: 6505 - DNA, 1671 bp, Candida albicans
atggttttagcagatttaggatcaagattgaggggtgctttgtcatctgtggaatctggttctgatgacgagatccagcaaatgataaaagatatctgttcagcacttttagaatcagacgtcaatgttaaattagttgccaagttgagaggcaatatcaaaaataaaatcgacgaatccaatgtatctaaagaaacttcagctatgaataaacgtaaaaaattacaaaagatcattttcgacgaattgtgtgcgttagttgactccaatgtcgaacctccaaaaccaaagaaactttctacatcaaccaaaactatcaatgggaaaaaagtgagattgtcaaaagaatcaagtcacgttattatgtttgttggtttgcagggtgcgggtaaaaccacgtcatgtaccaaattggctgtctattataagaagaggggattcaaagttggtttagtgtgtgccgatactttcagagctggtgcttttgatcagttgaagcagaatgccataaaggcaaatataccttactatggttcgtatttggaaccagatccagttaagattgcatttgaaggggttcaaaaattcaaacaagagaaattcgatattataattgtcgatacttcaggaagacatagacaagaagaacaattgtttacagaaatggttcaaattggagaagctgtccaaccaacccaaaccataatggtgatggatggatctataggtcaggctgcagaatcacaagctcgtgcatttaaagaaagttctaattttgggtcaatcatattaaccaaaatggatggtcatgccaaaggaggtggtgctatttctgctgttgcagctacaaagacaccaattgtcttcataggtactggtgagcatgtgggtgatttagagattttcaaaccaaccacatttatttcaaaacttttaggtattggtgatattcaaggtttaattgaacatgttcagtcattgaatttgcaccaagacgaaggacataaacaaacaattgaacatataaaggaaggtaaattcacattgagagatttccaaaatcaaatgaacaatttcttgaaaatgggaccattaacaaatatagcatcgatgattcctggtctttccaatataatgtcacaagtgggagacgaagaaacatcgaaaaagatcaaaaatatgatttatatcatggattcaatgaccatcaaagaactagaaagtgatggtagaatattcataaaggaaccaagcagaatcgtcagagtagcgagaggttctgggtgtgctgttgtcgaagtggagatgatattacaacaacatagaatgatgtcaactatggccaaatctgccatggctgcacaaggtggtcaaccaggccaaccaggaaacccaatggccaacaatccacaaatgcaaagaatgatgcaacaggctcaatcaaacccaaattttatgcaacaagccatgaatatgttaggaggcgccggtggcggtgctggtggcgctgggggattagctggaatgatgaacaaccctgctatgatgcaacaagcacaacagatgatgagactgaatcctcaaatgatgcaacaggctcaacaaatgatgaaaaatccaggaatgatgcaaaagatgatgcaacagtttggtggtatgggtggtatgtaa

SEQ ID NO: 6506 - DNA, 450 bp, Candida albicans
atgtcggaatactcgggctccaactcagaagacttatccttacctaaggcaacagtgcaaaagataatcaatgagatcctaccaaaagatataggcattgccaaagaagcacgagaagcaataacagaatgcagcattgaattcataatgatgctatctacacaactgaatgatattgcagagaaagaagctaagaaaaccattgcatcagatcacgtagtaaaagcattggaagaattggatttcaaaatctatcttgatatcattaacaagatattggacgaacacaaagagctcttgaagggtaaagagaaaagaaacaacaaattccaaaactcggggttgacagaggaggaattgttgagacagcaagaagaattgtttaaaaagtcgagagctcgtttgcaaaaccaatcagggtcacttacagccaaacctgaacctaattag

SEQ ID NO: 6507 - DNA, 861 bp, Candida albicans
atggcatcttgtaatcttctagtcatacaaaccacatccataattatgtttagttcactactatcaaggccagtcaatagttcctacgatccgtcttatcatttttctcctgttactagagagattaaaaatgaccccacatcaaatggagttgtctcaaccacaaagaatgcaacacctcttgccccatcaaaatatgatacaactatccctttaaaaaaacgatatcctaatctagtacataatttccccaaaccagaattagatgagaatgtaatactagagactaaaaaaatcattgattccatattgaatccctctgatgagccaactaatgatattaattatatcaaatatgaaaatccaaatccaaatccaaatccaaatccaaatccaaatcaagaacaacaacaacaactgctgctgctgctgctgaaaataattcaaatcaaacaatttcaagaagatccaatgcttccaccaaaattcaaattacgtaagaatcgacatgaaaggatcattgaagatgttacatttgttaaagatctcaaaacgaaaaaattaactaaagaagatcgagaattttggaatataccagcagcagtatcaaattggaaaaattctcaaggttttactattggattagataaaagaatgattgggagagaacatgtacctatagaaatgaatattgaaaaatttaatgatttatcaacagcattatctgatgctgatttacaagctagagaagatcttaaacaacggaatgaaattcgtcaacagaaacaattacaagaaaaaagattacgtgatgaaaaaattaaagaaattgctaatcgttctaaaagaagacgatattaa

SEQ ID NO: 6508 - DNA, 2067 bp, Candida albicans
atgtcacactcaaatgctctaccaaatagtccattccggtcacctaaaaaacaacgtatggaggtcataggaccactcaatgcgtctcgtttttccttttcgccggtaaagacacctcctcatgggagagctggtctatcatctccagagaaaagattagtcaaagaccttgacaagtcggcgagaaaaagagccaacaatagcttatataaccgattaatggatgagtatctggacacagatgattatttggatgaacaagataggatattggccgacagaattatcaaacagtcgaggggagaacccgacgaagtcaattatggcagcgacgtggaattggaaattgatctaactcagcagagacgaacccgaagaagagaaaagaaagttgtttactcgagcgatagtagcaacgaatatgaggatacaggaatgccagaagaatcttcaagcgaggaagaagaggcagatgatgatgatggcaatgtggagtttgtttatggaccacccaaagaaagaaaaacgtcgttatcaagctcaccacccacagtcaagcctactgtgcgccgaaccaagcgaggtagaccaagcaagagtgagcttgttctgggtcaaatcaaaagtatattccatcaagatgacgtgttgttcagtacagatagaaaaacgttcacaccgactaaaccaaccgcagcgaaaaaaccagtcagcaattatttgacatctatttttgatcaaaatttcgatagaagcaaggtgccaagtctaagtggaattcccaaatcaaccaacacgcatgaagagaagaaaacgtttgtgccgcttcctattcccaccctcgatgctgacggaaatatcactgacaaggagtacatctccaaatactttgatggagttgaccctgcaaagttcaaagaaggcaggtttgtggacgaaaaagtattttacttagaagggccagaaggatactttgaacagcaaactaccagagttaaacaaagtggcaactctttaacagcattggcaccccagattgagtacaaagattttgccaggttagtaaagttgggcgacaacctcagtttccaacgcaaacgccaccttttcgaattgcacaagtatatctatcaccagtggtgttttgaaatgtcacaagggttcaatttgaatttctacggagtcggatccaaaatcgatctactccgagattttgccacaaactattttggcatctggtgggaaaatgtggtacacgccgatttgccaaaggttttggtggttaacggttttaaccctagcatcaatatcaaaaaactaattctcgaaatcgcttccatccttttgccaaacgaactgtacccaaaacatatagctggaacggttccctttgtggttgattatctaaacaaccatagactgccctgtggaagtatcggtttccataaacccaaaatcttgttgattattcacaatcttgatggggaagtttttagagtagacaagacacagacgcttttgtcgcaattaatgacactaccagaagtatgggccatgtcatctaccgaccacatcaatgcatcattgttatgggacctgtccaaagttaaaaacttgaatttcatctggcataatctcacaacatatgccacttaccaacgagaaacatctttccgagacgtgataagtttaggcaaatccaaaaaatttgtgggtggccttggtgccaagtatgtcttgcgctcgcttaccgacaatcaccgaaacctctaccgcgagctattgattgcacaattggataaaatggagaaagctgtcccatctgcttctggaagagtgggtttgaaaggtaatgccaaggttgctgttgacctaaaaagcctatacaatacatgtttggacgagttcattacttccaacgagatgaactttagaacattcttaaaagagtatgttgagcataaaatgtgtcagctagtaaaagatccttcaggagttgagaaggtattcattccgttcacatacgaagagatacaaaacatatataagcaagaatttgatgtatag

SEQ ID NO: 6509 - DNA, 645 bp, Candida albicans
atggatgataccgatagagctgtttctcgtttattcagaagttttaaaaccgttaaagaaatggttagagataggggatattatatatcacaagaagaacttgatatgacattagaagaatttcgatccaaaatttgtgattctatggggacaccacaacgtaaacaaatgtgtttccaagctactcctacagctgaaacattagaaaaatttcctgaaactggatcattatgggttgaattttgtgatgaagcatcagttggaattaaaactatgaggaatttttgtattcatattactgaaaaaaatttttcaacggggatttttatttatcaaaattcaatgactccaagtgctaataaattaatccctactgtatcaccagcaacaattgaaatttttcaagaaaatgatttaatcgttaatattactcatcatgaattagttcctaaacatttaaaattaaatcgtgaagaaaaaaaagaattattaactagatatagattaaaagaatcacaattaccaagaattcaacgagaagatcctgtagctagatatttaggtttaaaacgtggtgaaattgtgaaaattattagaagatcagaaacttctggtcgttatgcatcatatagaatttgtttataa

SEQ ID NO: 6510 - DNA, 2073 bp, Candida albicans
atgccacatgatttattatcacatgtggcgacgagtttttccctgcatcggtcgtcaccatcaagcaacaattcaaccaaacgacgtttagcattagaggacgacccaacagttctacccccggcattaagctcatatagcatacagtgtttgaatgaaagaaccaaaacttctacactaccatctcaaataacaggaaagtatgagttagatttcccagattcctccagtaaaagagacaatacattacgaaacaaactagctgcacattttacaaacgaatcaacccgatctcgtgaaatatctaattcatttacaaatttgtctgaagatagatcaagtataaatactgcagcgacaacaacaccaggcagcaaaacatttgaagacttgcgtagtaaacggaaaagaaggttcggcaaactgttgggaccccccaaaagaggtactgactttgttcaagaaagcacaccaattggagacgaactatcacctaaaattgaaagcaagtttaacattacaccgcaacacaaactgttgagtgaaataataccaaaggccccgtcgttagaaagattctcccctcttttgaagaaaaaccattcatccatagatgctgaggataccattacaaaacgaatcgaagcaagacgacgagagcaaatggaacaagagtttgtgaaaaaagaaaaggaaaacgaattggccgaattgaaaataaaaaaacttgaacaaatagcagcactacagtctccttacgaagaacataaatctaaagagttccaagaacccaaacaaagtcgtatgccactccgtgaaatacctgtcaacagtgctgttgatgttttccgcaaaccaaaagcccctaaatctgctatatccccctcacctaatgtgcaaagcaattccatgatacccccggcacaaccagtatttagaaatacgttacaagactttccaaaacctccccaacaacctcaagccagtagccaaaatcagcaacaagtattgccctctgcacctataccacccaaagctcattacgatagaccccagcattctggaaataaacgagcattaataataaatgataaactgtacgagaagttggaacttataggaaaaggaggatcatctaaagtataccgagtgagatccctcaataacaattgtgtctatgctctcaaaaaagttgaacttggtcaattcgaagatgtgagtggattcaaaggggaaattgatttacttacaaagctaaagtcatgtgaaagagtagtgactttggttgattatgccaccactgaaagttcgctttatcttataatggaaaaaggtgatcttgatttagccgaggttcttcaatatagattgaaattggatgctccgttggatttgaactttgttaaatatcacacaattgaaatgtttaaatgcataaaagatgttcacgatgctggcattgtacatagtgatttgaaaccagcgaattttttgtttgttaggggcatgttgaaaatcatagactttggtattgctaatgctgtacctgaccacaccataaatgtttacagagagaaccagattggtacacccaattacatggcacccgaagccatttgcgaatcaaattatacctcagcaagaatttggaaggtaggcaagccttcggatatatggtcaatcgggtgtattttgtatcaattcatatacgggaaggcaccttttgctggatattctggcaatcaaaaattgatggctataactaatccgcatataaagatttccttccccagtagtggcattggaaataccccggtgcctgttagtgctatcgaattgatgaaaaactgtttacaccgtgacccaaacgatagatggacaattgaacaatgtctaacttgtgactttctactgccaaaaatagttagcgagaattttattcgggaagttgttcaccaatctataaactacggttataatagtaggatttcgggtgacggtatgacaagtgatagatatgatgctttggttgactctgtaatgaaacaaatacaaaacttaaactacagctag

SEQ ID NO: 6511 - DNA, 765 bp, Candida albicans
atgccaaagtatcaaccaaaaaacggcgagttaaacccatatattcctcgatatatattagaaaccccaagatatcaacaagatatcatcaacaaatctcctgaacaagaagatgcccaagaccaaacaacaacagcacatgatccattagcacatcaacggaaaacgggagaaataatcgataatagtatagcacaatcggggacaggcattaaagatgaatttaaaggtacaataagagtagaagaaaatgaaagttatgatagtaaacgagatcgatggtatgggtattcaactgaagaatggctaacgcatttgaaaaattggaatgacaaaaagcaatctcgaaaacatgcctcagcccaagataatgatgattcagatgatactgattatgaattggaattaattgaattagagttggataaaaaagatatgaagaaaaatatcaaaaaagatcccatggagaaaatgcttagagatagacaagatataccagcgtatatttataatatcacttctaaccctaacaataaaataagaattgaatacgaccctaaatctagattagctaaagactcagcaaaggggttcttaaataagagaaatcaatttgtgaaaaaattaaccggtgatggtgatgagttgatgaaactacagaaaatggcccaagagcttgataatgagcacgaaaaggatcggaaattggctaaattgaaacaagattttatggtgaagaaatccgaaaaccgttccacaaactga

SEQ ID NO: 6512 - DNA, 1182 bp, Candida albicans
atgtcactaataaataagcaatggtcgagtatatcgacagaactagtccaggacccgcaaaattttgaactctggcagagcttgatcgaagcagctgaatggaatgaaaaacgaggcattaacaaatcaactagcgaggaagaattgaacgtcttaagaacatcttataattcatttttagagaaatttccattccaattcaaatattggattcgatatgctgagtgggaatttaaattgggaaacacatctactgcagaacagatttacttacgagggttgaatacccaattaagccattgtattgagttatggatttcctatttgaacttcaaaatcaacaccataaacgataacatttcagaaattttacagaaatttgaagctgcacgagatttgattgggttccatttctttgggtttgaattttatgaattgtatttatcgtttttggacaattataaaaatgataacaatgaatttgagaagaaatactacattctattaagaatcatacttgaaatacctatttaccactatggaattttctacaagaaatggtttgatctaatagataatttgtcgaaagacgaaaaactagctaaacaaattgcaccatatattgcccccgccaacgaaattgctacccttgcatcgaaaaagaacacctcgatcttcaacgaattgaaaaaacgattcaccgatgcttacatagcaacacaatatcatagtttcgagttatacgaatttgaaaaaaaattgatacccaagaacaataagaatccacaacaagataatgatttgagatcacgacaggaacttgatgcctggatgagctatattgattatcttgagataaaacaatacccgattaaatttatcgaattggtatattacaggtttttatataatgccagaaactatccacaaacctggagtaaatttgctgattactatatatatcatgcaaaatttaacaaggcaagaaaaattttgaccgatggagtaaaatatgttgatgattataagttattgataaaattggttgatctagaaatctttttgaaaaactatcaacgagctataaacttattgataagttacattcaatacaattctaatgttccaattccaatacgtgataaagttcatcaagttaaacaattaatagatcaaaaatga

SEQ ID NO: 6513 - DNA, 1152 bp, Candida albicans
atggttcaattactacactctatcaaggcacacaatgataaggtttggagtgtttctgtccatccaacattaccaataattgccacagcatctaccgacaaatcaacaaaactatacaaactttccgcaaggcagaaattcccattagttgccaaattagaagatactcacaaaagatcaatacgctctgttgcatttaaacctccattaggtggtgctgatactcctaaactggatttcttggatttgccggcattagcagctggttcttttgattccacaattagtgtatggggtattgatgagcccgacgttgaatatgacattgaagaagttattgctaatcaaaaggaaattcttactagtcctaataatgaatggaatttaatggcaattatagaaggtcatgaaaatgaagtgaaagccgttgattggaattttcaaggtcaatatttagcttcttgttcaagagataaatcagtttggatatgggaaactgatccggaaactttagaagaatttgaatgtgtggcagtattgaatgatcattcacaagatgtgaaaaatgtttcttggcatccatcaatgaatatattggccagttcttcttatgatgatactattagaatctatcaacaagacattgctggggatgaatggtcatgtgttggtattttaaatggacatgaaggtactgtttggtgttctaaatttgaaagtcttaaaagtccaattgctgattcaagtgttttaagattagtttctgctagtgatgatttgtcagtaagaatatgggtagcaaaaagagagcaagaagacgaagaacaagctaagttggaacttccaagttcgattagacacacaaacgaaatggtatgggaagtagaatctgttttgccttctgttcacaagtatccggtttattctgtggcgtggtctgcattaactggtaaaattgctagtgctggctccgatgggaagattgttgtgtattcagaaactgaaaaagggaaatgggtgattgattctattcatgaaggtgcacatggagttcatgaaataaactgtgttatctgggcacaactagatgatgaaaatgaaatattggtgagtgccggagacgatggatatgtgaatttatggaaaatatag

SEQ ID NO: 6514 - DNA, 1143 bp, Candida albicans
atgttacaaacagctgaaggtatgtcaacagtttacccactcctagcaagttataacagtctgactaaccacattatagatgaccaattaaaagatatgtgtccgatttgtaagacggataaatatttgtcaccaaatatgaaattcttaattaatcctgaatgttatcataaaatatgtgaatcatgtgttgatagaatattttcattaggtccagcaccgtgtccatatcctaaatgtgggaaaatcttgagaaagaataaatttaaacaacaaatatttgaagatttaataattgaaaaagaaattgatattaggaaaaaagtatcagcaatatataataaaactgaagaagatttccctggagatttacaaggatataatcgatatcttgaaaatattgaggatataatatttaaattaagttatagtgatgataaacaagaaattgaaactgtggaaactgaattaaataataatgaacaagaacataaattagaaattttggaaagaaatatgagagaatcacaacgtaatgatgatttaatgaaatataaagaagctcgagaacgattaaaacaagaaaaattaaagattcaaaaacaaatggaattagaagatttagaatatcaacgagaacaacaacaagaattattagataaattaactaatagttcaactactagtgaagaattaattaaacaacaacaaaatcaaatgttaaaacgatcaaatcttcggaggaaacaattacaaactataaataatcaattggatcaacaatttaataaaattaatccatttgcaaaaaataatggggttgatagtgatgatgaacagaatggtggtggtggtggtgtaaatggttcatcaaaaattccatttacaccattccaaggtgatcgtgatttaaataaaggatatactatgttaccagtacctacagatgttgaatcaataatgaatattgaacaaaatatatctgatagttattatgatccatttattaataaattggccaaaaataaacaatatttaggtggtggttggagattacaaaatgttttccaacaagcattagatgaagcatttattggattaggttgtaatatagaactagaaaaagctaccaccatcacttaa

SEQ ID NO: 6515 - DNA, 2637 bp, Candida albicans
atggatgaacgatttttgaatccaccacctacagctgatcaagatgatactaatcagccacttgatgccatctttggtgatagagtcagaagatttcaagagtttttagatagaattgattctaatacaggtatagattacagatctattatcaaagatatgttgatcaagagtaagtttagattgagtgtttcaattgatgaaataagagagtttgacagagaattttggttggggttgctcaaccagccagctgactatttaccagcttgtgaaagagctttgagagacacagttttagctatttacgacccacaggatccaagtttcccacatgacagttatgaccctaaccagcaatactatttatcattcaagggagcatttgggggacattcgctcactcctagatcgattgattccagctatctttccaaaatggtttctattgaaggtattgtgactagagcttcattagttagaccaaaggttattagatcggttcattatgctgaaaaaactggtagattttatgcacgtgaataccgagaccaaacaacatcctttgatgcaattgctactccggctatatatccaactgaagatatggaaggtaataaattaaccacagagtatggttattcgacatacagagattaccagaagatctctgtacaagaaatgcctgaaacagctcctccaggtcaattgccaagatcggttgacgttattttggatgatgatttggtggatttgacaaaacccggtgatcgtgtacaaattgttggtgtttatcgtgccttaggaggtgctgcaaacaatagttcttctttcaaaacggttatcttaagtaattctgtttacttgttacatgccagatcaacaggggttgcttcacaagaaaagttaactgatcaagatattagaaatataaataaacttgcaaaggatagaaagatttttgatattttatcccgttctttggccccttcaatttatgggtttgactatattaagaaagctgttttacttatgatgatgggaggtgttgaaaaaaatttagataatggtacacatttgagaggtgacattaacattttgatggtgggtgacccatccactgccaaatctcaagtattacggtttgtgttgaacactgcttcattagctattgccactactggtagaggatcgtcaggtgtaggtttaacagctgctgttactaccgacaaggaaacaggagaaagaagattggaggctggtgcaatggtattggctgacagaggtattgtttgtattgatgaatttgataaaatgtcagatatcgaccgagtggccattcacgaagttatggaacaacaaactgtcactattgctaaagctggtattcacacctcattgaatgctcgttgttctgttattgctgccgcaaatccggtttttggacagtacgatgtccataaagatccacataaaaatattgccttgcccgattcattattgtctcgttttgatttgctctttgttgttacagatgatgtcaacccaacaagagacagggttatttctgagcatgttttaagaatgcacaggtttgttcctcctggattgatggagggagagccaatcagagaaaaatcagcagttacattggctgtcggagatgatgaaaccaatgaacaagaattattagaacagccaatgtttgaaaaatttaacacattattgcatgctggtattcaaaacaaaaagtcaaataatatactttcgattccattcttgaaaaaatatgtccagtacgccaagcaaagagtgcaaccagtgttgaccaagggtgcatccgactacattgttactacatattcctccttaagaaacgatttgataggcaacaaccaaagaaatacagctccaataactgctagaactttagaaactttgattcgtttagcaacagctcatgcaaaagtccgtttatccaaaaccgttgatgtgaaagatgcaaaagttgccgaagagctattgagatatgcattattcaaggaagtagccaaaaagacaaaaaagagacaaaaaactacaagtatagtggactcagaagaggaggaagaggatgagtctgatgcagaaatggaaaattccgataacgaaataatgcccagagaaagtactagaagaaccagagctacagcacaaacacagcctccacaacagcaacaagcatctccttcactaacacccgaaccgccacttggacatcgggacgatggagatgacgatggagttggtgaagaattagaacaattccatttgtcatcatctcagcaacaacagcaacaacaatatttgcaaccattgactgagagatcatcaagtaacattgtatcatctaccgccacaaatgcaatcagcgttgagagattgaatattttcaaaagaatactagcccaggtgtcacgttctgcattatttgccaatgatcaagctgcggcaaactatcatgacgttactcgtgctatcaatgaacagatggaacaagaagatattttctcagagcaagagttgagtgctggatttgaagtgatgagttctgaaaacaagttttacctagaaagtgataagatttggaagatttaa

SEQ ID NO: 6516 - DNA, 2991 bp, Candida albicans
atggcacaacctactacccaactcctatccatagtccagaaacatttggatcttcctcaagatgatgaaaatgtggtgctaattgcaaagttcttagtgaacttgcatggaaactcgacacttgaggagtttaaaaaagttgtcaaagaaaatggaggtgacgaatttgaagatgagtttataaaagaagtttacaacgaaatatcaccgccaccaccacaggtgggcaaaatatattctggtgtagtacaaagcgtgaccaactacggggcctttatcaagatagaaggtacatcgggtctatgccacatctcacaaatgtcatttgatggatcaagagttgagtctaccaacgtcctagcaccaaaccaaaaggtatttgtaaaggtcatcgacattcaaacgcatgccaatagaatatctttatcaatgcgaggaataaaccagaatactggacacgaagagcccatcccacaacggggaagataccaagaacgacagcccagaccaaaacgaaagttgacttctccagaacgttgggaaatacgccagctcatcagttccggcgcagtatctgcagacgactacccagagttggatcaggaagaagacacacaaacagaatcagaaaagacagataatttacacatcgaattgaacgataagaaacctgatttcttaaaaggtgtcaaagtcaccaaggactttcccgaaaccacccccattcccgtcaaccagctgggcccactaaccaaatcagcacagcgaggatccaagtttgccagagactttaaggaagaaaagtttaaacagaaaaagcaaagggaaaaagaagaaaaaatgcagtcggaattgtcagatccattatttcaaacatcagaaccggtaaagaactctgacctcgatccagatactgagtcattcatctcaaaatggaagaaatcaaacaagaccgaaacgtttgggaaacggacaagtcttccaatacaggaacagcgacgcatgttgcctgtgtatgccatgcgatcacaattacttgaggctatacgcgataaccagtttgtagttattgtcggagaaactggttcagggaaaaccacccaaattgttcaatacatctacgaagagggaatgaacaaggtcggtggacagaccaaattgatagggtgtacccaaccaagaagagttgctgcagagtcggtggcgaaaagggtgtcagaagaagttggctgcaagcttggagatactgttggttacaccattaggtttgaagatgtaaccagtgaaaacaccgtaatcaaatacatgaccgatggtatgttggaacgtgaggcattgaatgacccaaatatgaaccggtactcagtaatcatgctagatgaagcccacgaaagaaccattgccactgatgttttatttgcgttgttaaaaaatgccgccaaacaaaaccccaacttaaaagtaattgtcacttctgcaaccttggattcaaacaaattttcccgatactttaacaactgtccaattataaccattccaggaaggacgttcccggtagaggtattgtacaccaaggcaccagaaatggattaccttgctgcagcactagagtcagtcatacaaatccacgtttcagaacctgcgggcgatatcctagtattcctaactggtcaagaggaaatcgaaacaagctgtgaggcactacatgagagaatgaaattgttaggcgaaaatattcctgagctaattatccttcctgtatactcagcactcccttccgaaatgcaaacacgtatttttgagccaactccacctggttcaagaaaagtgatattggcaacaaacatcgctgagacgtcgatcactattgacggaatatactatgtcgttgacccggggtttgttaaaattaacatgtacgactccaaattgggtatggattcattgagggtaacaccaatcagcaaggcccaggcaaaccagcgtagtggtagagcagggagaactggtccggggaaatgttatagattatacaccgaacaagcatacgaaaaggaaatgataccaaacactatcccagaaatacagcgacaaaatttgtcgcacaccattttaatgttgaaggcaatgggcattcacgatctcgtaaactttgaattcatggacccaccatctaccaccaccatgcttactgcgctagaggatttgtatattcttgatgcattagacgacgatgggaacttgacaactttgggaagaaaaatggcagatttaccgatggagccggcactagccaaaacattgatccaatccgttgaatacgagtgcacggaagagatcttgagtattgttgccatgttgtcggtgcaaacaatattttatagacctaaagataaacaggcattggctgaccaacggaaaagtcggttccaccactctttgggagatcacttgacgttgctaaatgtatttcagctgtggtgccgcaacaactacagcaaaacatggtgtcgggacaatttcatacaggaaagaagtatgcgtcgagctatggaggtaagaaaacagttaaagctgattatgcagcggtttggatacaagaccatgtcgtgtggtaatgacgtggaccgggtaaggcggaccttctgctcagggtactttaaaaattcggccaaacggcaagaaggcgaagggtacaaaacattaaatgaaaacacattggtatatttgcacccgtcttcatctctctacggcaagaaaccacagtatgttatctaccatacattattgcttacatcaaaagagtatatgcattgtgtatcgatcatagaccccaactggctttacgaacttgcacccaaatactttagacccgcggatgctaaaaccgtgcaagaaatcaaaaagaaacaaaaaatagtgccgttattttctcgacaaaagaaagataattggcgactcagttcccatcgcccagctaaaagaagatag

SEQ ID NO: 6517 - DNA, 267 bp, Candida albicans
atggcgaattcaaaacaaattttactgttatacaaacaattattagaaaaagcatacaagtttgataactacaacttcaaggaatattccaagagaaaaatcgttgaaacatttaaggctaacaaatccctaacgaacgaaaatgaaataaaccagttttataacgaaggtataaatcaattagcattattgcatagacaaacgaccatttcccagttgtacacttttgacaaattggtggttgaaccattaaagaaacatcaataa

SEQ ID NO: 6518 - DNA, 5964 bp, Candida albicans
atgtctaacaatgttatacgacaacagagagatcgtaaccatgaagaagagattcccgccagctctatgactggtcgtatatcaaagagtgatatgagaagtaattacaagtcttcacctgcaccagcccagttgaataaaccaccacgcaaagaaccagaatcagaaccagtagacgaccaattatatgaactattcgtgactaaaatacggtcctacctacctgattcaagtcacgaagtcattcaatcagcatcagaagtggccagcgaacaattgagcaatcgtgatatatctgtcccagaaaagagaaaagaacttgaagaactattgaatgcatctatatctgatgatgaccttcatgaattgattaatttatccaactcaattgaatctgccaaacaaaatcatcaacaaggcaacggagatgacgaatttgttgccatcgactttaattcgtcagatgacgaggaacaggctatagaagcagagattgaagttgaagacgaaagcgacaaagaaacagacacggaagaacccacaagcaacgaacaccccaaagcatacgactggcattggcttcaacagatttctgaatttaaacattatgggtcacaagtatttgatcttttggctgacaaagatttggatctgctacagctagacagtaaactcaacgagttattggattccaaggggatggactttattgtcaaatgtattgaacatagatggcgtattgtattttccaagagattgcaaacagaaaacaaagaacctgtcataaaggaaatggaagaacttggtcttcattctttgatcaacgagttgcaccgcaaaagactgctagatgatgagactagcaacccacttaaacgacaaaaaaaggtaaaacgagtaccccaaaagattagccttgacagaattgtgttctctaccagtgttgaaaatgcccgtgtgactttaccagagggtaccattcacgaggttaaaaagtcttacgataccatcactgtcccagcaccagcacagtctttatccgacaatgatgaattgttgcctatttctactcttccagattgggcccaagaagctttccccaaaaccgaaaccactacatttaaccggattcaatcgaaaatatacaaccaggcatttgaaaccgacaataacttattaatttgtgctcccacgggtgctggtaaaacaaatgtggcaatgttaaccatactacgcactattgaaaacttccgtaacaatggccacattcaattgaaaaatttcaaaatcgtgtatattgccccgttgaaagcacttgtgcaagaacaaatgcgtgaattccaaagacgtcttacatcagtgtatggggttgttgttaacgagttgaccggtgacctgtctttgtcgaaacaacaaatagctgaaactcaaatcattgtcacaacgccagaaaagtgggatatcataaccagaaaagaccccagctatgtgaaattggtcaaactcatgatcattgatgaaatccatttattgcatgacgaaagaggtcctgttttagaaagtttggtcagcagagctataagaaaatctgaaactactggttccgatatcagaattgtcgggctttcggctactttgccaaactatgccgatgtcgcaaagtttatcagggcaaaacctgaagggttattttactttgacgctagttataggccatgtccattggaacaggtatacattggggtaaaggaacaaaaggctatcaaaagaattgctgccatgaacgaagcgtgctacgacagaatgcaccaaagtctacaagatcgtcatcaacttatcatttttgtccattccagaaaagagacattcaccactgcaaaatatttgatggagaaattagatatcgacatcgtggaacaagaaggtgtaaaagaaatattgaaacaggaaggtgagtcgatgtctaaccccaagttaaaagaggtcatacccagaggatttgggattcaccatgctggtttgaccaaaaaagataggggtgtggttgaagacttgtttgctcaaggttacttgcgtgttcttgtttctacggccactttggcgtggggtgttaaccttccagcacacactgtaattataaagggtacagaaacctactcaccagaaagtggggcctgggtccaattatcgcctcaggatattttgcaaatgttggggcgtgctggtagaccacgatacgacaagaatggtgaagggattatcattacatcacaagacgaggtccaatactacttggccattttgaatcagcagttacctattgaatcacaattgattcacaaattggtagataatattaatgcagaaattgttgctgggtcaatcaccactatcgaagaaggcatagagtggttgacttatacatatttttttgttagaatgttgcagtcgccagccttatacggtgttgaagccacatatgactttacgaatgacccaacactttacaaccgaagagctgatttgatatacactgcattttgtattttgcatgaaaacaagttggtcgtttataacgctgctttgggttcagtcgcctcaactgagttgggtaagattgcatcacatttctatatcaattttgaaacaataaatctatatgggaaaatgttgaaaccatggcacagtgaaaccgatattttgagtgtgttttcaaactcaggcgagttcaagtatgttcccgtgagacaggaagaaagattggaaataagcaagttgatggagaaatgtcctatcccaatcaaagaacaacccaatgaaccactagccaaaatcaacatacttttgcagacatttatttctcgattaagtctcgaaggatatgctttgattgccgacatgatatacattacccaatctgctggaagattgcttagagcgttatatgaaatagctttgttgcaaaaatggtcatcattagccaaaagtatcctcaatttgtgcaaaatggtagacaaacgattgtggctaaacaattcaccattgaggcaatttggtgatgtcgtccctcaccagatcattcgagcatcagagatgtcacatttgccatggattaggtattttcatttaaaccctgatgaacttgctgttgcgttaaatttaaagggaaatgcccaaatagctaaacagtatatcgattcttttcccaaagtatcaatccaatacatggttcaacctatcacagaacaatttctacgcatacaggttgaggtgattccagaatggtcttggattctggctattcacgggagccaagagattttcaatgtttttttggaaggttgtgatgggaataaactattgcatagcgaacaatttatcgtaaaacgcaaaaatattaacaaaccgcatattttggagttttttgtcccttttgttgcaccgcctttacccaattatattctatcgtttgtcagtgaaaaatgggtgcattgtacatggaaaagctctattttattgtctgacgtgatttctcccaaagtgtcacctcattacttggataacaatgtggatttagtacctacagaaacagtgggcgatttgtttccatttactcatttcaacaaattgcagtcgtcaacgtttgatacagtttacaacagcgaaaataatgtttttattggctcttccaaaggcgacgggaaaactgttttggccgagttggcaatattgaatcattggaataacaaaaaaggcagaatagtatacattaatccgtgccaggaacttgttgacaaattgtttaaaaaatggtccacattctttctgtcatatgagaaggaaatcaatgtgttaagtggtaacttgcgtgaagactcggcttctgtgaatcaaagccacttgattttggccacgcccgaacagtttaactgtttatcaaagcgttggaaaactagaaaggcgtttaggtctattgatttatttatctgggacgacttgcatttagttgggtcagatgttcactacgagatgcttgtcacaagagttcgtatgttaacctcacaatgggatgactataaactaagaattgttgctttgtcgagccctgtattaaacagtcgtgatattgcagaatggataggagtggcgaaactggaaacgtttaattttgctccacatagtcgcgaaaacagaatcaccgaaattaaactaagtgtcgaaagctccgacaatacagttaaaatttataaagatttggctaaagtgaatagtggtttgaggaacacgctaatctttgctccatcatatatccatgcctttgaaatggcacatagtatggtcgaaaataaccaagcacaagaatggagatcagttgatttattgaaattggaaaaatatatcctgaaaattcagaatcccttattgaagaacttgttacctaaaggaattgccgtattctattctggtatggcacgagtcgacagattgattgtggaaagattatttgaatccaagtccattggtgtattgttttgcaccatggatactagcaaatttgcaccaactgctaataacgtgtttgttgctgggacacgagtatatgatggccacgaacatcgattccttgattacccgcttaatgatttgtatgaaatggtaggctgttgtcaagatggcggagtggtccatatctatacaacttcgcagatggtcgaattctacagctcgtttttgaatctggggcttgcggtagagagcttgctctcaaactctttgcacgagtttttcatggacgctgttgccaatggtattattaaacaaagacaaaattgtattgatgtattgacattcacatttttttacagaagattgctaaaaaatccaagtttttatgacttgaaagaagtttcgaatagtggaatttcaacgtatttgtcagaattgatagaaagtgttttcgatgatttcaacaaggaagaatttattgaagaagaggacgaaggagataccatcagtccattgaataaaatcgttattgcttctcattacaacagtacttttgaaacagtatccaacttgagcaagctcagcaataaaagtaaattgaaagatattttccatgcgttgacaaatgcaactgaatttagtgacttacctgtacgtgaaggtgaagacgccttgttgattaaacttcaaactaaactaccaataaaatatagtcaagatgattatgaatcaccatttttcaaagcttttatactattgcaggcacatatatcacgaatcagtatcccctttgatttacgacaagatcagaaatctgttttgactagagttttacaaattttgaatgcagctatagacattttgtcaagtgatggctcgttgaatgttttattagccatggatttatcacagatgatagtgcaggctgtgtggagttctgacaacccattaagacaagttccgcgcttcaccaacgagattttagctagatgtactcagcacaatgtcgaaacagtatatgatataatgtcattggaagacgaagaacggaatgaaatcttgcaattgccagaccaagaattgaacgaagttgcatcgtttgtgaatctgtatcctaatattgaattactgtatgaaatgaagggcggggttacttctaacgaatcaaaatttgttaccgttacaatcgatagagacgaagagatcgagtcattagaagttgttaaaaatgaaaattttcctgttaccaagcaagagaattggtggattgttgttggcgatagtaagactcgtcatttatatggtataaagaaagtcaatattcaaaaaataagccagtctttcgaaatcgagtttactatcccaaacaaaggtaagcatgaattaacaatttatttgatctgtgattcatatctagacgctgataaagaaatggaattcgttatagatgtagtatag

SEQ ID NO: 6519 - DNA, 3516 bp, Candida albicans
atgaaagtcgatgaattgataatagatggatttaaatcttatgctgttcgtaccgtgatatccaattgggatgcacaatttaatgccataactggattaaatggatcagggaaatcaaatattttagatgccatatgttttgttttaggtatagcgtcaatgtcgactgtgagagcttctaatttacaggatttaatttataaacgaggtcaagctggtgttactaaagccagtgttactattgttttcaataatagtgaagtatcaaaatcacctattgggtttgaaaattgtcccacgattagtgtcacaagacaaattattcttggggggacatcgaaatatttaattaatggtcataaagctcaacaacaaaccgtattaaatttatttcaatcagtacaattaaatattaataatcccaattttctaattatgcaagggaaaatcactaaagtattaaatatgaaaccactggaaatattatcattaattgaagaagctgctggtacaagaacttttgaagaacggaaagataaagctcaaaaaaccatggccaagaaggaagcaaaattgacggaaattcgaaatttattatctgaagaaattgaacccaaattagaaaaacttcgtaatgaaaaacggaattttcttgaatttcaacaaacgcaaattgatttagaaaaattatcaagaattatcgctgcttgtgattatactttattatcgaaaaatttcactcatcattcgaaatttttaaatgatcatgaaaccaaaatgaataatttacatttagaagtggataaattgaatcatgaaattaaaaatttgaatgaagatttagatcaagttaaatcacgtaaggaagaaaatttgaaaactgatggatcgatgaaagaattagaaattaaagaaaatcaattatctaatgatttgacaagattgaatacggcaagagatattgctatggataatttaactgaagaaaaaaataaacacactaaactaattgaacaattggaacaaataaaacaacaattagctctgaatcaaactgttttcgataatcaagagaatgaatataaacaatcaaatcaagaattagtacaattaaaggaagaatatgctaataaacaagaattattatcaacattatctacggggatttcatcgactgggaatgtcacttctgggtatatcacccaattaaatgatgtgaaactgaaattaaatgcttcagaaaatttcattaaaacatcaactctcaagataaatcatcttcaacaacaaatggaaagtgatcaaatgaaattgactaaagcgaaaactgaaaatgaaacattattatctgccattgaacttcatcgtcaattcattaaaactaaacaattggaaattgattcaaaattaggatttgaaccaacgaaaatccatcaacttcgagatcaagaatcagaattaattagtcaacaaaataaatttaatcaacaattaaatcatatgagacgagaaattgggaatttagatttccaatataatcgaccttcacaggattttaatgatcaattagtaagaggtgttgtagctcaattgttcaatttaccagaaacttctcatgataaggcattagcattacaagtatgtgctggtggtagattatataatgttgttgttgataccagtgatgttgcttctcaattattagaaaaaggtcaattgaaacgaagagtaacaattataccattggataagatttcttcacgtaaattagatcatcaagtcattgattatgctaaacaagttgcaccggggaaagttgatcttgcccttaatttaattgattttgaagatgaattatacaaggcaatggaatatatttttggtacaacatttatttgtaatgatcctaattcagctaaagcagtgacgtttgatcctaaaattaaaagtcgatcaattacattagaaggtgatatatatgatccagaggggaatctttctggagggtctcgaagaaataattcgacaattttattaaaacttcaacaatataataaattaaccatacaattgaataaaattgaatttgaattacaaaatgtaaagcaagaattatcaagaatggattcattaattagttccacaagaactattcaaaatgaaatcaatttaaaacgacatgaattatctttattagagaagaaattggaaaataacccggcagcattaatattgaaacaaaatgatttaaatcaacaagaaattattagattaactgaagaaattgaaatcactaaagagaaatgtcgtcaatataaacaagaaatcgccattattgaaaaagatattgctgaatttaataatgataaaggatctaaaatcaattgtttgaaaaaagaagtggcccatttgaaacaacaagttatttccaaagaaaaacaattagaaaatcaaacggataaattccaagcagcacaaattgatagtgaacaattgaaaattgaattacaaaataaacaagaagcattaatatctaccaagaatcaaattgatgaattaactcacaagatcaaacaacaagatcaaaccaaagaacaattgattgaacaattaaccttggttaaatcagaattagatgatgctcgagctaatttattgggattagatgaagaaatcactgaattaactaatattgttaaattgaaaattgaaaaaatgacaatgacaaaattagatatacaaaaattaactcatgaattagaaaaatcacaaaatgtcaccaagaatttgaaaactagattagatgaaattataagtgaacatgaatgggtcatggataatcaaatggtgaataatatcatggatcaatatcctaacattgatattgaagaaactcgagaacaatgggaattattacaagagaaattctcaagtatgagacgcaaagtgaatgttaatattatgagtatgattgaaaatgttgagaagaaggaaacatcattgaaaaccatggttaaaaccattgaaaaagataaaaataaaattgttaataccataaataaattgaatggttataaacgtgatacattaaatactacttatcaaaaagtatctaaagattttggtgccatttttgcagatttattaccaggatcatttgctaaattagttcctatagatatgatggatgtaactaaaggtcttgaagttaaagttaaattaggtcaagtttggaaagaaagtttagtagaattatcaggtggtcaaagatctttaattgctctttcattaattatggcattattacaatttaaaccagcaccaatgtatatattagatgaagttgatgcagcattagatctttctcatactcaaaatattggtcatttgattaaaacaagatttaaaggatcacaatttattgttgtttcattaaaagaaggaatgtctactaatgctaatcgagtatttagaactagatttcaagatggtacatctatagtatctgttatgtaa

SEQ ID NO: 6520 - DNA, 1287 bp, Candida albicans
atgtcaaagcgacaagaaaacaagaagattgcatttattcatcctgatcttggaattggaggagcagaaagattagttgtcgatgcagctgttggattacaagattttggtcatgatattattatttatacatcacattgtgatttaacacattgttttgaagaagtcagttctggtcaattgaaagtttctgttcatggagattcattacctaccaatttatttggcaaacttcatattttttttgcaatattaagacagttttatttagtttgttggttaatattcactggcacaattaaaaattatgattattttattgttgatcaattatcattctgcatcccattattgaaaatgttttgtaattccaattgtcaagtattattttattgtcatttccctgatcaattactagttagaagaacaagctttttaaagaaattatatagagtaccctttgatgcaattgaagaatataccacggggtcaagtgatcagattgttgttaactcaaatttcactaaacaaattttccatgacacttttaagaaattaaaccatattgatcctcaagtggtttatccatgtgttgatactgaaactattgtcgatacaaacacatcatctaattcagaagtatcaaaatttttcaaagactcgccattttttttatcaattaatcgatttgaaagatccaaaaatattgaattagcaatcaaatcatttgctagaatgaataagttaatggttaccaataagaaaccaagattggtgattgctggtggatatgatagccgagtagctgaaaatgttgaatatcttgcagaattgtcaacgttatgtgatgaattgaatttgattaactttaccatcagaggtaaattgattatgatgccaccatctgtagatgtattgttcttaccatcaatttcaactcaacttaaaaactcattaatccaacagacagaattattgctttacactccaccaagagaacatttcggaatagtaccacttgaggcaatgttagccaaaactccagttttagcaattaattttggtggtccgttagagacagttgttaattataatggtaataatctcgatgaagcaactggttatactgaaacaggcgattttacaaaatggtcaaaaattatcatgaaacattataatttggatgaaagtactaaaattaaattgggtgaaaatggtcgtaatagagttattaataaattttcaaggaagaaacttgctcaaagtttagacaacattttgaattga

SEQ ID NO: 6521 - DNA, 2286 bp, Candida albicans
atgattatgaatatgactactgattatagagatccattactcgatttgtttggtacagagtctaactctggcaatgaaacatcatctcccagtgacattccagttatcaacagaagtggcacatttaatcaacaacaatttagccccttgttaacccaacaactgttatacaatacacctaactctggatctactccgaatatttttgacccaaactatacccagatgcaggaggaacaaacatctccatctctgaacaaacttcaaccagaagatcccccaagaaagaaaaggaacactagaagtcagacaaagatacaccaacaactggaaggagatgaatacaactcaaatgattacaaagatctgatagatttagacaaaccaccagttgttgaaccaagtcctccgttttttgttgaaagtgacactacccctgaatttgtgattccaacacctaccctggaacaacaacagcaacaacatcacgagttaatcgcacaagactaccaacgttccaataattcaaatcaatttggaaacttgacccattatgaaccaaatcttcctccattacctcctttatcagagagtatacttccacagacaaacactttccatccattagtgttgccacatgacccaagacacgctattactgctggcccagctaataacagtcaacaacaacaacaacgacaacagcaagactcactgataccatcagatggtatttcttccaagatacaacaacttcatgcaccttcattgtcaaacaatcaatcagcatctcaacgtaaaaagaaagaaagttccgggcccaaaacacgtcctgcatttgttatgaaaatctggtcgatggtgaacgatcctgccaatcatgaatatatcagatggaatgatgacgggaagactttccaagtgtttcaccgtgaagattttatgaaggttatattacccaaatatttcaagcataataattttgctagttttgtgagacaattaaatatgtatggatggcacaaagtgcaggatgtcgctaatggtaccttaaatcaaaactcggacaagaatggacaagatgaaatatggcaatttgagaatccaaactttataaaggatcgagaagatttattggataagattgtgagaaacaagagtagttcaaaccaagatgacgtttctggagtttcattcaatgggataaacaatagtgcaaatttgtcgttgattttacaagagttggaaacaatcaagatgaatcagtatgttatatctgaagatttaagaagagtgcgacaagataacaagatgttatggcaagagaactacctaaatagagaaagaaatcaagtacaaggccgcacattggataaaatattaaagtttttatctgttgtttatggtaataatgctaataaaatattgaatgggcacggatttgctgatttcagtgatagtaacaatatcatgactcaatatagaccatcacccatgggatcaccattactactgagaccacaaacccaaccaccaccttcaaattctagatttgcaagagataacaatcagactgcacaacctacttatgaatcaccattatcaaccagcgataccaataataataacaacaacagtacctttgaatatcaacaagctgtcaatcgtccacgtctcatgttgactaaccgagcacattcaagacgtccaagtatgtctagaaccaaatctacaccagaagggtccatagaagagataatacgttcttattctaacgataaagctgctgaatctaatgttaatcgaatgtatgagcaattagttggtcatcaaccaggtgcaactacaaataacaataaccattcttccctgacagcaatttcggcaccatcaccacgtcatagtttcttacaagaattgaatctaccaggcacaccaagaaaccttgatgatttagagaagcatattaataacgaaggacaatcaattcagcaagtgcaagactggattgataagttagcccaagagcaacatgaaaaacaacagcaacaacaaggaaatgaggatgacgatgattttgatgtcaacgagtttttgaaagatgctactacaactcctggttctaatgtgccaaatggtggccattataataatgggaatataaattttgttgattcaccaattgcaatgactccaggctcaaatgtcagttctaacataaatgattctaatggtaatgagaagaaactgaagaaaagatcaatcgaagaagttagcgatcattaa

SEQ ID NO: 6522 - DNA, 996 bp, Candida albicans
atgtcaccaagtcaaacacaaatagaaaaatcacaactagctgcaccagaaccagaacattgtccgggtccggaatcggaacttgctggtcaaggagatgcatgtaaaggatgtgctaatcaagaaatatgttcttcacaaactgttaaaggacctgatcctgatttaccaattataacagaaagattatctgccatagatcataaaatattagtattgagtgggaaaggaggtgttgggaaatcaacatttacatcaatgttagcatgggcgattgctgctgatgaagaaattgaagtaggagccatggatttagatatttgtggtccttcattaccacgtatgttgggtgctgaaggtgaatcagtacatcaatcaaattcaggttggtcaccagtatatgtggcggataatttaggattaatgagtatatcattcatgttacctgatcctgatctggcaattatttggcgtggagccaagaaaaatggattaattaaacaatttttaaaagatgtcaattggggtgaaaaactagattatttagtagtcgatactcctcccgggacttctgacgaacatttatcagtgacaacatatatgaaagaagttggtatagatggagcattaatagtgactacaccacaagaagtggcattattggatgtcaggaaagaaattgatttttgtcggaaagccaatataaaaattttgggacttgtggaaaatatgtctggatttgtttgtccaaattgtaagggggaatcacaaatttttaaagcaactactggtggaggtaagaaattatgtgaagaattggggattccatttcttggttcagtacctttggatccaagaattggtaaagcatgtgatatgggtgaatgctttttcgatagttatcctgattcaccagcagccactgctatattagacgttgttgatgccttacgagatcaagttgagttgagtttagagaatttggccattaaataa

SEQ ID NO: 6523 - DNA, 450 bp, Candida albicans
atgcctactagattaactaaaaccagaaaacacagaggtaatgtttctgccggtaagggtagaattggtaaacacagaaagcacccgggtggtagaggtaaagctggtggtcaacatcatcacagaaccaacttggataaataccatccaggttacttcggtaaagttggtatgagatacttccacaaacaacaaaaccacttctggagaccagaaatcaacttggacaaattgtggactttagttgattctgaaaagaaagacgaatacttgagcaaatcatctgcttctgctgctccagtcatcgacaccttggctcacggttacggtaaagttttgggtaaaggtagattaccagaagttccagtcattgtcaaagccagatttgtttctaaattagctgaagaaaaaatcagagctgttggtggtgttgtcgaattagttgcttaa

SEQ ID NO: 6524 - DNA, 1905 bp, Candida albicans
atgagtccgaatatatctaacagaacagtccatttaccaaatgatactccattgaaacagcaatcgttgaaaagaccatcaatatcatcttcctcgacttcaggtaccggtactggttctggtgctgctgttgaagttgccgctgattcaacatctacaactaacttgaaacccatttcaaaaccaatatcaaaatttcaacgaccacaattaccgccatcgttacggccaccaattaatagtagatcgaaaacagcagtcttaccttctcttagcaaatcaacatccagtttggcaactacacattcactgacccaatcattatctaatcctttcattctacgtcgagccaattccctcataagtcaaggcggttcctcatcattatcggacttgcatcaacaacaacaatcatcaacaacatcttctgatcgatttatcccatctcgatacaattcagtcactggtaaactagataccaccaatgaagtaccattacctagtgcggcaccagaaatacatataaaagcccaaacatccaaaatttatcaacatcatgtagctgaagcatgtggattagaaatgaattccagaatattattatatcaaccattaccaccagaaagaaaaaaaccagtgaatttagttcgacaattatctaaccaatcatcatctggctcatccagtattccaaattctcaattgtttagaacaagttttttgaccaaatcaggaacattaaccccatcagcggctgcagctagagctaataaaatacctaatgcaccagaaagagttcttgatgctcctgggttaattgatgatttttatttaaatttattagcctggtcactgacaaatttattagccattgggttagaagatgcagtttatgtatggaatgcctctactggatcagtgggacttttatgtgaacttgctgataaaactttggtgacatcattaagatggtcacaagatggttcatatatttctattggtaaagacgatggattgattgaaatttgggatatcgaatcaaacactaaattacgaacattaaattgtgataatcatttaactagaattgccctgcagagttggaatcaacatgttttaactagtgggtcaagaatgggtcatatttatttttctgatgttagagtggctaatcatttagtgaataaaaatcaagaagctcattcagcagaagtttgtggtattgaatatcgtcctgttggaaatggtactagttctactactagtattaatgattcattacaatttgctactgggggtaatgataatttagtatgtatttgggatgctagaaatgttactacaccagtattttcaaaatctaatcataaagctgctgttaaggcattatcttggtgtccttatcaatcatcattattggccactggtggtggatctactgataaaacaatcaatttctggaataccaccacaggtgctaaagtgaatactattgaaactggttcacaaatatcttcattgaattggggttatgctcatggtacgggattagaaattgtggctactcatggattccctagtaatagtatttcattatttaattatccaacgttacaaaaaactggtgagataattaatgctcatgatacaagaatattaaatggatgtttatccccggacaatttaactttagccacggttgctggtgatgaaaatttgaaattttggtcattatttgatctttataaaaataacaaacgcgattatagtcatttacgtcatggccaagatcgtgataatcaatataatgattatgatgatagtgatgttaatggattaaataatgacgataaagacggtggtcatgatagtaaaaggattaaaaaaatgatgaaccttagataa

SEQ ID NO: 6525 - DNA, 2643 bp, Candida albicans
atgtccaattttgtatcatcaccagggagaatcccatcagatgctgcccagttgttgaattcacaaactctgtcttcttttggtagagacaattccacaccagcacagccaatattatattccgaagatcttccacctcatttacaactacaaaaacaacaacagcaacgtgcaattgctggaagaagaagacaaattgctgttccaaaagttgttgatgtaactggtgagaaagtcagggaaagttttgaaacttttattgaagaatttgttgatcctgaacaaacagatgatgattgggatgggaaaatttacttggcccaaattgaagctatgaaaacatacgagtatagtactttatatgttgattaccaacatttattgctgagagagaatggtgttttagccacagctatcctggaacaatactatcgtttctcaccctttttgttgaaaggtttgcatagattgttgaaaaaatatgcaccaagcttgttacataccagtttacttcacaataccgaagaaactgttagtgaaacttcaaccagttctcaagcaaatgaacgtgttttccaaatttcttttttcaatttaccaaccgtacaaagaatcagggatatcagatcaaataaaattggttcattaatgtcaattctgggtactgtaaccagaacatctgaagtgagacccgaattgtatcgtgcatgctttacttgtgacttgtgctcagcagttatcgaaggggtagaacaagtttttaaatataccgaacccaccgcatgtccttcttgtgagaatcaatcttactttactttgaatgtgtccaagtcccagttcattgattggcaaagaattagaatacaagaaaactccaatgaaatccccacaggatccatgccacgtactttggatgtgattttgagaggtgaaaccgttgaaagagcaaaaccaggtgacaaatgcaagtttactggatgtgaaattgtaatcccagatgtttctcaattaggtttaccaggtgtcaaaccacaatccgttaaggaatcagcaagaggctcagagttgagtagtggtgttactggtttaaagtctcttggtgtcagagatttgacatataagctcgcctttggagcttgccacgttgcttccatggttaataaggcaggtgggaatgaacagcttgaagttgatttgaatgaccaagaagtttttcttacatctttgagtgatgctgaagtattacaattaaaggaaatggtcaaggatgaacatatttatgacaagcttgtgaactcaattgcaccagctgtgtttggccacgaagtgatcaaaaagggaattcttttgcaattattaggcggtgttcacaaacaaacagtagatggaatcaacttgagaggggatataaacatttgtattgttggtgacccatccacttcgaaatcacagtttttgaagtatgtctgtgggttttcgcctcgtgctgtctacacttctggtaaggcttcctctgctgctgggttgacagcggctgtagtgaaggacgaagaaagcggagaatacactattgaagcaggtgctttgatgttggcagataacggtatttgtgcaattgatgaatttgacaagatggatattgctgaccaagttgctattcacgaagccatggaacaacaaacaatctccattgcaaaagctggtattcatgctaccttaaatgcccgtacatctatcttagcagctgctaaccctattgggggtagatataatagaaaattgggtcttcgttctaatttgaatatgacagcaccaattatgtcgagatttgatttgttctttgttgttcttgatgattgtaatgaaagaattgatactcaattagcatcacacattgttgatttgcacatgcttagagacgatgcaattgatccaccttactcagccgaacaattagcaagatacattaaatacgcaaagactttcaagcctagaatgactaaagaagctagagactttttggtcactagatacaaggaattgagagaagatgatgctcaaggtttagggaggtcctcgtacagaattactgttagacaattggagtccatgattagattgtcagaagctatagccagagccaattgtaccgaagaaataacgccaagttttgttgctgaggcctatgatttgttgaagcaatctattatcagagtcgaaatggatgacatcgaaatggatgatgaagaaagaccaactggagaaccggggcaagcacaagaacaagatcagccacaggaccaagatactcagcaatcgcaaccttctgaaagagtacctccagtgtcaattagttatgacaaatatgtttctataatgaatatgttagtcaagaaaataaccgaggacgaaaaaaatggaggtgatggactttcggctgatactttagttgaatggtatttgcttcaaaaggaagacgagatttctagcgaacaagaatacttacaagaaagaaaattggcttataaggtgataaaaaggttagttagagataaaatacttatgagtgtgacagaaggaacaaatgttgtttacattatacatcctaactgtgctattttagattttttcgaaagggaataa

SEQ ID NO: 6526 - DNA, 2178 bp, Candida albicans
atgtcattcaaattgtctgttgccggaaaggctcaaaatgtcccttatcctgtattaattgcagttaactttatcaactctagtgatgttgatgtgtcaatcccaattgaatttgttgatgacaaaaccgttgactctaaagattcaatcaaattagttactccaggtggtgaaacttttattgatcaattagatgctttggattatttgtcacaaactttacctgaattgttaccagaaagaagcaaatcccaagaatggatcaaatttgccttgaccaaattgtacgtcaagaactttaaagaattggctgttgatttggaaaaacttgatcaacacttgaacttccgttcattcattgttggttaccaatactctttagctgacattgccatttggggtgttttgagagccaatgcattgatgggctctgttatcaagaatggtgtttatgccaacatttccagatggtacaatttgttagctgatgacaaaagattcgaaggttctgttgaattgatgactaaatcattggcagaagtgagaaaagctgctaaatctgccaagactgctgctgctggtggtaagaaggaagcccacaaggccagtttcgaaattgacttgccaggtgctgaaatgggtaaagttgtcactcgtttcccaccagaaccatctggttacttgcatattggacacgccaaagctgctgttttgaatgaatattttgctcataaatttaaaggtaaattaattatcagatttgacgataccaatccaactaaagaaaaagttgagttccaagattctattattgaagatttagagttgttgggtatcaaaggtgaccaaatcacttactcttcagattacttccaaaccatgtacgacttggctgttaaaatgatcaaggatggtaatgcttattgtgatgacactccagttgatactatgagagaacaaagaatggtgggtgatgcatcagcaagaagagaaaggtctgttgaagaaaacttgagaattttcactgaagaaatgaagaatggaactgaagaagggttaaagaactgtttaagagccaagattgattacaaagctccaaacaaagccttgagagacccagttatttacagatgtaacttgacaccacatcacagaactggtactgaatggaaaatgtatccaatctatgatttctgtgttcctgttgttgactcaattgaaggtgttactcatgctttgagaaccaatgaatacagagaccgtaatccacaatatgaatggatgcaaaaaactttaggtttgcgtccagttgccatttgggatttcggaagagttaactttgttagaaccttgttgtccaagagaaaattgcaatggtttgttgacaaaaactacgtttccaactgggatgatccaagattcccaactgttagaggggttagaagaagaggtatgacagttgaagggttgagaaatttcattatttctcaaggtccttcaagaaacattattaacttggaatggtcagttatttgggctatgaacaaaaagatcatcgacccagttgcaccaagatttactgctgttgatgctaagaatgttgtttcagttaaattgttgaacggaccaaaagagccatacactgaatcaaaaccaaaacacaaaaagaacccagaggttggtaacaaagatgtcatttttgctgatcaagttttgattgaccaagaagatgctgatttgactgaaggtgaagaagtcactttcatggactggggtaacattattgtttcaaaagtcaacaaagaaggtgatattgttaaatccgttgaagctaatttgcatttggaaggtgatttccgtaagacttccaaaaagattacatggttggcttacactaaggataaagttgaaattgacatggttgattttgatcatttgattactaaagacaaattagatgaaaatgataactttgaagacttcattactccagaaaccgaattccacactaaaggctttgctgatttgaatgtcggtaaattgaaagctggtgatatcattcaatttgaaagaaagggttactttagagttgataagccttctgaagaaggtaagcctgctgttttatatactatcccagatggtaaagcagtttctagatatggtgccaaaaaataa

SEQ ID NO: 6527 - DNA, 639 bp, Candida albicans
atgttcacaccccaaaagcaacaaaaccctgaaataatactaaccccactgaataagcccctacaacaacaagaaagcaaagacaaagatttgactaccacatcaacccaacaagtccaaaatatactacttaatccaatgacaccatatactctaacattatatttccaattattttctaatatgataatggccagtattgttatttatatggcttatttagcatatacaactattagacaagatataaatttcaaaattcaacgaatgacgcttgatttgttagacgagatttctcaatgtctgaaacaatatacattgaataagtgtcatttatcaactcgaccaccggcaattgaacaagaatgtaattatttggataaatgtcaaaatcaagatccatctttgattagtcgatcaaatttgacaagtgagatattagcagaaataactaattcattcttcaataaattaaattataaaagtattagtattgtactaatatttcttgtaattaatttggtgtcgaattattatattattggtaatttccaatataatgaaattaatcggttaaaaaaattagagttcaattcaaacccagaatcaaaattggacaccaaaatagatttagattag

SEQ ID NO: 6528 - DNA, 3174 bp, Candida albicans
atggaagaagacaatactggcagccatattaggcgatcaaccagacaacagcttaaacagcaacaacgtcaacaactagagctacaacaacaacaattagcagaagaggaagaagaagaggaacaacaaatacagttgcaacaacagaaacagaagcaattggatcaaaatcaacgtaccacaaaaaatcaagaaacaccggaataccatgacttgaaagaggaagattttgagcgactcatggaagagatgcaaatcgataagaatgatgatggtgatgatgggtcctctgacgagtatattttttcagacgaatcggatgattatgacgattacgataatattaataacaacaataatggaaataataaaattggtgggccaatattgagtgatgaaccagaagaagatgattatgatgaagattataattttaaagatgcattgaaaggtgctagtaactttagagttagaaatcgaagagaaaagatcagtaaaaattctagatcctattataaacggaaaatgatgagagcagataatcgagagttggacccagaagtacgactgaatttatcacaagctaatgaagcgtttgttcgtaaagatttgcaagtagcccaacaattatatctcgaagttattaagaaggatcccaaaaattttagtgcttacaaggctttgggggagatatctaaagcacaagggcaacttaatgaatgttgtaattattggttattggcagctaatatccatccttgggacacagaattttggggtcaagttgcccaattgtcagcggaattaggtcatattgatcaagctgtttattgttatggacgtgcaattacccctgatatagcaaaaagttgtgaatttatattacaacgtgccatcctttatcaagaacggaaacaatatggtaaagcattagatggattccaaaaagtgcgacaattataccctaaagattctaatattataaagtatttagcatctgtttatctggaacaaaaaagattgaatgacgcaattaatttatatatgaaagttctcgatagtaacattcatccagaacgagaatccaatgagttatatcctaaatttgattgggccgaactaaatattttattggaattacatctacaaaatcattcatggagaatgggattgaatgtattgaaattagcatcaagatggattcaaaatagaagtcaagagacttggtgggacgagaatgaagatttggaatttgattcgcgccaaagattcgaagtgattctgacattatcatctcaagatcaaatagatttagccgagaacaaaccgtttgacctaccgattgatattcgattcaaattgggttgtttaagacttggtttacaacaaaaagatgtagctgtccaacattttgattatttattggaagaacaagatgtttctgatttacattttgaagcagggaaattacttgaagaacatggtcattatgaagatgcattgaaattcttactgaaagccagtgaagatgaagaatttactatcagtttggaacttgttcaattattagctaaatgttattttgaagttggagactatcatgaatcaaagcaagcttacgaaactttattacaacatgatccagataatttagattttaaattatcgttagctgaaaatttgtattatttggaagatagtgctggtgcacaaagtttgattcgtcaagttcgacaatccaaacctaaagtacatcataagaatggggcgtcaattgaagaagaagaagaagaagaagaggaggaagaagatttgaatttggatactgcacaattgggaaacatacgatccttgattccaaatgaattcaaagtccatggcaagagaaaacttactgaacaagagaaggaagaaattgaaaataatgctaaacggaaagttttggaaaaatttggacgtatggaaagattacaagaatcaatagattctggtgatagaattgccattggggcttggttacaattggcatcacaattgattgaaatcttcactaatgtgaaaagtttcttccctcgagacaaaaatagaacgtttaatggtatagtgagatatcgtagacgcaaagatatgggactcgatgaaaaattggctcgagcctataatttattagaaggaatagtacaagatgaacattatactcgacatacattgactaataaaactgaatatcgtggacttagttatgatcaatggtttgatatttttgcccaatatgcagtattgatatctcggtatgagaataatattgattatgctgatgaaattgtcgatattgccctagcggtaaatgtttttattcaggataagcgtaaggaaacgatattaagagcattgaaattagcatttggtgttagacgtaatcgtgttgttgattcactattcatatatcttagacattttttaaacttgaaccaattttctccgtttatatataaattatttatgtgttgttatggttcaggaattgaatattgggaacaatttgccagttataatcatcaaaaatattttttacgtcaattgaaaagttatgattcttgctatacggggaaaaatgtttcaggaatggcacatataactaccgatcttagtggatttaaattgggacctcatcatcttgatctcatttatgtgtatgggaatctacttggaggtaataaaagttatgtttcttcacttttttatttaaatcgagcttataaacaatataatcaagatccaatgttatgtttaattttgggtttaggtcatcttcatcgatcaatgcaaagattaagtgcaaatagacatattcaattgcttcaagggataagttatattttagaatataaaaaacttcgtcaattgaatgccacgatttatgaattacaagaaattgaatataatttgggtcggcttttccatactcttggattatttacacttgcagtacgacattacgaacaagttttggctatgaaagatgatattgtaaacagtagtaaagacaataatgataattatgagtatgatatgtcttgggaagctgcttataatttgtctttaatttataacattgacggtaatccaaaattggctaaggaaataattgacaagtatttaacaattgtataa

SEQ ID NO: 6529 - DNA, 351 bp, Candida albicans
atgaagttggtacgctttcttatgaatatccccaattctactaaccagccgataacggttgagttgaagaacgggaatattattagtgggacattgctatcctgtaatccgctgatgaatttgcatttgaagaacgttaggttacaacagccattgcaggacccgattttgttacagtacatcaacatcagaggaaaccaagtgagacagatattgttgcctgatgagttgaatatagagagtgttttggccaagtcagagactaaaatcaaaggtagtggcgccggacccggtgccaaagcagtggcacgaggtgggtttagaggtaggggcaagggtagagcggtttga

SEQ ID NO: 6530 - DNA, 1503 bp, Candida albicans
atggctgacgtggaaaagaaaccggaggcggtctcctctgatccagcagaaaagaaactttcaaacaaggagttgaaagaattgaaaaagaaggaaaaggcagccaaaagagcagcccagaaggaagccattgggatcactccagaacaacaaaagaaaatagccgaacaaaagattgaaaagaagaagcagcaacaaactacatcagcatcaaatgtaaagaaacaattgaaccaaactattgtcaaagacgaaagaaaagttccagctttatttggccatttagagactcgtgaacaaagaaatgccgcatcaccaactatttccaatgttgtacatcctaccatcttgtccctaacattgaaatattctagttacaaagttgtgggatcaagttcaagattgagcaacatgttacaagcttttaaacaagtgatccaagattattcaacccctgagaacacaacattgactagacatttgacagctcacttatcccatcaaattgaattcttgaaaacgggccgtcctttatcagtttctatgggtaatgcaatcagatggttgaaacaagaaatatctgtgatttcaattgatactttagaagccaaagctaaagaaatactatgcacaaagattgatgatttcattaaggaaaaaatcgttctttctgatcgtttgattgtggattcagcttcaagacatatttgtaatgggtctactattttaacttatggccactcacaagtattagaagagttgtttaaatattgtgtcgttgaacaaggtaaaaaattcaatttaataattgtggattctcgacctttatttgaagggaagaaattattgaaaaacttggtgagtacatctttggaagaaaaggttgaaacaaattctgtttctagtttgacaatggaaaaggtcccaattacacaaagtcacattagtgttcaatatgttcttatcaatgccttgtcatcaactcttttagaagatgtggattgtgtgtttttgggtgcccatgcaatgttatccaatggacgtctttactccagagtgggtactgctttgatcgctatgatgagtcacaccagaaatatcccggtcttagcctgttgtgagtctgtcaaattctcagacaaagtgcaattagactctgtcacaactaatgaattggctgattctgaagatttaattcaaggtattgattccaagaaaccaccacaaaaacaatcatttgcattagaacaatttttgaaagaaagtgaacaagaaaacaaacaaccaaaacaagttaaaggtaagctggaagcagatgctaccgcagaccaatcagatgatctggaacctttgaagaattggcaagacgtgaaaaatttaaatataatcaacattatgtatgacttgaccccaccagagtatatcaacaaagttatcacagaattgggtgcgttacctccttcttctgttcctgtgattttaagagagtataaaaatgcataa

SEQ ID NO: 6531 - DNA, 1916 bp, Candida albicans
atgtcaaaaccagagctatatgaccaatatatgattacaactcttcctcgtactcctgacttggaattatccgacaaagttgtagtgtcaacgataaaatcaatcgacacatctattatcgatattggggtttcaaaatcaaccatatccagtcacatcaccaaacctacaccaaaattattatggtcttattcattgaatccaacaacaatagttgaatgtatggatgtattagctaaggaagacaagaaatattacgtttgtggtttgagtgatagaaaaaagtttaggcttttattagttgaaacaactcgttctatcactgaagacgggaacgccaactataccacaactaatgaattagaattgaaattggataggaaacctattggaatcaagtttatgtcaccagagattattacagtactttatgtgaatggatcagtggaagaagttggtttttctgaaaacatattacaattcagtggtgtcaagtacactggtaccaaaagcaaagatactgttgtctacagtgcgtttgttaacgatttggaagacaatttactacttactgtatcgacaaactcaaaaagtacaatttacagattgatagcaatcaactctaaaaactccatactcgaagtcaactcacactcagttccaggagtatctaataccaagttttgctacttcacagggtcattataccaatatgccaataaagcaattgaaacgcttctgatcaccaatttcaaaatcacaaacacggtttccgtggatggtattataaacgatgaagaaatcacgtctattgttgccccagcaccggatcgtgttttgataggtaattccaatatgatttatctcataaatgttaaattcgcatcgcttttgtcgtcatttaaatcgtcatcgagctcatctcatcctatcccagataaagtgtttcttaaccaagttgtccccgtcaaggggaattcaacaaactcatacatatccatggcagtttatctcaacttgaaaaataaagacaacaatgtatacttgaatgttattgatataaatgttgggatgaacaaattgagtgaatgtttaggaaaatcattgaataaacagaaaccaggtttccatgagatccctgaattattcaatattcaagatgctttaccatcaagtgatgaaatccaagaagtttatctgtatttgaaagacgcgaaagaggcacaggatttgaataaatgggaatccatactcattccctacttgaagaataaaaagacatgggccgaaatcaagagcttactgagagcatccaagaaagataaagtatacgaattcaaggaattcgatgtcgacaatgatagagttattgatattgggtttattgattctgttttacagttgattttcactgaggacccacttgcttttgccaacgagcagtttgttcccgaatatactttgatgtatctattgaccaacccattattccctatccgattcacactgggattgattgaattgttcagtgtaacaggaaatacaacattgttgagacaggcaataaacacatgtcctaacattccatgtcgcgacttgttggaccaacttgtgaatgaagaaaacaaggaaaccttgcttgatcttattaatagaataattggtgaattttctcgtaaggaaatcacaaatacttttaaacaactaattcaaggcaatgccgtggatgtggttgaattgatttccaagttaattggcttgccaggaaacaacaactggtatttggttgaaattttggttgatgtcaatggattgttcaactgggatatgggggatatcaaagccttggatgaaataatttctcaaaaagtagaggcattgacggtgaatagttataacttgactttgtctcatca

SEQ ID NO: 6532 - DNA, 2145 bp, Candida albicans
atgggtaactatatcactgttgccacttgtaacttaaaccaatgggctttagactttgaaggtaacagagatagaatttttgaatctatcaaagaggccaagagacaaggtgcaaaattgagggtaggtccggagttggaagtctgtggttatggatgcctcgatcattttgctgagaatgatttatatcgtcacagttgggaagtttacggagagattttgtccaatcctgaaactcatgggattttattagacattggtataccaattatccacaaatcaatcaaatataattgtagaatcatttcgtacaatggcaaaatcttattgataagacccaagatatatttggccaatgatggaaactatagagaaatgagatactttactggttggaatagacccaaataccacgaagaatatcaattgccaaaattcattagtaaaattactggtcaagctagagttccatttggtgattgcattgttcaaactttagaaaccagattaggatgcgagacttgtgaggaattgtttacaccagaatcaccccatattgccatggctttagacggagtagaaatattcaccaattccagtggatctcatcatgagttgagaaagttggataccagattaaagttgatcactgaagcaaccaagaaatgtggcggtatttatttatatgccaatcaaaaagggtgtgatggagatagattatattatgacggatgtgcaagtattattgtgaatggtaacgtgttggcccaggcatcgcaattttctttgaaagatgtcgaggtcataagtgctacagtagatttggatgacgttagagcttatagaaatcaaaaatctgccagtgtacaagcggttaatcaactggaaaaattcaaagttatttacacggatgtggaattatctccaagtgattatgtatttgatcattcaatcataccatcgaaaccacaaccaatcaagtatcatacacctgaagaagaaattgctcttgggccagcatgttggttatgggactacttgcgaagatctaaatgtggtggatattttttaccattaagtggaggtatcgattcctgtgccactgcagttattgttcacctgatgtgcagattggtcgtagaggcaattcctaatgatgaacaagtgttgaaggatattcaagcaattactcacgacgaaggatttgtaccaaagacaccacaagatatcgcccaacgcattttttacacttcattcatgggtactgaaaactcgtcgaaagaaactagatcaagaagtaaagaattggcttcaaagattggctcatatcacgttgacttgaacatggacaacttggtcacttcagttgtttctcttttcgaagttgctactgggaagaaaccaatattcaagatatttggaggatcaaatacagaaaatttggctttacaaaatatccaggcaagattacgaatggttttgagttatctttttgcccaattgttaccatggactagaggtaaaaatgtccctggtttactagttttgggcagtgccaacgttgatgaatgtttacgtggatatttgacaaaatatgattgctcatctgctgatatcaatccaattggaggtatttctaaaactgatttaaagagatttattgcctgggccgagaaaaattttgacttaccaatattgcacgagtttttaactgccacaccaacggctgagttagaaccaatcaccaaagattatgttcaaagtgacgagattgacatgggaatgacttacgacgagttatcgagatttggtactttacgtaaagtcgacaagtgtggcccattagcaatgtttataaaattgtatcatgaatggtctcaacctccttacaatttgagtgctaaacaaattgccgaaaaagtgaaacgtttctggtttttctatgcaattaatagacataaaatgactaccatgacaccagcataccacgctgaacaatattcacctgacgacaatagatttgatttgcgaccatttttaatcaatcctagattcccacatgccagtaagaaaatcgacgaattggttgaagaaatcgaaaagagacaacatgaaatagattctagcaataaaagtgtagattaa

SEQ ID NO: 6533 - DNA, 1194 bp, Candida albicans
atgcctgaaccagttggtattgcaaatttgcctaatcaaaggtataaaatcatttctaaagagggtgccacattcaccatcatggtggctggtgaaagtggtctaggaaaaaccacttttatcaatactcttttccaaacctcattgaaaccacaccaagagccaagccacagacacaataagttcacttctccacatcaaactgttgaaattgacatagttagagccatattggaagaaaagaattttgaaattagattgaatataattgatacacctgggtttggtaacaatgttgacaatcatgattcttgggtcccaatcattgattttattgatgatcaacacgaatcttatatgaaacaagaacaacaaccttcaagaaccgctaaaaaggatttgagagttcacgcttgtctttattttattagacctacgggacattctttgaaacctttagatatcgagattatgaagagattgtcaaccagagttaatcttatcccagttattgccaaggctgacactttgtcgccacaagaattggatatttttaaaactagaataagagaaattattgaagctcaagacattagtatttatactccaccattagagttggatgatcctgctagtgctgaacatgcaaagcaattgattgaatcaatgccatttgctataattgggtcggaagaagaagtggaagttggaccaggtcagtttgtaagaggtagaaaatatccatggggtgtggttgaagttgaaaacgatcaacattgtgattttaaaaagttgagaagtttgctattaagaacgaatatgttggatttggttttatctaccaatgaattacatttcgagacttttagatcagttaagttgggtggtgatgaacaagaaaatggtgaagagaatggaaccgaggaattaactaatgaaaagggtgaagttattaagaaaccatcaggttcaaagaaaccaagaagattacacaatccgaaattcaaggaggaagaggatgcgttgaagaagttcttcactgaacaagtaaaagctgaagagcataggttcagacaatgggagactaatattattaatgaaagaaatagattgaatcaagacttggaagaaatgcaatcgaagttgaagtccttggaagaacaagttaagaggttgcaaattgctaaacgttag

SEQ ID NO: 6534 - DNA, 3909 bp, Candida albicans
atgaatgggtcagctattgccaatggtaatggatctgttggggtaactcctgcattatcacaagtacaattacaacctggttcagcaaatttaacaacccaatcaaatgattctgttgtgcctaagaataaggaagaattaaatgaattacttagtaaatactataaattactttttgattccaacaagttgaaaaaagaatttgaaaaatctgaagacaaatcagagggcaaatttgaagatgttaatgcccaagccaaattggatatagaactggttttggcacaggttagcaaagaacatgaagaatacatcaaggatgaaagtgagtttatgcaagaattattttctgaaaatttgaaaggcactatcaagagtgaaggttttgacaatgaattatttgaaaaacaagtagctgggttattattattgtctagggattatgatttgccagaaaaattccaaaaggaattcactactattagtgatcaaactaagaaagatgatttagtgaatgaaattttggaaaaattgacagagttggagactgattttgaaacaagagcacaaaatcttgggatcaaagtaccgtcgccgtcatcatcatcatcatcaaaaactgacaaagatactttacattcaccattaggtactatccatgcagagaaaatcatcagtaataagatttctcaaagattaaaagaattggaaaacttacctgctaatattggaacatttggcgatactgatggcattgacaaatttaaaatccaagcattaatagaacttaaagcacttagattattagggaaacagaaattgttgagacacaatattttggttcatgaagctcaacaagtgaaatatgctgaccctaatttaaagtcgctcccattagcattactggaaaagagatctttcaatgtgagaccaaaaatagaacaacgaaacccacaattattggcagtgcaactagaagaattgaaaaaactagaggctagagaagccaaacgtaaacaacacattgaaaaagttgacctagtagtggaaaagtcaacaagtcgtagtgaagccaaatacgtcagagaccattatcgatctcattatttggttagacagatcaacaactttcatcaaacaacagaaaaagaggaaagtaagaaattggaaagaactgccaaacaaagattgcaagctttacgatcaaatgatgaagaagcttatcttaaattgttggataaaacaaaagatcatagaatcactcatcttttgaaacaaacaaatcaatttttggattcattaactgagaaagttagggctcaacaagaagaagctagtggtggttctatgggcactccaagacatggaagtccagaagttgctgtggaaaataaatctgatgacaaagccgaattacgtgaaaaaaccgattattatgaagtggctcatagaattaaagaaaagattaccgaacaaccaactattttagtcggtggtaaattgaaagaatatcaaatgaaaggtttagaatggatggtctcattgtataataaccaccttaatggtattttggcagatgagatgggattgggtaaaactattcaatcgatttcattggttacatatcttattgaaaagaaacatgaaaataagtttttaattattgtcccactttcgacaataaccaattggacattagaatttgaaaaatgggcaccatcaattaaagtgattgtctataaggggtctcaacaacaaagaagatcattacagccagatattagatatggtaatttccaagttttattaaccacgtatgaatatgttatccgtgaacgtccaatgttggcaaaattccattattcccatatgatcattgatgaaggtcatagaatgaagaatgcccaatccaaattatctcaaactttaagaacttattataagactaaaaatagattaatcttgactggtactccattacaaaacaatttacctgaattatgggcgttattgaattttgttttacctggaattttcaactcggttaaatcttttgatgattggtttaacacaccatttgccaatactggtgctcaagaaaaaatagaattaactgaagaagaatcattattggttattcgaagattacataaagttcttagaccatttcttttgagaagattgaaaaaagatgtggaaaaagatttaccagataaagttgaaaaagttttgaaatgtaatttatcaggattacaatatgtattatatcaacaaatgcttaaacataatgcattatttgttggtgctgatgttggaggtgctaaaagtggtatcaaaggtttgaacaataaaattatgcaattacgaaagatttgtaatcatccatttgttttcgaagaagttgaatcggtgttgaattcactgagacttactaatgatttgatttggagagtgagtggtaaatttgaattattggatagagtcttacctaaattcaagaaaagtggacatcgtgtattgatgtttttccaaatgacgcaaatcatggatattatggaagatttccttagatggaaagacatgaaatatttacgtttagatgggtctactaaagctgaagaacgtcaagatatgttgaaagttttcaatgctccagattctgattatttctgtttcttattatcgacacgtgctggtgggttagggttgaatttacaaactgccgacacagttattatttttgatactgattggaatcctcatcaagatttacaagctcaagatcgtgctcatagaattggtcaaaagaatgaagttcgtattttacgattaattaccaatgattctgtagaagaagtgatattagaaagagctcatcaaaaattagatatcgatggtaaagttattcaagcaggtaaatttgataacaaatcgactgctgaagaacaagaagcatttttgaaaaggttattggaagcagatgccaatggtgctgataatgaagaaaatgattctttggatgatgatgaattgaatgaaattttagcacgtagtgaagaagaaaaggtgttatttgcttctatggatgaagaaagaaaactggaaaaagtgccttataaatctagactcattgaaaaggatgaattgccagctgtattcactgaagatatttctcatcattttgagaagaaggagaaagaattatctaaaatgagagataagaaacgtgttagatatgatgatgggttgagtgaagaacaatggttaaaggcaatggatgatgataatgatactgttgaagaagctattaaacgtaaagaagaacgtattgctaaaagaaaaagaaataaggccataagagaaggtttattggaagaagatatcaaagatgatgaagttggcgaagaagatgatgaagactttgaagaggctgctcaacctagaaaacgtcaacgtcgtgctagaactcccttaccacatattgataacgatgatattaatggagacagtggtaatggtggtggtggtgctgcaatagaacttgatgatgataatgatgataatgaaccagaaactgatggatttacaagcaaatgtttgagtgtaattgatgaaataacagccttaacagatgagacagatggtcataatttaagtgatattttcatcaaacttccatcacgtaaattgtatcctgattattatctgattattaaaaaaccagtttccattaatcaagttaaaaaacaattggatcaagaaaaatttgcctcatttgaagattttattgcagaattgaaacaaatgtgtcttaatgcaaagacttataatcaagaagggtcatttgtacatactgatgctactgttattgagaaattacttgatgagaaattagctaatcaagaataa

SEQ ID NO: 6535 - DNA, 2163 bp, Candida albicans
atgggtaaaactaaatctagagggagaagagctgagaagaagaataaaaagaatgagccaggatttaatgaagatgtatcaaatttagattcagatgtaactattacaaaccaagaaccattatcgtcatcaatgtcttcaacttctggtattcctaatacattttttgggcttgtggataacaatgagttagattattttaaacaagctgaatccacattaaacattaatgcatttgaaacagatgaggaaagacaaggatttataaattcagtattagaagaagctcaaggtaaagaattgaaattggtgactaatcaaatttgttctaaattaatggaaagattaattttatttgccaatcacaatcaattaaagaagattttcaaacaattccaaaaccattttgtttctttggcatttcataaatatgcatcccacgtattagagacattacttgtaagatcagcagctttgatcgaaaaggaattgactcaaacagacgaagaaaaacttgaagaagcagaagaagaagaagcagaagaagaagaagcagaagaagacagtcttaataatgacgtaccaatggaggacttatttataagtatgctcaatgaatttaagcctcatttgactaccatgatagatcatctgtatgcttcacatgttttgagactcttaatattgattcttgctgggaaagaattaccatcatcagtaacatcaaattcaactttaagatcgaaaaaatccaaaattgccagaaaaatgattgaaataaaagataatgaagattttgatcgtgcttttcaaacaccacaatcattcaagaatgaattacgtgaatattgtcaaacaataattgtcggattagacacaaaactggctagagaattgagtattcataaaatcggatcacctgttttacaattattgattcaagttgaaggattagttgaccgtgaacgttcattttggcatcttatatttgccaaagatctggaaggtaaagattccgtagaggaatcatttgttgaatacttgttatctgaatcagtgggatcacatttcttagaatctattataaaaaatgacggtgctcgtccaaagtatattgaaagattatacaaattatacatgaaagatcgagtattgaaattagccaaaagatcaactactggggtttatattattcaagcattattgttcaagttgaaaccagtggaagttgaatatattttggatcaaatcattccagaattggcagaattgatatctattgccgaaaaccaaaacttggatttggccaataagttaattgacgcatcgatttctcgtggcaattatagacgtgatgaaatcataaatcaattattcatcaaatttgctccaaattatgatattgaaaacccttctgacaacacatctacagaattcatagagaatattttacaactaactggttcaacattaggtaatacaagagatgattggcccactgccgaagaaagaaaacgtgctttgtttttagagaaattaatggaatacgattacaagtttgtcatatgtacatggtttaactttatggctttaccaattgaaagatttgttcaaatgtgtttccatggagtgttttgtcatgtagttgaaaaggcattaattgttgaacctgaagaaccgaaacctattcaaattttaagaaaaagattactcaatattttccaaggtcaaattgttggtcttgcatgcaattcatatgggtctcatatcgttgatagtttatggaatttcactgtattgttaccaatgtacaaagatagaatagcttcggagttattaggcgattcacataaagttaaggaaagtacttatggtagattagtatggaaaaattggggaatggaattgtttgtacgtaaaaagtatgattggaaagcattgataaaacaacaagaacaagaatattatggagaaactgaagattctactgaaaagagaaccaaaaaaccaatagaattgaaaatggaaagattagctgaagaaaaaagacgtcaagaagaaatggctgaaagagctcaaagtggatataccaagcgtaagttggaagaagctacaggaactgcttccgaaaagaaacaaaagcttagaggacgtagacgttga

SEQ ID NO: 6536 - DNA, 480 bp, Candida albicans
atgaaagtactaacggaaagagattcatttttatcaaactatgaagtattacaacatttacaaaatattaaaaagaaatacaattggtcgtttaacccaaatgatgaaaaattcatgaagaataaaaaaaataaacatcatttcacaggatgtggaatcaatttagaaatcataactagagatgtattatcatgtttagaaaataatgaaagtagtttaatacaatcaactaaaagttttaaacaattgatggaatttttaaatcaatttgaattaatgaaagttgaaaaattacaaattgttaatagtttaccaagatcattagtggtgttatatgctttagttgaagaatgtgaagatcgatttggtgaagaaacttcagaaagtataatagagaaaataaatgaattattccccatacaagaagaagaagaagaagaagcaggagaaggagaagaagatgcagaaattaacgaatag

SEQ ID NO: 6537 - DNA, 1242 bp, Candida albicans
atgtccgtacaagaaactccaactaaaggtttaactggtaaaatttccgacttagacatgtcaaacatgaaaggtaaatccttgactgataaattagctgctgatgccaaattaaaagatgaagctcaaaccattcacgaagtcaaacaagccgttgcatccactgacaaagcaactgaagaaaaggatgacagtctcaaaaaacatcaagactttttggctaaacacaaagtccacagacacaaattgaagcaattagaagctgaagaaccattattggttgaaaacaaacgtcgttatgtgatgttcccaatcagataccatgaaatttggaacttttacaagaaggctgaagcttccttctggactgctgaagaaattgatttgagtaaagatttggatgactggaacaacaaattaaatgaaaatgaaagatattttatttctagagtattggcttttttcgccgcttccgatggtattgttggtgaaaatttaattgaaaatttctcaactgaagttcaacttcctgaagccaaatcattctatggtttccaaatcatgatggaaaacattcattcagaaacctattctttattgattgaaacatatatcaaagatccccaagaggctgattacttgttcaatgccattgccaatattccatgtattcaaaagaaagctgactgggctatcaaatggattcaagatgatgaagccttatatggtgaaagattagtagcttttgctgctgttgaaggtatcttcttcagtggttcatttgcttctattttctggttgaaaaagagaggtttgatgccaggcttgactttctcaaatgaattgatttgtagagatgaaggtttacacaccgactttgcctgtttgttatttgctcatttgcagaatagaccatctccagagattgtcgaaagaattattactgaagctgttgatgttgaaaaagaatactttactgatgctcttccagtgtcattgttgggtatgaactgtaacttgatgtgtcaatacattgaattcgtcgctgatagattgttgttggctttaggtaacaagaaagtatacaatgttactaatccattcgatttcatggaaaacatttccttggctggtaagaccaatttctttgaaaaaagagtttcagactatcaaaaagctggtgttatggccaagaccgaaaacaaagaagccgatgcttttacctttgatgaagatttctaa

SEQ ID NO: 6538 - DNA, 5544 bp, Candida albicans
atgagtggcatatttaattggtcgctggatgtgtttgccgatatttataacaccctcaagtttgagtccaatatagatttggatacaatcgacttcaccagcatcaagaatgatcttgcaaatgttttgattacaccagtccctctggatcaatcacgtagcaaacttggagacgcatcaaaaccagtggcgttgcccagtggagatgaggtgaaattgaatcaagcatcaattgaaattactggagttttatcaaatgaattggatttagatgaactaaatacagcagagttgttatataacgcaagtgacttgagctacaagaagggaacgtccattggcgatagtgctcgattggcttattatttaagagctcattatatactaaacattgttggatacttagtttcgcataaacgtttagatatcatcactaacaacaaccaagtgttgtttgacaatattttgaaaagtttcagcaagatttatactttgagtggtaaattaaatgacatgattgacaagcaaaaagttaccggcgacatcaacaatcttgcatttatcaattgtatcaattattccagaagtcagttgtttaatgcacacgagttattgggacaagttgtatttggattagcggataattattatgagagttatggcacactaaacaactataaatccttagtggagtttatactgaaaaatatcagcgatgaagatgtttttgttatccattttttaccatccactttacaattgttcaagaaattacttcaactaggtgaggaatctttagtcgatcagttttacaagactataacctcttccatactaaaagattatgaagccaacaatttttccaaaagtgaagatattgacttgtcaaaatcaaaattgtctggctttgaaatagtcacaagctttatttttctaactgagtttattccatggtgcaagcagctgtcaagtagaaccgcgaaatacgatttcaaagatgatatattaaagtatatggaattcttgataagttatggagttatggaacgattattatcgtactgttctgaaaccgccaatgcaaaaactcagcaagtgtacgactggtcaaacatgtacgatttcagagcattgcttcaaaagaatttcccacgacttacaccagcaaaatttcattatcctggcaatcaagaattgttgaatgcagttagaccgggatatgaaaatgtatccaaattgattgacatttcctttttgacgttagatccatcgcttaatgagacgttggtttcaccttttttccagagctttttcagtgtgtttatatctaatgcggcagttgttatgacctctttaagggactcagaggaagattttgttttatcgtcgttgaatgaaagtgacgaagaggaagaagaagaagaaagcgacagcgacgaagattcttcgaccccaaaaaacaaagaaaaatcaactgggttagaccttgacaagattgcccagcgcgctgaattagaaaggttctacttggctttcgcgtacacctacaacaatagacctgaattgtgtgcgttattttgggggaacgagcaggtaactcatgacattataggatttatttcctggggacttgctaataatacgtctccgttgatcactgcaacattctgcttactattagggtcgttggcatctgctggtgcagaggcaacttcaaggatatgggagattcttgtacacaacaataacaacgcaagtacgagaaaaaatgatttttcaaagatatccgttgactccctttatgattcgttgaaatattacattgactctttaaatgaaagctttgaacaagatttaaatgcccaattgatgttgaatcagaagaaacaagattttctcttcagcaccacaacaagcaaacaggaccttgatgattctggcgagaatagaattgttatagagttggccgaggattcacttgtcttcatttcagggtttattcaattactttctgcaattgtgaagaatttgaacactaagaatgaaagaagcaaagaaatcaaatccgtggtatacactagattctcaccaatcattaaagggtttttaaaattcgataatttgatcaatggtagcaggttccttcaagttgatgctagcattcaaagcacaaacaaccccaaatttattgatttgccaaatgttttcgtcagtgatgactcgagaattatattgacgaacctcattctaacctttttaggcgattttgttaccaacgatagtgatccgtatattagatatgagatttggcgtttagtcgatcgatggatgtaccaggggttgcatagtttgccagaagataagaaagatgatgcttttagacatattaagagaaagtatatcagtaagaaaaatgtccccatcaatcaagcattttcaacaaacctaactcatcttagtcagattgggaatttcactgtcttggtgaaaaaattgttaaccccatacgcagatagtaatgaagcattcaccaagtactcgttgttgtatccttgtgatttaggatcagggtatagattcaacaaccaacttggaatttggccatacattgaatttttaatgcaaaatgtgtttgcaaactctgctactattgctaataaacgagatagggtcaacttgcaacttaatttgctagaattatttagcaatgcattacaggaagttgactggaagtttcttattgatgtggcaccgaaaattattcgtgacttgaaaaattttaatgggatatttgactcgcttattcctggtgttcaattggactttgaagtgtttgtcaaattgcatcattcagttgctgtgattaactatctatttgaaaacaagacattttctgctttgtttaagcttgttaatattggagttgattctgtgaatgaatcaggtgaatcggctgcattagtgtcacatgcccttgggttgattaattctttgttgagagttcaaaattcttttataaacaagttgttaccaatattgcgaaacaaagatacgcagcaacaattacattgtgggacagccattgggattggtacttctatgagtctttcgttagcaacccctagaaccatatttgattgtatatactatccaaagaacttgggaacacatggtgttgctgatttctacgaagtgatattgttccacttatctgcagttgtccaatttgccctttatgtcagttgtgaaaatactatttccaacaaagcaatttccatattgaaaggagtaagccaatcgaaattttttgttaccagagtttcaagctctgctgatcccttactcaacaacgatagattgattaccacatttgaaaacatcgacgagtcaataaaaatcaagtttgctttcattgacaagtttgaagaactcgaggactctttgaatatgaaatatgagatattggattttgttttgggcaatctcaatcaatttgatggcaaagtggctactactgcccactttttgttgggatacaaagtgaaaggcgatacattagacttggtacagacaaacgatcaaaacacattactaaaatctttcttaaatacattgagcattagtcttgatttaatttctgaaattgattacaataatggtaataaccatattattgatgttggtccagccaagctttcgtcgttgattttacagattcttatcaagttgtgccaagatccaatttcgtcgtcaataacattgaatcaattacgtgaatatgaagaattgtttgaaaaattggttaactgtcaacctaaacttgatttgaataccgtttggtgtggtaaccagtttgatggggatttgcagattgatgctagcaatgtatttgttgacaaccaagcaagcacccaggctttcttttcctttattaaccagagaaacttaattttgcagtatttgtcattggaattccatagtgtcaaatcaagaactaagcgggagtattattctaaagtgttgaccaacgacaaggaatttgttaatcgtacacctaaggtgttgacatttttaaacattctaaattattcattcaagaactttgaagtgcagaaatacgaatggcttgaccaaaaatttaacatgtcgttgttattggcagaagtaaacgctcaaaagaatggtacattagatttttctgttttaacaaaggttttccgtcttttgtgccaaacgtcaaacttaataacacccgagtcaaagcaattgtttgccgaagaaattatggttgaaggaagtaagatttctgactttgtcacaaagtacctggtgtcgaccgacttgaaggatgtgcagttgaaatgcttacattcatggtgtcaattgatagagattttggttactgacagtggaatcaattcgctgaatttcatcttggaagtgttgcaagttattattcccaaaatcaatgactattttgatgtggacatactgttttctgaagaaatggtttcattatgtgttttattgtttgatctttatgatcagctgactcttgcggacagaaaaggtgaagattttgcacttggaattgagagattgatccccttatttcagacttgtattgcaggtattcttaattctaactcaacacccagcttacgctcagacttgtatgtagttggcaacaagtttttgttaaaatgttttgagagagagtcgtttttgaaacaagtgatgcatatcatcaagtcggtagataaaaagtttttccaggtgatttgtaatgacgctatctactcagagggtccatctagaatcacttctactttattcctcgagtcattagttcacttagggactttggtcaaggttgattttattttgaatgcgttgatcaaaaataacgcattgctgttgctagtcaggtcagttaagcggactgatgccatgatcaaattgtgccaggaaaaaaattcaggagtgactttagatcatttcatatttgacttgatggcattcaaagcaacgctatatttttttgttagagtggccaaatcgaaaaacggggcattgcagttgattcaaaatgaattgttttcaattttgcatcagtcgaagtttttgcagattgatccagatattggtttaagtttacgaattgaagaagttcaagatcacaagactgtcaatgtaaatgttttgctagatactccactttcgataactgacttggtggatccatacaagttgcgaagtgaaaacactatatcatattttgagttccttgtaccaatatttcagctacttacaacagtgttattgtcaatgggaccaaattatcaacctgcaattattcaaactagagaacttatgaagagtgtaaatcgattggtggtaggtgttatgaaaagagatttcttggtagagaccaaacaaattggtcaagggttgtacaaggaagagagtcacgagttggtatcgttgaaagaattggtgaagttgtttattttgattgattcattagctcattatagtgtgtag

SEQ ID NO: 6539 - DNA, 2145 bp, Candida albicans
atgtttggaggtcaacagaataatagtggcaccaatgcctttagtgggtttaccgcaaataacaacaccaacagtaataccagcagccaacaaggtggcacatctgtatttggagcatcaaagtcagccgaatccaatgcgtttggagcttctaacagtacttctaaaccactcttcagttcaggagctcaacagcaatcatcgtcaactccagcatttggggcccccaaatccagttctccgtttggaaatgctagtaccaatcaacccaacgcatttggatcagcatttggtgctgctcctaaaacagggggattatttggagccaacacagctaactcaacagctcaatcaggttcaatatttggacaaaagaaagatgatgctacttccggttctactggaacgaccagtactggattatttggagctaatcccgcttctaacaatcagtcgaccggcgttacttttggtgctcctacatcgaccacctccaatgaaaagacagaagaacccaaatcaactggccctttcggttccaaaccagcagatagtacaacaagtacaggcacaacaggggtatcttttggtactcaaaaccaaacaactagtgcaactagcggtggaggcttatttggggccaagaaagatcaatctccagcaccaacgggaggattattcggctctacaacaacaagtcaggatgccaaaccagcaaatgataccgccacaagtagtgaactgaaacctgctattaatatgtttggttctagtagcactacagccgataataagttgggcagcgggagctcttttggttctaacaataatccactctttggtggtaagaaggatgataacaaatcttctgcatttacgcttggatcgaaaccagaaaataatgaaggaccaaaagcacctttttttgcagctaacaatgacacaagtaaaccggctactagtggattcttgtttggggctaaaaaggatgaggataaaccagctagtggtggatttttgcttagtgttaagaaggacgacgataaagacaaacctaccaccagtggattgtcatttggtgctaaaaaggatgacaataaaccagctagtggtggattttcatttggtgctaagaaagacgaagataaggctgccagtggcggcggatttacatttggtgctaaaaaggatgacgataaagacaaaccagctagtggtggattttcttttggccaaaaatccgatgataagaaagaagataaaagtggttccggaaatgccacatctgctactacagcttcaacggcaaccactactactaccacagctcaaccaaatttgaaaccgacaaaaattgaaccaattcctgtttcaattgataacaaaacacttgatgacttgattgtcaaatggtctaagcagttgacgacaactacaaaagtttttgattcatacactactaaggtcaaggaatgggaccagaaattggtagaaagtggagatgatattaccaaactaaaccaagaatcattggaggcagagacgttgcaaagcaaaataaaccagcagttgctttttgttgaaaaccaacaagatgaattagagaagatattagataattacgagcaacaggcagacattttgttgaacaacatggaattgaacaataacgaagttgtcaatgccccatcatccttgattcatgctgttgacggaagcaataaagataccaactccaaagatgctagtgctagtgtttcctcttcaaatccagcagcctctggcgggtcatcctcatctttgagtatcactgataaattacgtgaaaatgcttatcacaatgctgagttgttagatgaaagattggataacctaggtgccaacttaggaactttgatcaatgaaatcaattcagtcagtgatgttttcaacaagaatttgatcaatgagttagctaacaaagccgatgcaagagattctaccagtaagaaggatgatataaaaccagatgagaataatccatttgaagagattgtgagattattgaatttacatttggaaaacttgaaatacattgaaaatgcagaagaagagttgaaaagcaagttggagaaattgaacaaaaccaaaaaattaaatcattaa

SEQ ID NO: 6540 - DNA, 1947 bp, Candida albicans
atgttatctgctagaaattcattgaagaatattagtcgtcaatttcctaaagcactcactcgtgctcaatccactgctgccgctccaaccggtccagttattggtattgatttaggtaccaccaactcagctgttgctgtgatggaaggtaagaccccaaagattttagaaaactctgaaggtggaagaactactccatccattgttgctttcactaaagatggtgaaagattagttggtattcctgctaaacgtcaagctgttgtcaacccaagtgacactttgtttgccaccaaacgtttgattggtcgtcgttacgaagacccagaagtccaaagagatattaaccaagttccatacaagatcgtcaaacacggtaatggtgatgcttggttagaagctagaggtgaacaatattccccacaacaaattggtggtttcattttgaacaagatgaaagaaactgctgaagctgctttgagcaaaaaagtcaacagtgctgttgtcacttgtcctgcctatttcaatgatgctcaaagacaagccaccaaggatgctggtaaaattgttggtttgaatgttttgagagtcatcaatgaaccaacagctgctgccttagcctatggtttggaaaagaaagatggtgaagttgtcgccgtttttgatttgggtggtggtacttttgatgtttctatcttagatattggagctggtgttttcgaagtcaaatctaccaatggtgacactcatttgggtggtgaagatttcgatattgctttggtcagatacattgttgatgccttcaagaaagaatctggtatcgatttagaaaaagacaagatggccattcaaagaatcagagaagctgctgaaaaagccaagattgaattgtcttctactgtttcaactgagatcaacttgccattcatcactgccgatgcttccggtccaaaacacattaaccaaaaaatttcaagagctcaattcgaacaattagtcgaaccattgatcaagaaaaccatcgaaccatgtaaaaaggctttgaaggatgctggtttatccacctccgatgtttctgaagttatccttgtcggtggtatgtcaagaatgccaaaggttgttgaaactgtcaaatctatttttggtaaagaaccatctaaaggtatcaaccctgatgaagctgttgctatgggtgctgccatccaaggtggtattttagctggtgaagttaaagatgttgttttgttagatgttaccccattgtctttgggtattgaaaccatgggtggtgttttcgccagattgatttctagaaacactactattccagccaagaaatctcaaatcttctctactgctgctgctggtcaaacttctgtcgaaatcagagtgttccaaggtgaaagagaattaaccagagacaacaaattgattggtaactttactttgtctggtattccaccagctccaaaaggtgttccacaaattgaagttacttttgacattgacactgatggtattattaaggtttctgctcgtgataaggctaccaacaaagatgcttctattaccgttgctggttcatctggtttgtccgatgctgaaattgaaaaaatggttaacgatgctgaaaaattcgctgaatcagacaaagccagaagagaagccattgaatttgccaacagagccgatcaattatgtaacgataccgaaaactcattgaatgaacacaaagaaaaattgtctagtgaatcagttcaaaaagtccaagatcaaatccaacaattgagagaaattgtcttgaaagcacaagccggtgaagaagtttcaccagaagaattgaaacaaaagactgaagaattacaaaacgaagccatcaaccttttcaaagacttgtacaaagacggtggtgaatcatctggttcttctgaacaaccaaagaactaa

SEQ ID NO: 6541 - DNA, 636 bp, Candida albicans
atggcaagactttcaggacaaagtagtggcagacagactggccaaggaacaagtgcagaggctatacgacaacagagagaagaacttagaagacaacgagaattacgactacaacaacagcaacaagcagaaagacaacaacaacgacaacaatatcgtaccgaacaatccccaattgtaccagctgctacttcctcgtcacgatattcacaatttggaatatatagaaatcaacctggtgatgtagtggacacattggcatcatcgctaccacgaagaacgacaacaacgagaccagaggttaatcgaacagtacctcgagtgaaaaaaagatatcgtccaggtactaaagctttacgagagatcagacagtatcaaaaatccactgatttattgattagaaagttgccctttgcccggttggttagagaaataagtcttgattttgttgggccaagttatgggttgcgatggcagagcaatgctatattggcactacaggaagctctggaatcatttttgatacatttattggaagacacaaatttatgtgcgattcacgccaaaagagtgactatcatgcaaaaggatatacaattagcaagaaggatcagaggacagtcttggatattgtaa

SEQ ID NO: 6542 - DNA, 747 bp, Candida albicans
atgccaaagttagttttagttagacacggtcaatccgaatggaatgaaaagaacttgttcaccggttgggttgacgtcagattatccgaaactggtcaaaaagaagctaaaagagctggtgaattattgaaagaagctggtatcaatgttgatgttttgcacacctccaaattatccagagccatccaaactgccaacattgccttggatgctgctgatcaattgtacgttccagtcaagagatcttggagattaaatgaaagacactatggtgctttacaaggtaaagacaaagctcaaactttggaagcttacggtcaagaaaaattccaaatctggagaagatcttttgatgttccaccaccaaagattgatccaaaagatgagtactcccaagttggtgacagaagatacgctgacgttgatccagctgttgttccattgactgaatcattagctttggtcatcgacagattgttgccatactggcaagacgaaattgctggtgacttgttggctggtaaagttgtcttaattgctgctcacggtaactccttgagagctttagttaaacacttggacaacatctctgatgaagatattgccggattgaacattccaactggtattccattggtttacgagttagacgaaaacttgaaaccaactaaaccttcttactacttggacccagaagctgctgctgccggtgctgctgctgttgctgctcaaggtcaaaagaaataa

SEQ ID NO: 6543 - DNA, 1215 bp, Candida albicans
atgcgtaaatgcaaaatttttgttggttcatcccatcccgagttgggtcaattggtctgtgatagattgggtgttgaaccggctccatgtactttaaagaaattttccaatggtgaaacatcagttcaaattggggtttccgttagagatgaagatgtctatattattcaaagtggatcaccacacattaatgaccatataatggagctcttgattttgatttctgcatgtcgtggtgggtcagccaacaagatcactgctgtgatcccacaattcccttattcgaagcaatcaaaaatgaaaaaacatagaggggccattaccgccagaatgttggccaatttattggtgatggctggtgctgaccatgtggtatcaatggatttacatgcatcgcaaatgcaagggtttttcagcaagcccgtggacaatttatttggtgctcctactttagcacgttggatccgtcatcatatcccagattgggaaaatgctgttgttgtttccaaaaacccgggtggtacaaaacgtgttactgcattagcagattcattaaagattaatttcgccatgattcataccgacagaagaagaactcaagatgaatatgccaagaagaaagagttgaaacaggcacaaataattgaagaaggtgaagacaatatcgtttctgaattgcaaactgcaagagtcgtgcaaggccatgttgttgatgatgattatcaagcaaatggtacttctgaacatctagccaaagagggtattttggacagtgacgttttgggaggtacttacgatgccactggttctgatgacgaagatgagactaccacttcaagcgaagagaaattgatcactttggttggtgatgttaaagataaagttgccattatattagatgatatgatagataaaccaaattcgttcattgctgctgcagagcatttaagattgaattgtggtgccaaagctgtttatgttgttggtacacatggtgttttcaacgataaatgcttgaaggacttgactgattcgaaatgtattgataaaatcgttgtcaccaacacctatccaatttcaaaagagcaaattgaaaaacacaaagataaattggtcgttatagatgtgtctccaatctttgcagaatgtatcagaagagatcattttggtgaaagtattctggttcttttcgatagtttgtccagtattgaataa

SEQ ID NO: 6544 - DNA, 4107 bp, Candida albicans
atgaaaagaaagagaaacacgattcccgaaagtgacgatgatgccagttttgtcaataacagcgattactctgtgttagataagtcccatacccaacagaccctcgatggcccctttgatgtgcacaaatcagagtcggaacatagtattggagaaacaaatgaatcaaaaatgatttcccacaatactcttgaaacatccactaatactcagctagtatccccaaaagacacgaatgacttgaaactgcaaactgatttaaatattgaaaatgaaactgaccgacctgtcgttgatggaagtgatcccgttccctccaaaaaattagatgcgcctacatcagaagccaaaatgtatagttcgcctttatccctcaatacccatgactcgatagcgcaagacactaaaattacacaggagaaaagaaatgagccaagattagtcatagatcgattagtgctactgatttccaaatcgttatgcggcaaaaaagttattggcccgttccattcatctttttctgctgtcgtaggtcctaatggaagtgggaaatcgaatgtgattgattctatgttgtttgtttttgggtttagggcatctaaaatgagacaaggtaaactatccgaattaattcacaattcaggggatcaaagacctgactattgtcaagttgacattcattttcagatggtagtggatgatttggtagtgcctcaaaaggcagatgtggtacctgactcggagttgattatatcgaggaaagcttttagaaacaaccaatcactgtattatattaatggaaagacaagcagttattccgaagtcacaacattacttaaaaataagggtatcgatttagatcacaagaggtttcttattttacaaggtgaagtagaatctattgctcaaatgaaacccaaagcggaaaaagagaatgatgatggattgttggagtacctcgaagacattgttggaacctcaaaatacaaaaagttgattgaagacagtattgtccgtatagatgagttgaatgacatatgtttggaaaaggctaacagatttgacttggttgagaaagacaaagatttattagaagaaaagaaagttgaagcacttcgatttttggaactagaaaagaaattaataaattgcaaaagtgttcagtttcaaattgagattctggcgcaccaaaagagaatagcagccaaacaagcagaagcagatgcaatcgaaaaagaattagaggaaaataaggagtccaacaaagaaattcttgaaggaattgaaagtgaacttagcacccaaaaggaaattgaacgcgatatcaaagttttgtcagcggagattgacagtttagggaagaataggaaagatattagtaagaaaaatgtttctttggaagaaaagtctaagaacaacgccaacaagttgaagaaaatccaaaagagtttagagaacctgaaacataccgtgagcagctctaatcaaaaactttctaattatgctgttactaccgagaaattcaagtctgatatcgatcgtttaaataaggagttagaaactgaagaagctagattaaacgatataaggtcgagcttgactgaaaagacttctgagtttacaaaagaaatacaactgctacagaaaagtttggatccatgggattctaaattgaaagaaaaggaaaatgaaataaagttagctgaatccgcgatagagatcttgcgtagtcaattgaatagcactacaaaccaattggaagaacacaaggaacgtttgattcagataaaaaagttggggaaagacaaagaggttgaatacagagaaaacgagtccaagctcggcaagatagaggaacagattgcgttaggcgaagagcaatgccaaacagctaaaagtgccttgaacaatttcaaatcacagcttatgagcttccgacaaaagacacaggattcggcagcaattgtccacaatacccaaaacaagaacaaagtgttaactgcattactcagattggcaaattctggtagaatccaaggattttacggtagattaggggatcttgggactattgatcaaaagtacgatgtggcgatctctacggcagcaccagggttagactcgatggtcgtggagactgtcgagacagcacaggcgtgtatcgaatatctacggaaaaacaaattggggtatgcaaactttatttgtttgaataaattgagaaagttcaacttggcgcctatccaaactccaggtgatccaagtagtatcaaaagattgtttgatttgatacagccatctagctccaagtttgccccggcattttacagtaaagttttcaatacattagtggcacctaacttgaacgaggccaaaaaagttgcgtatggggccaagagatggaaggttgtaactctagatggtaaagttgttgacacatcaggtacaatgtcaggaggtggtaactatgtatctcgaggagctatgagattaagtgattcttccaactccaacgatcaagccattactgctgatgagttagaaaaaatgaacacaaagctacaagaaatggaaaatgagtttgagcaaatgaattcagactataatgagaaaattgccatgttgaacaaattacaagttcttaaaccagaaacagaatttgcgatatcaaggttaaagttggacatacagtcattagtgtcagaaaagaaagaggttacccagatttgtaaaaacttgatagccgaacagcaaaaattggaagagaacaacccttttgaacaacagttactttcaaaggaaaaagagttggaagaattagtaaatgcaaaaacacaaatcaaagagcaaatgagtgggtttgaacaaaagatttctgttttggaacaaaagattatggatgtaggtggtgtggagctaaaagttcaaagctcgaaagttgattctatcaaacaacaaatatcaattatccacgagaaaacatctggcgatcgtatgactgtgaaaaaattagaaaatgaaattaacagacacaccaaattaattgagtctttaactactgaacaagaagaagctgaggctgaattggagaaaataaatgaacagcagcgctctcttttatcaaaattagaagaagtgaattcaaaactcaaagaactcgaagatgaacgaaacgacaaagaagataacttggaaaaaatgaaacacgaccttgaagaaaaacaggaccaaatcaataagttcaaactggtggagattgaacttttaaacaaattagaaaaatgcaagggaaccctcaagggtttgaagcaagccatcgaacagaataaagaggaattagatgctttggtcataagggatgttgaaccatatattagttggctcgatgaaaccgaacaaaagaaatataatggtgctttgattgacacattatccgaagaggatatagcagatgttgatttagaggctgtaacaagtgagattgaagaattggagaattatatggcaaatgttaaagttgatattgaaatactaaaagagtacggtgccaagattgttgaatacaatgacaagaaaagtgatttgaaccaggcagttgcagaacgtgacagcaagaaaaactactgtgacgacttgaaacgcaagagactagatgagtttatggttgggttcaatacaatctccatgacattaaaggatatgtaccgtatgataaccatgggtgggaatgctgaattggaattggtggatagtttagatccattttcagaaggtatattatttagtgttatgcctcctaaaaaatcttggaagaatatttccaatttgtcgggtggtgaaaagactttaagttcattggcattggtatttgcattgcacaagtacaagcctacaccgctttatgtgatggatgaaattgatgctgcgttggatttccgaaatgtttccattgtggccaattacatcaaggaaagaactaaaaatgcccagtttattgtgatatctttaagaaataacatgtttgaacttgcacagcagttagttggtatttacaaggttaacaacaagactagtagtgtttcactagcaaatatagaaatgcattaa

SEQ ID NO: 6545 - DNA, 2796 bp, Candida albicans
atgtttgggttttctcttttgactccaggagataatgatcattcttttaaagctgccttattagaatttgataatgaattcaagttgattgcagatccatcttggaatggtgtcgatgtaaatgcagccatgttcatggaagagcacttaaaagaaaccaatgcaatcctattatcacattcaacagcagaatttatcagtgggtttatactattgtgtataaagttcccaattttgatgtccagtatacctgtttattcgacattacccgtcaaccagttggggagagtttctacagtggaatattatcgtgctatgggatttttgggtcctgtggactcggctatacttgagttagatgaagtggacaactggtttgataaagtcaatttattaaagtatcaacaatcattgaatttatttgacaataaggtggtggtcacgccctataatgcagggcattcattgggaggcacattttggttaatcacgaaaagaatagatcgggtaatttatgcaccagcttggaatcattcaaaggactcttttctaaacagtgcttcctttatctcgccatcaactggaaacccacatttactgctattgaggccaacagctttcatcactgctacagatatgggatcggtgatgtcacataggaaaagaaccgagaaatttttgcaattggtggatgccacattagctaatggtggtgctgcagtattaccaacatctttatcaggaaggtttttagaattgtttcatttgatcgatgaacatttaaagggtgcaccaataccggtgtatttcctttcttattctggaactaaaatattaacgtatgcgtctaatctattggattggatgtccaaaagcttcactaaagaatgggaagaattatccagtgtccctttcaacccttcaaaagttgatttgttgctagatccaagtgaattgttaaaactaagtggtcccaaaattgtgttttgctctggtatagatttgcgaagtggtgatatatctgccgaggccttccaatatttatgtaacgatgaacacacgacaattattttgacagaaaagacgacgatgaactttgctagtagtttgagctcagtactctacactgaatgggactcgttagctaaaaaaagaggaggcggagagtctgaagacggtattgctgtgcccatagataaaaatatttcgttgaaaaattggacaaaggaagtagagttaacaggtacagagttgacagagtttcaagaaaaggtggctcagaaaagaaaagaaaaattattagccaaagtgagagatcaaaagaatcagaatattttaagtgccgataccgtagattcagaagactcttctgatgacgatgacgagggagacaatgaagcagaaaagcaaaaaggcaatacttctagtaacttgctaatcaagcaataccagaatatcaatgtcgcagattctaatgttgctcctaacgaagtcaaccctcttgctactcatgaagcattcatcacagatcatattaaacaaagcttggaaaagaacttacccatcgatttgaagataactcacaaattgagacctagacaagcgacgttcccatactttgccactgcgcacaagcaaaaatttgatgattatggagaagtgatcaagattgaagattaccaaagacatgatgaagtttcacacagtaaaattataatggaaggcaaacgaaaatttgatgaaaaaagaaccgccaacaatagaagaaacaagaatcaaaacaaacaacaggcaaacaaattgacgccacaggaacaagttaatcgaaaattgcttcagaaatacctagacacattgtctaatcctaagaaaagagtcggcttaaattatggaacaaagaagaagagtgaaacacaaaagttgaaagttagatgtggattgtcatttgtggatttatcaggacaagtagatttacgttcattgggtattattgtacaagcattgaaaccttacaatttgatattattacctgattatacaccactgcagaacttgactcgtgtacaagagttttttgccaatcaacaaaatgagcaattgcaggagcaaacaaaaaagaatttagctcagtcgtcgaggtatttatctcttgtatcgataagagatggtctttccagtgccatgtcgccttattcaagtggtaacatgaatgttatggttgttcatgacaatgaatcagttaaaataggagccgaatcagagtcaggaagtattggcatcaataactttgaagtgaatttggatgattctattgtcaaagatttgaaatggcaaaagattggtgatgactacaaagttgctaaattgtatggagaattagaacttcagaatcaatttccagctgctaaaaagacaagaactttgcaggattacattaattcaaacacccatttctcattaagaaagttagatggaaccaccgctgtgaaaagacaggaaacaatagccaaccaagtacaagatccaaaaatacgagcattgataacaaacgggcccaagttggctatagggaacattcgattgccagacttgaaaaagaaattacaaaacttgaatatgacagctgaattcaaaagtgagggtacattggtggtaaatgacattttagcagtcagaaagatcgcctatggattagttgaaagcgatgaatctggtgatatagtaatagatggtaatgttggtccattgtattataaagtcaaagaatgcataagggaaatgctagcatatgtatag

SEQ ID NO: 6546 - DNA, 2199 bp, Candida albicans
atgggttataaaaatagtgataacactaataacaaattttccagaaaatcaatgtcaccttccctcactggtgggaaggggaggaaaacagttgggaagaaagtgaaaaaaaccattcctagaaaaactgtcaactggtctagctacgatgttaattcagatagtaatgaagacagtgatgaagaaagcgaaaatgagaatgaaaacgaaaatgatagcgataacgacgatgaagatgatgatgaaactgaacatcatcatcttgatgggttatattcattaatggggaaaagaccacatgattcaagtagtaatggcgatgacgacgacgatgatgacgatgataacgataataaaaacattttcagttcaacttcatcagatggggactccgatgaggctatgtttagttcttcggatgatgattctgacgttgattttgttaaattacaggcacaacaaaaggcacatgcgttgaaaatagccaaagccagaaaaggattgaaaagcaaaccaaagaatgaaagtaatgataatgcgattgcgtcgagttctgagtcgcaatctaactctgaatcacataacgaacatgatgatgatgatgttgacagtataaaaaaattgataccaagacagaagagatttcttaaatatggtaggagaagatctgatgctgaagaagagaagtatcttgttaatgaatttgaaactaatgggtttgatgaaaatgaagaagacgaagatgaagatgatttgcatacttttgatagtgatttctcaactactaatcgcattgtcaattcttttaaaggtatcggagaagatcgtagtaaacccattgtcaaatatgaaagtagtgtttctggtggtagtgattacgacgaagatgattatattgatttgatcaactttgatgttcccttatttgacgataaaaatgggcatcttgatggtggcaagaaaaatagtcatcacaagggaaatactgataagttgaaaaaagataaagtaaagcaaagagccaacagtaaccacaatagtgacgaagatgatgattcttatttatggaattattttttcagttctgataatgattcatcgagtgaagaaactgacgataaaaacaattccaaaacagtcaacaaaagtagaaagaataaaaagaacaagaaggctttgactaataatgcaattactggagctgacgaattatttgaacaaattgaaaatgataatacattcaagagcaaaagcaagtctaatcaccatggcaattcactttacaaggcatatagtgattcaccaatgactatccaggatcttgaggctgaaattagagcaggggctgatgacgatgacgatgatgattatgattatgatagtagtgaatctactgatgttgatgaaagtttaccaaaatcatcgtcaaataataatttggttggatcttccaaaaaagctaccgaggtgttatcttcaaaaaccgctgattatagaccacctaaattgggttcatgggttactgttgattgtaaaccatttggagtaattgatggattatctaccagaacattacaattgaataaatcacaggagccaagaagtgctgctcaaagtggtacttctcattctactagtatagtgaattcatctaatggatctggtctaggtctaccgacaacttcaatcgcatcatcacttgctgctaatccacgtaaaagtatagtggttggaccaacaaatgtaccatcactgatgatatcatctgacgatctggcattgggattagatgagttattaaatgtgagtgaattggacaatgatgatgaaaatgatgtgaaaatatggcgagatttcaataataatcaaaataagaaaaagatccccttgggtgcatttagaaacaaatcagtgctatataataaccacatatatcaagatgatcaacatcaccatctccatcgtcgtaattcaaatgccgacaagaagtttaatggcagtggtcacataaagaaacaacaacctatacgtcgtcaaagtcaatctaaaattgaaagacgtcgagcatcgattgttgaagcagtttctcaaggttatcgaccaactaaatcaggattatttagtgaaacggcattggctgatgttgaagaattgttaggagatgatcgtgatttgatggaattgatccaaggtttataa

SEQ ID NO: 6547 - DNA, 2186 bp, Candida albicans
  misc_feature (2167)..(2168): n=g, a, t or c
atgtcttttgaacgtccggaagtgttttctgcacatgtgttacctggtgaagaaccagctgaaaattcctacaatgagattacaaaagctttccgttcatttattttagaatatagaattgattctcaatttatttacagagatcaattaagagaaaatttgctcattaagaattatttcttaaaggttgaagctgaccatctcattgcattcaatgaagagttgaataaaaaattaagtgatgaccctgctgaaatgattccactttttgaaaatgccattactgatattgctaaaagaattgcttatttgtctaatgacgaaattcctcaagatttcccaacttgtcagttaattttatattctaaagccaatgagacctcaataagacatttggattccgatcatatagcaaaaattgtcagagtaagtggtattattatttctgcttcggttttaagttctagagccacacaagtgcaattgatatgtcgtgcttgtaaacacaccatgaaaattactgtcaaacatgggtttgggcagatccaattaccacctagatgtctagcaccacataactctgatccaaattccacagaagagaaatgtcccaacgattcttatgttatcgttcacgataaatcgacatttgttgatcaacaggttttgaaattgcaagaagcaccagatatggttccagttggtgaaatgccaagacacattcttttacaggcggatagatatttgactaatcaagttgttcctggtactagagtcaccattgtcggtatttatgctatttaccaatccaaacaaagtgcaagaaataactcaacctcaaatgttgcgattcgtaacccatatttgcgtgtattaggataccaaactgatattgataatggtgcaaatggtcaaggtataatctttagtgaagaagaggaagaagaatttttaagaatgtcaagaatgccaaacttgtacgaaacatttgtcaattcaattgctccgtcaatttacggtaatgaagacattaaaaaggcaatcacttgtttattgatgggtggttctaagaagattttgcctgatggaatgagattaagaggtgatattaatgtattattgttgggagatcctggtaccgccaaatcccagttgcttaaatttgttgagaaaatcgctcctatttcagtgtatacatctggtaaagggtcatctgcagctggtttgacagcttcagttcagagagacccacagactagagacttttatttagaaggtggtgctatggtcctagcagatggtggtgtcgtttgtattgatgaatttgacaagatgagagacgaagatagagttgcaattcacgaagctatggaacaacaaactatttctattgccaaagctggtattacgaccgttttgaactcgagaacttctgtattagcagcagcgaatccagtgtttggtaaatacgatgaatttaaaagcccaggagaaaatattgattttcaaagtactatcttgtccagatttgacatgatttttattgtcaaagatgagcacaatgaaggtagggacatatcaattgctcaacacgttatgaatgttcatactggtggaagagcacaagatttgttacaagaaggggaaattccaatagagaaaatgaaaaggtacattcagtatgtcaaattgagatgtgccccacgtcttaccgcagaagcatcagaaagattgtcatcccattttgtgtctattagaagaagattgcaactcaatgaagcagagatgaatgaaagatcttccattccaattaccgttagacaattggaagctatcattcgtataacagaatcattagcaaagttgcgtctttcacctgttgctactgaggaacacgtcgaggaagcaatcagattattcactgcctccacgatggatgctgtcgaccaaggacttggaagctcgaatgatgttaccttgaatgctgaaatcaagaaagttgaacaagagttgagaagaagattaccaattggatggtctactgcttataagacattgcgtaaagagtttgttgattcaggtaaggctagtgcttctgcattagagaaagctctatatataatggaaagacacgaagtgatcaattcagacaccagagacagaacgnnttgagagtcggtggttaa

SEQ ID NO: 6548 - DNA, 3036 bp, Candida albicans
atggccagatttaacaatgaagaaattttgaactcagtaggattaccgagtcaattattacaacaaatcaaaaataaagaaaacaagggtgattatgacgatgatgaaagtgaagatagatttaccaaatttgaaaatatccgaggaacgaaacggaaatcaaaacctataagtcgaaaagacaaaagaaaacaagaaagggaattgaagaaacaaaagagaataaagaaagatactcatcctcaaaaggttcaacctaagaaacaaaatgagaagacagcggatccacttgcgttattggcagccaaaaagaacaaaagtaagtccaaaaaagcagaagaggataacccgttgatggcattacgaaagttgaaagaaaataaaaacagcaaaaagacttcaaaggcaaaagaagacttcaaaattgtaaaggaagatgaattattggtagatgaagtatctgatttaggttatagtgaagatgaccttggcagcgagaataaagaagattttgatgaagatgaaaatattgatatagacccaatggaagctttgcgtgctttgaaggagaagaaaaaaggagtaaacaaggcatcttctgatataagaatagtaaaagaagatgacttggaacaagaagatgatgatatatcggatttcgaagagctagaagaagagaatgaccccttggaagccttgcgtttattgaaaagtaaaaagaacaaaccaactaaaactccgataataagaatcgtgaaggaggatgatttagagcaagaaattgacgatgatgtatctgatttggatagtgatgaaaatgttgatgatcaaaacgaagagggagaagattttgaaggttttgaagaggaaaattttgatgaatcagattttcacttatcagaggaggaagacccattggcaaaattgaaagctatcaaagaggccaaaaagaatgggaaatctgagaaaaccaagaaaaagcaggaaaaagaagtgtatccaattgatcctcatttgcaagagcaattccgcaaagatgatgaagacattgaatattatgcgaaaaaattgggtctcaaaaatgggaaaaaggccaaactttctaaaactgacgataatgatattattggcgggcttttggacggcttagatttagatttcgagtccgaaatggaaaacataagtgatacggccgatgaacatatttctgaagaggatgaagaagatgacgagtatttcagtgatgatgtggacgattcggaaaaaatgaaagaaaacccatatgtagcacctggactggaagaaataaaatcctccgaggaactggggctagctccacaaagatatattccaccagcattgcggaaaaaaatggctttagaagctggcgaaagtgtctcagaggaaacgctcaaattaaggaaatctattaaaggtcccctcaataagttgtccgaagctaatattagttccattgtcagtgaaataaatgcgttatacttgtcacatcctagacagacattgaatgaggaaattacgaatattattcttgatagtattgtgcaacagggaagacttttagatacgtttgtttatcttcatgcaactgttgttgtggcactttataggttgcaaggagttgaattcggtgcacattttattcaaactatcgtggagaaatttgaaacttctaaaaccgaatcttcaaaaacaaaagaagcatcaaatataatttcattgttgtcttcagtatatttatttcaattagtgtcgtctaaattgttatatgatttaatcaaagaattgatcaataatcttgacgaaaataatgctgatttattgttaaggttgattcgtaattcggggaatcaaatgcgttctgatgatccctcagcattgaaggagattgtattgttaataaatgggaaagcctcgacattaccaaaggacgctgttaacacaagaacccaatttttaattgaaacaatttcgtcgttaaaaaataataaattgaaaatagtaaatgaagcaaaccatcagttgtctattaaattgaaaaagtttttgggtggaatcaatgaaaataaatcaggcgatccaattcaagtttcattagaggatattcaaaacgttgccactaggggtaaatggtggttagttgggtcagcttggaaaggtcacgagacagacaaaccaaaagatgttgatgttgtggctatgagtgatattttggataatgctgaaccaaactggatggaattggccaaatcacaaagaatgaacactgatattcgtcgtgcaatatttgtctccattatgtcagccaatgattatattgatgctgtcacaaagttagataaactagcattgaaaagaaatcaagaaagagaaatacctaaagtgttaattcattgtgctactatggaaccttcttggaacccttattatggggttttgggtaacaaattatgtgattcacattcattcagaaaaactttccaatttatgttgtgggatttgatcaaaagattggatggtggcagtgctgatgacgaagaggaggaagataatttcattggatttgatacatttgatgaagaaaataagatgataagaatattgaacttgggaaggtgttatggttttcttttggctgaaggttccatgcccttgcacaatctccgtactgtaaatttcttaacagcttcaagtgatacggtgctattcttagaagtgttgttagtcagcttttttgatcaagttggtaaaaaatcacggaagaactccgttggtggtggtttacaaaacaaagctaaaggaatgtatgagcagaaatatgatgatagattattagttgagcgtgttttgaaagctaaagaccaaactactatgttgagaggtttacaatattttgtacaagaaaaagtcaaaacaagtgaagtcgtttctggaaagaaacaatcgaaaagagtagcatggggggtcgatgccttgtttgatataattgacgaatttttgaaagattcagaagactga

SEQ ID NO: 6549 - DNA, 2427 bp, Candida albicans
atgaataaacttcccaaaggatggaattttaccatagtggacgacaatgccgatctgaccaactcagaaaacatacaaggaaaaagaccaagaaggtcaagaactagtgtacaaaggagtgacggggcttctccaattatccgagacaatatagtcttaataagaactgacgataatgaggaattcaaagtgggcgatactatagagataactcaaggaaaagggccggaggatccaaccactgaatacggccttataacagaaataaagtttggaaatagtgagtttattgaagtcatcgttgattggtttatacggtcatccgaaatagttggtatgcccaatgatttttttgcagacaatgaattgttgttaactccgtttagaagtgaggtgaaatttattgattttattagacccatcaatgttctatctgaaagccaatttgcggatgtggtaatagacgagtctaattcccattccacgtttttagtgaaacgtgctacagataacgaaggaaactttagcgacatttttgattataaggattttagtggtaaagtacttgagaacccaaagaaatgtgcgatacaggttaaagaattgatatctactactgtgcaaaaagaacttttaaaggaatttagcaaggagcaacgtaaaaaaaaagcaaacaaggtttcgacaacgggtcgcgtaactagattcaataaacgcaaggaaagtgtatcaacaaaagctattaaaccggaaaataagcaggttaaaattgagattgataacgacgttttatctgaccaatctgaagaaaaacaggaagagagtgattataatgaggcggaagatgcaaattctgcgttggagtctgacgaagaaaacatttcacaagaactggaggacctggaagtggaatattcaacaaaaaagaagttgaaaaataagaagttgctgcgtagatcgaaggcagcagccaccccttcacccaaacgaaagctacaaaaaaaggacattgaagacatttactccgttgtcacacccactaaaagaatgaaattgggtaaagatgaccgagactcgttaccagtatttttatcaccgaccaaaagcgttcctagtgaattcaccgaccccaaatcggttgctttcaaagaagtgaaacaaagattgcacacatcacagaagttaaatgctctacctggtagagaagatgaatttgccatgatatatatgaatctagagtcagcagtaaacgaaaaaacaggttgttgtgtgtatgtatgtggagtaccaggtatgggaaagacggcaacaatcaaggacgttgttgaacaaatgacatattcgagtgaaagaggtgaaatggaacagtttagttatttagagttgaatggattgaagttattaagccccactgttgcgtacgaagctctttggcatcatataagcggggacaaagtcagtgcttcaaatgcagcattattgttagaggaatatttcaaacgagaagatcacaagagaaaacctttagtgatacttatggatgaattcgaccagattgctaccaaaaagcaaaatgttatgtataacttcttcaattggccgacatattcaacatccaaattaattgtcatagctgttgccaacactatggatttaccagaacgaatgttaacaaacaaaatagcatcaagattgggattaagaagaattcaatttagagggtacacctttcaacaattgggagatatcataacacatagattagaaatgatcactaagaataacagaagaaaagttgtgattacatctgacgcaattgggtttgcctctagaaaagttgctagtgtgagtggtgatgctcgtagagcattgacaatatgtcgacgggcagttgagatagctgagaaggaatacttggagaataaaaagggtgaggacgatagtgagccttaccaggtattgatttctcacatatccactgcgataaatgaaacggtgaactcgccattaagtaaatatattgcatcacttccatttgcatccaagttggtattggcatcactattaagaagatcgagaagaactggccttgctgaaaacagcctaggcgatataattgatgaaatgagaaactcatttgccatggccacacattcagaagaacaaggaagtgacgagttgaatatgcaagatgtcttgtacagtgataaaacatttactgccactaatgaaactgcacctattttgaatttgagaatccattttttcaaacaaatagtgacgtctttggtagaagcaggaattataatacagcagaattcaccaggtgaaagatcaagacttgttaaacttgacgtgcctgaggaagaagtcgtatcggtcttcaagaaagataatgctatattcacagtttttatagataaatag

SEQ ID NO: 6550 - DNA, 501 bp, Candida albicans
atgtcttctaccaaacatccaccattaccctcagtcaccaatcagaaaagaaagagaaagcgtcaaaggttatttgcgaaggatatagaaaatttgttatatgcgatgggtgatcgacctgtgagtacagaggccactgtcaatgcgttggaggatgtattggtcgaatacatttcacaaatatcatactcgatggtaaattttgcaaagagtcaaaatcgaacacgagtcaagttgaatgatttggcatttacattaagaaatgatccgatgaaattagctcgtttccgatacattctagagcaaagttataaaatagaaaaggcgaaaaaaatgtttgatgacgataaatatgataacaagaaccatgaagatgatgacgacgacgacgatgaagaagacgaagataatcatgaaaatggacgaaacatgaaggataaatcaagtactaaaaatgattcaaaacaactgaaaaagaaaaagaagaaaaaccatacttga

SEQ ID NO: 6551 - DNA, 789 bp, Candida albicans
atggctattaaagaagaaacaaatgaatttagtcaaggtaatgaggggaattcccattcaaccaataacaacaataacagcaacaacagcaacagcaacaacaatgctgatgtttctgcaccagtagatgatgacgatgatgacgatggtacttctcaaggtaaaactcaaaaggaaagaagaaaaattgagatcaaattcattcaagaaaaatcaagacgtcatattactttttcgaaaagaaaagctgggattatgaagaaagcttatgaattatcagtattgacaggtactcaagtgttattattagttgtttcagaaactggtttggtttatacttttaccactcctaaattacaacctttggtcactaaatctgaagggaagaatttgattcaagcatgtttgaatgctcctgaagaaggattgggtgatgatcaagagaatcaaagtgatggaaatacaggagattcacctgatcaaagccctgctccagcaaccaatccaaatgtcatgggtgctgcaggtcatgctcatcacattcaacaacaacaacagcaacaacaacaagctcaacagcaagctcagcaacaaatggcaccaatgccttctcatggtttacctacacattattccaatcctcaaggagctggtaatcctggtgtacctcctcaacaacaaggtcaacatcaacctggtattccattacaaggtggttatagtgatcaatacctgtattttggtaatattcaaaataacaacatacctaatcaacagcaatatcaatga

SEQ ID NO: 6552 - DNA, 507 bp, Candida albicans
atgtcatcattagataacgacaaaactgaaaatttcattcaagaaagattagattcattacatgaaatagattgtaaagtagtaactttacttgatcaattttcttcaattttccaatcattttatactaaaagtaaagaagatttttctcaacaaacttccgatatatattctactttgagtaaagtagctattgatttacgtaaagaaattaaaattatggatgataatattggggcatatgataaaaatgatgataatgtgatgatattacctattagtaatgttgatcaaaaaaatacaaaattaggtagaaaacgattggatttagaattggcagagttgaaaagactaatatcggatgagaaacaagttgaaactttagaaaatgaatctaataatgaaatacaacctaaaactgaaagtgataccaaccaagtagaaactaatgaaaatggaaacgacataaacaataaagaaagtgaggacattgaaatgaaagaataa

SEQ ID NO: 6553 - DNA, 1062 bp, Candida albicans
atgattttcaaactaccgttaatccttttgagattgtatatcacatcatttataatttggattttccaaacaactattcttccacaaacattaactaaattaaccaatgtttcaatcaagactcaaactttccaacattattatccatatacttcattagtcaacactcctaaaaattccaattccataaacattataactaattcaaatataacatatataatagctcaccctgatgatgaagtaatgtttttcgctccatcaataattgaattgaaaaaaccaaaatataataatcaaatcaatttaatttgtttttcaaaaggaaattatattaaatcaatggatgaaatacgtcaatcggaattgattcaatcgagtagaattttaggaattgatcaagtttcgatattggattatcaagatggtatgaatgaaacttggcaattgaatgatattgtacaaagtttacatgaaaatttatcacccacaagtagtggtagtgatactaatagcaataacaagccatcagtgttgattacatttgatgatcaaggagtatcaaatcatcctaatcatatttcattatttcacggtacgaagaaatatattcaagaattacgacgcaaactggaaaataagaataaaaccagaataaaaactactactactactattaattatattgacattgatagttccagttcaaccaaattttatgttcttaaaagtttgaatttttttgaaaaatatagttttacaatacttggtaatattgaaattttatttaattttatttcattattaattaaaaaatttataaatattaatattaatgttagttttttcagtaatcaaattattaaatcaaaatttgataataacaacaataatttacaattacaaaatttaaatgatattagattttattctgatttgaatatgcttagtttgagttatgcagccatggcttatggacattttagtcaaatggtctggtttagatacgcttggttattattaagtagatatcttacatataatcatctcatagaacaataa

SEQ ID NO: 6554 - DNA, 3285 bp, Candida albicans
atgaaacggattatggcacccattgaacagaaaagaaacttggctggcaattactccatacctgactctttaaataaggagctacagaaggagtttgcagaagatgtatctactccaatggataaattacaagatgacatcattaatcaaaacaactacaacaagaaacgatttcagaggtctattgtgttggacttggacgagcaaaaaagttataaacaaatcatgaatgaaagaaacttggaaagggaggagctcctagtagaaaagcttattaaagagaaagacgatggaacaactcaaaccgttgaaaacccccaagagaggttactaccccgtaaaagaaagaaaagatgggacatgacaccagaagaatacaagaagcaaaaagagtgtgaaaacaataaagaattggtcaaaaaatctacatcctcacttattgcagaattggtagagggaaaagttcctgtagtaagagggattccattaacagactcgatattagaaaagatcttgccacctggatatgtaaaagtgaatcctccagcacatttcaaacaaaatgaagagacgttaccaccagatttgtctgatgctgtagtatcatcggattactatctaccaccaactaatgaatccgtgggtatttccacaacggagattccaacagatgtacccggagtaaaaggtttggagtttttcaaagaggaagatatgaaatattttggcaagttagttcattccaaaccagagtccttgaatgatgaagaaaagaaagaactaaacgctatgaaattggtgttgaagataaaaaatgggtcgccagtaacacgtaaacgagccatgagacaattgactaataatgcagcaaaatttggtcccaaagttttattaaatcaaattcttcctatattgttggagccaaacttaactccacaggagagacatttgcttataaaaatgattggacgtattatttaccaattagacgagttaattcgaccatatacttctaaagttctcaccgtcatatcaccattcttgatagatgaagatcctacagttaggttggagacacgagaaatcatatcaggcttgaccaaagcagctggtttagccaatattatatcaacattaaggccagatttagaccatgttgatgagtatgttcgaaacttgacggcacgtatattcgccatagtggccaacacattgggattaaaatcatttctaccattcttaaaagcagttatcaagtcgaaaaagaactggacagcaagacatactggtatcaaagttattcaacaattatgtattatgctaggacgaggaaatggtacggcaatattgccatatcttgcaaatatagttgaaatattgaaacctccaatcaatgatgagtcattacaagtcagaactataacagcgttaactttggctcaactagctgaaaacgtgtcgccatatggtattgattcgtttgaacccatattggaaccaatttggtttggaatcagaaaacataggggcaaaggcttggctagtttcttaaaatgtattggagcaatgatccccttgatgtcatatgatccgaattatgaagattacacaaattattatacaacagagctcatgcatatcataacacgtgaattcagatctcctgatgaagatatgagaaagactattttgcgtattataatgggattacctttgtcgagaaagcttattccagactatgaaaaatcaattatcgggccgtttgtcaatgcattttggaatcgtcgaactgcttctgattcagtccaaatcacaaggctagtagtagaggcaaccaaccatttggctattaaattcgattttctcgatatgttagaacatattgtttactttacaaaagacgacaatgagcaattgcggaagttagcgattgaagctattaacaaattaatttccaacaatagtcaagaattaataggtatggattctcaattggatagaaaattggtcgatggtgctttatttgcttttcaaaagcaaactattcaccaaaagatatacctcacctgttttgggacattggcagatgccttgaacgtaagattgaaacctcatttaaattcgatattgagtactatcttgtaccgaatgaaaaataaattggcagaaataagacagcaagcttcagatttgattgctattattgctccggtaattaaacaatgttcagaacatgatgatgaattgttaatgaaattgatattgattttgtatgaatcccttggtgaagtctaccccgaagttttggggtcaattttaaatgctttatattcgtgtcttgattcaattgacaaatcaacattatataccatgtcaaatccttcaattaatcaaatcctaccaacgctaacaccaattttgaaaaatcgacacgaaaaagttcaagaagcatgtataaaattggttggattaatagccagaaaaaactctgaaactataaacgcaaaggaatggatgcgtatttgttttgatttgttggaaatgttaaaagcccaacgtaaaagaatacgtattgcagctaataatacattcggctatattgccaaaactattggaccccaagatgtaatagttatgcttttgaataatctacgtgttcaagaacgtcaattgagagtttgtacggctgtggcaatgggtatagttgctgagacttgtttaccatttactgttttgccagcaattatgaatgaatacagaatccctgagaaaaatgtacaaaacggtgtattaaaggcaatgagttttatgtttgagtatttggatgggaaaattacaaaagattatttgttcgctataacgcctttattagaagatgcattgacagacagagatttagtacatcgtcagactgctgcaacagtaattttccacatagcaatgaattgtattggattaactgataaggattatagtgatgttttcattcattacttgaacttgattatgcctaatatttttgaaacatcaccgcatgtgatttcaagaattttggaaagtattgatgccttaaggttggttattggtaatggagtatttacaaactacatttggtctggattatttcatcctgcaaggaaagtcagagcaccgtactggaagattttcaacaatgcttacgttcaatgtagtgatgcattggttccatgctacccaagaatcgagagtttaccggatgaagatgaaataagttacaaattggaagagttggatttgtttttatag

SEQ ID NO: 6555 - DNA, 1710 bp, Candida albicans
atggcaaagacaaccaaagtaaaaggtaacaagaagaaatctgatacatcaaaagttgtatcaaaagttgtgtctaaactttccagaaaaagatctcatgaagattcagaatccgaagttgaagataatgaaaaagtagttgaagaattagatgctgattttgatgaagttgcaggattattaggtgacgatattgaagatcctgaatcaaaatcccaatccaagaaagaaaaacaaaaggccaaagatgaagccaaacttgaacaattaaccaaacctcaagtatccaatgaagttcctgacaatgacaacgacgatgacagctccgaagatgtattattcgagaatgctgatttttctgaaccaaccatgaaagccatcaaggaaatgggatttaccaaaatgacaaaagttcaagctaaaacgataccaccattattggcaggtagagatgttttgggagcagcaaagaccggatctggtaaaacattagcattcttaattcctgcaattgaattattgtattcattgaaaatcaaaccaagaaatggtactgcagtgataataattaccccaactagagaattagccttacaaatttttggtgttgctcgtgaattgatgcaattccattcccaaacttgtggtatagttattggtggggccgatagaagacaagaagccacaaaattagccaagggtgtgaacttattagtcgctaccccagggagattattggatcatttgaaaaatactcaatttgtgtttagtaatctaaaagctttggtgattgatgaagccgatagaattttggaaattgggttcgaagatgaaatgaaacaaatcattaaagttttacctaatgaaaacagacaatcaatgttgttttctgccacccaaactacaaaggtggaagatttagctagaatttcattaagacctggtccattatacataaatgttgtgcccgaaaaagatgtttcaactgctgatgggttagaacaagggtatgttgtttgtgattccgacaagagatttttactattattttcattcttaaaacgaaacgtcaagaaaaaaatcattgtgtttttgtcatcttgtaatagtgtcaaattttacagtgaattattgaactatattgacttaccagtgttggatttacatggtaaacaaaagcaacaaaagcgtacaaacacttttttcgaattttgtaatgccaaacagggaatattagtatgtacagatgttgctgctagaggattggatattccagccgtcgattggattgtccaatttgatccaccagatgatccaagagattatatccatcgtgttgggagaacagccagaggaactcaaggtaaaggtaaatcattgatgtttttgaccccatctgaattgggattcttaagatacttgaaagctgctaaagtacctttgaatgaatatgagttcccagctaacaagattgctaacatccaatctcaattaactaaattgatcaaaaccaattatttgttgaatcaatcagccaaagatggatacagagcatatttgcaagcatatgcttcacatggattgaaaactgtgtatcaaattgacaaattggatttaaagaaagttagtgctagtttcggtttagatcaagtacctagagtcaatttgagtattggtggcacaaaaaccaaaaagcaaaaaaggtcataa

SEQ ID NO: 6556 - DNA, 2625 bp, Candida albicans
atgtctcgtttttttgtttcaggatacacttctgactcttcttctgaagaggaggatttattgagtacttctgaagaagagttattatcttcttctgatgaaggagaagacaacgaatcagatagttcattttttggtgaagatgatgatgaatcagaagaatctagttctgatgatgaagatggtcgaccatctggtccagcatattttttaaagaaatcatttttaaaaggagctggaggagatgattctgacagtgatagtgatgatgaaggtcgtaaagttgttaaatcagctaaagataaattattagatgatatgaaatcttcaattgaaattataaattccaacaaatataataacaattggagtatagttttaggtgaatttgataagtttggtagatttttgattagatgtaatcaaaccaatttgggtacaccaaaattttatattaaattgttgactagtttagataactccataactgaaactagtaataatgaaagagatgataaaacattaaaagctgatgaagccagagctttcaatactttgagacaaagaattaaaaaacaaataagagaattccaagtttattatgatttgtataaggaaaatccagaagaatttgatgaaaatgaagatgaaccattagaatctgttcaagctggtcttaacgataatgttaaaaatgaagctgataattctaatgttggtgctcttgcgtcaaacagagtattgagtcctattttccatactttgaaaactatttccgaaagtcgtggtaaaaagaatattgataaattggaacaaattgctactttggaaaaattattagaagcaaatgtttctaaaagttcaccatttgaattgatttctatttatcagatgttattatcagttagatttgatgcttcatctaatcaagcttttatgcctttggaacaatggcaaaagaatgaacacgatttaggtaaattattggatttgttggaagctaatgttgatacttatcaagtttctgaattgggttcaactactgatgatattgatattgaaccagttgctaatgcccaaggtgttaaagttattttcggatcaatcacttcttctattgatagattggacgatgaattgaccaaatctttacaacatactgacccacattctattgaatatgttgaaagattgaaggatgaaagtactatttacaatttgattgttagaggtcaagcatatgttgaatccataactccagaagatgtcaagtataattctgaacaattggcaagaattgttttgagaagattggaacacatttattataaaccaaaacaattgattaaagctaatgaagaagaagcttggcgtaatattgaatacaattcatctattgtcagtaaaggttcttcagttgatgaagttattgatcaattgacggaatttttacaaaagcaacaaaaaaacaaaacttatgggaaacatgctatactattctccatttattattatgctgtcaatagtcaatatgaaaaggctaaagaattatttttgagatctcaattttatagtaacatcaattctgctgaatcttctttacaagttcaatataatcgtgctttagttcaattaggtttaagtgcttttagagcaggtagtattgaagaatctcataaaattttgaatgaaattgtcaattctcaaagatctaaagaattattgggtcaaggtttcaattctaaattccccaatcaagctactgttttggaaagacaaaaattattaccattccatcaacatattaatttggaattattggaatgtgtatttatgacttgttctttattaattgaaattccaactttggctgctattgctaataatcataaggattcaaaacgtaaaaatgcttcattgaaatctttcaaaagtaaattggatttccatgatagacaatttttcactggtccaccagaaagtattaaagatcatattgttcatgcttccattgctttacaaaaaggtgattggttaaagagttacaatttattgtcatctatcaagatttggaaattgtttcctgataatgataaattattggccatgatgaaaaatcaattacaaattgaagggttaagaacttatattttcacttataaatcagttttcaagaaattatcgatagaaaaattacaacaaatttttcaactttcaaaagatgaagttgtttccatattagaaaaaatgattactactggaaatgttagtggaggagaaatcattgataacaagtttataagtttcacttcaactactgaaccacaaagatctaaattacaagaattggctattgtgttgaatgaaaagattcaattattaactgaaaagaatgaaaaaacacaatctaatggttatggtaaaaaacaacaaaacaaagatcaacaaaatcaacaacaacaaaaccaaaaccaaaaccaacaacaacaacaaaaccagcaacaacaacaacaacaacaatcatctcaacaacaatcaaataatatcttgtctgaagaatctgctaataaatttagatatgccaatgttaattctaataatgatgaatttcaagctacagcttag

SEQ ID NO: 6557 - DNA, 1989 bp, Candida albicans
atgagtagtttagttaaaaagggaggaactctgtttactccaaagctaaaaaaggtggtcagaaagaaaccagtgactgcagcaaaaccaccagccactccaccagcaacgcaagtgaaagaaggagatgatgatactagtactgttatttttgatacaaaaaacaccagtggagtattagctgcaggcatagaaacgtcaactgcagatgttgaaactagtattgctaccccggcaagcacgcagttaccagattctcccaaaagcaaaccagcctttagaataggtttaaccaaaacatcatcaagtgataaaagtcaaaaggataatgatattgatcccaaagattcttccaaacaatatgcaaatgaaaatgaaaatgaaaatgaaaatgctattgcaagttcctcagaagaagatgacgatgaagacatttttaaacctcctgtggatccgtcgaaaagtcgtagacagtcaataactcagcggagattgtccaatataactgcatctggtttacgaagccgatctgcttccatttcacttcatactgctgattcaaaccatgtaccggctaagattggaatccctgtttccaaaccaacaaaaaggagaagatcgctggcacaagctcgtagttctaaaagagtttctaccacacagccagcaaagccaaaggcagtagttgtgccaacagtgtcaactgaacctacatcttcttctatggataaatctgaatcatctactcgagaagaaaagaaaccacccaaaaaatcagatattaaaggtatcagtgacgactttattgttggtattgatccgaaaactcaaaaattgacaaagttcagacgaaaaggtgcaaccaaggtgaaaaaggagtctgattctgttaaaactgaaaacgagtctgttaaacccgaaggtgatgaagtcaaagttgaggtgttatctgacacggactcaattcctgaagaacccgataatctcattaccaccgtcacacatattcatcagattccgaaaaacatcaatgatgaagatgctgatcttttcggtgaagtggacattgatctagaggaagttactatggccgatttgtgtaaaccgactcttcggatagggaaagtgagcacgaactttgaattagtgagagaggctgaacaacagttgaaacagaaaaaggctcaaaggcgaagagacagggaattggctaggcttgaaggaatatcactcgaagatgctatacaaaagaatgaagagcagagacgaggaaatggtgatgatgtagaaaagcaagacgaagaaccaaaaccagattcactctttgatgaagagccgcaacaagcagctacatctttacagttgacattcactgatggtaaaattggattcaatgaggaatctgctattgttgcgaaacccagggctgatataactagtcgatcggtggagaaatcgaatccatttgccaatccaataacttcaaccacctacagtcgaagagtatttaccgataagtggacctcacaggaactaaatcagttttatcaagcactaagcatgtttggtacagacttttctttaatttcccaattatttcctcacagatcaagaaaacagattaaactgaaattcaacttggaagaaagaagatttccagaggttgttgagctagcgttgagaaggaaattgccagttgatttcgaagaatattgtgccaacacaaagaatgacatcaagtctttggaatactacaatgaagagttgcgcaaagtcagaattgaacacgaacaaagtatgaatgccatagctttggaaagagagaaggcgttgaaggaagatgcagaagcaagcagaagaagagaaatagaaatcagaactggttctaaaccaatgagccgagccgagaagttgaaagaattgcgtaaaaatgaaactgtggttggttctattgatgatgtacgaaagaagagagagactaatgtgtag

SEQ ID NO: 6558 - DNA, 804 bp, Candida albicans
atggcaaggaaacaagttaaatcgaaggttgctgaaaaggttgaaaagaaacaaaacataacaactccaagtgaaaagtcagtagaagatattgaacatgatttacaattaccatcctcatctgatgaggaagaagatatagaacaagaagaattatctgaagaagaaagcagtggtgatgaagaagaagaagaagtagaaaaagaagataatataaatggattatctgacgaagaacaagaagaagtacaacaacaacaacaaaacaaagctaataaatctggtcattccgtcaacaaaatcattaaaacttctgaagctactaccaccaatacatcagcaaacaataaatctacaaaatccaaatctggtgtcatatatattggtagattaccatcaggatttcaagaatcagaattgaaaacttatttttctcaatttggtgatgtgattaatgttaaattagctcgtaataaaaaaactggtaatactaaacattatggatttatagaatttgattcaattgaagtagctaaagttgctgctgaaaccatgaataattatttattatttggtcatttaattaaatgtgaagttgttgaaaatcctcatgaagatacttttaaacatggtaatagaaaattcaaagttattccttggaagaaaattgctaaagaaaaacatgaaaaatcgagaacagaagaagaatggaaagtattgattgcaaaatttgaagaatctaaacagaaaaagcaagaagaattgaaaagtaaaggtattgatttcgatgttagcgcaatatag

SEQ ID NO: 6559 - DNA, 2340 bp, Candida albicans
atgagtaccaattctaaacaattgaataagaaaaagactcgattgtataatagtcgaacgattaagagtcaaatcaatgatcaggcatatgacaaaaaacaacgagttttggatgtgaattcttttatccattcacgaaactttgaaatccgatcatttgagcaatctcaactaaattccaaaaatgcatcatcaacaagagtattccaagatttaccaagagcattaagacgtagagcagcatctcataatgtgaaaagaatccctaaaagattaaggaaaagagccaaacacgagatgagttctaatttaccagtcaagaaaatgcctcgtggtagaagattatataaattacttgtcagaaatagattacttaaagtggcttcaaaaatgaagcagaataagtatgatccattggaaaacctcgtcaataagaaaaatcttcgtaaacaattcaaagcaatacgtgacgaaatcaaaaaaatcgaccaagaaaaacccaaactgtcaactgttgaaggttttactaagttgaataattcagttgggtccagggataataccggtatcaatgaattagccccacggccaaagggaagcatcaagtattataaacgtcaaagggaatttgtttggatacctacacatatatggcatgttaaaagatttcatatgagcaagaaatacgggtatcaaattccatacacccctacacagaaatgtttcaaattaatgaatcgttggaatagacaaaaggcagtgtgttttgatacttcttattttcctacgtttattttatatgtaagcgatgggacaatgtttggagatatagctaaacagttatgtgggaagaaagtaggtaaaaaatttttgaatggggaaaaatcatactatggttggattcatattgatggagtaacaaaggtatgtccaggatttgcatatatgaatcagtctttgaataccataatggtaagggtggttccatcgatgtatgaacaattattccaatcttataaggccaaaatagaaagtatcccaaactccacaattaatgattgtcgatatgctttgggaagtattgaattatcgggtccattgagtattaaatgtctaagtaaaatatttcattttcagaatatctcacccgattcaaaaagcatttgggcatcattatcaaaaattaaggatagtgatcttgttcctgttgggacaacattcactttcaatttacaagacccacgtatttggcagagaccaaccaagttgcgccataaccataaagaagaccaagatatctatgatataataattgcattaaattcttcccctcatatagatcaagatattgttaaaagcttaaccacctcagaagggagatatgcctcatataaggatcaattatcaataaaggaattggggaaattccatgctaatctaaacaagaaaccatcggatatttctcatagtcaaattccagtattgttatccaaaacagacagccaaaaatggttattaattcttccttggcactggatattaccattttggattcagattacaaaggtcacggatattaaaccaggtggatccaaacagatgcatcaatttcaatttgaaaatcacaaaccatactatccacaagattttccttggtcatacgatggatggcaatacaataaattagttggtgaagcaaatcaaattaaagcagcaaagttacctaaaagtcaagtttcagtccagcagtctgaaaagaattattcagtgattttcaatgctaataaatgcgattggacggatttacgaaatatggtattgctaatgaaatatagcaaaatggataggaatacagttaaaaaaggttcaggacaaccagattttgcacaatatgatggtcctgagagaatcatcaactctgttcatgatttattgcaaactacaaagtcacttgaaaatgatgttaccgacgtgaacgaaacaacagtcgaattgtatacaaacaatcaatcgcaagtggatttttataacaacacctacaaaattgcaaatttggctgaaattgtacacacaaaattacctattgttcaagtaagtcttacagttgttaatgatggtacaattgaagataatgcaagattgtattcagacccaagtggaactgatattcattgtgttgggtttgttactactggagccatgaatttgaatcttggaaaatatagtggcattggtacaattatagctcaaaagtggttaattgaagagaatggccacaagttgtatgttagaaatccaggaaagtcaaaagtttatagtgttttctttagggttatatag

SEQ ID NO: 6560 - DNA, 1632 bp, Candida albicans
atgtatagatctcataataataataacaattatcactctcgtaatgatggctccaatggacgaataaacaaaccaagggaccctaaactgcaagataaatacgtggcgtatcaacaaaacattgaacaacaattggcaagtcaagaaaagaaacaagcgtatagaagaatcaccgatcatgggaataatatgggacgatggtatattgagaaatcattaggattaactaatagatcacaacaggcaatcggaactatacgaccggaatcatcatatttaattgatttattaccttcattggcgtatagttcatcattcaatttaaatcgaagaaataataaaaacaatttagctgtattagatttacaaacgaaatttgttcatttgtcttcaaataaagttaaacacacgataaacactgttaaatggactcctgaagggagacgattattggttgcttcacattctggagaattcacattatggaatgggatgacgtttaatttcgagactattatgcaagctcatgaatcgccaattttaacaatgaaatattccaatcatgatgaatggttattgagtggtgatcaaaatgggacagtgaaatattggcaacctaattttaataacgttaataatatttctgctcatgctaatggagtaagagatattgctttttcacccaatgatctgaaatttcttacttgtggtgatgactcggcaattaaaatatggaactttaataatggtaaagaggaaagaactttgagtggacatcattgggaagtgaaaagtgctgattggcatcctaacttgggtttgattgtcagtggctcaaaggataatttagttaaattatgggaccctcgactggctaactgtgtttctacattacatgggttcaagcatacagttaacaagacaagattccagccaaatgggacagcaaggttgttggcttctgtgtcaagagatagatcgtgtcgaatttttgatttgcgtaccatgaaagatatgttggttatcagagattccgaaacggatttatcatgtgttgcttggcatcctatccatgcctcaatggtcactactgctgcttacaatggatctataagtaatttcttgttggattcatacattcctgattcaaatgaatctgtacccaagagaagtaataacaatagtaatctttccaccaatactaacaacacaattgatgccgtacagaaaatcccttatgctcatgaaaaggctatacacgctgtagaataccatccattaggtcatttattatgtacagctggttccgataagacagccagattttggtctcgtgcaagacccaacgatccaatggcttggaaagatgctgtttatactgatagtaaagctggtgcttggtattattcagttaataataatgtcaatgcggtaatggaagatccaaatgctgtgaaaaatgaagacgatgagactgctaataatgacgatccgttatccaattctggtcgtcgtcgtggtgttggagcttcagctctgggtggtgatactggttctgttccagggttgagatctagaaatgaaacccccaacaacggttcatacgcaatacctggattacgtgggttttaa

SEQ ID NO: 6561 - DNA, 894 bp, Candida albicans
atgggaactcaaaagaaggaaaagcaaagaagggtaagggagaatgatactagagacggtaatcttcgagttaaaggagaaaacttttaccgtgatgctaaaaaagtgaaacatttgaatatgtataaacaaggaagagccattcgtaataagaagggagaaataataaaagctgctgatttacaaagtacagatataccaaatgcaagagttgatccaaatagaaaatggttcggtaacacaagagtgattgctcaagatgctttaacccatttcagagaagctatgggtgaaaaatccaaagattcatatcaagtattattgaaaagaaataaattaccaatgtcattattggatgaaaaagatacaactgaatccccaactgctaaaattgttgaaaccgaatcgtattcctcgacatttggtcctaaacaacaacgtaagaaacctagagtcgctgcttctagtttggaagatttaatgaatgctgctgaagctgattcaacccaattccaagaaaagcaagaattggattcaactcttggattaatgggtggttctatcttggataaagatgatttcacacaagaagctaaagaggctattttccataaaggtcaatccaaacgtatttggaatgagttgtataaagttattgactcttctgatgtggttatacatgtgttggatgccagagatccaattggtaccagatgtgaatctgttgagaaatacataaaggatgaatgtcctcataaacatttaatttatgttttaaacaaatgtgatttagttccaacttgggtagcggtatgttttgaaaacgtgaatttttggacaaatgtttttccttttttttttttactactaacttttgcaattccagggaattga

SEQ ID NO: 6562 - DNA, 723 bp, Candida albicans
atgagtggttacgatagtgcattatcaattttctctttttattttaatttagaggttgaatatgcttcagaagctgtcaaaagaggtacttgtgccgttggggtcaaagggaaaaatacagtggtattaggatgtgaaaagagaactgcattgaagttgcaagatccaagaattactccatcgaagatatgtaaagttgatcatcatattcttttagcatttgctggtttgaatgccgatgccagaatattggtcgacaaggcacgagtagaagcccaatcccacaaattgacattagaagatcccgttagtgttgagtatttgaccaaatatgttgctggtgttcagcagaaatatacacagctgggtggtgtaagaccgtttggtattgctaccttgattgctggatttgatgttcgtgacgatgttccaaaattatttcaaactgaaccttcaggtgtgttcaacgcttggaaggctcatgccattggtagatcttcaaaaacagtcaaagaatttttagaaaaacattacgaagaggatttgagtgaggaagaaaccatcaaattaactgtgaaatcacttttggaggtggttcaaacaggtgctaagaacattgaagtttctgttttgaaacctggtgctgttataaaaaaattggatgttgacgaaatcaaaaagtatgtagatgcaattgaggctgaaaaagctgctggagcatag

SEQ ID NO: 6563 - DNA, 792 bp, Candida albicans
atgttcataagaagtttatatcatcgaattagcaacactaaaacaattacaaatctcattatacgaaacatgtcttctacaagtaaagttgaatccgccaaaaaattagctgcttataaagcagttgatgaaaattttcctaaagatgctaaagtcattggtattggatctggatccactgttatttatgctgccgaaagaattggtcaattggacaataaggattcatttatttgtatccccacggggtttcaatcaaaacaattaatcattgataatggattaagattaggtactattgaacaatacccagatattgatattgcctttgatggagctgatgaagttgatccacaattaaatttgattaaaggtggtggtgcttgtttatttcaagaaaaattagtagcggcatctgctaaaaaatttgttgttgttgctgattatagaaagaaatctgataaattgggacaactgtggagacaaggtgtacctattgaaattgttcctaattcatatagtaaaatcattcaggaattatctaaaaaattaggagctaaaaatgtggatttaagacaaggtggtaaagctaaagctggtcctataattactgataataataatttcttattggatgctgattttggtgaaatagaaattgacaatgttggtaaattacatgaacaaattaaattattagttggtgtcgttgaaaccggattatttactaatatggctaataaagcatattttggtgaagaagatggatctgttagtgtatggagtaaatag

SEQ ID NO: 6564 - DNA, 2019 bp, Candida albicans
atgtctgatattagtaaacaaatgaataatttgagtgttaacgatggtgctaacacagtaaacaacaacaacagctttagaggcggccgttcccaatacgtgccacctcatttaagaaacagacaaggtggtggtaatcaatcaggttcctcatcagaatcatcagatgttccatttggaggatctcaacgtggtggatttaactcaaatggattcaacaacaacagaggtggattcaacaatggtggctacaacaacaaccgaggtggattcaacaacggtggcttcaataacagaggtaactacaaccaatcctttggaggcagaggtggcagaggtggtttcaacaacggtggcggtagataccaaagaccaactccaggtgtcggtaaatggcaagatggtaaacacgaaccagctcctcgtaatgagaaattagaagtggaattatttggtactgctgatgattctcatttccaatcttctggtattaactttgacaattatgatgatattccagttgaagctagtggtgacaaagttccagaacctattacttcctttactgctccaccattggacgaattgttggttgaaaacattcagttgtctagattcaccaaaccaaccccagtccaaaaatactccgttccaattgttgctgctggtagagatttgatggcttgtgcccaaactggttccggtaagaccggtgggttccttttcccagttttatctgaatcttacatgaagggaccagctccagttcctgaatcaaatggtgccttctcttcacacaaagtttatccaaccatacttgttatggcaccaaccagagaattggtttctcaaatttacgaagaaagtaaaaaattcagttacagatcatgggttcgtgcttgtgtcgtttatggtggtgccgatattggtcaacaaatgagaaacatggacagaggttgtgatttgttagttgccaccccaggtcgtcttaaggatttgttggatagaggcaaagtttctttggccaacattagatacttggttttggatgaagctgatagaatgttggatatgggttttgaaccacaaatcagatacattgttgaagagtgtgatatgcctgctgtcaaggatagacaaacattgatgttttctgctactttcccaagagacattcaaatgttggcccgtgatttcttaaaagattatgttttcctttctgttggtagagttggttctacttcagaaaacatcacccaaaagatcttgtacgttgaagatgacgaaaagaagtcagttattttggacttgttatctgccaatgaaaatggattaactatcgttttcactgaaaccaagagaatggccgacaacttggccgattacttgtacgaccaaggattcccagctactgctattcatggtgacagatctcaatatgaaagagaaaaagctcttgctgccttcaaaaatggtgctgctcctattttggttgccactgccgttgctgccagaggtttggatattcctaatgtttcccacgttatcaactacgatttacctagtgatatcgatgactatgttcatagaattggtcgtactggtcgtgccggtaacgttggtattgccactgcttttttcaacagaaacaacaagaatgttgttaaaggattaattgaattattatctgaagccaatcaagaagtcccagactttttaactaaaattgccagagaaggagcttttggtaagatgactcgtggtggtggccgtggcggttccagccgtggaccatccagagatttcagaagaagtggaaattcaggatggggcaactctggtaacagtggctggggtaactccggtaacgccagtagcagtggctggggtggtaattcatcctcatcatactccaacactaacagcaattatggtggtggttacaacaataaccaacgttctaactttagcagcggtggcagttacggtaatcaaactggttccaactcctggtggtaa

SEQ ID NO: 6565 - DNA, 2397 bp, Candida albicans
atgacaaaggatgatatcaaattacttttatcagaagatttatcaccttataaattaaccctattaatagtaatccatctatatttatgtaatgaattaccaattcctcaattaatcactttgactcaattgatagaaaacaaacaacaaccacgaccacataatctactatcaactcataatattatacattcattatcacaattatgtgaattatttaatgatatgaatgtaacaaaacaacttttgaaatgtatttggcgtatcaattcaatagaacaattggaaaatgattatatcaataatttaataaaacgagttaaatcagttgatttaattacattgaatataactccaggttctacaaatagtggcaaagtattatcatcaaaatcattatttggttcatttattttaaaaatttgtacatcatttaattcacttaaatttgatgaaagttttttattatttcaagcattccaacaatttagagaaccaacacgacaaagatatgttgaattgggaggtgatatcataaatgaaaataataatcttggtgatgatcctgatagggatttatttactagattgaataataatttaattgaattaggaataaacaattcaatatcattatcatcattatcatcgccgacgttaacgtcaacgccaacgtcaacaaaaatcatctcggtacctaaatatgattttcaacaattattagatcgacaaatttcattattggaaacttatggtacaccaactccacaatatttaaaagatataatgatgatgatgatatcaccaaattctaacgttggtagaattcaaaatattcaatttaataatttaccgtcatattattatttaagatatcttgaatgtttacaaatttcaaattataatgaagcatttgcttctttacatcaatatttcgattatatggtttctaataattccaaatatttttatcattttgcattaatttctcgagcttcattacatcaatattttggtgaagataataaagctatggatgccattgaagaagccatttctgtagctcgagaaaataaagataattcaactttaacttatatattatcttggttatttaatttcatgaaaaataaacccgaattatggaaaaatcgacaaatattttataataataataataataataataataataataataataataataataataatgaatctcaattattagattttttaattaaaaaatcaaaacaaatatcattactgctttattctatgagttataattttaaaactttatatttattgaataatggtgattatcaatcatgtattaatagtttaattaaatcaattttcattgctataaatgatgatgtgaaatcaacatttattaaatcagcagaattagcagcaatagtttggagtaaacttggtgaaccaatattaagtgaagtttataatgaaattgccattgaattaactgataatacaattgatcaatttagtctatttattagactgaattttttaaaattcttacaaggtaacaacaacattaatgaaacttataatcaattacaaaatatgaaaaacaaagtgatgattactactgatcattcattatataatgctattcaaattagaatgttaattattctgattaaaattaatttacaaaaggggaaatataataccagtaaagaaattattaatttgttgttagatactgatttaaaagatttggaattgaaacatgaagtattaatgttacaagtacaattggaaatgtatttacaaaattatagtcatgccttggaattacttgccagtatgcatactaccactaccaccacaaccaccagtagcagtcaaatctatttaaccattcgattaaatttattaaaatgtaaaattttcatttcttcaggtaatccatatcgtgttttcagtttacttattcaacaaatcaaaatagctactaaatgtggatttggtatgattattattgaagcaaaattattactttggaaattattaaatgatttaaaatcttttactgatgcaagaaaattgggtgaagaaataatgccacaaatattcagtttaaatcaatcagaatttattgctattgcatattttgaattagccagaagttggagcaatgataatgatgatgatcttgtcaagtctggtgaatatattaaaattgccattgatagatttaaacaaaattctgatttggttatgttgaagcagtgtttacaatatcaagtttatttaatgaataaatataatcaaccacaagaaatggagttggctaatcgtttattaaatgaaataactcaagagttgcaaaatgaagtggaacaaggatatatatataattag

SEQ ID NO: 6566 - DNA, 1470 bp, Candida albicans
atgtctataccagggtttgggagtgctgaaaaagtaaaccatacagcatcaagtgttacattgacgattcctcagagctatgaatggcggatagaggttcccttcaatagaatactcaagttcaaggttttaactggaatagtggaaataaatgggaccgagttagcaaacaatacagaaattcaattatccgggacaaaaacttacttgtactcgccagtaactgatgcggtaattgagtacgttctagtggaaaacaaagacgatttatcattggtttccgcttctgatgaaggttttgtcgaatacttgagtgacgaatccaatatggattccatattgaacctacatatgtatcttgaaagcaagagacagtacacaaaagattacaatttttcaagttctattgaccagcaacaaagtggtccaaaagtgttgattattggctcaaaatattctggtaagacaactgtgctgaaaatattatcagcgtacgccaacaagatgaacaatacacctgtattggtgaacttgcaacctcgagatggggtttttgctttacctggatcgttgactgcaacacctataagtgactcttttgatgtagaaagttgcaatggatatggattaacaacaaccagcggaacactagtacacaatcccaagcaaccaattgttaaaaactttgggatggcagattttaatgacaatgtggatttttataaattgctaattgagaagttgggcatagcagttttgtctcgattggatcaagacttgaatattaaaaatagtggagtgattattgatacaccggctttgactctgaagaattttgatattgttgagagtatggtgtctaattttttgattgacaatattattgttattgggaatgaacgattagccattgagttgaccaagaagtttgcttataaatcgactcaattgaacatcattaaattaaataaactgtcaggatgtattgaagttgaagatagatttattcgtctacaacaagaacaaactataaaagaatattttaatggaaatttcaaaacaagattgtcacccttcaaaaccgatattgagttgctggggttgaagatttataaaaatgtattgacaaaggatttgctttctcaaatggcatttttgcccggaggagacgatttcgagaaagatgaaaccaatcccgaagaagatccagaaaagaaacagttggaaaaatattatcaagcaattgaagatcccaacagttcaaatttagagaattcgattgtggccataacgcatctaccaaataatgataaaaaactaggaaaagatttactaaacacaagtgtcttagggtacatacatgtgagtaagtttgatgatcagaagaagcggttgaaagtgttgtttccatttcccggtgtgtttcctaaaaatgtattgatctctactaatataggatacaatgaataa

SEQ ID NO: 6567 - DNA, 666 bp, Candida albicans
atgtcaggatttagcaggttgaacaataacagcaatattaatagcactaacaatggcgtctcaccaaataaaagaaacttatttggaagtgccacagcggctaatacatcaaccaacatcaacaacaacaataacaactctaatataaattcctcgatcatcaagcaagaactattagaagaacaaaaactagaaataagagaagcatttcaattgtttgatatgaacggagatggttgcttggattatcatgaattaaaggtggccttcagagctttagggtttgatttgacaaaacgtcaagtcttggacatcattcacgaatatgacacggatgacaccaatttaataacttatgataacttttataaaacagtaggtgaaatgattataaagagggatccattggaggaaatacgccgtgcctttaggttatttgatatcgatggaacaggaaaaatcagtgtgagaaatctaagaaagatatccagagatctaggtgaaaacttgagtgatgaggaacttcaagccatgattgatgaatttgatctagatgaggatggagaaagtatgtattacatttataaagccaacctgtttaggattttagtgctagccatgtttgagtggaaaattactaactttatattattttttagtcaatga

SEQ ID NO: 6568 - DNA, 2013 bp, Candida albicans
atgaattttgctagaactgaaagacgtaaatcaatggctgaacgtagaccaagtactgtctatactccaccggtaatcccacatttagcaggattagaaaaacctcaagatcaatatttaaaaatggataattgtgatgtattaattattggtactggattacaagaaagcattttggcagcagcattatcttggcaaggaactcaagtattacatattgatagtaacacatattatggagattcttgttccactttaacgattgaacaattgaagaaatggtgtggtgatgttaattcagggaaaatccatcaatttcaagatgctcagatttatattcctggtggtaaacaaagtaatcaatatacttcaaaagattatggaattgatttaacccctaaaattatgttttgtcaaagtgatttattatcattacttattaaatcacgagtttatcgatatttagaatttcaaagtttatcaaatttccatgtttttgaaaatgatgatttccaacaaaaagttaatgctaccaccaaacaagatatcttcacggataaatcattatcattaatgactaaaagatatttaatgaaatttttgaaatttttattattggatcctgattataaacaacgagttaaaccttatgctgatactccaatacaagtttttttacaacaagaatttaaattagaagagccgcaaattaatgaattggtttattctattggattaagttataaagaacaaacatcgactaaacaagcattaattagaatgaaaagatttttaagttcatttgatgtttatggtaaatttccttgtatggtgtcgaaattcggtggtcctggtgaattactgcaaggtttttgtcgaagcgctgctgttgctggtacaacatataaattaaacaccaatttaaccgattttgatccaatttctaaaattgctcattttaatgatggttcacatattaaaattaatgaaaaaattataatttctccgactcaattaccaaaatttttacaaagttcttataataaagtggtggaaaatttacaaccttattatgtcacaagattagtcacagttgttcgtcgtgattgtaaagaatggatgtcaggtaatgaatcactggctatagttgttttcccacctcattcattaccaacggataatcaacattcagtacaagtgattatacaaaatggcaattccggggtttgtcctgatggtcaagccatttggtttagtagtacagtcgaacaggatttgagccgtgctaaagttgatttagaatctgcttttgaaaaaatggagacatcattattaagagaaagttcagaagaaattgttaatgatatattaggtgataataataataataataataatgattttgttatgaatgctcaaggcactactaccccagtattagttaattcatttaaattaggttcatcattaattaattttgttcctaaagataaattggaaattgtttgtaaattaggatacgttgaaaaaacttttattaatcctgatttatccaatattttcaaaccaactaaaaccaataatattgtttataaagatgttgaagatgctaataatgaaattatttttactaatatgccaagttcagaattaagttatgatggaattataactgatgttaaatctatatatcaaagaattactgggaccactgatgatttctttgatgttgattttgaagatgaagaagatgaatatgatagaaataatcaaccagtagttcaaccaaaaagaagttcagttgttggtgggattgttggtggtggatccattactagtcttactgctcttagagaacaacataatgaaaataatcatagtgataatgcaattgatagtgatgaagatgaagatgaagatataaatgatatgaatgatatgaatgataatgaagaagaagatgatcatggaaggggtccagaaccttttggtgctgatgaaatggaactctaa

SEQ ID NO: 6569 - DNA, 1170 bp, Candida albicans
atgtctgtaactgctacctcccatgacatcttaaagtccattgatgactctatattacctccagaagatacattatcagaagctatgtataataatgtaaagctagatcactacttcaacaaactaccaaagagctcggaagaaaataatatcaacgaccagacaaatcagcttatagtatcagctgcacccgaactggaagattcccctgctgcagaatggaaattattaagaacattagcaggtgcacaccaagggtggataagagcgattgcattagatgaaataaccaataaatggtatgtcacagggctggccgactctacaataaaaatatgggattttgaaaataattcactcaaagcagtgttgactggacatgtgctaggtatacgttcattgtgcatttctaaacgtcatccatatttattttcagggggtgaagataaatctttgcgatgctgggatttggaaagaagtaattctgacgcggggtgtcaaatacggtcatatcacggacacttgggaggtgtttattctattggcttgcaccctgagctagatgtgttattcagcggtgggaaagactgtgtcgtaagagtttgggacattagaagcagggtagaagccatgactttattgggtcacactaatgatataacatctattgagactgattataacgatccacaggttatcaccagctccatggatggaactatacgattatgggacttgagaaaactgaaaaccgagcttttgataactaatcattcgaaaagtatacgaagcatgaaatcgcatcctaaagaagcgacatttgtatctggtgattcaaacggcgaaataaagcaatggcttttaccaaagggtgaattgttaaatgaatttggaaccagccaactactgccaaaccaaagagataatagcagaattattaacactttagcgattaatccagttacaaacactttgttttcgggatatgacgatggtaaacttgaattctacaattacactaccggtaacttgcaacaatctggacaatctccctctttggctggccctgaacaatcggcaatttatgcctcaacttttgacatgtctggtttaagattattgacatgccatggcgataaaagtattagaatatggggaacatcctattaa

SEQ ID NO: 6570 - DNA, 1302 bp, Candida albicans
atggatttaagagttggtaagaaataccgtattggtcgtaaaattggatcaggttcatttggtgacatttatttaggaaccaacattatatcaggtgaggaagttgctatcaaattggaaaacactaaagccaaacatccacaattggaatatgaagccaaagtttataaagcattgagtggtggtgttggtattccatttgttagatggtatggtactgaatgtgattataatgccatggttattgatttattgggtccatctttagaagatttgttcaattattgtaatcggaaattcacttataaaactgttttgttattggctgatcaattaatttgtcgtattgaatacattcatgccagatgttttattcatcgtgatattaaacccgataatttcttaatgggtattggtagaagaggttctcaagtaaatgtcattgattttggattagctaagaaatatagagatccaagaactcatttacatatcccttacagagaaaataagaatttgacaggtactgccagatatgctagtgtcaatactcatttaggtattgaacaaagtagaagagatgatttggaaagtttaggttatgttttgatttatttctgtcgtggatctttaccatggcaaggattgaaagccgctacaaaaagacaaaaatatgatagaattatggaaaagaaaatgactactccaaacaatattttatgtaaaggattaccatcggaatttttggaatatatgaattatgtgaaaacattaagatttgatgataaaccagattatccatatttaagaaaattgtttagagatttattcaaaaaagaaaattatagatatgattatgtttttgattggactttatacaagtttcaacaagaaaaacaaagagctcaacaaggtaaagtagctgatggtgacaatcaagatcaacaacaacaacaaaataatcaaaatcaaactcaaactcaaaatcaacaaggccaaataacagcaccacaaccaccagtaccagtatcacaacaacaacaacaacaacagcaaattcctcaacatataccaacaccacaacaaatatcacagcaacaacagcaacaacagcaacaacaacaacaactcccaccacaacaacaaaaaacttctgtcactccacaattacaacaatacactgatcaacgtcttcaaaatcaacgagctgtatatcaactgaatcaaaattatagtggcactaaatctgctcaaccacaagcccaacaacctccacaacaaggtaatccagcatggctttaa

SEQ ID NO: 6571 - DNA, 1587 bp, Candida albicans
atgatgcttccacgtaactcaccacatcgtacagaatcaacattagcgtataacaacaacaacagtaacaacaacaacaacaacaacggtagctcattatttcaaagaaaaccattagcgccaataaatagtgaattcaagatatcaaaaccacaacatataaaacccaatacccattctcatacatttaccacacctacaccgaaaacacgaaacaccgccaccaccaccaccaccaacaacaacaacaggaacaatcatcaatatagaaatcccaatttgaatacttcactcgttttcacaccaacgaaaaactcatcatcatcatcatcatcatcgcattcatcaagtttattatcgtcatcaccatttgttgaagaaccggaaaatcaaccagaatcaaatcatactagagctacatcccattatagaacaacttcaacttctcaatataagtcatcagctaataaggatgcatcgcattcattgatcactagtagtaaaagaaaaacatctaccaaacaaacatcagaatcaacaaaccctaaaagaagaaccacaacaacagctacccaaaatacaaataataacaaaattttaaatccatcattatcgtcatcaactattcgcttttcaactgtttcttcttctacctcttcttccaccacctcctcatcatcccatacatcacctaaacctcaacaacaacttacattagatgattttgaatttggtaaaattttagggaaaggaaaattaggacgagtttattgtgtcaaacataaacaactgggacttatatttgcattaaaagtgatgtcaaaatcagaaattatgaatcttaaattagaaaaaagtttacgacgagaaattgaaattcaatcaaatttatatcatataaatattactcgattatattcatggtttcatgattctattaatatttatttattattagaatatagtatagaaggtgaattatatactcatttgaaaaaattaaaacgatttgataatataatggcaagtaattatatttttcaaatcactcaagcattgatttttttacatcaacgtggaataattcatcgtgatttaaaaccagaaaatattatgatatctttagataatcaattaaaattaagtgattttggttggtcagtacaaataaatcagaatcagaatcagaatcagattcacaaccaaactcaaactcaaaaaactccccatcagaagaagcaaaaacagaaaagattaactatatgtggtacattagattatttacctccagaaatgattgaaagtaaatctcatgatttttccgttgatatttgggcccttggtatattatgttatgaattacttgtggggaaaccaccatttgaagcaattaatcgaaatataacttatgaaaaaatcgctaaagtagatattaaatatccttctaatctagacgttgatgctattgatttaatatcaaaattggtggttaaagatccaaataaaagattaagtttaaaagaagtattgaatcataattggataattaaaaataaaccaaaatggccaaaaaatatttacaaatga

SEQ ID NO: 6572 - DNA, 4944 bp, Candida albicans
atggcgattggtaatatagcagctagatatctaagctcactcgaagagacagataccaccgcaaccaccaccaccaccaccacatctaatgttttacagccaagtaatagattgaactccccgacaaagttcaatagaaaaagtcttgacaataatagtcaagatttagatgctttggcaagagctttgaacattactccaagtaaaccggagactcctacttccatctcaaaaggctctgcaacatcactattaagaactaaatttgaatccccttctgctactgtctcgtcgttcaaatcaactagctcaagcaatggggtctcaccaactaagaaaaatcactttgtggaaatcacttctgatgaaactcctagttgggccaacaaaaactataaagacattttaaacaaatcaccaaccaaatttaatacccaatccaatgttcataccccattaaaacaattaaaccaaccaattggcaccccatcatcatcatcattatcaccagcaaaaaacgcctccaaaagctcacccggttatgaatatttatgccgaattgaagcaattaaacaatggttagaactggttttacaagaacaaatcactcaatctgcttctcaattgatatcttatattcgaaatgggatccaccttgctaaattagctaatgttgtcttacccacgtcgaaaccggtttttttaaatgatagtaaacttcagttcaagcataccgaaaatatcaatcgatttttccaattattagattttttcaatatgccagatttgtttcgattcgaattaaccgatttatacgacgccaagaatgtccctaaagtgtggttctgcttgcatgccttgagttatattttgcataaacaagatcctctgtatcctgcaatgaataatttggtaggcaaagttgatttcagtgccgacgacattcgaactgccaatcgagcactagttaattccccgttaccaaacttttctagtgctgatactggtgaaggaaaaagtgacactagcaataataatagcagtactacaagtgccactgctgcatttatggataaagtcacttcaccggttaagaaaacaccatctccattaaaaagaccacaacaattgcaaaagaaacagttagaattggtcgaagataataaaccagaattgacacaagattctagcggactctccaaaattagtagggatgacccctttactgaccgtgtggatttggctcctccttcaacatcaaatgcaaaattagaattacacactccaccatcaaaactgcttgaattcaaaatcaagctgccaataattgatctatctcatagagattctgactattataccccagagttggaaagtcatctccccaatattataaagtttcaatcgttggctagaggggctgttttcagatacttgatgtttgtggatagaatcttgttaaaatcataccaagacgagtttaccaatcttttcgcaataatacgtggtaataaagcgcgtcgcaaaactgttcacaaacatcgagatgaattgaggttatatagctttgaaattattgaattacaatcaataattaggaaaaactttgttatcaacaaaaaacccaatttcacttctatcaccaatgatgttgaaacagttgagttacaaagtttgattagaggtaaattaacaagagattggaaaaaatacgttaccaatggattggagaaattcactccccagattattgatttccaatcattggtcagaatgaaatcaatttattccaaatcaaataaagtaatttcttataaagacgaaattttgccatcactcattgaattacaatctattgcacgaagccaattataccatcgattctctcgatccaacgccattgatgaaacggaaattattaaaatccaatcaatcattagaagaaatgcagttattgaagacctttacaccaaactttccaaggttcgttctaataaacgtagattgatagagttgcaaagcattgctcgtggaggggttgctagaacaaagttatgcaacagtgttttggtcaccttaatttatgaagacgggatattgaatcagcttttcgccaagattagaggtgacaattaccgtaagaaattcaatagtcaaaaatcggagctattaaaatatgagaaatcatctatcataccagttcaaactttattcagaggagttctttcccgctataccaaagaggtcacactcagtgacatatttgatcaaattgacagtgtaatcactttgcaatctgttgctcgtgggaagttgatgagaggactgatttatgagtttagtgactactatcaaaagcacatcaagcaagttgttaaagcacaggcaattttgcaacgtgtttttgctcaaaatgcttacaaacagttgataactagtaaaaatcctccccttaaggttattagaagatttgctccattattgtcaaacaatgaccgtgattttcaagacgaaatgactttatctgatttgaaggatttgattattgaaaagtgtaaagccaatgaagagtatgaaaatcagattgagcaacttgatatgaagcttgggttgttagacaagaataaaatcagcattgaggaattcctcaaaccaacaaagggtaaaactttcaagcctattgtggaaaatgtgaaaaatttggaacgattgaataaatcattgaagaagaaaattgaattgtggcaaacactcttttattttattcaaaccaatcccatttatttgacaaaattgtttaattccattccatatactaaaaatcagacaaaatctggtcaagatttgttccagtctgtgattcaattattcccagtaagagattcatcaattacttatcattctcgtgaagagtactttttggtcaaacttatgatccagttgatgcaaaatgatacagctaactcaaacaatttgggtgacatcaccaagttgcatttgacaaactggatagatttctttactaatttcaataatcatacattccagagacaacacttgaaagcacttttgggcaagtttgttatacgtattgttgataatgaacaagtggattttgaatcagatccaatcagaatctacaatcaaatcattgatcatgagatgaaagtttatggtcgtagtgaaaagtctcgtgatatttcaccacaggcagctattcagttgccagaagttagtaataagtttgtgggcaatttgatgtcattaagggagacttgcagtgatttgctttcaatgttacaaaaaaatgcttctggaaataaagccttgttgcaaatccctgaccatgtgaaattgatttgtcgtcaaggttatttatgtgctcaaagaaagttccccgacaaatctgatcaacaacatttagccgttgctggggttatatttgtgaaacactatcttgggtctattttgcaagtaccagagaactatggaattttgactggtaacaatgatacccagaaagctaaaagcaaagacaatttgcgatacttgtatcgtgttatgttgcaattgttttcaatgaaaccatttaatgacaattttttgaaaccattgaatgagtacattatggcaagtaccgacaccgttaagtcaatcattagtcaggcaattattaatgtgggtgaaattgaaaccgtgtatgaattacatgattatgatgatcttgtgactcatcagagacctaagttgactatcagtgtaaactcattgattcaattagagaaatccatcttgcaaaatgtcgatattattacaacaggcaatgatgatcaattgtacaaaacatgcgtcgaggtggaaaaattgttgatttccccacaagacatgttgacattgaccgatttgtcatcggttactttgaacttaaatcctaccacacaagaggagtctatagttgattcaaaaactaaaacattgttcacccaagccaaacgctgcttgttgtatatcattagagtgcaggaagaagacgacagtgatgatttattggaattattaatatcgggcatcaaaccaagccacgaacaaagattcaaggagattgttcaatatgaaaaagcggagcaagatatttccctcaacaacagcaagagtgttactgctaatactgtcaataaaaagaaatctaccagaccatattcgggtacatcattaggggacttgtcgaatttaacctatcatgaattgaaaaaaatgtgtttggagattattcttaagctagaatcaatgggggagttgactcgtaaaaactcatttcaaacattgctcaatcaaatagctatggacattaaaacaaaggattctcaaagacaatgccgttggcaacaattgcaagtttctcaaaaaactattaagaagttgtctgagaaggaaaactatttgaaaacgcaattgcacaactataacaaacacgttgaatcggtattattggaattacaatcaaaatcaaaatcaaatgataagaattggaaaagaaggctatttaatattatggtcatccccgttttcagcaaacaatatttctatcatcgtgaattgaggaaacataatcgcttacctaaatttggctcctataaatatctggccaaaaaattgatagatcaaaaagtccttattgatttttctactgccaacaatgttgctacagcatcaaagttggattttatgtttagttgtcatcaagttggtaaatttactattgaagttgcctcaggtacagtgaacattccaggtgctaccaacaccataactttagacgaattgttggcattgcagtatgagaacaaaactaaatttgaattgttcgatggtatggcaacgtttgattctaataattttatgggattgatatttagaaagttctatgatttgaagaaagaataa

SEQ ID NO: 6573 - DNA, 1770 bp, Candida albicans
atgacaggtgaaataactatattatacggatctgaaactggtaatgcagaagaatatgccaagtacttgaaacaaagattaagatcttacaatttgaaaccaatcaaccttgcatcactagacgattatcctttgaagcgattagtaacacacacttcgtatttaattataatatgttctacaacaggacaaggagaaatccctagaaatgggaagaagtttatgaaatttatcttgaagaaaaaattacctctggatttattccagcatttgcaattaacaacatttggtgtgggagactcgtcgtatgttaaatataattatgctataaaaaaaattcacactagattaatgcaactagggtgtcagcttttatctcctcggtgtgaggctgacgagatttcacctgaaggtgttgatggatactatattgaatgggaggctgaacttattgcagcattattaaacaaatttccaagtgccagtaaaattagttctgaggctgttccaatgcctgaatatagaatttctgtttcaaaaagtgacacggcaatagatccagaagaggttattgacaatcccattgtgtcacgacttggaaaagatgggctcaaattaggcactgtattagaaaacaaccgactcacaagttctaaccatttccaagacgttcgagattttaagttttccagcaatgggttgaactatctaccaggagatactgtttcattgtttccatgtaacttcgatgaggatgttgacgcgttattacaactgcagccccaatggcttaaaatcgcagataaaccattaaatttgaaaaattttccacatttagagggcgggtttgctgacatcttaacattgagaacgctattcaagtaccatctagatataatgtctattcccagacgaagctttttcgctttattatggcattttgttgacccatcgactgaagatggagaaagagaacaagcaaaattaaaggagtttggcagcttagatgaaccagaagagttgtatgattacgcaaatagaccaagaaggctgatattggaaactttactagaattcgaaaataatttaactataccggtttcgtatattctagatttgtttcctttgattagaccaagaatgtttctgattgcatcatgtccatcatccaaagaagttgagttggttgtggcaattgttgaatacaaaacaatcataagaaaaataagacgtggggtgtgtactaggtggcttaagactttgaaaccgggagatcaattcctattctcgatacaaagatccagtttcaagtataaagacgataatagccctatcattatggtggctccaggtactggtatagcacccatgaagtctttgattgatgaagtgatacaaaacaactctaagcaagagctttatttattttttggatgccgcttcaaagagaaggataatttaatcgaatcgttttggcatggaaatgaaaatcaaaatctacatttagtcagtgcttattcaagagactcgaattcaaatataggtacgttcaagatgcgttgtttgcccattcagaacttattgggaaaattgttaattgaacagaatgcaaaagtgtttgtatgtggatcgagtgggaaaatgcctagagaagtaaagataacttttgttgaaatagtaaagaaattcacgggaatggacgagggagatgctcaaaagtacattatcggcttagaggacaatggtaggtataaggaagatgcttggtag

SEQ ID NO: 6574 - DNA, 1035 bp, Candida albicans
atgtcgccatcaacatctacggcagtacaggagtatattggaccaaacttgaatgttacattaacatgtcctgagtgtaagatatttccacctgatttggtagagaggttcagcgaaggtgacattgtctgtggcagttgtgggctagtattgagtgatcgtgttgtggatacgagatcagaatggagaactttcagtaacgatgaccaaaatggtgatgatccttctcgtgttggtgatgcaggtaaccctttattagacacagaagacttgtccacaatgatttcttatgctcctgatagtaccaaagcaggaagagagttaagccgagcccaatctaaatctctagtcgataaaaaagacaatgcattggctgcagcatatatcaagatttctcaaatgtgcgatggttatcaattgcctaaaatagttctggatggggccaaggaagtctacaaaatggtttatgacgagaaaccattgcgaggaaaatcacaagagagtatcatggcagcttctatctttattggttgcagaaaggccaatgttgctcgttcattcaaagagatatgggctttgactaatgtgcctcgtaaggaaattggtaaagtgttcaagatcatggacaagatcattcgtgaaaagaatgcagccaaccctaatgctgcatactacggtcaagacagtattcaaaccacccaaacttcggccgaggatttgattagaagattctgttctcacttgggtgttaacacacaagttacaaatggtgcggaatacatagccagaagatgtaaggaagtcggggttttagcaggtagatcgccaactacaattgctgcaactgtaatttacatggcttcactagtgtttggatttgacttacctccatccaagatatctgataaaactggtgtcagtgatggtactatcaaaacttcatacaagtacatgtacgaggagaaagaacaattgattgatccatcttggatagaaagtggtaaagtaaaattggagaaaataccaaaaaactaa

SEQ ID NO: 6575 - DNA, 1377 bp, Candida albicans
atggaagttgccaaactagatcatgaaataagagtgaaggaacaagaagaagaagaagaggaggaggaggaagaagttttttataccccaggaccaaaagaattatatgatgttagattagaagtactaaattattcattgaaacaatcagctattcgattacaaaaactacgtcaactaaaacaatccaccacaaccaccacaccaacaacaacactaagaactggaataccttcacaagatgaaattaatatattaaaatcaagacgtcaattaaattctaacctatcaaaatatgaaatttatggatctcaatttataccaggaactacaagaacaatatcaaatattaaaatttctaataatgataaatatattgcttgtggatcatgggatggatcaataaatttattaaatagtcaagatttatcaatttttaaaaaaactccatcaggtttccataatgaaaaaatatcaggattaagttggaacaataatgataatcaattagtatctggaggtaatgaaggaaccatcaatatttggaatgtcaatgaaaacaacaacaacaacaacaacaacaacaacaacaacaacaatgaaaaagaccaaaatggtttattattatcgtcaccaatagtttcaattaaacaagctcataatgatagaatcacaaaaacattatttcatccaataaataatttaattatttctacatcatttgatcaaacttggaaattatgggatttgaataaattatcaggacaaagagacgatttacaatgtttagttgaacaagaaggtcattcaaaacctatttttacaggagaaattcatcctgatggtggattatttatgagtggtggccttgatggtattgttcatatttgggatttacgatcaggtagatcaattgtaacattacaaaaacatatggcgggagtatattgtttagattggtcacctaatggatatcaatttgtcactggtagtggtgattgtagtttaaaaatttgggatttaaggaaactcgaaaataataattccaataatgaattatattcaattccggctcatactaaattaattactgatgttaaattttatcatcaaagtagagatataatgcagaaacaacaacaacaacaagatcaacaacaagatcaagatcatttattgggatcagagtttaatgatgggaaattcttagtgagttgttcttatgatggtgatgttaacatctggtcaagtgataattggattaaaatcaaaagtttaagaggtcatactgataaagtaatgagttgtgatattaatagtactggtaaatggatagtaagtagtggctgggatagatcaataaaattatggaaataa

SEQ ID NO: 6576 - DNA, 2787 bp, Candida albicans
atgtctggtagaagaagagcatatccacaacctcagtatgcaacaggaccagctgaaatggctacaccaccagctcctaatcagttccaacaacaacaacccgtacaacaaccagtgcaacaatatggagttgaccaaatgcaaggccaatttcagcaaatgaatgttggtggagtgggaccaacaggagttccaccagctccacaatactcatatcaacaacctgggcagcctcaacaatcaccccaactcagttatgatccatatcaaccccaacctcaagcaaatactggtgtgtacggacaaggcatgggcggtgttccaccatcagcagtgcctgctggcggagctggatatggcggatatggtcaacaaaacaacatcggtttaggtgctcaattgaatgctttgtataccactgacttatcaagggaccttccaccaccaattgccgaattgtccttccaaccaccaccaataacattaccagataatgcaactttgattccagcatctaagactgctaatgcaactcctgagtatttcagatcaactttgaatgtggtaccaaccaattcatcgctcttgaagaaatcaaagttaccattggctattgttgttaatccttacaacgctttgacaattgacaacgaaaatgtaccagtcacctgtgatactgtcattagcagatgtcgtcgttgtcgtggttacatcaacccatttgttactttggctgagaatggcagacgttggagatgtaacttttgtaatttgttgaacgacattccaagcgcttttgactatgacgaaatcagtggccaagtcaaaaacaagtttgacagagttgaattgaaccattcagttgtcgaatttattgctccaaaagagtacatggcaagagccccacaaccaattgtttacacatttattattgatgtttctgtacacgctattcaaagtggtttaaccggtaccataaccagaactatcttggaaagtttagatagaattcctaacgaaaataaaacagctagagtttcattcatcggtgttgactccaacttacattatatccgtttcaacgaaggattagaaggtaccgagattttggttgttgctgatatagatgagccattcttgccatctccaggtgggttgttggtcaatttggatgagaatagagaagcgattgaaaaattattgttagactttccttcttattttgaaaacaatgctaaccaaggttttgctttgggaccagctttgaaagcaggtcataaaatgataagcaacattgggggtaaattagtatgttttgctgccactttaccaaatattggtgaaggtaagttgagtgtaagagacgaagctagcgttgcaggtaaagctaaagaagccaaggctttattagctccagctgatagtttttacaagtcttttgccgtcacatgcaattcttcacaggttacagttgatttgtttttgactcttccggcataccaggatgttgcccctttgtcaaacttggcaagatatattgcagggcaaacccatttctacccagcatggactagcaacaaatacgaggacgttgccaagttatctaaagaagttagcgatcatttgtcacaagatattgcccttgaagctgtgttaagagtcagaggttccactggattcagaatgtcttcattttatggaaacttttttaaccgttcttctgatttgtgttcattcccaactttcccaagagatcaatcttaccttattgaaatgtcgattgaagaaacaattaacaaacctgtggtttacttccaagccgccgttttgcactccacatgttttggagagagaagaattagggttatgaacttggctttgccaacatcatccaagttggtagatatttatgcctctgccgatcagttggcaatcgcaaattatttcactcacaaggctatcgaaaaagcattgtccagttcattgccagaagctagagaatacttaattgccagagtcgtagacatattgaacgtttacagaaaagaattagttgccggaaacgtttctggtgcttcaccattgcaaatttcgactaatttgagaatgttgccattacttttgttctgtttgaccaagcatttggctttcagaggcgagagagtgccttcagaccacagagcagcagctttaaacaatttgggatcatctccaattcctcaattaatcaaatccatctatccaactgtatattctttgcataacatgcctgatacctgtggattaccaggagtcaaagaagacgaagatgatgaggaaggtgctggagcagaaattgatgttgttcttccagacccaattaacgattctaaagcttcctgggaaaactacggtttgtacttgattgataatggcagcgagttgttcttgtgggtatctggtaatgtcgtgccaggtttagtacaagacttgtttggtaccgagaatttgtacgaaatcccaactggtaaaactgagttgcctgagttttctctcgaggaatctgaattcaactacagagtccgtcaaattattggcaaaatcagagaacaaaacgattcaattatttggaagaatctctatgttgttgttggtgcatcatcaaatgaaccaattgaaatttcacaacaacgtgatttgatggctttgagaatgtgggcttcaagctgcttggtggaagataaaaccggcagcgaaccatcgtatagagatttcttgacttctttgaaatccaaagtttctcaataa

SEQ ID NO: 6577 - DNA, 1632 bp, Candida albicans
atgtttagacaagtgaaaagacgtacagctggtagaagaaattttgaagatagtactagcacagctactactactactactactactacttatactaacggtgaaaaggattcaccaaaatatcttaccccgtcagcattatacgcttcaaggttatcattttatgatttacctccaacccaagaaatcacattagaagaatttgaaacatgggctattgatagattaaaaatcttaattgagattgaatcgtgtttagcacggtctaaaacattaaaagaaattgaaacatcgattaaaccattattattaaaatatttaccattaaatccaacgagcggtggtggcacggtaaattatgaaaaagaacgaatgaaagatcattatagtcattttattcttcgattagttttttgtcgtagtgaagaattacgcaagaatttcattaaaaatgaactgacattatttaaagttagatataatttattacaacctaaagaacaacaagaatttattgaattaaatcatcatcgattaatttgggaatatattactccggaagaaaaaacaaatttacatcaacaattatttaattctagtgggaatttaattaaaaatcaatttatgttacaaggagaaaatttaactaatgatcaattaaaacaatttataatgtataaagagaatttcattaaattaccatttgaaaaaattacggggaatttaattagtaatcgatcaatttttttatttaaaggttatggatatttaccagctagtttacaattaaatttattatcaattgaatttataaatattttgaatgataatttgattaaaacttttcaaacaattccaagattagaagaagatgatagattattaccattacttaataatttatcgaaaaatttttcaaatttccaatatgaatcagaaataaataagttagatgaagaatttatttctgatattaattcaaaactgataattactcctaaaattactaaacattatccattatgtgctcaacatttacaacggaatttaattgctaattctcatttaaaatataatggtagacaacaattggggatttttttaaaaggtattggattaaatgttgatgaagctcttaaattttggtcttctcaattcattaaaaataattccatgtctttagaaacgtttaataaagattataaatataatattcgtcatcaatatggattggagggggcaagaattaattataaaccttgggattgttccactattttatctgaacctcgtccgaatattaaatctgaatatcatggttgtccatatcgtgatttcaatttagatgttttaattaataatttgaataatatggggattacggatcaacaagatttgaattcaattgttgatgatgttaataaacatgattatactattgcttgtactagagtatttgaattgactcatcaaaaacaattaatgggcaaagaaaatatgaatatgcatattaatcatccaaatttatattttgatagatcaagacaattagaaagaagtgaaaccaaagataaagaagttgttaacacaggtagtagtagtagtagtagtagtagtagtactgattcatag

SEQ ID NO: 6578 - DNA, 492 bp, Candida albicans
atgataaatacgcttttggactctttggctgatgcagccgtatcacaggactctacatttaactttctgggtacattaatagcttcgaaagaagacgatagaattgaaatacatactatatgtattgcttctgatatcaacaatgatccgcaggggcacagtgtcatggaggctatttcaaaaattgctgaaagggaagtcatgaacagaaaaagtaaccaaagtgagcgaggatacctttgtaatgatatgcttgtctatacaacccatgagccctgtgtaatgtgttgtatggcgctagtacactcaagaattggacgaatcatatacttgaaaccagaaaagagttctggtgggttggaatctcattatcagctcggtgatcgagatggactaaattggaaattcgaaatatggaggtggttgggagttgatgaattggcacgattagatagaataaacgaaaatagatgtccatgtatagaatattaa

SEQ ID NO: 6579 - DNA, 1089 bp, Candida albicans
atgtcactctgggtagataaatatcgtccaagaaccttggaccaattgacatatcatgattctattacgaatagtcttagagccttagcaaagtcaggagactttcctcatttattagtatatggacctagtgggagtggtaaaaagaccagaatctattgtacattgaatgaaatttttggaccacaggttgaaaaattgaaaattgacgtcaaaaattttgtcacttcatctaatagaaaattagaattcaacgttttaagttcatcgaatcatttggaaattacacccagtgatatgggcaacaatgatcgtgttgttattcaggatttattgaaagatgttgccagtaccgaacaagttgattttgccaaccaactgcgagccaaacatagatttaagattgttataatcaatgaagccgattctttgagcagagatgctcaagccgctttaagaagaaccatggagaaatattcatcaaacattagattgattttggtttgtaattcaatatccaacatcattgctccaattaaatcaagaacattactagtgagaattccaagtcctagtgtcgacaatattaatcacattttgggtcacgttgcagaaaaagagtctctaaaatttagcacccataatgattctgagatcaaccatttttactcaaaaattgctgaaacaagcaatagaaatttaagaagatgtttattaagttttgaaacgataagcatgcaaaatgaaactattaatgttagatcagatgttgccaaaattgctttagattgggaagcaatcattagaaatatggcgatcagcattcaaaagaatcagaatgtggctacattggcaaaaacaagagtagtcttgtacgagctattatcacattgcatcccggcaagaatcatcttgaaaactttattgtttgacttaattgatatttttagtaacaacaatgaattagttctggaattaataaaccaagcatcgatatttgacgaacgattgagcttgggtctgaagagtattttccatttggaagggtttgtagccaaatcgatggtatccatcagcaacttaaagtaa

SEQ ID NO: 6580 - DNA, 1092 bp, Candida albicans
atgttttcgggttttggttcatcaatatatgggtccggatttggatcatcaggatttccaagtaataagtttgaagaatactttcggtgttatccgattgctatgatgcccgacttgattcgaaaagacgatgcaaactatggtggcaagatttttttaccgccatcagctttaaacaagttaactatgttacacataaggtaccctatgttgtttgaaataaagaatgaacagaatgagaagttgacacattccggagttttagaatttattgctgaagaaggaagaacgtatttgccacaatggatgatgaatactttggaactcacccctggatccttgatcaaaataaccaattgtgatttgaatttgggaaaatttgttaaaattgaacctcagagtgttgatttcttggatataagtgatcctaaagcagtgttagagaatgttttgagaaaattttcaactttaaccgtgaatgacattattgaagttaattataacgatgctatatatgggataagagttttagaagttaagcctgacagtacatctaaaggtatatgtgtggtggagacagatttagaaactgattttgcaccgctagtgggatacgtcgaaccagagtacaaaccaaagacagttgaaccactgagcaaacccattgatccatcaaaagtaaacaaaagtgcaggtgctgctactatggccaaatcgataaactatgccaaattagttgctgaagctgggaaaaccacaaagttctctggaagtggtcaaaagttgtctggaaagtctattgacatggataaaaaccaaagcacaaagaactaccgaattgacgacttggatccagatgcaccacctgttccattgtcattacctgagaaccagttattttttggtttcccagtagtattaccaacacaagaggaaatcgatgaggagagcaaagaagaattaaagaagcagcaagcattctcgggatcagggcaatcgttgaggcagagcaaaaagagaaaagataaaaatactaactatccctcgctaaaaaaccatacaagaagtccagatgctattgagattgactaa

SEQ ID NO: 6581 - DNA, 1854 bp, Candida albicans
atgagttatagaggaagaggaggaggttacaataacaacagaggtcaattttcctcgggtccacaccagcaccaacaaaatgtcgattcattcgtagcagcaaaccaatacccaattgaaataatgggatggaatggtgcgagtctgggtgaatgtataaatttcatatctagaaaatgtaaggtcattgtatcaaactattccgttgattcgaacagtggtgttttgaaaggatatgtaaagaatgaatcgcaagctaacacattattgaattggtcaggagtgaaatttgctggacaatctttgagattttctaaaggtgtatcaaatatatccaatcagatgggaggcggagcatcgacaggctctcaatctactattgaaacaatttcccagtttttgaaagctagataccaaccagaaatcaagatgttaaatctaagcaatgtgaaacaggatccaactttgactgcccaaggtttttttggatcactatctgtgagttcaaaatttttcccagcattgatgaaagtagcaagtgatttgaaattggacgttgacagcattgatttgtccaacaatgaacttcaagatttacaaaccttaacgtcgatggcacagacattccctaaattacaaaacctttccttacagaataacaatttcaccaagatcaaagttttcgaaacatggagacataaattaaactttttgagggaattgatcttgtttaacaatcctattgtgcaaacaaatgaccctgcagagattcagaccatcaagttagagttgatgaaaagtttcccgagattggtagtattgagtggcgaaatattaagaaatgaacaagttttgattgccaatctttcatttccattcgagtctccagaaacaatgtttttccaagatgaagattcaagaaatttagcgacaaactttattgcaaattatttgaagttatgggatgcaaatcgttcagaattgatgattttatatcaaaatgagtcacaattttcaatgcaagtagattcatcacacccacatctcattgaaagtggaaattccggttattctggaagtacagactttggttactatttaaacaactcgagaaatttgaccagagtctcgtcaatcaaagcaagaatggccaagttatctattggacaagaacagatttataagagtttccaacagttaccaaaaacccgtcatgatataatagcgaccccagatctatttagtatgggagtattcaggttccctcccttaaatggaattatgataactttacatggaagctttgatgaagtcgcacaacctgaagttgacgggagcgcttcatccgctccctcaggtccaaggggtggttcaaggtatcattcagggccaaagcacaagaggatcccgctaagcaagaagagctttgatagaacatttgttgtgatacctggtccaaatggaagcatgatagtggccagtgatactttattaataagaccatataccagtgatttcccatggaaagtacaaaaattgccttccaatccaactgccgctacaccaggtgtttcagccacctcaactccgtcaccactcccaccaacaacaattacaactccacaactagcaccacctggtaccggaccaactacagcagatttaccagcagatataaaggctcgattaaatcaaatacagcaagagttgttggtgaagatattgctagagacaaagttaaacattaactacggaataatgttatgcgaacagagtaactgggattatcaacaagcatcagtcaatttcaaaaactcggctgcttctttgcctagtgatgcatttgtacaatag

SEQ ID NO: 6582 - DNA, 1827 bp, Candida albicans
atgagtcaatcagatgttccgattaaaaaggaagtcacagtgaaaaaggaagatggttctactcctacatcgcccagcaagcaacaagaatggcaaaccatcccattaaagtcatgcacagaagaggatgtgaaagatattagatttcatataatgaaatttgctactaaacaggatgtgaatattacgaaagattttaccagaccggtaaggttgcacagaaaagatcccagaaatatgcaattccatttaacccgtgaggaattagatcaaaggaaaagggaaaagcaacaaatggaaaaattgaaacaggaagaaaaagaagcaacagcaaagccaaccgaagaatcagaagaaaaggaagaaaaggataagcctacagctgatgcagcaaaagtagcaccggaaaaaccaacactaaataagaatcaggcagatatgtctcaggtagcccctgatggtggagccagaaagaatagaaagaatttgttcaaacgtaaaactagacagattaatcttatgaatgaagaaaaaagaaagttgagatatgaagagcattatccttgggtaatagaagattatgacgggaaaaacgtttttgtggggaactatgaagcagggtcaacagaacaacaacatgtattgtttgttttcgataaagatggattcaaaatgattcccgcggagaaagtatacagattcacacctagaaatagatatgccactttgactttggaagaggccgaagcaaaaatggaaagaaactctagtgtaccaagatggttgatgaaacatatggaggataggtcaatttctgaaggtacaccagatcaaagattcagatataattcacctgcagccaacgggagtgtgatagcaaatgttggcaatggaagtgctggaagaagaatgagaacagtcttgggtggaagtggatctggaaatgacagagactctgatcatgatgatttagattacgatgaagaatttgctgatgatgaggaagctcctattatggacggagatgaagaagaaaataaattgtcagagaagaaaatcaaaaaagaaatgttgaaagctgcacattttgatggacagctggaggctgaggcagaagatgatttggatgatttgtttgaaactgaaaagaccagaaaagtcgataaagaaggtaagaagttaagaaaagtattgaacaaacgtgaaggtggtgtatatgatagcgacgaagaagacggattaatgccatatatttccaaatcagatttggaaagtgatgaagagagtgatgacgaagttcaagttaagaaggagccatcgagtgattcccaaactgacaacaatacgaataagacatcacgtgcaagggaagtaggtgtcaaaagtattggggatggttttgtggttatcaaagctccaccatcatttttaggaactatgcccccaggtgattggaatcctcaagctcgcaaacgccccactccagaaattgccagtccaaggaaaaaaatcaaattggacgaaactatcaaggttaagaaagagagaacattgtcaccacctcctgtttcaccaactacgaatgctgccacaaacaccagctctccaggcaatggaatggacttgaatgatgctggaccagacaatttattggtcacggtcaaagatgtgttggatattgtaaaagaccagccattgactacaaaagaattattaatgggattaaagagcagggtcagtgctcacaaggataataaattaagaattatcagtattgtaaagcaaaatttacgattggttgatgggaagctagttcttaaagactaa

SEQ ID NO: 6583 - DNA, 453 bp, Candida albicans
atggttaaattaacacaaattgacgacgaaactcaacaacaatttgaaaatcaatcagttgctaaaaacaaccacattatcgatgaagctagttctgaagaagaatctgatgatgatgatgaatcagatcttgatgattttgattttgaaaatgaaactttattagaaagaattgttgctcttaaagatattgttccaccagaacaaagagaatccatatataatttatcatcaactataggagatttatttaaatcaagtgttcaaaatggtgggaaatttttatggacattgacttcaagttctttattattaggagttcctttagctttagcaattttatccgaaactcaattacaagaaatggaaagaggtatgtcattagaaaaatctgctcaagatgttttagctcctggatctgaagctgcatttggaaatgaaaataagaaataa

SEQ ID NO: 6584 - DNA, 1644 bp, Candida albicans
atggctcttgcagaaactgttattagaaaagtcaagaaacttggccttgtgccaaaggcaattgccattcttccaaggttgtctttattagtggcagcactcagtgtgttatggttggttacgttaccacaagatgggaattaccgtaatgtttacatttcagagaacgcgttaatgccagcgcaggccaattcgtattttagggagagcgaatggaatattgttcgcgggtatagagaggagattgggaagatggaagagtggagtgtggccgaccgtaatgaggtgattgcgtcgtggcttgttgattcggggctacaaatttcgtaccatgaaaatgggttcgccaacaatactttgtatgcgattatgcatgctccacgaggtgaaaataccgaggcaatggcgttggttgtgccatggactaattctgacaacgagtacaatgaaggtgctatgagtttggcggtggctttggcacggtactttacaaagatgtcgatctggtcgaaaaacattatttttgtatttcctgagacgggccacagaccgttgaggtcgtgggttgaggcataccatacggtgttggacgatactgcggggtcgattgaggcggcgattattatggagtacggcaagaacggtgattattttgagtattacgatatgttctacgaagggttgaatgggcagttgccgaatttggacttgttgaatacggccaatgtaatgacgtatcatgaacagatcccctgtgccatgcaagggatgtcggatagggttatcaattatagcacccggttgcagactttgtttaggggtatcctcaaattgacgcttgtcgggttgactgatgaagttcatgggtgtgaagcattttcggggtggcagatccaggcatttacgatcaaggtaagggggactgaagggaaagatgttacgcagtttggccggattgtcgattctacgtttaggtcggttaacaatttgcttgaaaagtttcaccaatcgtttttcttttacttgatgttgtcgccaaaacactttgtgtctattgggacgtacttgccgtcggcgattttgttggcagtatcgtatgcgttgagctctgtcagtgcggtggtggttgccgggtttgattttcgaaagctatattttgtggtggtggttgaaattgcgtgtgctattttggcgtttgtgccggtgaaccaggtgatgcttgtagcgattctggcggtggtgttgttgccgcgccaagccatcttttccaagcaggcggcgttttcgctaatttctattgcgttgttggcagtggcattacttattaccgccctcttgattgtacattttgcattggcgtttagtattgggattttagcccttccattgacatttgtcccgacattaatgaagaacaagtctaggctaacagctttttgtttggcggtgtcgaatccgttttttgtgattttcgttgctgggaaagtgcttggccaccccgagctatttgaccggttggtcactgcctggtcggacatacagtgttggacatggtttatcgttgttttggggtggttcccagcgtgggtgattatcacactaagctactgtggctacaagccagttaaggaaaaaagtgaatag

SEQ ID NO: 6585 - DNA, 1125 bp, Candida albicans
atgccaatacaagaaaccaataaagaattagttgagaaaccggtcgggattctacaagaagaggagaaggaggaaccaattctttctcacactgaagatgaagatgacgatgacgatgatgacgaagacgaagacgataaaaatcaacaaggtaatctggcagttcaatatcctggaactgtcttaccagataatcatccccaagaaattgaagctgatcaggacttaaccactgggtatgatcttgacactgattacattgacttagtgcacttgaagatttcatcacttgaggatttacacttggaacgtttcaagaaattggaatctttgtgtttgagacaaaatttgattacttcgatggttggagtcaaagatttgcctgacactttggaagaactcgatttgtacgataatagaataaaccacatatcaagttccattaaacatttggttcatttgacaaatctagatctttcattcaacagaatcaaaaacatcaaaaatattgagacattagttgaacttgaaaacttgtattttgttcaaaacaagattagggaaatcaagaatcttgacacgttgactaaagtgactaatttagaattaggtgggaataagatagaagtgattgagaatcttgataaacttgtaaatataaagcaattgtggttagggaaaaatagaatatacaagctccagaatatggataatttggtgaatttaagagttctttcaatacaatccaatagaatcactaaaattgaggggcttgaaaacttgaaaaacttagaagaattatatttgtcccacaatgggatttcggagattgagaatctcgaaaataacataaacttacaagtgttggatgtcacggcaaataaaatcagtaacttgaaaggattgtcgcatttagtcaaattgacggacttttggtgttcatataatcaagtatccagtttcgaagaaattggtaaggagttgggtaaattgcctgatttggagtgtgtttattttgaaggcaacccggtgcaactccaaaatccaagtgcatatagacgaaaaatgaagttatatttaggtccatcgttaaacaaaattgacgcaacttatgtccactcctga

SEQ ID NO: 6586 - DNA, 903 bp, Candida albicans
atgagtacaacaaattgcagattttatgaaaacaagtatccagaagtggatgaagttgttatggtcaacgtccaggaaattgccgagatgggtgcatacgtgaagttgttagaatatgacaatatcgaagggatggtgttattatcggaattgtcgagaagacgtattcgttctatccaaaaattgatccgtgtcggtaagaacgaagtggccgtagtattgagagttgacaaggaaaagggatacattgatttgtccaaaaaagttgtttcagctgaagatatagtgaagtgtgatgaaagatataataaatcaaaagctgtccactccatcttgagacattgtgccgaaaaatttaacattcctttggaaagattatatgaaaccattgggtggcccttaagtagaaagtatggtcatgcgtatgatgctttcaagatatctatcaccgatccttctgtttttgacagtgtcgatgtaccttcaaaggacgtattggaagaattaaagttatacatttcaagaagattaacacctcaggcaattaacatcagagccgatgttgatgtctcgtgttttagttacgaaggtatagatgctataaaggaagctttaaaagctgctgagagcgtctcaacttcacaaatgcaagtcaaggctaaattggtggctgctccattgtacttcattactgttcaagccttggataagaatgaaggtgtcaaacttttagaaaaagccattgaaaaaatcaccgaatcaattgaagctagcggcggtaactgtaaagtcagtatgcctccaaaggctgtttcggctaacgaagatgcagaattagaacgtatgttgcaaagaagagaagccgaagacaaagattcatctgacgaggaagatgacgcataa

SEQ ID NO: 6587 - DNA, 2064 bp, Candida albicans
atgagatcatcacaatcttcttggttaccacgtattggtttattatatgtggcgttagttatacttataccatttttggtttcaccgaagcacgcatttgcggttgctgcagtgagcgatgatgaatcctcgacagataattatggtacagtcattggtatagatttgggtaccacttattcctgtgttggtgttatgaaaaacggtaaggttgaaattttggccaacgatcaaggtaatagaatcactccatcatacgtgtcgttcaatggcgatgaaagattggttggagacgctgccaagaatcaagcttcctctaatgtcaacaacactgttttcgatattaaaagattgattggtttgaaatataatgatgacactgtgcaaaaggaacttaaacatttgccttacaaaattgaaaataagggtaacaaaccagttgttaaagttgaataccaaggtgaagaaaaaactttctcccctgaagaaatttcatctatggttttgggtaaaatgaagagtattgctgaagattaccttggcaaaaaagttactcatgccgttgtcactgttccagcttatttcaacgatgctcaaagacaagctactaaagatgccggtactattgctggtttgaacgttttgagaattgtcaatgaacctactgctgccgctattgcctatggattagacaaaggcgaccaagaaaaacaaattattgtttacgatttgggtggtggtacttttgatgtttctttattgtccattgaaggtggtgttttcgaagtcttggctactgctggtgatactcacttgggtggtgaagattttgatttcaagattgtcagatacttggccaaacaattcaagaagaagcacaatattgatatcactgccaatgctaaagccatttccaaattgaagagagaagccgaaaaggccaagagaactttatcttctcaaatgagtactagagttgaaatcgactcctttgttgatggtattgacttttctgaaactctttcaagagccaagtttgaagaattgaacatcgctgctttcagaaagactttgaaaccagttgaacaagtgttgaaggatggtggtgtcaagaaatccgatattgatgatattgttttggttggtggttccaccagaattccaaaagttcaagaattattggaaggattctttgatggtaaaaaggcttctaaaggtattaacccagatgaagctgttgcttatggtgccgctgttcaagcaggtgttttgagtggtgaagaaggtgttgatgacattgttttgttggatgttaacccattgactttaggtattgaaacttctggtggggttatgaccactttgatcaagagaaacactgccatcccaaccaagaaatctcaaatcttctcaactgctgctgataaccaaccaactgttttgatccaagtctatgaaggtgaaagaaccatggctaaagacaacaacagattgggcaaattcgaattgactggtattccaccagctccaagaggtgtcccacaaattgaagtcactttctcattggatgccaatggtatcttgaaagttgaagctgctgataagggaactggtaaatctgaatccattactatcaccaacgaaaagggtagattatccaaggatgaaattgatagaatggttgaagaagctgaaaaatacgctcaacaagatcaagaattgaaagaaaagattgaagctagaaactcattagaaaactatgctcatgtcttgagaggtcaattgagtgatacttctgaaaccggtttaggttctaaattggatgacgatgacaaggaaactttggatgacgctatcaaggaaactttagaatttattgaagataactttgatactgctactgctgaagaatttgaagaacaaaaacaaaaattaattgacgttgctaacccaatcacagcaaaattatacggtggagctgctggtgaaggtgctggtggcgccggggatgccaaattcggtgatgatgattcagatgatgaattcgatcacgatgaattgtag

SEQ ID NO: 6588 - DNA, 1503 bp, Candida albicans
atgaaatttggtttgccagacaattttgaagtcgtcgtagatgtgtcatcgaaaccagcaaatcaaatcacattatctttgattaagccatcacgacccaagaatactttcaatgatgttttcaaaaaaacttacaatgatatagatgaaaacacactagacttcataaagtccaagcaaaatgagatcaatgaaagagttgacacgttgcagtcaaaaatgaagtctcgcgaagctcaagccgacataaatataacacatttaattcaagactttaatagccaactaaggattcagaatgaacaagtagaggaattgatcagaaaagaaaaagaaagaatacgtttggaactagagagaaagagaagagaagaggaagaaagacgacgccgagaagaggaggaacgcagacgccaagaagaagaagaaaggagacgcaaggaggaggaagaaaggaaacgaaaagaagaagcaaagagattggaagaggaggaacgtaaacgtaaagaggaagaagaagctagaaagaagagagaggcagaattgaagcggcaacaagaattgaaaattcaaagagaaaaggaattgttagaacagaagaagaaagaacgagaactgcgttttactacagactataatcaaatcgagaaaacattatacaagtataaacaagatatacaggatataaagaacaatgtcaaattaaaattgaatgaagacccagacttgaaaaaacaagtgaaccaatacaaacgaaaaatcaatcccaagtttggtcaattatctaactcattatctcaattcaacaaaataagtactgaagtgattggaatgatcaaagcagtcgagaccaatgccttagtatttaaatgggtattgaatttcactgcaaaggcaataatagatcaagcagaaactgaagtcattgttagaccgaactcagctgtcccattagctaaactagcatatgccatattgcaggcaattccagattttgaatattatttaaacgcaagatttataaaaaagtgtccatatatcatagggtataactgttccattgattcagaagaaggtagagaaaggatgggatggaaacgtcctgatggtagcaaatgggaagaagaaacgaaatatgatgaaagaatgggtggtatagtcagtgtttgggcagccatgaccactattactaaccatggatcacagaaatctttatattcgtttgaagcatcatggcagtttttagctagaacggccaacttacaaacaagcatgttagttaatacccatttcacaattttgggaaattggtgggaggctgctggtgcgagcttcttaggtgtttacggcaatcaaagtcaaaaactaatgtacattgtcgtagtccaactaactgacgttgtggcttcgaaaaaatttccatctgctgccagattgagaattatgggtgaagaatgggttactaggcgacaaattcaatctctaaaggcaatggaatattaa

SEQ ID NO: 6589 - DNA, 1497 bp, Candida albicans
atgcaaaaattggaaaccaatttccccatattggctactgactatagattgattgataaaattggtgaaggtacattttccactgtatataaggcagaatctttaacgggtaaaatacgattaggatctgatatttggaaatcaccacctttaaagagaaacaaacgaaacattctaaatttccaacaatcaaggaaaaagaatcctatagttgctttaaaacaaatctatgtcacgtcttcccccaatagaatatttaatgaattacatttgctttatatgctttcagggaattctcgagttgctccattgttagatgttttacgttttcaagatcaaatagtcgccatattaccttactataaccattgtgatttccgtgagttttatcgtgacttacccgttaaaggaattaagaaatatttatgggaattatttcaagctttagattatattcatggtaaaggtgttattcatcgtgatttaaaaccaacgaattttttatatgatccgtttaggggaaaaggagtattagttgattttggactagctgaaagggaaaatatatcgaaaaataccaaacctgaaacttctactacgtcttcttcaggcacggccactacaactactacagccacaactacaaccactactactaccaccaccaccacaaattcttctactgcttcatcctcggcaatatccacagcatgtccttgtttgaacaaagatcagaaacttatcaaccgaacccatactaaacgtttaaatgtcaagggagcctatccaaaaaatgataatagaccaccaagaagagccaatagggctggaactagaggttttagagcaccagaagtattattcaaatgtactaatcaatcaaccaagattgatatttggtcagccggaatcattggtttctccattttacttagaaaattccctatatttaattcaccaactgatactgatgccatattagaattagcatggatatttgggtatgataaaatggctaaatgtgctgaacttcatggatgtggacttgaaatctccatgccggaaattcataaatcaaatggtaatttaattaaaatcatgtatgattttttaatgcaagaacatattaatggatgtttcccatctgatagtgttgtttatgatactttagaattaataaatgaactgggtgaaaaatttgttaaaccggtttatactatacgtgaaggaatttctgatattgaaaaaatgaaaattaatgaagatttcacaaagagacatgatgattataaagatcataaatatttaatggaacttttatatggttgttttaaaatggatccatccaagagattaagtgctagagaaatattacaattaccatttttccatgaaattttacaaatcagtgaagatgacactcaagatgagtttatgcaacaaaatcaaactcaaactcaggaagaagaagaagaagatgaagtaattttatcttag

SEQ ID NO: 6590 - DNA, 3054 bp, Candida albicans
atggcaaaaaaaggaaagaaagcagcccaggctggaggagatttttgggatgatgaggatatggcccaagatcaaccacaagctgaagaatttggcacacctgccgaaccagaatctcaagaagcatccgcagaggacgtcagtggggatttgctaagttctattcgtaaaaataaacagaagaaagctgaaaagcaagaaaacgaaaaagcaaatgtcaacaatggagatgctccaaaattgttatcgaagaaggaaaaggaaaagttgaagaaggaagctgaaaaacaaaagaagaaagagttagctcaaaagaagaaggcccagcaagcaacaaagaaggaacaaatcaaagaggctaataaacaaaatgctggtagtgccgtaactgcatcttctgcgtcagccactcctgaaccagaggaaaatgaatctctggctgcatctgaacaaaatgaagcacctaaggcaaaacctgcaaagaaaggtaaaaaggcgcctgctgggcttgctgctttgaagaaacaattggaattgaagaaacaattagaagaagaacagcgtaggttggaagaagaggaggaacaacgtagattggaagaggagagacttgcagctgaagaagaagccaaaaaagaagctgcccgtgccgctaagaaggaacgtgaaagattgaagaaagaacaattgaaagccgaaggtaaattattgaccaagaagcaaaaagaggaaaagaaattgcaagagcgtcgtcgtcaacaattattgcaggccgggaacgtttcagttgctgggttgagcaaaactgaagaaggtgatgcgccaaagccaaagaaagttgtctacactaagaaaaaatccacaaaaccaaagacttttatccaaaaacctgttccatctaaggctcctgtcaagaaagacgatggcgaagatgaagctttggtagacgattgggaaaagatggcattggatgacgatgctccagttgctgatgattgggaagctgcacttgctgatgaaggcgatgaagaagtaggggaagcggaagaagaagacgaagaagttggggaagacgaagatactattgttgaagatgaacaagaaaagaaagccaaggaagaggctgctagaaaggccaaagaagaatcagcaagaaaagccaaggaagaagcagcaagaaaagcacaagaagaagaaaaatctaaacaattggctgcacaaaagaaggccgcttctccatctgaaaaagatttgcgttctccaatttgttgtattttgggacatgtcgataccggtaaaaccaaattgttggacaaaatccgtcaaactaacgttcaaggaggtgaagctggtggtattacacaacaaattggtgcaacatacttcccagttgatgctattaaacaaaagaccgctgtcatggccaaatacgaaaagcaaacatttgatgttcctggtttgttgattattgatacccctgggcacgagtcctttaccaacttaagatctcgtggttcttcattatgtaacattgctattttggttattgatattatgcatggtttggaacaacaaactttagagtctatacgattgttgagagatagaaaggctccattcgttgttgctttaaacaagattgatcgtttgtacgattggaaagaaatcccaaataactcttttagagattcatttgctaagcaaaccaaatcggtgcaagctgaatttgaaaaccgatacgaacaaatcaaattagctcttgcagaacaaggtttgaactcggaattgtatttccaaaacaaaaacatgtccaaatacgtttctattgttcctacctctgctgttactggtgaaggtgttcctgatttattatggttattgcttgaattgacacaaaagagaatgtctaagcaattgatgtatttgtctaaagttgcagccactattttggaagtcaaggtagtcgaaggttttgggtacaccattgatgttgttttgtccaatggtattttaagagagggtgaccgtgtggtattgtgtggattaaatggtccgatagcgactaacatcagagcattattgacacctcctccatcacgtgaattgcgtatcaaatctgaatatgtccatcacaaagaagtcaaggccgctttgggggttaaaattgccgcaaatgatttggaaaaggctgttgctggttctcgtttacttgtggtgggagaagatgatgacgaggatgaattaatggacgaagttatggatgatttgactggattgttagactctgtcgatacatcaggtaaaggtgtggttgttcaagcatctacattaggttctttggaagctttgttagatttcttgaaagacatgaaaatcccagttatgtctattgggttgggtccagtctataagagagatgtaatgaaagcttcaacaatgttggaaagagcacctgagttggcagttatgttatgttttgatgtcaaggttgataaagaagcagaacaatacgccgatgagcaaaatataaagatcttcaatgctgacattatttaccatttgtttgattcgttcactgcttatcaagctaaattattggaagctcgtcgtaaagagtttatggaatacgctgttttcccatgtgttttaaagactattcaaatcatcaacaagagaaacccaatgatcattggggtcgatgttgtggaaggtgctgtgcgtgttggtactcctatctgtgctgttcgtaccgatccaaccaccaaacaacctaacattatggtgttgggtaaggttgtttccttggaagttaaccacaagcctttggaatctgttaagaaaggtcaaactgctgctggtgttgctatgagattggacaatccatcttctgctcaaccaacttggggccgtcacgttgacgaaaccgataacttgtactcattgatcagtcgtaagtctattgatacattgaaagacccagctttccgtgacagtgtttccagagacgactggttgttaattaaaaaattgaaaccagtgtttgatatcaaatag

SEQ ID NO: 6591 - DNA, 3081 bp, Candida albicans
atgaagaatccatttgacagtggcagtgacgatgaagatccatttcttagtaatccacaatctgcaccatcaatgccctacgcagcatatactagtgacagaacatcgccccgcaagacataccaaccattgaattttgacagtgaggacgaagatgctaaagaaagcgaatttatggctttcccactgtcgactagtggatctccatttcaccaacagcaatccccaagacaatcacctaatattttttccagaagtactgcaagagcagcaacctcaaagctgaatatgagcatatatgataataccccgaacttacaattcaacaaaagcggcgcagccacaccaagagcacaattcacatcgaaagaatctccgaaaagacaaaaaactactgaagtgaccattgactttgacaatgatgatgataacaatcacaccttagaatttgaaaatgggtcacctcgtcgttcatttcgtagtagtgctataagcagcgaaagatttttgcctcctccacaaccaattttctctcgagaaacatttgctgaagccaactcccgtgaagaagaaaaatcggcagatcaagaaacattagatgaaaaatacgattatgattcataccagaagggttatgaggaagtagaaacattgcattcggaaggtacagcttatagtggctcatcttatttgtcggatgatgccagtcctgaaactacagattactttggagcttcaattgatggtaatattatgcacaacattaacaatggatacgtaccaaatagagaaaaaaccattaccaaaagaaaagtgagattagttggtggcaaagcaggtaacttggtcttggagaatccagttccaacagagttgagaaaagtgttgaccagaaccgagtctccatttggtgagtttaccaacatgacatacacagcgtgcacttcgcagccagatactttttctgctgaagggttcaccttaagagctgccaaatacggcagagaaactgagattgtcatttgtataaccatgtataatgaggacgaagttgcatttgccagaactatgcatggtgtgatgaaaaatatcgctcatttgtgctcacgccataaatccaaaatatggggcaaagatagctggaaaaaagttcaagtgataattgttgcagatggtagaaataaagttcaacaatccgttcttgaattgcttacggcaacaggctgctatcaagaaaatttggccaggccctatgtcaacaatagcaaagtaaatgcccatttgtttgaatataccactcaaatatctatcgatgagaacttgaaattcaaaggagatgaaaaaaaccttgcaccagttcaagtcttgttctgtttgaaagaactgaaccaaaagaaaatcaattcccatagatggctttttaatgccttttgtcctgtcttggaccccaatgttattgttcttttagatgtgggtaccaaacccgataaccatgccatttataatctatggaaagcattcgatagagattccaatgtagcaggggctgctggtgaaattaaagcgatgaaaggtaaaggttggattaatcttacaaatccattagttgcgtcacagaattttgagtataaattgtccaatattcttgataaaccgttggaatcactttttggatacatttctgtgttaccaggtgcattgtctgcatatcgatacattgccttgaaaaaccacgatgatggtacagggccattggcttcttatttcaaaggtgaagatttactctgttcacatgacaaagacaaagagaataccaaagctaactttttcgaagcaaatatgtacttggctgaagacagaatcctttgttgggaattggtatcaaaaagaaatgacaattgggttcttaaatttgttaaactggcaaccggtgaaactgatgttcctgaaacaattgcagaatttctttcgcaaagacgaagatggattaatggtgccttttttgctgctttgtactccttgtatcactttagaaaaatatggacgactgaccattcgtatgctagaaaattttggctacatgtcgaattcatttatcaattggtatcattattgttttcatttttttctttgagtaatttctatttaacattttattttttgacaggttcattggtgtcttacaaaagtcttggtaaaaaaggtggattttggattttcacattattcaattatctctgtatcggtgttttgacatctttgttcattgtctccattggtaatagaccacatgcatcaaagaatattttcaaaacattaatcatattgttaaccatatgtgcattatacgcattggtggttggatttgtgtttgttatcaatactattgctacttttggaaccggtggaacatctacctatgtgctcgttagtattgtggtttcattgttgtccacctatggtctttatacgttaatgtccattttgtacttggacccatggcacatgttgacttgttctgtacaatactttttgatgattccatcgtacacttgtacattacaaatatttgcattttgtaatactcacgatgtctcgtggggtacaaaaggtgacaacaatccaaaagaagatttgagtaatcagtacattattgagaaaaatgccagtggagaatttgaggctgttattgttgatacaaatatcgatgaagattaccttgagacattatataatatcaggtcaaagagatcaaacaaaaaagtggctttgggccattctgaaaagacgcctcttgatggtgatgattatgcaaaagacgttcgtactagagttgtgttgttttggatgattgcaaatttggtatttataatgaccatggtacaagtttacgagccaggtgataccggaagaaacatttatttggcctttattttgtgggcagtggcagtgttggctcttgtcagagctattggctctcttggatacttgatacaaacatatgcacggttttttgtggaatcgaagagtaaatggatgaaacgaggatatactgcgccgagtcacaatccattaaattag

SEQ ID NO: 6592 - DNA, 1050 bp, Candida albicans
atgcctttcactcaattcttggataaatattcagataatttggctattcaatatgctattatttttgcattgttattaggagttttcaaattgactgtgttttcactcaaatttgcttcattaatatacgatatatttttagcaccagcaaccgatttctccaaatacggtgctgccagtgggaaatgggctgttgttaccggtgcttccgatggtattggtaaagaatatgcttttcagttggccaaaaagggtttcagcattgtcttagtttcaagaacacaatcaaaattagagttgattgccacagaaattgaaagtaaatataaagttaacacaaaaattgttgcatttgatgcttctacagacgatgaagaaaactatttaaaattggaaaaagctgtgtttgatttacctgttaccatattgattaataatgtcgggcaatcccactctattccagttccattcttgaaaactgaaaagaaagaattgaaagatattattactattaacactactgccactttaagaatcactcaaattgttgctccaattattgtctctaccgttgaaaacccacacccaaaacaattgcgtggtttgattttaactatgggttcatttggtgggttattaccaacaccatacttggccacttattccggttcaaaatcctttttgcaagcctggtctgctgccttggctggtgaattacaagctgatcatgttgatgttgaattggtcatttcttatttagttgcttctgccatgtccaaaattaaacgtacttccttaagtattccaaaccctaaacaatttgtcacttctactttgaatggtgttggccgtcgtaatggtgctcaagaaagatttgcaacttcaactccatactggactcatgccttgatgcattttgcaatcgataatactgttggtgtttattcaaaaattgctaataaattgaacttgcaaatgcatcaatctatccgtcaaagagctctaaagaaggctgctagattggctgctgctgctgaaaagaaagattaa

SEQ ID NO: 6593 - DNA, 1671 bp, Candida albicans
atgattaaaagattggtgaaattgttatctaaaatgtcaattcctccatcttcaacatcagcaatggaaacaaccacgacaaacatagttcaaccaaactcaactatttctcaagaattcaatactgttcaagaagggaaagccacgatattgactcctaaacaagatgaagtattctataatcctattcaacaatttaatcgagatttatccatcatggcgattaaagcatatgatgaaatacgacacgaaaagatacaagcaataaagaaaaagagtaagaacaaaaggactaaattgaatggattgaaaattttggaaagtttagcggcatcgggtttgagatcatgtagatatggattggaaattcctgaagcagggaaaatagttgctaatgatatgttggccgaagcagttaaatctatcaataagaatgttgaatataataaactaacggacaaagtagttgccaatcaaggtgatgcgataaaattcatgggttctactgatgaaaaatttcatattgttgatttagatccatatggtactgctgcaccatttattgatagtgcaattcaatgtttagaagatgatgggatgttattagtgacttgtactgatgctggagtattagctggaagtgggtatccagaaaaatgttttgcattatatggagggaataattttggtaatgcatatgttaatggagaatcaaaccatgaagttggaattcgattgattcttaatttaattgccagtactgctgccaagtataaaaagactattgaaccgatgttgagtttatctattgattattatttccgtgttttcgtgaaagtgaaaactagtcccataaatgttaaaaatcatgctagtgaaacaatgttaacttatggatgtaatggttgtggacataaaattgtgcaacctttaggaatgaaaaacaataccaaattccaatatccaaaattacaaggtccaatatcttccaattgtcaatattgtggtacatcatataatgttgccggacctatgtacgctggcaatttgcataatcgtgaatttatagacaaagtattgaaaattaatgaatcgagtgataaagaaatctatgtaaccaatgaaagaatcaaaggaatgttgactttggcgtctaatgaacttgatgatgcaccatttttctttaatcttaatcaattgtgttctattttcaaatctccaccaatatcaattgaacaatatacgaaagcagtgggtaatttgggttataaagtaagtttaactcatgctaaaaagaattgcgtgaaaaccaatttaccatggaatttgaatttattaattaatcgagcatggcaaattgatcaaaatgagaaatatgtcaaagagatggaatcgaaaaatgttgatgaattgaatgaaaaaattaaagagaaattgattaaattgaaagataatattggtattaatccaagtttggcagaaagttctcctggttggaaaattttgaattattttaagactaatatgaatgaagaagagaaatctgtttctattgattttgaaacaggtaatgaagagtttgaaaagattgcgaaattaagaaaagtcaagatggtgagatatcaagaaaacccaagaaaaaactggggaccaatggccagaccaaaatag

SEQ ID NO: 6594 - DNA, 2565 bp, Candida albicans
atgtatgtttataagagagatggccgtaaagagccagtacgtttcgacaaaatcactgccagagttcaaagattatgttacggtttgaatccaaaccacgttgaaccagttgctattacccaaaaagttatatcaggtgtttaccagggggttactactattgagttagacaacttggctgcagaaattgctgctacaatgacaacaattcacccagattacgctgtcttagccgctagaattgccgtatcaaatttacataagcaaaccaccaaacagtattccaaagtgtctaaggatttatatgaatacattaatcctaagactgggttacactctcctatgatttccaaggaaacctacgacatcattatggaacacgaagatgaattaaactcagccattgtttacgacagagattttaactacaattattttgggttcaagactttggaaagatcatatttgttacgtatcaacggtaaggttgctgaaagaccacaacatttgatcatgagggttgctgtcggtattcacggtaatgatataccaagggtcattgaaacctataacttgatgtctcaaagattcttcacccatggttctccttgtttatttaacgctggtacaccaagaccacaaatgtcctcatgtttcttgcttgctatgaaggatgattctattgaaggtatttacgacactttgaaatcgtgtgctttgatctcaaaaagtgctggaggaatcggtttacacatccacaacattcgttctaccggtgcttacattgctggtaccaatggtacttctaatggtattattccaatggtaagagtattcaataacactgcacgttatgtcgaccaaggtggtaacaagagacctggtgcctttgccttgtacttagaaccatggcacagcgacatttttgatttcattgatattagaaagaatcacggtaaagaagaaatcagagccagagatttgttcccagctttgtggattccagatttgttcatgaaaagagttgaacaaaatggtgactggactttattctcaccaaatgaggccccaggcttggctgatgtttatggtgacgaattcgaagaattatacaccaaatacgaaaaagaaaaccgtggtagacagaccatcaaagctcaaaaattgtggtatgctattttgggagcccaaactgaaacaggtaccccatttatgttatataaagattcatgtaacaacaaatccaaccaaaagaacttgggtattatcaaatcttccaacttgtgttgtgaaattgttgaatattctgctccagatgaagttgctgtttgtaacttggcttccattgccttgccatcatttgttgaaaatgatgaaaaaagtacttggtacaactttgacaaattacatcaggtcactaaggttgtcacccgtaacttgaacagagttattgaccgtaaccattacccagtcccagaagctgaaagatcaaacatgagacacagaccaattgctttgggtgttcaaggtttggctgatgcctttatggaattgagattaccatttgactctcaagaagctagagaattgaacattcaaatttttgagactatctaccatgctgctgttgaagcttcaattgaattggctaaagaagaaggtgcctacgaaacctatccaggttctccagcctctcaaggtttattacaatttgatttgtggaacagaaaaccaactgaattatgggattgggatacattaaaacaagatttggccaaacatggtatgagaaactccttgttggttgcaccaatgcctactgcttccacatcacaaattttgggtaacaatgaatgttttgaaccatacacttctaacatttactctagaagagtattagctggagaattccaaattgtcaatccatatttattgaaggacttggttgatttgggtgtctggaacgacgctatgaaaagtagtattattgctaacaatggttctatccaagccttaccaaacatccctgatgaaatcaaggcattgtacaaaactgtctgggaaatctcacaaaaacatattatcgacatggctgctgatagagcagcatttattgatcaatctcaatcattaaacattcacatcaaagatccaacaatgggtaaattaaccagtatgcacttctacggttggaagaaaggtttaaagactggtatgtactacttaagaacacaagctgccagtgctgctattcaatttaccattgatcaaaagattgctgagactgccggtcatacggttgcaaacttggacaaattaaacattaagaaatatgttaacaaaggaagagttgagagtgagaataccagtgatgctccatacaagtcaccatcaaccgaaccaacctcattagaaagttcagttgctgatttgaaaataaaagatgaaggtgaaaagccagctgaagacaaaaccattgaagaactcgaaaatgacatttatagtgccaaagttatcgcatgtgctattgataatccagaatcttgtacaatgtgttctggttag

SEQ ID NO: 6595 - DNA, 1794 bp, Candida albicans
atggacaaaagagattctaatagaccttctaaggacaatgctatccgtaatccttttgttctgtttgagactcctaggtcgccatcacgatcaaccagaagtctaaatcctcccaagttgaacgaaatgggtgctatacaatcgtcaccaccacgaaggagaaataataacacgattttcagtgatcgatatatacccaatagaacaggagttgatctacaggctgcctttagtttgactaatgaggaaatactaccggatttgagaaacactagaaacgctgataatgaaatagaaattagaagagaagaggaagcaaatcgaacattctcaacagttcttaaagcagaattatttggtgataatgtgccgatggcaacagcaaacttgtctagtgccactgccaattctaatcttgcaaacaatcgatcgaaaacagggagaacaaatactggtattgttaacggtgcatctgtttctggggctgctacatctacatcaagtctctccacaaccccgccaagatcatctaattctggtcagaatttccctggatctactggctcatccttgcctggtaacaataatgcaattggtaataatgatagccataacatcatatcagcaaatgctaataataatatttctagtgatattgatgatattactagcactccacgtcggaaaactaacttattcacttaccagtcccctcaaaaatcaaaaccaatatcaagagacttgcaacaagaattgtactcattgtcacccgtgcggcaggattcacagaaactattgttgtcgccgcagaagaagcctcgaacaatatcaaaggttccatatagagtattggatgcaccagaactatctgatgatttttatttgaatttagttgattggggtcaacaggatgtactagccgtaggattgggcgacagtgtgtatttatgggatggcgccacacaatcagtggacagattgtgtaatttaacaaacaaggacaaagtcacaagtttgaattggataggtactggtacccatttggcaataggaacatccaagggtttggtggagatatgggatgcaactcgaatcaagtgcatcaggacaatgacaggacactctctacgggttagttcattagcgtggaatgaacacatattaagcagtgggagtcgcgatcgaaccattttaaatcgcgatgtgagaattgaagatcactttgttaataaatttgataatcataagcaagaagtgtgtggactcaagtggaatgtggaagaaaacaaactagctagtggtggcaacgataataatttgtttgtatgggatgggctcaatcctaaaccgttgcatcaatttacagaccacactgctgccgttaaagctattgcttggtcgccgcatcaacgggggattttggcatcgggtggcggaacagccgataagactataaagacatggaatacgttgactgggaatttagtacatgatgtcaatactggctcacaagtgtgtaatttaatctggtcaaaaaattccaacgaattggtttcaacccatggttattcaagaaatcaaattatagtgtggaagtatccatcaatgcaacaaattgcacaattgacaggtcatacatatagagttttatatttgtcgttgtctcctgatggtgaaacaatcgttactggtgctggtgatgagaccttacgattttggaatgtatttgaaaaaaataggcataacgaatcacctgcttcggttttgttaggagcatttctgcagttgcgctaa

SEQ ID NO: 6596 - DNA, 5016 bp, Candida albicans
  misc_feature (289)..(289): n=g, a, t or c
atgtcgaacgatattcctattgactttactgaattaacccagttgatcgaattgggaattccacagacttcgttggatttcaaatcaacaactttggaatcagatcactacatatgtgtccgtgaatctggagctcaaggaaacaccgtggcaattgtcgatttaaaaaccaacaatgaagtgactagaaaaaatatgacggctgataatgccattatgcatcttaaggaatttgttatttcattgagagccaatggaaccactttacaaattttcaacttgggatcanaccaaagattgaaggctttcactatggatcaaccagtgatattttggaaatggctcgacgatacatatttagggttggtaacacaatcatcaatctactattggaatgtatttgatggaaccaacaatggaccaaccaaattgaccgatagacaccacacattgaacaattgtcaaatcataaactttgtcgctgaacctgatttgaattggtttgctgtcactggtattgctcaagaagatggtcgtatcgctggtcacatccaattatactcaaaatcaagaaatgtttcgcaagctatcgaaggtcatgtatgcaaatttgcttctatatctttatctggaggtgtccaaccaactaaagttttctgtgttggtaacaagaatgcccaaggtcaaggcaacatgcatattattgagattgatcatgttgatggcaacccccaatttcaaaagaaagtggttgacattttctttccacctgatgcttccaatgatttcccaatcagtttacaagcttctaacaagtacggtattgtttatgtattgaccaaatacgggttcattcacttatatgatatggaaactggggccaacttgtttgtcaacagaataactgccgatccagtattcactgcttctagttataacgatggcactggtttaataactatcaacaaggctggtcaagttttaagtgttgaagtttcccgtgacaagatcattccttatgttttggataaattatcaaatgtcccattggctttagctttatcctctcgtggtggattcccaggggctgaaaacttgttccaacaacaattccaaacttacttgaaccaaggtgattacagtaatgccgctaaagttgccgcttcatctgagcaattgcgtactcaagataccatcaacaaattgaagaatattactcctcaaccaggccaaatatcaccaattttgcaatatttctccactttgttagacagaggtactttgaacaaatttgaatcgattgaattggcaaaaccagttttacaacaagatcgtaaaccattatttgaaaaatggttgaaagaagacaaattgacatcttcagaagaattaggggatatcgtcaagtcttacaatgatacaactttggcacttgctgtttatattagagccaatgtaaatatcaaagtggtttcttgtttagctgaattaggccaatttgataaaattttgccatactgtcaaaaagttggttacaatcctgattacaccaatttgattcaaaacttggttagagtcaaccctgataaggccagtgaatttgctacttccttattgtcaagtccagatgccaacttaaacgttgaacaaattgctgacttgttcttttcacaaaattacattcaacaaggtactgcattcttattggatgctttgaaaaacgacactccagctgaaggtcacttgcaaaccaaagttttggaaatcaacttgttacatgcacctcaagttgctgatgccattttaggtaatcaaatgtttagtcattatgataaaccaaccattggtaaattatgtgagaaatcaggattattccaaagagctttggaacattatgatgatttgaaagatattaagagagtcattgttcacactaatgttttaccaagtgattggttggtttcgtattttggtcaattgaatgtcgatcaatctgtcgcttgtatcaaagaattgttgagtaacaatatgcaacaaaacttgcaagtggttattcaagtagccacaaaatactcagatttgattggtgctgccaaattaatcaaaatttttgaagagtacaagtgtactgaaggattgtactattatttaagttctattgtcaatttgactcaagacccagatgttgttttcaaatacattcaagctgcagctagaatgaaccaaaccaaagaaatcgaaagagtggttagagataacaatgtttataacggtgaaaaagtgaagaactttttgaaagaatttaaattggatgatcaattacctttaatcattgtttgtgatagattcaactttgttcacgatttgattttgtatttgtacaagaatcaatactttaagtttattgaagtttatgttcaatcagttaatccagccaatactccacaagttgttgccggtttattggatgttgattgtgatgaaaacatcattaaaggcttgttaatgtctgttttgggtagagttccaatcaaagaattggttgaagaagtcgaaaagagaaacagattgaaaatcttgttaccattcttggaaaaaacattagaaggtggatctaatgatcaagaagtatacaacactttagctaaaatctacattgattccaacaattcaccagaaaagtttttgcaagaaaacaacaactacgatacattggttgttggtaaatactgtgaaaagagagatccatatttggcttatatttcttattctaaaggtggcaacgatgaccaattgatttctattaccaacgaaaataaaatgtacaaataccaagccagatatttgttatctaagtctgacattgagttatggaacaaagttttaagctctgacaatatccacagaagacaattggttgatcaagtcatttccactggtattccagaattggatgacccagaaccaatctcaattactgttaaggcatttatggaaaatgatttaccagaagagttgatggaattattagaaaagatcattttggaaccatctccattcagtgaaaatgcatcattacaaggattgatgattttgactgctatcaaagctgattcatcgaaagtgtctagttatattgaaaaattagacaaatttgaccctaacgaaattgctccattatgtattgataatggattgaatgaagaagcatttgaagtttacgacaaatttgaattaagatcagaagctatgaaagttttagttgaagatattgtttcattagacagagctgaacaatacgctgagaaatatgacacccctgaattgtggtaccaattgggtactgcacaattggatggtttacgtatcccagaagcaattgactcttatgttaaatctaagaacccagaaaatttcgctcaagtgattgaaattgctgaacatgctggaaaggaagaagaattaattactttcttggatatggccagagaaacattaagagaaccagttgttgatggtgctcttattaatgcttatgccactttagatagattgagtgatatggaaaaatttgttggtggctccaatgttgctgatttggaagctattggtgacaaattatttgaagcaaagaattataaaggtgctaaaattttgtattctaacgtttccaaatattccaaattagctactactttggtttacttgggtgattaccaaggtgctgttgactgtgctagaaaagcttctaacactcaagtttggaaacaagttaacagtgcttgtattgaaaacaaagagttcagattggctcaaatttgtggtttgaatttgattatcgatgctgaagaattgcctgaattggtcaagacttacgaatacaatggttatttcaacgaattgattgctcttttcgagaatgggttgagtttggaaagagctcacatgggtatgttcaccgaattggctatcttgtatgctaaatactctccagaaaaagttatggagcatttgaaattattctggtctagaattaatattccaaaagttttgactgcatgtgaagatgcacacttgtacccagaattgatctttttgtactgtcattacgaggaatgggataatgctgcattgaccatgattgaaaaatcagaagttgcatttgaccactcttctttcaaggaaatcattgttaaggcaccaaacttggaaattcattacaaggctattcaattctacatgaatgaaaacccttcgttgttggttgatttattgaaagtgttaacaccaaaattagatttgccaagagttgttagaatgtttgttcaaagtgacaacttgccaatgattaaaccatttttgatttctgttttggataagaacaattctgttgttaattctgcttaccatgatttattaattgaagaagaagattataaatctttgagatcatctattgaaaatgaaagcaacaatagattcaataaattggatttggctgaaagattggaaaagcatgatttgattttctttagacaaattgctgctactttatacactaaagaaaagaaattcaatagagccatttctattttgaaaactgataaattatggccagatttattaagaacagttgctatttccaaatctaaaaagattgctcatgaattattagattactttgttgaaacaggtaatcatgaatgttttgttgccttgttgtatacttcttatgaattcattgctaatgattacgtgatggaattatcatggttgcacaacttgtccaactttattaaaccatatgagatttccattgcttttgaaaatcagaagaaattgaatgaagtataccaagatttacaaaagagaaaagaagcagatagaaaacaagaagaagaaccaggtgttggccaaccattgatgcttactaatggaccaatgagttatcaaggtactggtgccactggaattggttatcaaccaactggtactggatttggtaatgcattctag

SEQ ID NO: 6597 - DNA, 2295 bp, Candida albicans
atgtcatcaaatcaaacgcctactactgataatgtattgcttactcttaaggaagctagaaagttagctctcaatgaacctcaaaactatcctaatgtattacgatctatgtttaatctcatcaccaaagaacctgaaacacaacaacaaacatcagagattcaacaattaattgttgattttatgtatgaaacatttataaataattctatattacaacaaagcgtcaaaatcgaattagcaattgattctttagatgcattaacaatcttgaccaatattcatgatattgccacattacgtaaagtcattgatatatcatgtgttatatatcgattacttttccaatatgtggcacttaatgataatagtaatcaaatttggagtaaaattactgaattgaaaaatgttttggttaataaatttcaaagtaatttccctttaccaccaagtgataatactgaacatgatttattaagaaatattgctacaaaattagatttattaaaatttatgatgacaattattgatgtttcttcgaaaactcgtataattggtgacccaatacaaaataccaattccatgcaattttcgttaaatgatgtaccacccaatcatagtttaatcaaatatgatcaaatggaatatgaatcacaagtcatttttaaatcaatggtattaagggttttcaattatgatattattattgcccctttgatcacagccacattgaatcattgtatacttataatgaaacgcaaaccacaatttgttcctttattattgaaaacaattgaagaatacgacactaataataaacttcaatcgaattatcaatcattagaacaatttaaattggcaagaaaatatgttgatagaaatttacgcaatttcatatctcattgtcaaaaatacaaattaatcccaccggaatttaatatgccattaggaagaatggctaataccttaactgaacgtggaactaatattagaaagaaaaatatatttgccattgatgaaccaaatattaaaaaaagaaaatttgaagggttttataattcttcgaaaaaaatgaaacaaatgagttatagtcatttatatactttaaatgatgtgaatgatggattaaataattttgatttgagtactttaccccaagattatgtaacaaatatggtggttaatgctttacaacgtgctccagtttcaaaattggtgaaggcattagaaatcatttcagaaagatatattgatgcatttcaaaaaccacgaccaattgccactccagttagtcaaatcaataacaatagcgcaaccacaactactgcaaccccagtggcaaaacaagaagatccagaagtcaatgatgaagatgaagaagatgaacgatatcaagttgatcttaatggagatttttatgatcccctgaaagttttcagtttaccaccacctaaagaattatcattccaagagaaaaagcaacatattaatataattattaaaaatttcttggaattagctaaaaaaggtggtcctgaaaatgataatattaacaacaacaacaacaacaacaacagtagccaaaatggggaagatgaatcagaattgagtcctggagataaaggtgatattagtaaggcattaaaaaaagtagccattaaaggttggaaaaaaggtaattggttaatattattatctcgattagccactagaggaatgagaacgaatccaaaaagcggaaataatactattgtcaaacaagaggatggaagtgaagaaccaaaaatgtcaccggatcaaaaaaataatcaacaattgagtgatttgatacgattagctatacttgaatactttctggaaaatgtccatggtagaattgatatggttatagaatggcttaatgaagaatggtatagtgaacgagttttccaactgaatgaatatcttaatgaaggtaaagaccctgataaggaggttattactacaccaatatatgatatatggagtagaaaagttgttgatgcgactgtatcatatattgaacctaatgataaaaaaattttccttcgtttattaagtgatttacctgaattaaatgaagatttaattggtagaattaaatcattatgtattgatccaggaagatcagccattgggtttttagctttacaatttttgattatgtatagacctccagtgaaacaaatgtgtttaaaagttttacaagaattgagtgaaagtgatcaagaagatataagtattgaagctaaaaagaggttagagaaatttaaataa

SEQ ID NO: 6598 - DNA, 1971 bp, Candida albicans
atgtctaattttgaagaatggattaaaatggcaacagataataaaatcacggtcaagaattcttggaattttgatttgatagattatttccacgatttgaatgtgataaaagatggcgagagtataaatttccaaagggcatcggctactttagatgggtgtgtaaaaatatattcgaatagagttgaatcagctgccaccgaaacaggtaagttgttaagtggattaagtaaaaaagatgatgggcatcatggtaaccaagaagccggcaatggtgatggtgatgaaaatggagagaacggtgacgatgatagagatggcaatgacgaagattctagaaagaaaaggaagtttaatcgtattgttgagtcgacactagttgagtttgatgctataaaagtgaaaaaactagagcaagaattggctattgatccattatttaaaaaggcactagctgagtttgatgaaggtggcgccaaaagtctattgttgaatacgttaaacatagatgtatctggaagagtggtatttgatgcaacatcaaaccctattcaagagactgaagatgccaatcaaatagaaactgattcccaacaagtacaggaactacaaacatcagatacaaaacagtcagacatatcatcattaaagctgtttttgttcaaggataatgagaattttgacgacctaactctttgtccttcattagtcgagttccaatctgcattagcagatgtcaataaagctaaaagtatccttaatgactttaactcaaagattactaatgcagcacaagaaccacttgctttcaaagaatctgaagagaataatgactttgatcttggggactttaacgactttggtggtaatgacgacttcaatgatgatataaatactcatgataacagtagccacaacgatccttataataacattgataatacaatcatgaaagccttgtttaatgataaaacagatagcagcatttattcgcgaacacaaagcacagcaattatggaccaggacttgatggcatatttcgatgaccgaatgaaatcaaattggcgtggtcctgataattggaaagttgctgcatttaaaaaggctaataatattgaccaaaagcagtctgattcctcagttaaacaagaatcatcagctcagacatcgacagcaagaagaaaacctgagaatatcattatagattttttcaatgatgacgatgatgttgatgaagatattctttttgaaccaccaaagagtttaaactcgatactgaagaaaggtaattttaaactgtctgactatatactacctgatgacataaaatataactcagcaagactaaccaatttgtttacaaaacctcaaattgctataatgtattacggaaataagagattacaaggaatcgatggacagctactcaccgatcaaaactattttgcagaacaatataggcaacacgaagaagaagaaagagatagacttgctaactcatttcatcaagctgaatgtgaagatttcgacaatgattttggtgataacaatgattttgggggagtagatttcaatgatgcattagaagccgatgtaccagaagtagccacttctgaaactcagagtgttatgggtaagagacgtccagagtatgtcaatttctcaagagttgctaaacgagttgatgtgaaattgttgaaggataatttatgggttgtcatgaagaatcaattagcagaccaaaaggaagattctccagataaagaagaagaagaagaagtagccgaaaaacagactaccattgatttcaaaagtgttgttcaaaatgttttacgtacatacagaccagagcaggcaaaggatttatcaactagtttttgttttatttgtgtgctacatcttgccaacgaacatggattggctattcaaagtaatgaagctcataataatttaactattataggctcctaa

SEQ ID NO: 6599 - DNA, 3294 bp, Candida albicans
atgtcgacgtcacagccgtcacaacaacaaaacccagaacaagttgtcaatgatattaggcaaaaaatagaaaaagaacggaaaatcattcaaggtttcaatgatgtcaaaagaaataccaacaatccagaggtgattcagaaatgtaaatcgaaaatcattgaatcacaatcaatgattgattactaccaagaaactatgaacaaattaactcgacagatgctgcgtttaaatactaattccagttcacggacagctagtaggagctcggtcatttctgagtacaagccatcgtactccaattttgatttgattaaatacgaatgtccctcacttggtaataagattcaatttatgttgcaatatttggaattcaaactccaagtcgaaaataagtattccgaggccaataaaaaattgtctcatctttatcttatggatggtgacaaatcttccagtaatgctgctgaaggtggtagagctgagagtgatcaaagaattcaattgttggaaaaagctttgaagaaatatcaaaagtttagtatcaatgaccatgaatttgaccgtgattacgaaataatggacagtacaaaacattcgagaaagttgttaactggtagattgactgtttccatcacatgcattagagatgttgatcacatagctactgcattagctaagaagcgtgagacagttgtggtaattaaagttgatgatctcgagaaagctcgaacaaaaccatcgaaaaatgataattggaacgaagaaatggtgattgatgttgataaaagtcacgaaatagagcttgctgtgatggataaacaaaatggaatttatgtccccgttgctgtaaactggttttcactttttgatttagcagaagagatacgtaaaaagaaagttgctaaagatcagggctccagtgggtggttgcctgcagccaatttacctcaaactggtggttctggtgctggtactggctcaagtatgactggtggggctagttatggagcaacctcgcctctcccagcccataatgacttgagaccttcagtatctccttcaagtgatgctaaagaaaacaaagttctggtcagtacttggttgagcttagaaccaggtggtcaaatgttgattaatttgaattttgaaaaatcaataaccaatggaaagcaatttagaggaccattaggacgtcatggggccatccgtcaaaagaaggaagaggtatttgaaaagcatggacaccagtttgttcaaaaacaattttataatatcatgtcctgtgccctttgtggagagtttttacgttacacgggttatcaatgtcaagattgtaaatttttatgccacaagaaatgttatcaaaaggttgttaccaagtgtatttccaagtcaggctccgattatgatgctgctcagttgaaccaccgtattccgcataggtttgagccaatcacaaaccatggtaccaagtggtgttgtcattgtggttatattttgccatggggtaagaagaatgttagaaagtgtactgagtgtggtgttatgtgccatgcccaatgtacacatttggttccagacttctgtggtatgtcattgcaaatggctaatgagattcttgcaacgattgagtcaactaaagtttcaccaaagaaggcacaacatcagcaatcacatgccaagccgttaccacctaaaccaccgattgaaagcaagccatctatggattcagaagaaactttgcacaatgagccgtcgtataaatctttgcgaccagcgtcagtggttcatcaagacactaactttgtttcaaaattgcctactacagttcaaaataaatatcaggaaccagtagagttaccaccacaacaacagaatcaggtcgttccttctactagacgtcggggtcatggactgactgaccttagttttgaaactggttacggtcaacaacagcaccagcatcatcgtgatgtgccacagattgttgttgaagaccaccaacattacaattcaaatgataatagagatgtcgaaatggaagaatctaaggatgaatttgacaactttgactataataacaagtacaccgagaatgaaattctcactgatgttcaacaagaccaggtccgtagtccctttgctgatcaaatacaaggtgttcctgaaacttctcatgcaaaacagcagaatcaacaagtacaacaagtacaacaacaagaagaacttggccatcaacgtactcattcttcaggaaaatttggcaagtctaagcgtcgcaaaagaaaggttggattagatgatttccaattcttggctgttttgggtaaagggaattttggtaaagttatgttggctgagtcgaggcatactctgaaattatgtgccatcaaagtgttgaagaaagatttcattgttgaaaatgatgaggccgaaagtgttaagtctgaaaaacgagtattcttaacggctaataaagagatgcatccatttttgttgaatttgcattgttgtttccaaacagagaatagaatctactttgttatggagtatatatctggaggtgacttgatgtggcatattcaaaagaatcgatttaccgcgaaaagagccaagttttatgcttgtgaagtgttattggggttgaaatatttccatgacaatgggattgtttaccgtgatttgaaattagataatatcttgcttacaactaaggggcatattaagattggtgactatgggttatgtaaagaggatatgtggcataaaagcaccacatcgacattttgtggtacgccagagtttatggcaccggaaatagtggcgggtaaagcatatgatagaagtgttgattggtgggcatttggtgtgttgttgttccaaatgcttttatgtcagtctccatttaaaggggatgatgaagatgatattttcaatgctattgagaacgatgaagttaaatatcctataaatttatctagacaaacagtattggtgctacaagcattattgacaaaggatccatcgcagcgtttaggtagtggaccaaaagatgctgaagaaattatggaacatccttatttccatgatgttaattttgatgatgtattgaattgtcgaattccggcaccatacataccagaagttcaatcagaacatgattattctaattttgataaagagtttacatctgaaacaccaagattgacaccagtggaaacagttcttacttctgaaatgcaagaacagtttagagggttctcgcatatatctgacaatgcaacgatttga

SEQ ID NO: 6600 - DNA, 2796 bp, Candida albicans
atggctccacctcataagaatcataatttccgtccagaaaacgttttaaaacgtgctgaagatttaattgctgttggacaaaaggaagcagcattagatacattatatgaattaattacttcaaaaagaattcgttatttacaagttcaagatttagaacctattgctagtttattgattgaattagcagttgaattaagaaaaggtaaattagctaaagatgcattacatcaatataaaaaaaatattcaattactggaaaatgggttagaaagtgttcaaaccattgttcgtaaatttattgatttagcagaaaagaaattagatgctgctcaaactaaagctgatattaaaattgacgaagaagaaaatgctgctgctgctgctgctgctgctacaagtagtgctggtgcaggtggtgctggtggtgatgcaggtggtgctggtgcaggtggtgatgatgatttagaaactgcacaaactccagaaagtattttattaagtgctgtttccaatactgattcagctgatcgtactgaaagagaattagttactccatggttaagatttttatgggaagcatttagagctgttttagatattttaagaaataattctaaattggaaatcacttattctgctattgttaatcaagcttttaaattttgtttaaatttcaatagaaaagcagaatttagaagattatgtgaattattaagaactcatatgcaatcagttactactcaaactactactaaaactagtggtcataatgccattgatttatccgatgccgaaaccgtgcaacgttatttagatcaaagatttgctcaattgaatattgctgttaaattagaattatggcaagaatcatttagatcagtcgatgatgttcattcattaattactgcatctaaaaaagcaccaaaaccaaatatgatggctaattattatgaaaatttggcaagaatttttgctgtttctgataatactttatatcatgctgctgcttggaataaatttttcaatttatattctcaatcacctttagctactgatgaagaattgaaaagatatgcttcagtcttggttttatcaactttatcaatcccacaaagagtggttcaagatgttgatgaacacaagagtaaaaattctaaattatcttcattattgaatttaactcatgttccaactagagaaggattaattaaatcgattttgtcgagatcaattttgaaatatgttgatgaaccaattcaacaattgtttgaattattagaaggtggtgattttcatccattatcaattaaacaagaaattagtcaactttttcaaatcattgaatccgataaagaatttaaaaaatatattcctactttaactgaagtcattttaattagaatttttcaacaagtttctcaagtttatgatgcagttaaattagatttcttgatttctttaggtattttccccgatttagaatattctttatcggaattacaagttgaagatttgattgttaatgctgttaaagatgatttagtatctttaactattgatcatgaatcaggggttgtttcatttaaatctaatccatttgatgaaattgatcaagaatttgctaatgctggtactaccaccactaacactatcaccaccaccaccaccattggtacttctagattacaaatatcaccagcagaattggttcgtactcaaattagtaaattagctgcgacattaagtgaatcgatttatttgattgatccaaattatgaagctcgtcaacaacaagctaaacaacaagcattacaacgttgtattaaagatatggttaatgaacaacaaagaattgctgatcgttccaagattttgaaagatcgtaaagttgctgctgaaaaacgtaaacgtgaagaagaagaacgtcaagcccgtttaagacaagaaaaattggcaatggaacaaaaattagaacaagaaagattaatagctgaacaagaacgtaaaaaattggaaaaattagagaaagaacgtgaattaattaaagaaaatgaaaaacgtaaaattgctgaagaaattaatgctaaggggatcattaaaattgatttaaataatttgaaagaattagatacgacaaaattacaattgatgcaaattgaacaattaaataaagataaaaaagaattggaaactaaattacaagccacggctaaaaaagctgatcatttagaaagagcttatagaagatatgaattgaatttattagaagctgatttggaaattcaattggatttagaaaagaaagattatgaatttttgaaacaatcgaaaattaataaagctaaaaaagatcatgataatgctattgaattaaagaaaagattacaaagaattttacccgattatagtaaatttaaatcagaaattgatgccaagaatgaagttaaattgaaacaattacaaaaagaagctcaaattaaatttgaaaaggcaaaacaagaccgtattgaatcagttaaaaaacatcgtattgaagaattgaaaattagaaaggaaagagaacgtaaagctgctgctgaagaagcggcaagacaagctaaagctgctgaaatggctaaattgaaagaagaattaagaattcaaaaagaaaaagatgaagctttagcaagaaaaagagctgaattggaagctgctgctgctgccgctgctgctccatcatcatcaccaccaccaaagaaaacaatgacatttgctgaaagaatgagattaaagagagaaggtaaattaccataa

SEQ ID NO: 6601 - DNA, 780 bp, Candida albicans
atgttagaaggtaaatttgaagaagctgctttattaaaaaaagttgttgaagccattaaagattgtgttaaaaaatgtaacttcaattgttcagagcatgggattactgtacaagcagtggatgattctcgtgtattattagtttcattattaattggtcaaacttctttcagtgaatatagatgtgacagagacgttacattaggtattgacttggaaagtttcagtaagattatcaaatctgctaacaatgaagatttcttgacccttttagctgaagattcaccagatcaaataatggctattcttgaagaaaaacaaaaagagaaaatcagtgaatattctttaaaattaatggatattgattctgaatttttacaaattgatgatatggaatacgatgctgttgtgaatatgccaagtagtgattttgctaaacttgtgagggatttgaaaaatttaagtgaatctttacgtgttgttgttactaaagattctgtcaagtttacatctgaaggtgattctggttccggaagtgttatcttgaaaccttacaccaacttgaaaaatgaaagagaaagtgtcactattagtttagatgacccagttgatttgacttttggtttgaaatacttgaatgatattgtgaaggcagctacattatccgatgtcatcaccatcaaattggccgataaaactcctgcattgtttgaatttaaaatgcaatctggaggttatttgagattctacttggcaccaaaattcgatgatgatgagtag

SEQ ID NO: 6602 - DNA, 3666 bp, Candida albicans
atgaagatgttaactaaatttgaatccaagtcttctagggctaaaggtgttgcctttcatccaaagagaccttgggctttagtctcgttacattcatcaacaatacaattatgggattatcgaatggggacattaattgatcgatttgaagatcatgttggaccagtaagaagtgttgatttccatccaactcaaccattatttgtttctggaggtgatgattataccattaaagtttggtcattaaacactagaaaatgtattttcaccttgaatggacatttggattatattagaggggtatcatttcatcatgatttaccatggattattagttgttctgatgatcaaactattaggatttggaattggcaaaatcgacaagaaattgcttgtttaactggtcataatcattatgttatgagtgctcaattccatcctagtgaagatttaattgttagtgcttcattagatcaaacagttcgggtttgggatatttctggattaaggaaaaaacatagtgctccaacttcttcagttcgtgcatttgaagatcaattacaaagacaacaattacctcaacaagatatttttggtaatattaatgctgttgttaaatatgtattggaaggtcatgataaaggagttaattatgcttctttccatcctactttacctcttattgtttctgctggagatgatcgagtagttaaattatggagaatgagtgatactaaagcttgggaagttgatacttgtagaggtcatactggtaatgttttaagtgctattttccatcctcatcaagatttaattttatcagtttctgatgataaaactattcgggtttgggatttgaataaaagagtccccgtgaaacaatttagaagagaacatgatcgtttttggttgattgcttcccatccaactattagtttatttgctgcttgtcacgattcaggtattatggtgtttaaattagaaagagaaagaccagctcatactattttccaaaataaattatattatgttaatggtgaaaaacaaattcaaacttttgatatcaataaacaagaaaattctttaccaatgttatcattgaaaaaaattggtaagacttggtcatttatgagaactttatcttataatcaaagtgataattcagtattagttgtccatggtgaaggtgataatgggaattatgctttgattactttacctaaacatgtaactggtgctattgaaccaactgatattcgtcaaggtgaagccaattttgccgcatttatttctcgtaatcgttttgttacttttgttaaatctactaaaactttacaagttaaagatttgaataataatattacgaaaacggttcaattagatctgtcaattgttgatgtattaccggggtctcctggtcgtattttattggttaaagctcattcagtgattaattatgatgttcaacaacgtaaagaattggcagaaattagtgttaataatgtcaaatatgtttcttggtcgagtaatggacaatatttggctttactttctaaacataccatcactattgctgataaggatttaaaattaatcacctcaatgcatgaaactattagaatcaaaagtgctgcttgggatgatactggggttttattatattccacattaaatcatatcaagtacactttattgaatggtgataatggtattatcaaaactttagaaaatacattgtatattactaaagttcaaggcaatttaatttattgtttgaatcgtcaaggacaagttgaaacaattactattgaccccactgaatatagattcaaacgtgcattagttaataagaattttggtgaagtgttaagacttattaaaaattctactttagttggtcaaaatatcattggttatttacagaaaaagggattccctgaagttgcattacattttgttcaagatccagaaacaagatttgaattggctttagaatgtagcaatttacaagtggctttagaacaagctaaaattttgaataataatcaaatttgggaaaaattaggtgaagaagctttattacaaggtaatattgaaattgttgaatatatttatcaacaattacatcattttgataaattatcatttttatatttatataaaggtgatgatgaaagattagataaaatgtcaaccattgctcaacatcgtgatgatacttcttcattagtacaaaacactttatataataatgatatcaaaaaaagatgtcaagtttatattcaaaatggaatgttacctttagcttatactttagctaaatctaatggattaaatgaattggcagaacaaattttacaagaagctaatattagtgaaaaagatgttgaattacccgaattgggtgatgttgtccccttacctaaaccaattggtgaacctgttggtaattggccattgaaagattcagaattatcttattttgaaacggctttaatcactggaaaaattgaaaacttgtcaatcaatgaagataatcttactactggtgctgaaggttttgagtctggtgctaccaatattgatgagaaccttggatttgacaataataataatgatgatgatgatgatgatggagaaggtggtgcttttggtggtgaagatgatgctgaagcatgggatttggacgacgaattagatattggtgatgatgatattgttgatgaaaatgttcctgaatttgtcaccactgagaatgaaatcggtgattggttacgtaatgccaagacaccagctacatatgtagcagcgggaggatttgaacaagcagcgtcattattaaataaacaaattggagtggttaattttgaaccattaagaactcgattcaatcaagtttatggtgcttccaaattatatttaccaggtatggatgaattaccagcaatgaaaacttatattagacatgataatgatgaagataatccacgaaaatttaaaccagttgttcctggatatgataaattggaagaattattatctttaggtttcaaaaaattcaaagccaataatttagaagaagcaattaccacatttagaaaagtcatttataccatcactgtcttaaatgttgatgatgaagatgacgaaaccaaatgtcatgaaatcttgagattatgtcgtgaatatattcttggattatcaattgaattggaacgtcgtaaattaccaagtctggatgtgaaacggaatttagaattggccgcttatttcactagagctcaattacaaccttctcataaattaaatgctttacaagttgccatgactcaatcatttaaaaataaaaattatgcttctgcttcttattttgctgaagaattattgaaaatttctaataatagtggacctagagctgaacaagctatgaaattgaaaaataaagctgatacaattgctaatgataccattgaaattaattttgatccttttgctgaatttgatatttgttgtggtagttttacaccaatttataaaggtgaaccatttattaaagaagcattagttggagctacttataaaccagaatttaaaggtaaattatgtaatattactgatattactgctgttggagtacctgcttcaggtttacgtatcaaaggttaa

SEQ ID NO: 6603 - DNA, 747 bp, Candida albicans
atgacaaccatgtcaagaagatatacaccaaacataattataacaggtacacctgggtgtgggaaatcatctcattccctgagtttagtttctcaactcaatcaaactcttggtaaagagacgacgattcatttcaagcactttaatatcagtgaaatagcaaaggaaagagactgcattgaatcttatgatgccaagttagatacttcgattgtagacgaagacaaattgctagactcgttagagcctgatttggaaaaggggggagtggtcgttgattggcattgttgtgatattttcccagaaagattaattgatttggtggttgtattgcgtacagacaattccaatttgtttgatcgattaaagactagaaactacaatgatctaaaattacaagaaaacttggattgtgagatcatggaagtgatattacaagaagcaaaggacagctatattcctgacatagtaattgagttgcgttcagacacagctgaagagatggatgaaaacgttgatagaataagctcttgggtggaaacatggatagaggaccatccagatggggttagcaatgaattgaacaagcaatataacccagatgattcttctgatgaaggtgatgacaacagcgattccgatgaatatgaacttgaagaagacgaacaagaagaagaggaggaaagagaagagtacgatgaagagaccaatgaagagatggagcatacagaagatattgcacaatag

SEQ ID NO: 6604 - DNA, 1548 bp, Candida albicans
atggattcatcagcagcttcatcacaggagaaaagagtcgggacatctacaccagaagcagagctcaatcctcatagggcgaaagcgttacttgcaaaatttaaggaggaaatggctttagccaaagcagcaacagatcctcaagaacgggagaaacattcagaactagtggaaaagataaaacgaatattaataagatatcaagaacaacaaaaacaagctaaaaataatagccctgctaccaagtcaaatttgacgaaccaagattcaactacaaatacacctagtccattggccacgaacaacaatagcgccactaatgtaatagaaccgaaaacagagaccccagactctacaccaatggagcaaaaacctatacaagcccctacaccgcaacacccaaataatgcatcaacatcatcagcaacaatgctgacaacacaattccaaccccaacctcaacctcaacaacaaacggtcacagttgaaaagtataatcatgtgaagaatactttaaaggatatgtggaaacaagtcaagactttagaggcatcatctataaatgaaacacaaactaaaaaggaagaaattgatcgcaaaatcactgaattgcgtaatcaaatgcaaaagtaccatacagcagcattacgtatgaagagtaaattgattgaacaagggacaataccagctaactcaacaccaattggatcaccaacaccagtctctaatacggatccaaccccaattgccaatactacaaatacatcaaacgtgacaccaccaacagagaaagcggaggaaaatagtaaaccaaatgtcaaaccaccaagcacgacaactacaactacatctaagtcgaaacccaaaccattatccactacagctaccaactcaaccacaaaaacatctacaccatccaaaggttcaggttcatctaagtcaaacaatcgttcaagtagtcagaatacaccaggtacatcaacttcagcctcagcaacaaaaacagcatcagtatcaacagaaaaagatgctccacttactgcgacaacatcgacctcagctgtggcaccagctgctgctactgttgctgctacaacagcccctactgctgccgctgctgccacatctttatcaactgcgtcggctattaccacaaaaagcacagctgatccaaaagtaacaccaagtaacatacccgacaatgatggcagagtgttgactaagagaaagttagtggagatgataaataatatcagtattgatcaaggagatgccaaaattcctattgataacgatgttgaagatattttccttgatttggctgacgagtttgtgagaaatgtggtacaattttccggccgtttagccaaacatagaaaattggatagaattgacgtaagagatgtgcaattaaatttagaaagaaattgggggttgagaattcctggatattctactgatgaaataagagcagcaagaaaatggcaacctgaaggtgaatacgctgaaaatgtgaagaaaatttccaaattaaataaagatcaatag

SEQ ID NO: 6605 - DNA, 5520 bp, Candida albicans
atgtctgaacaagaagaagaaacagccctgaagtcacaggaaattgagactccgtctgagtcaattgagaaaaatggacaaaaagaaaacaccaccacggataatactctgaatggaaataaaaaatccgatgattccttacagccagctacagaagaggaattgcaccaaccagaaaacgtagtacaggaaacaactaatattgaatatgtggtagaagatacagttcctacttcggatgacacagattcacctaaaaacaccgagaataataagcctaatactgagacggacaacgccttcaatgccaacattgagggaacaccaagaagtattaactcaccagaatcagtccctgacacagtaatcactccagctgaggatgtatcggttcagagtaccccaagagctaaccataatcgtcagagttcgatcttgtcaatttcatcaaatgcaacagtcgataatgctcaaattttcaagaaaacattcgacataattcttacttcaaaagaggccaagaaagatgacagctttaagaatttgattcagactgcccttgattctttaaatgacccggaatcgaaaaatcctcaaattatattcaacgccctaaaagcatgttgtgatacatcaagcacaaacttgaaatcaaaagcaattgatttgtttgccaaattatttgattatgcccagtttgacgattattcggaacaggttaaactaactgacgactcagtgagcgtaatatcagcttgttttgaaggagagggaacggatcctgaattggaagtacaagttgtgagagctttgatgcatagtattcttttaatgccatgccacggcgcatctttgctacaagctgttagacagatttataatgtatttattttttcattaacagccagaaatcaagctgtcgctcaagggattttgacccaggtcattggaacaattttccaaagagttgaagagtcagtgaagaataagagtaaaagaaacagtactcctagattaacgtcatcttcttcagatgataatttggaaatccaagcatccgatgaaacagagaaccaagagaaacttacgttgaaacgcttggaaaacttgaatgatgttattaatgacaatgatcgcttaaacgaagccaattttgccaccgaaacagatgaagatttagcagtcaaagatgcatttttggtatttcgagcaatgtgcaagctttcaatcaagtcattagattcagccaccattgatatgaagtcacattctgtgagatcaaaattattatcattgcacatagttcatactattttgaaggatcacatcgacatatttttgagtcatgatgttataattttatcttcaaataccaacgagcatgtgcgaatggtaaacgcagtaaggcaatacatcaatttggcactttccaaaaatgccgcctcagcattggctcctgtttttgaactttcattagagattttttggctcataatttcaaacttgagagcagaatttaaaagagaaatacctgttttctgggatgaaatatatttcccagttgccgaaatgaaaacttcaagtgcccatcaaaagcgttatttattgtcgataattgaacgattatgcaatgattcgagatgtattattgaattttatttgaattatgattgtgacagcaacatgccaaatatttgtgaaaagcttattgattatttgaccaaactttcattgcaaagagttgaggtcactccacaacaaaaatatgcctatcgtgaaaacagaagaaatggaatatctgtttacgacatcaataaaatttcaaacctcaccagtaaaactatgtcctcaagaccacctgagccagagatctatagtcaattccccttggagtatgcattaaaaatgacttcaattggatgtgctgtagcattcttacgctcgttatattcttgggcacaaaggggtcttaccaatgccaactctaaacagtttactattgataacaataacaagtcgttatcgtcactcagaaaccgttcagactcaacaaatacatcaattagtgcttcgagaaaccattcatttgtcaacggagacagcttaactgatagtgataatcctcagcaatttgaaaaccaaaagcaaaggaagaaggcatttttggaaggtgtacgacaatttaaccagaaagccaaaaaggggttgcgctactttattgataatgggtttattgctgcagatgatccaaaggatattgccaaatttcttttgacaacagatggattagataaagctactattggagaatacctcggggaaggtgatgaaaagaacattgctattatgcatgcatttgtcgatgaaatggaatttgaagaaacagggtttgtcgacgcaatgagaagatttttacaatctttccgattacccggggaagctcagaagattgatagatttatgttaaagtttgctgaaagatatgttttgggaaatcccgaggttttctccaatgctgacgccgcatacattttgtcatattcggttattatgttgaacactgatttacattctcctcaaatcaaaaatagaatgaccattgacagctttataatgaataattctggaattgatgatggggaagatttacccagagaatttttggaaaaaatttatgatgaaattcaaaacaacgagattaagttacaatcagaacaacatgctgcattattggcaggtgatctttctattcctgcatccggtcaatcaataggatttttcggtggacgtgatgttacacgtgaagcatacattcatgcatcaaaagaaatgtcaaccaaaaccgaaaagttgatgagaaacttgggtaaaaaatcaaaatcagatgacctggaaggtgttttctatgctgcaagtaatgtgttgcacgtcaaatccatttttgatacattgtggatgtcgatattagctgcactcactccacctttcaaagaatacgacgaagaagatgtcagtcgaacatgtcttgaaggaattaagttatccattcgcatagcgtgtatgtttgatttgaattatgccaaaacatcttttattagtgctttggttcaatttcagaatctccataattacgaagaaatgaaacaaaagaacattgattcaatctacataatgttggagttggcagtttctgaaggagatcatttggggcgtgatgcctggattcaaattttaacatctatatcgcaattagaacgattgcaattaattgctcaaggtgtggatcaggattcaattccagatgttacaattgccaaacttgtaacgagaaactctttggagacttctcgaactagtggtagttttttcagatcattttcttcttcgcaaacaccatctcaaacagcagcaagcaagttccataatcagcaattatcgccagaagttgccagtttattaacaaagacggagttggaagttgctattgacaaagtgtttacaaacagtgctaatttgtctggagaaagtatcgtccagtttgtcagagcattatctgaagtggcacaagaggaaattgattcctctggtcaaagcaccaaccctagaacttattcgttacaaaaagttgtggatatttgttactacaacatgagtagaatccgtttagaatggtctcagctttgggcagccatgggtgaaacttttaatgcagttggttgtcataccaatcctgctattctgtttttcgctttggattccttgcgtcagttgtccatgaggtttttggaaattgaggaattggctcattttaaatttcagaaagaatttttaaagccttttgagtatatcatactacacaatgattctcttgaagtgaaagatatggttttggaatgcatcaacaatatgattttggccagagctgataaaatcaaatccggttggaaaacaatttttggggtttgcacagctgcagccaaggaaaacaaagagtcaattgtgatgaaagcttataaaatggccaactggataaacaaagaatacgttgaagaagtaagactccaagactcattttcagatttggtggtttgttttacggttatggccaaaaacgaaaagttccaaagagtcagtttattatcgttagacgttttatccagattaatccatgaaattgctcaatacactgtgctcaacactggtgaagataataaaccaattgttcctgacattgaaaaaaatgaacatctagtaaaattgtggttcccagttttgtacggtttccatgatattatcatgactggtgaagaattggaggtcagatcacgagctttgacatatttgtttgatgtgttgatgaaatatggacaatattttgattttgaattttggaaaattatctgtgaaaacttgttatttcctatctttcatgtattgagtaatcattgggaaattggacttgatgatattaatgaccaattatcagtttggctatccacaactttaattcaagctttgaaaagcatgatgacattattcactcattattttgatgccttaaacagctttcttgatggttatctcgagttgatcatatcttgtatatgccaagaaaatgatacaattgctcgtattggacgtgaatgtttgatatcattgttaatcgataatgcccaaaactttaataatgaacactggggaaaggtttcagatgctcttagcaacttgtttgaattaacaactgccaaagaattgtttacatccgacccactcagaaatagaactgttaaagatagtgaaggtagttcaagtgatattggcggagaagatgtggaacacacagaaagcaagaactctattattgatgacgcggaagagagattaaagaaatcaaaagataagtcttccattgttgtgaagagtgttttgcagttgttattgatacaatcattgtctgaactctttgaaagtgatgatttctatgaaaatgtgccttatgattatttgtttaagatggcaaaattattgttcaagagctacaatttcgctaagaagtttaacgatgattacgatttgcgagtcagattatggaacgcgggtgtgattgaaaggttacctaatttgttgaaacaagagtcgtcctctgctgctgtgtttataaacattacattcagaatgtattgtgatgatgacaaggcgtcaccagcaaacaagcaaagtttattggattatcttgtaccattgtgcaatacaattgtcgaaaggtattcagaactcgatgagactaaccaacaacgaaatatttccacatggaagccagtaatagttgaaatctatgaaggttatgtcgaattagatgatgacgactttacaaaacactgtcctgcattgtatcatttgactttgaaattgttttcaaagagtatgtcaagtgagttgcgtttggcaatgaaagcttttttaactagagtgggtgaagagtttgttagtatttctgacaacaataaggaaagaaggtga

SEQ ID NO: 6606 - DNA, 4263 bp, Candida albicans
atggatgcatatcgagaatttattgatccatcaaaagtgaacaactgtgtgggatgcaatttcatctcatcaaccaagaagaaccttatagtgggtaaaggatcattattacaaatttttgagaccattcaattaaaacaatcaactattaataaaccacaatatcgattgaaattaattgatcaattcaaattacaaggaactattactgatttaaaatcaattagaactattgaaaatcctaatttggattatttaatggtatcgacaaaatatgctaaattttcaataattaaatgggatcatcatttgaatactatagctacagtttctttacattattatgaacattgtatacagaactcaacgtttgaaaaacttgctgtgtcggaattgattttagaaccaacttataattcagtgagttgtcttcgattcaagaatttattatgttttttaccctttgaagttatagaagatgacgaagatgaggaagaagaagaagaagaagacgaagaggatgaagatgaaggtgaagaaaatatcgatgacactaaagaaaagaaagacaaaaaacaatccaaaactgatacaatagaagaagataaaaatagtaccaccactaatcaagagccccgtttattttatgattccagttttataattgatgcaactactttagattcgtcaatagataccgttgttgatatgcagtttttacataattatcgtgaaccaacaatagcagtattatctctgaaacaagaagtttgggcaggaaatttgatcaaatctaaagacaatattcaattccaagtattaactttagatttgaatttgaaatctacaatttcggtatttaaaattgacaatttaccttatgaaattgatagaattatccctttaccaagtccattaaatggtacattattagttggttgtaatgaattgatacatgttgataatggtggggtgttgaaacgtatcgctgttaataaattcactcgtttaataactgcttcatttaaaagtttccaagatcaatctgatttgaatttgaaattagaaaattgttccgtagtacctatccctgatgatcatcgagtcttgttgattttacaaacgggagagttttattttattaattttgaattagatgggaaatcaattaaaagaattcatatcgataatgttgataaaaaaacctatgataaaatacaattgaatcatcctggtgaagttgccatattggataaaaacatgttattcattgctaattccaatggcaatagtcctttaatacaagtcagataccgtgattcactgaaaacactggatacaaaggaatctaaattgaataaaattgaagaaaaagaagataacaaagatgatgacgataatgatgacgacgacgaagatgacttgtataaagaggaagaagaagaagaaactcaaaaaaccataagtaaatctcatattgagtttttatatcatgatgaattgattaacaatggtccatcatctactttcacattaggaatatgctcaaaagagaaatttaaatgtaatttacctaatccaaactataatgaggtttctattttgagtaatgctggaacagattcacaaaccaaattgaatataatcaccccaacgatccaaccatcaatctcctcatcattaacattctctcaagttaaccgaatgtggaatttgaatcaaaaatatttaatcacttcagatgatgtcaattataaatcggaaatttttcaaattgaaaaatcttatgcgagaatgaaatcaaagcattttattaataatgaattaaccattaatatgcatgaattaaataacggtaaatttattttacaagtgacacctaaacaaattgtcttgtatgataataaattcaaaaagagattcactttaaatgacgaaattaaagacgatgaaattttgagtagtattttgagagatgaatttttaatgattttcttagctagtggtgatgtcatgatttttgtcattaatacttataatgaatcatacgataaaatagaaattccaaaattattagatgatacaattatcaccactgggtatatcactaattctcatctattgagtgcagtttctaaaaacgttaatttgttattagataataataccagcagcaataagagaaagagaaaacatagtgcattaagtaattctgaaggaagcaagaagaatactggaaaatcacaaccctcaacggctgcaccacctccaccaccaaaagtaaataaagtaaagacatttgttttagtcactggtgataatcgtattgttgcatttaatagatttcatggagaaaaatgttatcaattaaatcatgttgataagtttactgaaaatctttcccttggattttttgatccaaatcaactgacagttgatccatttatcaaacaaatcatgttgaatgaattgggtgataaatttgatactaaagatgaatatcttactattttgactattggtggtgaaatatacatgtataaactttattttgatggagaaaattattttttcaaaaaggaaaaagatttaactattactggtgctccagataatgcattcccctatggtacttccattgaaagacgtttagtatatttcccaaatttaaatggatttaccagtatttttgtaacaggagtaattccttatttaattttgaaaactgttcattcaattccaagaattttccaattttcaaaaatagctgccatgtcaatttcagcattttccgattccaaaattaaaaatggattgatttttttggataatcaacaaaatgcacgtatttgtgaattaccattggattttaattatgaatttaatttaccaatgaaacatgtggatattggagaactgatcaaatcaatagcatatcatgagacttctgatacagttgtattatcaacgtttaaacaaattccttatgattgtcttgatgaagaagggaaaccaattgctggtatcatcaaagatatcaaagacacacctgccatgtcatttaaaggttccattaaattagtatcaccttataactggaccgtcatcgaaactattgaattgggagataatgaagttggtatgactttaaaatccatgattcttgatgttggatcagaatcagggtcaacccttggttccgatcccaattcattgatcaaaaaatacaataagaagaaacgagaatatattgttattggaattgggaaatatcgtatggaagatcttgctgctaatgggatttttaaaatatatgaaatcattgatattatcccagaaccaggtaaaccagagaccaatcataaatttaaagaaattttcaaagaagaaactcgtggagccataactagtatttgtgaattgagtggaagatttttagtatcacaaggtcaaaaagtgattgttagggatttacaagacgatggtacagttccagtagcatttttggatacacctgtatatgtttctgaatcgaaaagttttgggaatttgttaattttgggagatctattaaaaggatgttggttagttggatttgatgctgaaccatttagaatgattatgttgggtaaagatactcaacatatttcagtagaatgtgccgatttcattattaatgatgatgaaatatttgtgttggttgctgataataataatgtacttcatttattgaattatgatcctgatgatcctcaatcaattaatggtaccaaattattaaccaaggcatcatttgaattgaattcaacaatatcatgtttaagatcattaccattgattgatattgaagaaagtgtccaaacagatgcacttactaacattgctgttcctcctcctcttcctcctaataccacttcaaattatttccaagtgattggatctacacaagatggatcatttttcaatgtattccccattaatgaagcagcatatcgaagaatgtatattttgcaacaacaattaattgataaagagtttcattattgtggattaaatcctagacttaatcgaattggtagtattaaattacaaaataatgaaactaatactaaaccaatattagattatgatttaattagaagttttacaaaattgagtgatgataggaaacgaaatttggctaataaagtcagtggtaaaggtatttatcaggatatttggaaagatattataagatttgaacatacattaaatgatctatag

SEQ ID NO: 6607 - DNA, 1665 bp, Candida albicans
atgccggtgtttgaaaaaaaagatactgtacataccaatgttccatcccctagaccatccactaattcacatacttcatctacttatatccctcgatacagactaagtatcactactaatgaggatataaatttacaatctatagatcccggtacagttaaaattgattgttctggagcatttattgccaatgatgatttattacgagatactgcacctgatataactgatgaaattaacaattcctcttcttcaacttccgggacacctcctctgtcaaatacatcgtcggatcttgaagatgacacagaagaatctgaatttgacacagaagaaaatggtggaggtttaagtgattcttcaagcacaacggtggaagatgacgaaaatcaattacaacaattgcaacaacaacctttatatggaggtgtcattaccaaaaacaatattaccctaccacaacacaatgatgaaatcatacatatatcggtggatataggtggtacattaaccaaattagtttattttactaaatcttcatcaaataggaaaaattcttctaggaaaaccactggtggtggaggtgggggtaaattacatttccaggatttccaaacggaaaattttaaaaatgaagctatgaaattcatgattaaattaatacaaaaatcaattaataaatctaatataaatcctcctataacgtatattatggcaactggaggaggagctcataaattttataatttaatgaaaaaaacatttaaaaaacataaattacccatgaaaattattgctaaagatgaaatggaatgtttaattaaaggattagattggttaataacgaaaatccctcaagaaattttcacttatgatttaactgaattaacaactaaatttgaacccattcaatcgaaaaaagaaatctatccttatttattggttaatataggtagtggggtgagtatggtcaaagtgactaaaccaggacctgaaggatttgaaagaattggtggtagttctttaggtggaggtacattatgggggttattatcattattaactgatgctaaagattataatgaaatgttggaaatggctcaaaatggagataatgaaaatatcgatttattagttggagatatttatggaactaattataataaaattggattaaaagctaatcatattgcatcatcatttgccaaagttttcaaaaaattgagaaaattcaactcgtctacgaacagcaataacaataacaattccgataatgatagtgatggtaaatttaaaaaattgactgctgctgaaaaattggctcaatttaaacaagaagatattgctagatctttattattttctatatctaataatattggtcaaattgcttatttacatgcattaagattcaatttgaaaagaatttattttggtggtagttatatatcaggtcatatgcaaaccatccatacattaagttatgccgtgaatttctggtctaaaggggaaatgcaaagttatttcttacgtcatgaaggttatttaggaagtgtgggggcatttatgatgggtccagctccaattcttgaagaaaatggcaattcatcaaatgaaaataatcacacaaataatgttaaaattgccaatggagttcaacattaa

SEQ ID NO: 6608 - DNA, 2262 bp, Candida albicans
atggcagcagcaccaccaccaccagcgaaaaaccagggtaaggcaaaacagcatgttacaggtgccaggttccgtcagcgaaaaatctcggtaaagcagcccttgactatttataaacagagagacctacctactctagatagcaatgagttagagcctagtcaagtccatcatttaaattctaatgcgtcatcatcatcaacacaacaaccgagagaccttcatgcagttgaaactggggttgacaagaatgaggaagaggaagtgcatcttcagcaagttatcaatgctgcacaaaaagcacttttgggttcgaaaaaagaagaaaaaagcagtgatatgtatattcccacaccggacgcttcgaggatatggcccgaggcacacaagtattacaaggatcaaaagttcaagcagccagagacatatatcaagtttagtgcgacagtagaggacacagtgggtgtggagtacaatatggacgaggtagatgaaaagttttatagagagacactatgcaagtactatcccaaaaagaaaaacaagtcagatgagaacaatcgaaagtgtactgaattggagtttgaaacaatctgtgacaagttggaaaagaccattgaagcacgacaaccgtttttgtctatggaccccagcaacattctatcgtacgaggagttgtcgtcgtacattgtggatcagtttaaaagtgcagtgaaaacaagcaacccgtatattgttaccaatggtgggaatctagagtatatatcgacgacagctttaaaagagagattgtcgaaggaaataaagtatgaaccgtttgttactatttttgataagaaccaaatgtccacaagtgcggtgagacctattcccaaattgtttgagttgttcggcagacctgtttatgatcattggaaggagagaaaaatagaaagaaagggcaaaaccatccagcccacactcaaatttgaggatcctaactcgaacgaaaaggaaaacgacaatgacccatatatatgtttcagacgacgtgagtttaggcaagcaagaaagacgagaagagccgatacaattggtgcagagagaataagactgatgcaaaagtcgttgcaccgcgcacgtgatttgataatgagtgttagtgaaagagagatcctcaaactcgacaattttcaagcagagcatgaattgtttaaagccaggtgcgctaccaaggcttgtaagagggagctcaatatcaagggtgacgaatacttgttctttccgcataaaaagaagaaaattgttcgtactgaagatgaagaaagggagaagaagagagaaaagaagaagcaagaccaagaacttgcactcaagcaacaacaagcactacagcaacagcagcaacaaccaccacaaccaccacaacaagcaccatcaaaacaagatggtacatcaacgagccagccttatgtcaaactcccacccgcaaaagttccagatatggatcttgttacagtttcgttggtattaaaggaaaagaacgaaaccatcaaacgtgctgtgttggagaaattgcgcaagagaaaggaacacgacaagggatttatcaatttgacagacgatccgtatcagccatttttcgatatttcaaccaatagggccgaagagttgagccatattccgtattcgtcgattgcggccacacactatcaccaattcaacacatcgaactacatgaacgaccaacttaaaaagctacttgaagagaaaaaacctttacctggtgtaaaaacgtttttgggttctaacggggagttggtaccatcgaaggcatttccacatttgctgtcgttgcttgaggaaaagtataaggcgacaagtgggtatattgaacgattattgcaaagcgtggagacgcaagattttagttcatacaccaatggctttaaagatgttgagccaaaagaaacaaatgaacctgttatggcgtttccccagagaatacgtcgaagagtgggcagggctggcagggtttttttggaccaccagcaagagtacccgcaaccgaattttcagcaagacacagatcgtgtgggaggtatcccagatgtgtattgtaaagaggatgccattaaacgattacagtcaaagtggaagttcgatacagaatataaaacaactgaaccatttagtttggatccttcaaagttgaatggtattagtccatctacgcaatcgattagatttgggtctatgttgttgaatagaacacgtaaatag

SEQ ID NO: 6609 - DNA, 2883 bp, Candida albicans
atgtttggaaataaaccagctacatctggaacagggttttcttttggtcagaccaaccaaactgctgcaaatggaacaaaccagacctcacaacaacaacagcaacaaccagctgtaaccattggatcaacaacacaatcagtaatcaaccctccaaatggtccaactaccggaacaacaacaaacttttctcttcctgtatcagtaaacacttcgaatagctctaaattattgaaggagttattggaatcagccaacaatttaccgaagactaatgacaacattcaattgggatccattcaccttactttgaatgaattagaaagaaaatcacaacaattaaggaaacaatcagaaaaagataccaatttcaccaaagcccattacttattggcaggtagtggaatcagtgctgatgatattgaagatgaattaaatgcaatccatatacctaaaactggtgggagaataccaagccatcgtgccattgttggtgcagaaaatattgaaaattatttaagtgccaagaaggatgaaaatattttaaacaccattgaacaatcattatcattggcatcaaaagattttgacaactacattgatgccaacatatccattgattggaaagttagaagagatgaattgagaaaagcagttggtttgaaaacaaacactaaattcaatgaagaaactttgaaaaattccattatttggaaatcaaattctgctgcttcaaacattttaactccattaaatacttcttcttcttcaatcagacaaatttcaagagaaaaatttgaaaatcaagccaaaattatttattcattgaatgaagcaaggttacaaaataaaagtttccccttgtgtttaaatttcaatgaagttaataaacttcaaaatgatattaaagctaaacaaattgctgaaatttggaaaattttgatttctttaactggtgaaaaaaccgctaaaacttctcaagaacaaaaatttttcaatactaccaaagcagatcttaacgctataattgtcaccaacagtataacttatttgcaacaagaatttttcaattatattgatgaattatatcttaaagatggtgataaaccacagagttttgccccaccaacaaatattaataaagtatcttattttgttcatcaaattgtgttgaaaaatgaccctgatttgatcaacaaaactttattggttaatggaactcctatttgggtattgatcttttatcttatacgtgctggattatatttggaagctgacgaattggttcaacgtaatcgtgaacagttcaacaagtttgacaaaaatttccctgtttacgtaaagagttatgtggaaaacactaatcacgttttaccttcagatttgaatgaaagattacacaaagaattcaatcaacaattccaattcattattaatgatgtggataacaatgtgaactacgatccttataaatattctgtttataagactattgggaaatgtgatttaagtaacaaatcattacctcgttcagtgaatttaagtattgaagattggacatggtttcatttatctattattaatgctaatcaaccgggatctgaatctaatttaatttttgaaaattacactttatcagatttacaaaataaaattattcaattaggtcctaaaaatttcatgtcatctccaaataatccattatatctcaagactttaatcttgactggactttacgaaatggcagtacaatactcttatgagtacgtaaatgaatctgatgcagttcatttggctataggtttagcttattatggattattgaaatgttctaatttcaacaaggacaatattttgactgtcaataacaatgaatatgaaatcaattatggaagattagttggggcatataccaccacttttaaaataagtgatccaaaagttgcttgtgaatatctcattatgattgccttagccaatggaggtgaatctaaaagtgctcttcttgtttgtcatgaagcattacgtgagttgatattgatttcttgtgaatttggtgtattacttggagaattaaatcaaacgaatggaacaaaaataccggggattttagaaagacaacggaaattgattaaattggaaagtttagatcaattttatcaacaaattattgaagttgctgctaataaatgtcaagaagaaggtagaatctttgatgcattgttattatatcaattatgttgtgattatgacacggttgtttctttgattaacaaattattagcagaaatacttgccactactgatttgaataaacctattattaaatcaggtaattatgaagttatatctacgggatatatcactaaagaagttgatgacaccattgacaataatattattttattggctcaacatattatgaaagttttcaataataatagtcatatacttggaaaattatcatctaaagtgaaacaaacatcagagttattacttccaataattggaattagagatttatttatcaaaaaagattggcgtcaggttatcaatgacattaatcaattaggacttattccagttggggttaatgatgatcttattaaaattagaacaatgagtgaatcaatacaaaataacgatttagatgataatttaattaaaattattccatcattattaattatggtaatgaccagtatttctcatataaattataatattttaactaaaaaatatcaatcttatggtaatgaaaaacaagaattgattcattggaaaaaaattgctaaaaattgtatgatttatgctggaatggttcaatataaaatgcctagagaaacttatagtctattaattaatttggaatcactgttataa

SEQ ID NO: 6610 - DNA, 2247 bp, Candida albicans
atgtccttggaggtatatggagctaaaggcaacacattattagcgttaactaataacttaaagttatctattgcattagcagcttttgaaccaaaagtggaattaactttgaatgaagttgaatcaaatttgtctttgaaagataagaaatctggttttgaattgattgaaccaaatgccatcgttaaatacttggcgaaagactttaccaccactgaggccattaaatttgaagaacaagttttatattcagcaattaaatccaacaaaaaagatgaacttgccaaaattacggatttgccaaagtttgctaaagaagagttgaccccatctcaaattattgtatttgctagtttataccctgctttcaaagatactaaagaaaatgagtggtttagtaagtttttacaattaccagaagttgcaaccggtatcaaaaacgctttggcaatcactccagtggaaagagaaaaggaaaccaacactgggaagcaaaatgttgaaactggtcatttagtgaaaaaacaggctgacaaaattcttcctaaatctgatgaaagaaatattttaattacttctgccttaccttatgttaacaatgttcctcatttgggtaacattattgggtcggttttgtctgctgatatttacagtcgttatgctaagaatagaaactacaatactttgtttatttgtggtactgatgaatatggtactgccactgagactaaagccttggaagaaaacgtcactccacaacaattatgtgacaaataccatgctattcataaagaagtctatgattggtttgatattggatttgactatttcggaagaaccacaacctccttgcaaactgaaattgctcaagatatatttttgaaattgcacaacaaaggatatttggaagaaaaaactactgaacaattgtattgtgaacaccataaatctttccttgctgatagatttgttgaaggtacttgtccaaaatgtgattatgaagatgccagaggggatcaatgtgataaatgtggtaacttattggacccattggaattgattaatccacgttgtaaagttgatggcaatacccctgttgtcaaagagtctactcatatttaccttaaattgaatgacttagaagagccattgaaggaatgggttcttgattcatcggcaaaaggtgcttggtcaagaaactctaagaacattaccgactcttggattaaaagaggtttagagccaagatgtattaccagagacttaatctggggtacaccagttccattaaagggatacgacaacaaggttttatatgtatggtttgatgccactattggttatgtttccataactgctaattatttcaaagattcaaacaccgatgattatctcaaatggtggaaaaacccagaaaacgttgatttgtaccaatttatgggtaaagataatgttccattccacactgttgttttcccagcttctcaaattggtactggtgataaatggaccaagttacaccatttaagcactactgagtacttgcaatatgaaaacggtaagttttctaagagtagaggtgttggtgttttcggtaacaatgctaaggaaactggtgtctcaccttctgtttggagatattatttggcctcaaatagacctgaaactcaagatgcccatttctcttgggacgaatttgttgctaagaacaattccgaattattggccaatttgggtaactttgttaacagaattgttaaatttgttattgcaaaatataatggtgtgattccaaaattcgatactaagaacataccagattacgacaagtttgaaaatgacatcaactctttgttggcaagttacattgacaacatggaaaatgtgaatttgagaaaaggtttagaacttgccatggctatatcttccagaggcaaccagtttttgcaagataacaagttagataactcgttgtatgctaaccagccagcaaaatctgatgctgttgttgctgttgccattaatttggtttatttggttagtgctattatttacccttttatgccagaaacaacagttaaaattgatcaaattttgaatgctcctgcattatcaattacaaacaaatttgaattggtgttgttgccaggtcactgtattggtaaagcacaatatttgttcacaagaattgatgacaagaagattgatgaatggagaaagttgtatggtgggcaacaaaagaagtaa

SEQ ID NO: 6611 - DNA, 5847 bp, Candida albicans
atggttacctcttcaacagccaatgataataataatgaagatcccataatttctaaaaattgggtatgggtacctaatcaacaagatttattcactaaaggttatatcactgactatttacctgatggtaaatgtaaagttaatgttgtcaaaggtcaagaatcatcccatgattcaacaataatcgtggatcaagataaattggaaaactgtaatcctgtgaaattcaataaatgtgaagatatggctgaactaactcatttaaatgaaccatctgtcgtttacaacttgtatcttcgatatttagacgatttgatctatacttattctgggttgtttcttgttgccatcaatccctataaactgttacccatttataatcaatcaattttaatgaaatatcaccaatataataacgtgacaacaaacaaaaatgactacaaatctaaaaacgcctccaacagcaacaacaacaacaaaggacaatcaccgccacatatatttgctgttgccgaatcgacatttagaaatttattatccaacaagaaagatcaatcaattttggtaactggtgaaagtggtgctggtaaaactgaaaataccaaaaaaattatccagtacttgtcatcaataactagtggcagtcataccaataaggttgatcataataatagtatcgatactaaaattcttcaggctaatccaattttagaaagttttggtaatgctaaaactatcaagaataataattcttccagatttggaaaattcattcaaatttatttctcaaatactggtgaaatatcaggagctaacatcaattattatttgttggaaaagtcaagagttataagtcaatcgaatcaagaaagaaattatcatattttctatcaatttttaaaagggtatgaaaacttacctagtttgggtttaaacaaagacatgtcaacttataattacctctcaggaggaaaattaactataaataatgttgatgatttcaaagaatttaatttattagtggaagcattcaaaatcatgggattcaccaccaataaaatgaactttatttaccaagtgttggcgataattttacatttaggtaacatcactttcacgtcatggaaatccgaacaagccaatttcacgaatgattcccctattgatagaatatgcgagttgttagcagttgataaagatttatttgttcaaaatttattgcgacctaaagtcaaagctggtagagaattcatcacaaagtcaaagaaaccaaacgaagtcaaatttgctatcgacgcctttgctaaatatttatatgaaaagttgtttcaattcatcattaccaaaatcaatgaaaaattggatcaaagccataatggagacgataacaccgccaacaataacaacgataacaattttttcattggtgttttagatattgctgggtttgaaattttcgatattaactcctttgaacaattatgtatcaattacactaatgaaaaattacaacaatttttcaatcatcattcatttattttagaacaaagtgaatatttacgagaaaatatcaattgggagtttatagattttggtcaagatttacaaccaacaattgatttgattgagaccaagcaacctatgggtatcttgaaattgttagacgaagaatgtttgatgcctaaatcatctgatgcatcttttatggaaaaattatcgaaaaatttcacaaatactcataagaaattttctgagaataaattcaaaaatgggtttataattcatcattacgctggtaaagtagaatataatgtggaaaactggttacagaaaaatactgatcctataagtgaaagtattttgaatttattgcctgattcccaaaatgaattgattgcagatatgtttataaacgatcctcatattaatagaccacagacaaatggtggtggtaattccaaactcaaaactgcttcacaaaagcataaagatcaattgaaaacgttaatggatcagttagaatcaactgaacctcattttgtgcgttgtatattaccgaatctagagaagcgggccaacaagtttgataaaaatttggtacttggtcaattaagatgtaatggggttttggaaggtattagaatcactagggcaggataccctaatagaatgatgtttgacgaatttattcaacggtactcgatcatttgtgataatgaactttcttctccacagaacaaaactaattgtgaaataattttgaaatttgtcaaattaaaccctgaagatttcaaagttgggcttaccaagatttttttcaaaaatggtatattagggaaattggaaattattcgtgatttagcattgaagaatattttcactgatttgcaaaaagttataagaggtaatttaaccagattagttttgaaacagaaaatcaaagaaattcaatccgcacaaatcatttcaagaaccatggtgacgttagatgaaatcaaatctaatagtccttggatgagattgtttttccatgtaaaaccattacttgaagattctgctaaagtattagattctaaaaaattacaagaaaatttacaaactttaactgtgaaattgaaagattcagaaaaacttacaaaaggtcttgaaacggataatgaaaaactacgagaacaaatgaataatttacaggatgaaatgattaatattacttcaattgcaaaggaaaaagatgacaaattatctcaattgagattaacagaaaataaatcaaagcatagaattgaaactttggaaataaagttgaaagattttgaaaaacaaaatcaagatttaatcaatgaacatgaaaagttaactcgccgttctttagaacttcatgataagcataacgcaaaagttgaagaattaaactctttgaataaactacatgattcggcacaatcggaattgtccaatttaaaacaacaattgaaagagattacaaaattaaaccaagcccatagtaaggaattgttgaaatttaaacaaatgcacgataaactgattgaagatttaaatgaaaaagttctgcgattggaaaatttgaataaaaaattacaagcagatttgaattcaagtaaagatgtgattctgagtgaacatgggaaattgcaaaatgaaattatgaaattaaaagaattatgcagtgattacgaaagaaagcaaaaggattcacaacgcactattgattcattacaaattcaattgaaaaaagatgaagattacaaatctagatatgaatcgaaaattgaagaagctagagagaaagttactttgttgaaaggcaaagttgagaagaaatcccaagaaattgatcaatataaatcagagattaaaaaattgaaagctgaactcgctagcagcaatactaagatcactcaattggaccaatctacaaaagaattatcaagtttgaaatccaatgaatcaaagtatgttgcagaaattgaatcggctaaacaacaattatcgaaaaaaattgaggaatatagttcaattgaagctgactataatagattacaaacggaattgaaacaaatgaagcaaacaaatacagagtatagcaccagaataactgaattgagcaccaagttgaaccaagtcactgaagaagccaaatctaaagagattgaaaaggaaaatcaaccaccgaaccctcaatttatggaagagtttacccatatgaaattgaaagtgaatgaacagactgcatcattgaggaaagaaaagtttgaaaacaagaaattactggaggaattacaaatgttgaaagaacgaatcatgaatgggtctttaactagtatggacttaacaccaaagagaagatctttggccattggtgataaatcaatgataactaacacggtggattcttttaataaagagattgaaaatttgaaatttcaattacagcaagaacaaggcaatttccaacgtgcagagaattatgccattgaattacaaaagaaattaaataaattattgaccacacgaggattaaataccaatactgattatgagaaaaaatataatgattcgcaaaagagaattacacaattagaaactaaaattgggagattacttgccaattctggtggagattatgaagatcaccatttagatgataacgacgatgattgggaatcacgttcttctaatggtggtagcggtggtggaagtacctcttcttcagctagaaactcgttagtgaaaagtgaaagtataactgcattccataatatgcgtggagtatctcaagattatattcaaatatatcaagacataacaaagactttaaaatccactagagaagagttgaatggatcaaaaacagaaattttaagattgaaagcattattgcgtgaatcagaagatgaattgtatcaagtcaaacaagagaattataaaaccagtgttcatgattatgaacaggatttggcgcaattgaaagttaagcacgaaactttattgtcaagaaataaggatatcaatgaaagtttagagatatacaagaaacggtcggatgagtactataagaaattagaattagctgaatcggccattgcaatttccaaacgacatgaagaacaagcaactaaagaaatgaaagaatctagaagccaattgttattagttagagaagaattaagaacaacacagattttgattaaagattttagaattaaagttgaaaatttagaggcaacaattgaagaaaaaaatcatcaattagatgcaaataaagaggaaatcaaacaaatacaagacaaattaaactatcatttgaaaaattttgagaataaggaacttaatgagaaactcaaagaagaaatcaagaatttgaatagggatttagatttcaaaactgatattgagactaaattaattaaagagaataaaaagttacaattggattatgaagatgttttattagttaagaacaatttacaaaatgaagttgaagaattgattcttcaagaggaaaaattacagaataagattgatgaattaactaataataatcgacaattggaaaatgagaaattgataaatgaaaggaagatagtcaattgtacaaaacagatttctgggttgaaagaattggttgatgagatttccattgaaagagataaattattgaaggataaggaaactttacaaaatgatttacaaaccatgaccaataaatttgatgcaacaactactgaattaaaacaagcacatggagaattagatttcttgaaaaaacatttagaaaatcaacgagaagattctgaagccattaaaactgaattaaatcaactgaaaatgtctacaagctttgatattcgagatcaacaaaaattaagaaatgaattattagtgacaaaggaagaaaatttcagtctcgtaaagactaataaagaattaaatcttaaagtttctgatttagaagaaaaattatacagtaatgaacaattaaaatattgggaatctaaagttgatacattatccaaggcattagatggagcattgaatgaaaaacatgaagctgataaaacgattaaaaatttacaacgatcaattaaacaattggaaattagagtggaaaatgaatcacaattgagtaaacgttataatgatgagaattttgattatcaaaataaaattaatcattataaaagtactattgatatcattcataatgaaaatattgaaaaagatttacaattaaaatcaatacaacgagaaaacatcgaaatgaaagaatcaatgttaatgttacaaaaagaagtattggaattacgtgaacgattacaagtttaa

SEQ ID NO: 6612 - DNA, 2985 bp, Candida albicans
atggcaccatctcaagaacaatcaaaagagcaaatccaatctcagacttctaaagatcaacaaccaactaaatctgataaatcaaaagttcaaaaggaagaagaattatctgaagaagatcaacatttaaaagatgaattggaattattagttgaaagattgaatgaaccaaatcaagacagggcattatataacaagtatttagatgctttgaaaacttttatcaaggaatcgaccacatcaatgactgctgtccccaaacctttgaaatttttaagaccacattacccttcattaactgaattatacacaaattggtccaatcaatttctggccaaagatgttattgttattaaattggctgatatattatcagtattagcaactacttattctgatgaaggcaatagagattctttaaaatatagattattagcttcagatgatactatttccgattggggacatgaatatatgcgtcatttggctttggaaattggagaatcattccaagaaaatttaggtgttgatgaagaattggtgaataaattggtgaaattggctttgcaaattgtaccattctttttgaaacataatgcggaagccgatgccgttgatttgttattagaaattgaatgtattgataaattgccacagtttgttgatgaaaatacttttgccagagtatgtctttatgtcacaagttgtgtgccttatttagctccaccagatgatgtttcatttttaaacactgcttattcgatatatttgtctcataatcaattgacccaggccttaacattggctattaaattagacgataatgaattgataaaacaagttttcgattcaactaccgatgaatcacttcataaacaattgggttttattttatctcaacaaaatagcaatttcaaatatccaggtgaaaatccagaagtacaagaatgtatttctaatgtgaaattagctgaatatttccaatatttggttaaagaattgaatttgttggatccaaaagttcctgaagatgtttataaatctcatttagaaaattccaaatttggtttaggtacttcgggttcaatagattcagctaaacaaaatttggctgcatcatttgttaatggatttcttaacttgggttttggtaatgataaattagttcaaactgaagaagataataaatcatggatttatagaacaaaaggttcaggtatggcatctactactgcttctcttgggtcgattcatcaatggaatatcaatgaaggtttacaagtcttggataaatatacttattctgaagattcagaagtgaaagcaggtgcattattgggaactggtgtagtgtcggctaatgttcatgatgaagtcgatgctgcatttgccttattacaagaatatgttcatgaaccaaataaactttatcaaactgcggccataaatgggttaggtattgcctttgctgggtctgcaaatgaagatgttttaaacttgttgttaccattagtttctgatttggatatctcgttggaaatttcatgtcttgctgctttagctttgggtcatatttttgttggtacatgtcatggtgatgttacgtcaactattttacaaacattattggaaagagattatacccaattgactaataaatttattaaatttatgtccttaggtttaggattattgtatatgggtagaactgaacaagcagaagatgttttggaaaccattgatgccatcgaacaccctattagtaagacattaaaagttttggttaatatttgtgcctttgctggtactgggaatgtattacaaatccaagcattattacaaatgtgtactgctaaacctaaagatcaattggaagaagaaaaaaaattggaacaatctgaggaggaacaacaacaacaacaacaaaataaagataccaaatcaaatggagaaggaggagaagaagaagaagatgtggagatggaagatgctgaatcaaagaatgagacttctgagaacaccactgcaagtgctacttcaactacttcctcctcgaaagaaaagggggatagtagtagtagtgctgctgctgctgctgctgcaggtgacgaaaaggcacaagaaggcggcgatgacaaagaagacgaagaagaaatagacgaagaagaagaattatatcaaggaattgctgtcttgggtttagcatgtattgctatgggtgaagatattggtcaagatatgtcattacgtcattttggacatttgatgcattatggtaattcattaattagaagagcagttccattggctatgggattagtgtctacatctaatccacaaatgaaagtttttgaaactttatcacgttattcacatgatccagatttagaagttgcccaaaattccatttattccatgggtcttgttggtgctggtactaataatgctagattggctcaattattaagacaattggcttcttattatattaaatcaccagatactttatttatggtaagaattgctcaaggtattttacatttaggtaaaggtactttaacattgactccatataattccgaaagaactattttatctaaagtttctttggcatcattattaaccattgctattgcacttttggatccaagatcatttatattgaatgattcaacaactgaaactactcatcaattgttgtattatttgactcctgcggtgaaaccgcgtatgttggtaacggttgatgaagaattgaaaccaattaaagtcaatgttagagttggtcaagcagttgatgttgttggacaagcgggtaaaccaaagactattactggttgggtcactcaatctacgcccgtattattaaattatggtgaacgtgctgaactagaaaataccgatgaatggataagtttgagtagttcattagaaggggttgttattttgaaaaagaatccagaatatatggaaattgatagttaa

SEQ ID NO: 6613 - DNA, 1623 bp, Candida albicans
atgtcgttgaagttaccacaagcaccaaactcaggcttattcaaacaaggatactcctccttctccaatgccgacggagccattatcagaaatgttgaagcagttcgtgaaatcgcctctatcttactcacctccatgggtccaagtggaagaaacaagatcatcgtcaacaagttgggcaaaaaattcatcaccaacgatgccgccaccatgcttaacgaattggaaattgtccaccccgtagtgaaaatcttgatccaggcatcaaagcagcaggaattcgaaatgggcgacaacactaacctagtaatcatccttgctggcgagttcctcaacgttgctgaaaaattgttaacattgggcttgaatgtcagtgaaatcatccaggggttcaacttggcaaacaagtttgtgatgaaaacattggacgagttggtcgttgaaaaagtcgagtcgttcgaaactgacctattaaaagcagtgaagccagtgatcgccgctaaacagtacggcgtagaagataccatcgccaaactcgtcgttgatgccgttgccctagttatgaagaacgggtctttcaatgtcgacaacataagagtggtcaaggtcatgggtgcatcgctctcccaatcgcaagtggtcaagggtatggtcttcccaagagaacctgaaggtaccgtcaaaaacgccgccaaatccaaagttgtcgtgtttaccaaccccatcgatatttccaccaccgaaaccaaaggtacagtgctcctccacaatgcccaggaaatgcttgatttcaccaagggcgaagaacaacagttggaccagttgtgcaaggaaatccacgattcaggagttaaggtggttgttgctggttctagtgtgggcgagttggcgttacattacctcaacaagtacggcatcttggtgttgagagtgccatcgaaattcgatttaagaagaatctgccaggtgtgtggcgccacccccttgcctcgtttgggcgcaccaacaccagacgaaatgggcgaaatcgatatcatcgaaaccaaagaaattggtggcgacagagttacaatctttagacaggacgagtcgagctcaagaactgccaccatagtcgtaagaggggcaacccaaaacaacttggacgatattgaaagagctattgacgacggtgtaaactccatcaaaggattgatcaaagataacagattattgcctggtgccggtgcagttgaaatagagttgatgaagcgtatcaccgcctatggcgagtccactcctgggctcttgcaattagctataaagagttttgccaaggcatttgaggtgatcccaagagtgttggccgaaacttctggtcacgactcttcagaaatattaagtaaactccatgctgcccacgctgaagacactggtctcagagctggtatcgatatagattcaggagaggtggctgatactgccgtgttggatatcttggctacaaagaaatccgctatagatttagctgttgatgctacaaacactatcttatctatagatcaaataatcatggctaaaagagctggaggcccagttatgccacaacagccaagaccgggcaactgggatcaagacgactga

SEQ ID NO: 6614 - DNA, 2298 bp, Candida albicans
atggccaagaatcttaaaaaaggaaagaaagtgttcaataaatctaccagaaaaatcaatcgtttgaaagaagaagaagagttggcaaaattgcaagaaagaattaacaattatgacccaaaaacagatgaagcatccgtatctcaattcagtgatctccctattactgagaatactttgaaaggattaaaagaagccacttttgtatctttaactgacattcaaaagaaaacaatcccaatagctttgaagggtgaggatttaatgggaacagcacgaactggatccggtaaaacattggcattcttaattccagtgatagaatcattaatacgaaacaaaattaccgagtatgacgggttagcagcattaattgtttctccaacaagagaattggcagtgcagatttttgaagtcttgactaagattggtaaatataataccttctccgcaggtttggtgactggtgggaaagatgtacagtttgaaaaagaaagagtttcgagaatgaacattttggtaggtactccgggaagaatttcacaacatttgaacgaagctgttggaatggaaacttcaaatttacaagtattagttttagatgaagcagatcgatgcctagatatggggtttaaaaaacaaattgacaatattttaggtcatttacctaccacaagacaaacattgttgttttcggcaactcaatccgagagtgttaatgatttggcaagattgtcgttgactaacccaaacaagattggtgtgtcatcagatcaagaagtatcagccactccagagtcattagaacaatattacgtgaaagtgccattagatgaaaaattggatgttttgtggtcatttatcaagtcacatttaaaaagcaaaatcttggtgtttttctcatcctccaagcaagtccagtatacttatgaaacatttcgtacgttgcaaccaggtatatcattaatgaaattatatggccgtcataaacagacatcacgtttggaaacaactatgaaattttctcaagctcagcatgcatgtttgtttgcaaccgatatagtggcgagagggttagatttccctgccattgattgggttgttcaggttgattgtccggaagatgctgcgacatatgtgcatcgagttggtcgttctgcgcgttttggtagaaaagggaaatctttgttgatgttattacccctggaagaagaaggtatgttaaaaagattaaagatccataagattgaaccaaaattgatgaacattaaacaaaaatcaaagaaatcaataagaccacaattgcagtcgttgtgttttaaagatcctgttatgaagaatttgggtcagagagcttttattgcttacttcaaatctgtacatatacaaaaagataaagatgttttcaaagttgaggagctaccagcagaatcttacgctgcttctttgggattacctggtgcaccaaagatcaaaattaaaggtggtgaatcgaacaaagaaaagaagaacgcatcaagaaaattgatagcattagcaaaaacagacgctgatggcgaagttcaaaccgggaacgaaaaagttagaaccaagtatgatagaatgtttgaaagaaagaatcaaacgattttgtctgaccattatttgaatatgactggcaacaaagtaaatagcgatggagaaagtgaagatgaagatttcatgacagtgaaaagaaaagaccatgaattgaaagaagaagaactcccagatttgacaataccggtatccaaaagacaagccaagaaagctctttcaagaaaggctacgcttgcatctaaaggtaatcctacaaaattgaaatttgatgatgatggtgttgcacacgccatttatgaattagaagacgaagatgattttattaaagccggtgatgctaagaaacaaaaggaagaatttgtaaataaagaaagggagactatgaaaatatcagatatcaccgataaagaggttgaaagacaaaagagacaagaaaagaagagaaaaagaaaagaaatcgaaagaagaatgagagaggaggaagaagaagatttcgacaatgaacaaacggtagtgacattaggtgcacctgatttggatagagacttgcaatacgataacggttctgatgttgaagagccagtatctaagaaacctaaatggtttgaaggtggtgacgatgacaagagcaagaacacaaatgatggttttgttgaatatgatgaacctgaaacattagaagatttggaatctttgacagctagattgattggtaattag

SEQ ID NO: 6615 - DNA, 1203 bp, Candida albicans
  misc_feature (569)..(569): n=g, a, t or c
atgccagatgcaaatgaggtcaagcctaaaaagggctggtctaatcctgctttacgaatgatgggaataccaagaatatctttaccttcaagaaactggatgattttttggacagtagtgacaactattggtggaggtattgcttatgataagtatgaacaaaagcaaatgagaaagaaatggatggatgctgttaaacaatttggtgaagtgagttatggtgcagatgagatacctcgtaaacttactatttttattgcaccgcctcctaacgattttttggatgaatcattgaaactattcagaaagttcattaaaccagtattgaacgcaggtgtggttgattttgaaattttcagtgaatctagacagggtgatattcgagcatctgttgctgaaaagatcagagaattgagacgtaaacaattggttgaagagactcccaagaagaatgaatcaaatggaaatcaagataatgatgaagaggaattgaagagtcgatcagatttatacaaggcaaaagacgtacttggattatataaagtgttccctgccgatatcaacgtaanatcagaagatgcgatcgatgattcttctgctggtggtattatatgtgttggtagaggtgcctataaagagtatttatctggtgtccatgaaggattattaggtccacttgaaaagccacaaagtgtgattgatgaagaaactaaattggccgaagaaaagaaaaaggaaaaagaggagaatccagacaaggatgatgataacgacgaggaacaaagtaatttgaagccagtcccattgaggtacatccaaccggaagattatgccaatgcccaactagccccagagctcgatttatcaacggttgtaaaggatgacaagggggtgcctgtattctttgaacaaccagtgtacacattcccattaccaaaccttgttggattcaccaatattccacgtaaaatctatcgatactttaccaaaagatttcttgttgacgactttggagagagaacagctactattgtaaataataaatcgaggccttttgtatataaggacgtcttaatggccaaagaagaagaaatggattggcctaaaaagtgggtagaaaagggtaaagaacgtaactctgaatgggtacaggagttggaacacgatgaaagagtaacatcacgaatgaaggtgtttgaataa

SEQ ID NO: 6616 - DNA, 5457 bp, Candida albicans
atgtctagtttagcttcacaattacagtcaatcaatgagaagactgcttctgttgctttggatagaaagcaacgctcaaagttgcattcacgatcattaatatttgatcccaaacaagcagcaactcaggactatgaatatatttatgaaattgctacagaaggtcttgaagatttatgtgagttagattccagattcaataaattcaaactgacattgttttctgaaacttctgtcaacttggatagaaatttacaaacaaaagatgttattagtcaattggataaaaatattgatgccttcttgacattagtggggccatattatgggttgacatcatctttaaaagcagttgaatggcttgttagaagatttcacgcaaatatccataatgctgagttaatgattttaactgcattgccatatttccaacatccagtatttgtgaaggtattgaatgtgattccaaaacaaaacttgccacaaatatttgaatggcttgtgggatataaagatcaattgaaaacaccacctgcgtcgtccattcttaaggcatttcgcaatgactttcactttttcaacttttatagtaaatttttgaatgaccaaatcaaaaatcacactgtttataaagagcaattggttttctatttatctaatacggtacaacttttggcctccttttccaagaacattgaggagttgaatgaaactcatattcctgttgttcttgagactactgccttaatgttattaccacagcaaaaacccaaatactcctcgtctataaactcagacttgaagttgacatcatattcgattatttctgtacttagctcaattttcccattttccgctgatatattgaagtcgttgactgtaagcatattagaagatgaggatgccctcaagggatttaccaagccaactttaattgttttatcacaattatggaagcattttcaaggaaacttggaagtcattgaagccttcaagaattttaaaattggccaacatgaattgggtgttttagatgaattaaaaaatgaaaattatcaattgagtactttcattatattggttttcatttcgactttcccttctaatgaatcgtacaagttgttgcctttcattgatttgtcaaacaagacagtttttgaaattataaccaagttggttttacaaaactcaaccacacaggaagactcaattagatctaatttgactaagattgcccaatctctaaccaaatctgatcctaaattgttccaaacaactcttgaaagtgagaactggaaagtagacgagttagaattgaagctcatgtctgtacttgttgaaagcaagaatgacgaagctgagtttgatgcaggtgatgaagataatgcagtggaagatattgaaattgtaaagactgtcgattttactaaattgcaatctactgctaagagttactttaatacagaatacgatgaagagtttaatttggtattaaaagaattgaaaagtgttttgtccgcatccgatgctaaattacacgtttctgtcatattgacatttttgcaaaaagtgttttcaactcctgaagtggcattgacatttgctttccgagttgcattaactcctgcagtccccttgtctatcagattatcggccatcaagagtattagaattaaaattaaaaatgctgcaaatggtaaaactgacttttacttgttgatcccacttatattattggcattgtttgataattcaaaattgattagatcgggatttgctcaactcttacgattagtcattgaaattaaaactaaacttactactggtgctgccttatttttggaaagagagatttatgggtctgtttctgataagaaatacccaactcctcatgactccttgtttctttgcagtttgttgagtgaagacaatgttaaggatactgtattagacccatcaagagtcatcaatattttatttgacagcattttcaaagcaaagaatgggaaatcaaaaccaggaaagtacttcagatcatttatcttcactcagtggtcgttgtgctcattgccaattgttttaaaagcaaatgcttggaaaattgtggcacaagctaacaaagcaggaactgacgataggttctttttcttggatggagacattgagaattattttagcaagcgtaacgtttggattgatcaggcatctattgctggcattgcattctttgataatgccgaagtctcagttgttggtttagttggtggtgttgcttcaaatgataaaaatagtaacacagagagtgaatggttatgtagagcattggaaaatccatcaggtaatttacagatgacagctaataatcgtgttcttgaaacttttgacacattcaaaccaattgagtcaagattgaaaattgtcaataaattggtagatatattgatcaacgatgatattgttgagtttgatccaatggcaactttacaagaattaaatattgaccgcaatttattcttacaggctttgacgagtgtgcaaattggtgatcaaatcccagaacaaggtatcgctaaaagaagaagaaggtcttcaaactctaccaagcaagccatggtgcgagatgaaattaacaacatggcatctggacacttgaagaagctcacatttttgttagaaatattggaatctagtcttcgaaagaaaagaaatgttgctggccctgatttgctaaaggtgttattcaaaattttgactgacttggaatacttagggaacgatggtaacttgcctgttctttatgcccaagaaacattagcatcttgtatgcttttgaatatcgtcaatttaaagtcgtcatctaaggaagtcaagtttgattctaattcaatcagagcagatttaattgttaattccattagggcatcaccatcacctcaagttcaaaacagattattgttagttatatcagagttagcatctttggctccagaagtaatcttgcattcggtgatgcccatctttacatttatgggtgctcatactgttagacaagatgatgaattttctagctctgcgttgcaacaaacagttgcaaaagttattcctgcattagcttcaaatggattatctcctgtgaataatgaaatcgagtttttgttggctagttttgctactgcattcccacatgttccaagacatcgtcgtgtgaagttgtttgtttccttgaccaaaactttaggctgtgctgaatccatgcacttaattttgtttttgatgggtcaacaatatgcaaataatgttcataagaataaaaatggagattcgcaatctgttgttgagtttgtgcatggttacatgaagtcgttttctgccgaagaacaacttgcaggaattgttgcattcactaaattgtggaatgatatacccctcaatcaacttgaacctggttccgaagagtttgaagttttgaataatcgcccagtttttggcaccacaattgcgacattgggccaatccggtttagctgtgttgagaaacgatttgttgcaatttttagatgaaactttgagttcagaaaataagcatgagctttcttctttgaagacaaagatggctttggttttaattgatgatgaagatagcgaggtttctaagaaagaactggttttagataaatttagagcaattacttcatttgccttggccagtttagacactttcacaaattcacatgctgatatcaagttatgttctacattgtattcattattgggcaatttattagatttgttacctttgaattattttattgattcaattgttgcttcattggatgtcgatactttgtcagattccttgtcgataaaagttgctagaaactatgcaatcttggcaagtagaaaatttgaaaccgaattgaatgttgcccactgtgaccaagttgttattgaatccgtaattaacaatttgttaccaatattgattaaaggaatcaagaaaaatgttgatgttgagttgcaacaggcttacttggatactttttccaccatcgttaataagtttggagcatcaggtactgaatttgcgctgagtgacgtttctaaagttcttattgaatctttgggtatcgttactacagaccgtggtttattgaatgagcaacccgaagtcatcattgcttccattaacgcaattacaagtattgtcaatatcttgggagttaagacacttggattgttccctaaagttgtccctcccgcccttaaaatttgggaatcgactaactcattgggggataaggagagtgctaaattattgcaaggttcagtgttagttttattatcgtgttacatcaaaaagattcctgcatttatgtcaactacgttagaagctgttttgcttactattttgtcaagtgatttgattgataaccatatcagatcaagtgttttagatttgattgttgaccacatggatttggctcaagttttgaaatccttatgcaacgtttggcttaccaagaagttttacacaaatgacaattctggtaacattggtttattcttaaaaactttacaagctacaataaataagatggagaagaagcaagccacaactcaggcaacattgtttatgagatggcttatcagtgcctttgaattcagacagtattcggaagacaatgacaacaaatttgataacaacaccatccatagattagaaagctctttccatggatgtgccatagcatttgtcatgaaattgaatgataagagtttcagaccgttgtttgcaaacttggtgagatgggctgtcgatggtgaaggtgccaccttgaaaactaatgaagtgtctaggttgttggcatttttccgtttcttcaacaaattgcaagatgaattgaagagtattattacttcatatttctcatacttgttagatccaacatcggcattattaaagagatttagcgaaggtagtcttgttgcaaccaatttaagaagaataattttgattgggttgacttcttcattcaaatacgatcaagacgactactggtcacaacaaggaagatttgatagcatatgttctccattattgagccaattgtccaatattgaggattccattggtaaatacttggtaaaatcagttagcacatttgttacagatgtttcctcagacgaatacaatgaaacgttggtccacgagttgatcaagtatatttctaatgccaatgaaaattctgctgctaccaagatctggagtattcgtacattgaaaacgattttccagaaaatgggagagcagtggttatcttacttgccaaccttggttccatatattgcagagttattagaggatgacgatgaagaagttgaaatggaagttagacgtggtttggttagagttattgaaaatgttttgggtgaaccattagatagatatttgagttaa

SEQ ID NO: 6617 - DNA, 1008 bp, Candida albicans
atgtcattttttcagtacaagaattacatagaagagggtgatctagtgcttgcatatatcagtagatctacaatcaagccaataaatgttaagaaaggtgaaatttttaataccagatatggtcattttgagcatgataaaatgattgggatgaagtatggagaacaaatgcctggggccaaaggatacggatttattcacttattgcatccaacaccagaattatggacattatcattacctcatagaacccagatagtgtattcacccgactcatcatacattatacagcgtttgaatgtgaagccaggatcccgagtgattgaagcaggaactggttctgcatctttcactcactcatttgcaagaaccgttacattactgggcaaagtattcacatatgagttccacgagccaagatacttagaggcaaaaaaggaattagaagaacataaattggacaacaccaccatcactcatcgtgacgtatgtaacgatggtttcagcattgataatgaatctattgaaggggatgttgtatttttagacttgccatcaccatgggatgccatacctcatcttgattcagtgatctctacaagcaaagcagctggaatatgttgtttctccccctgtatagaacaagtggatagaactgtacgtgcattagaggaaaatggttggactgagattgaaatagttgaagtggcggctaaacgttggagtgcaagaaaagaaatggttaggtcagtagctgatgcagtacaaagaattagagaaattcaaaatggacgcaagacaggattggaagtaatgaaaaagggaccttccgaagagccaccagcaaagttgcaaaagaccgataatggatacaaaacgccaaagaaaagcactaaagtcaaagaaggggacgaaaattatacatggcttaatgctacaaaatctgaatctgaaatcaagagtcacacttcatacttgacgtttgcttgtaagattcctaaacaatag

SEQ ID NO: 6618 - DNA, 2508 bp, Candida albicans
atgtctatgaaacgatttttgtcaaggtcatcgaataaaacaactgcaggtcagggtgatgacacttctgctagcataggctcagatcttccaatagtcccgcttccgagcaatcaatcaggtgaatctcatgactctatcaaggagttgggtcccatgttcagacaacaacaaaacaagcaaatcgctgataatgatgacagctatgatatgatgcatttgaatttgaatccaaccattctgaacttgaacaagactgtcccctcaattaagggctctaccattcaggactcattattttcaagcagacaatcatattccacaaatcagtcttcgtataaaactggtggtactaataccagtggcggcagtagtagtaacagtcagtttggtaaacgaaagcatgacctaaacacttctcagccattgcagaccctcaaaatattggaagagaatgaacatcaaaatttggaagagttgataagggataatttgaaacagttgtatcaagatttggcatacactatgagtcagttctacaactctagtgccagtctatcaacaactgttataaacattattgattgtttgaaaaaatttaatgttttcgttgaaaaagctaccattgccaagccaaatgaacaatatattttcacaagttataattcatcgagtctacggaaaattttgaaaatttatcttgagttgtacgataatttgctaacagatcaagtttatatcaaattgaaattgttgttagttaaaaatttcaatgactttgccatgttattaaatagtcaagagatgaaccaaataagcgaggaaatgatcaaaccaaagaactaccccataggctctagcaaagggaaactgttaccaaatgaagaaatattagtgcgcataatggaaaaagtgtcgcacagcaatttgtctatgaaggaacaaaatggatcattcattgccccaataactcgaggtatctcaaacaatttgaacatattatgtctatattttggatatcctgagcctactgagtatcaccatagtctaacacaaagtttacgtgaattgtacgacgacgtacacgttgttctcgctaaaaaccagattgagttagccagtgctacacgagtggatgcagcaagtactttcaataaaccagcagcattcaacgatggattcccgccattgcaagcccagagcacccagaaattcaagttaccatttagagtaccgacagacatccaccatgtgcctatgtccatgtcaatttcgattgaaaatgccactcgaacatcggggaccatgggaggctatatttaccccattattgatttacaaaagcaaccgcatttgaaatcctatgccaattccaaatttgcaatttcatgtggtcacgtttgtttagattccgacaaccctgagaactaccctaatgtgtcctcaccgtcatcggtattgatctcattatacaaacaagcgttaactgaacaataccacaagagtcttaataggaataacagtactgctggtgtgccatctgaaactcgagttgcgttcggtgccgttcttcaacaattggaggaaatgttccccttgaagcaaataaaaaaatcaagcactagaaacaacaacagtgcttataaggacgattatgaagttcgtaatttaccaaagtatagatttggacaaataatttggggtgaaagaactttaatcaaattgaatggtgatactaatggcaatagtagtaataaccaccaaataaatgaaatgagtgggattgtggagaaaaaattatctgatttggccattatcaaagtgaataagaaattgaaatgtgagcataactatcttggtgatgatgttcaattcaatgaatatgaccctagtttgatgtttgataatttatatgtcagaaaagttatcaacttgaaacgatatgttccaaaagtaataaacactgctattgaagacgtcgattctgatgtttcaaataatagtgaaatacaaacgtattttggaattccagttttcaaatacggttccactactaaatatactaaaggacatcttaatggtatcaagttggtttattggttagatggtgcaattcattctagtgaattcattgttaattccattgaagcaaattcatcgtttgcgtcaggtggcgatagtggatcatggatattaactaaattggatgatatcgaagacaattcaaaaggtttaggggttttgggaatgttacattcgtacgatggtgaattcaaacagtttgggttgtttactcccatgaccgaaatattgctgcgattagaagaagttaccaatatcaaatggggagttgttgggtgtgacaataagcatgatgaagaagatgatgatgaacttcatggatttgatactgatgacaatgatgatcgtcactcggcattcctggatgatgatgatgatggtgtttctgagaatagcgatgctgcatatccaccagatatagaataa

SEQ ID NO: 6619 - DNA, 1704 bp, Candida albicans
atgtgcatcgcaaaaaaaaaaaaattttgttgtgttactcttttaccaatcatgacacaagctacacttcagactatatacgataggccgtatgagatatttaagactgatggagagttttttaataagctagtcaagtcgtttatagacccgttggcgaaaaagtattctgtgttggatgagatatatattgatgggttagactcatcgcaagtttttggacaaacaaaaatggttctcgatggggtgggtgaggagttgttggggagtgttataccggagatacaagggatggtaagagatgaagaagaggaagaagaggacactcaagaagaagaggacacccaagaagaagaagaactgccggcagaagaagaggaagtcgaggaagtcgaggaagaactggaacaagaagaacagccagaggatgaggaatcccaagttgaatcagaggaggaacagcctgaggaagaggaagacgccgaacctatccataaagatgcgtttggccttaatgatggattttttgatattgacgagttcaacaaacaagtcttggctatggagaacgataataacgacgatgagatagactattttgatagtttgagtggcgacgacgatgagatggattactacaatgacttttacgacaagccaggaaagtttaagcaacaagtgcctgaaaaagaggagtttgaggaagatgattacgacaatgcagtcaactcggccatgctagatttatttgccgaggaggagccacagccaaaggaaagtttgtcgtcgtttgaaaagcagcaaaagtctatccaagcggaaattgccaggttggaagcagaattggtggcagataagaaatggacaatgaaaggtgagatcacgtctaaagatagaccgcaagaatcgttattggaggagactgaaatagcttttgaccgtacatccaaaccggttccggtgataactgaggagtcgacgcagacattggaagaccttattcgcaaacgtatcaaggaagacgattttaatgatttgcccagacgtataataacagacatttccaagttccacaagacgccacgagccgaggtttctgaacaaaagtcgtccaagtcgttagctgagttgtatgaggatgagtataaccatgttgatgcacaacaagaatcgatcaacgaagaggtgaagaaacagcacgacgagattagtgagttgtttaccaaggtcacacataaattagatgcgttgtgttcagctcatttcattcccaaaccacaccaagccaagaccattgatattaaggttaccgatagtattagcatggaagatgcgcagccattgcatgtgtcaaacgagtcgaggttggcaccacaggagatatataagattggtgatgatgaggctaagggtgatggagttaagggcaagtcgcaagtgcaattaaagtctggtttgtcgtactcgaaagatgagttgagtcgtgaagataaacagaggttaagacgtgctagcaagagaaagaaggccaagacgtttaaccaaagacaagagaccaaacgtcaaaggaaagatggtgttgtcgatacgttggctggtgcaaagaaccttactgtcattggcaataagggtgagatgagagacattaaaggtaatctcaaaaaggccagcgggccacaaagctcaaatagttttaagttgtag

SEQ ID NO: 6620 - DNA, 333 bp, Candida albicans
atgtttaaattagctttccgttccattcgtgcaccagttgctagagcttcatttgtcaaaccaattcgtttttatgttgccccaccaatttccaaagatgaagttacttcaagagccattcaagctttgaaaaccgttgctccattacaagaatccaatatcacattagaatcttctttccaaaaggatttgggcttagattctttagatactgttgaagctttagtggcattggaagaagaattcgatttagaaattcctgataagatttctgatgagataaagactgttggggaagctgttgattacatttacaaagaagaatctaaataa

SEQ ID NO: 6621 - DNA, 2484 bp, Candida albicans
atgtcaaagagtagaactgttactggatccttggatcaaaaaatctacaatttaatccatgatttacttcaggagcagacagaagaaaacaagagagcagctaccgcagacgaagagcatgatccattttcgtgcatggcttcatctcataatctcactgtttcccaggtgttggcttacgtacagatgaaagattttcaattgaaaagaatgaagaagaattaccttgaaaagtcgatagcagccagtttaaaagtaattcgtcaagatgagacagaagagttcggagatcgtgagaatggcatcggagatgaatcagaagctgagaatgatagagagtgtgagaatgacttgatggaggtcaaagacctgaatgcgataaacaagtccgttgtttctttatggaatcaggaaaagactgatggtgaatctgatggtgtaaacaatgaagagggccagcaagcagataccacagagctacttaagggaaacaaaagaaaggcaaaaggtctggcaaaaactcaattgaaaaagcaaaagagaaaaatcgactactctactcccaatatagatttatcgtctttaggaggggtggagagtgtcacgacccagttgttagaaatcattggactcccaattttacatccagaaatatattcttctacaggagtggaaccaccaagaggagtacttttgtacggccctccgggatgtggtaagacaaccattgccaatgctttggctggcgaattgaaggtgccattcattaatatttctgccccctcggttgtctcaggaatgtcaggtgaatctgagaaaaaactaagagagatatttgaagaagccaaacagattgctccttgtctaatattcatggacgaaattgatgctattacaccaaaacgagatggaggagctcagagggaaatggaaaagagaatagtagcgcaattgttaaccctaatggatgaattgacattggaaaaaacaggtggtaaacctgttgttgttattggtgcaacaaacagacccgactccttagattcagcgcttcgacgagcaggtaggtttgacagagaaatttgcttaaatgtgccgaatgaagagcagagaatctccattctcaaagcgatgacgaaaaacatcaaactcgagaatggtgagcatttcaactatagagagctttccaaattgactccaggttatgttggtgcagatctcaagagtttggtcactgctgcaggtataagtgctattaagcgaatttttgaaacaatgagcgaattgcaagaagaatcacatctggtcaaggatgattccatggatgcggaccccgttagcttagacgcaaataaagaagacatgatcaagaaatttgagcaaaaatcagaggctgaaaagttgtcaaccattaaaaagtttttaaacatgcatccagatccattgaatcaagaacaattggcacctttggctatcacgtatcaagattttgtaaatgcacttcccagtgtccagcccagtgccaagagagagggattcgcaactattccagatgtcacatggcaaaacgtgggcgctttattcaagatcagaatggaattgcatatgtgtatagtgcagccaatcaaaaagcctgagttgtatttgaaggttggtattgctgctccagctggtgttttgatgtggggacctccaggttgtggtaaaacgctattagctaaagctgttgctaacgaatcccgcgcaaactttatttctataaaaggaccagaattattgaacaagtatgtcggggagtctgaaaaggctgtgcgacaagttttccaaagagctcgagcctctacgccgtgtattattttctttgatgagttggatgcgttggtcccaaggagagatacgtcaatgtcagagtcgagctctagagtcgttaatactttattgacagaattagatggtttgaatgatagaaaaggagtatttgtcataggtgccactaatagaccagatatgattgatcccgcaatgcttaggccgggtaggcttgacaagaccttgtacattgaattacccactcctgaggagagattggaaattttgaaaacattagtacgcaccagcaatagtcccttacacgcaaatgttgatttgaatgcgatttcgagagactccagatgtggaaacttctctggtgcagatttgtcttcattggttaaagaggcaggggtctgggctttgaaaaagaggtttttccaaaaccaaaaaatacaagaattggatagttctggattctatgaagactcgattggtgaagatgacatttctattactgctgaagattttgatcatgctctttcttccattagacccagtgttagtgacagagataggatgcgttatgaaaagctaaacaaaaagttgggctggaatataatctctgataaagagcctgatgatgctggtagtacatctgataaaaacgattaa

SEQ ID NO: 6622 - DNA, 441 bp, Candida albicans
atgggtgcctacaaatatttagaagaattgcaaagaaagaagcaatctgatgttatgagattcttgtatcgtgtcagatgttgggaatacagacaaaagaatgtcatccacagagcttccagaccatctagaccagacaaggctagaagattaggttacaaagctaaacaaggttttgttatctacagaatcagagttagaagaggtggtagaaagagaccagttccaaagggtgccacttatggtaaaccaaccaaccaaggggttaaccaattgaaataccaaaaatcattgagatctactgctgaagaaagagttggtcgtcgtgcttctaacttgagagtcttgaactcatactgggttaaccaagattccacctacaaatactttgaagttattttagtcgacccatctcacaaagctatcagaagagatgaatga

SEQ ID NO: 6623 - DNA, 456 bp, Candida albicans
atgcaaattttcgtcaaaaccttaactggtaaaaccattaccttggaagttgaatcttctgacactattgacaatgtcaaatctaaaattcaagacaaagaaggtattccaccagaccaacaaagattgatttttgctggtaaacaattggaagacggtagaactttgtctgactacaacatccaaaaggaatccaccttgcacttggtcttgagattgagaggtggtggtaaaaagagaaagaagaaggtctacaccaccccaaagaagatcaagcacaagcacagaaaacacaagttggctgttttgacttactacaaagttgacaacgaaggtaacgtcgaaagattgagaagagaatgtccagctccaacttgtggtgccggtattttcatggccaacatgaaagacagacaatactgtggtaaatgtcacttgaccttaaaggctaactaa

SEQ ID NO: 6624 - DNA, 822 bp, Candida albicans
atgtcaagaaccggagtattagtattgggacctgcaggtgtaggtaaatctacattctgtaattctatgattgcgtatatgcaatctataggacgtagggctcatattgtcaacttagacccagcggccaacccaaccgagtatgaattcacaatcgacgttaaggatttaatatcattacaagatgtcatggaggagatggaattaggaccaaatggagggttggtttattgctttgaatttttactaaataacctcgactggcttgatgaagaaatcggtgattacaacgacgagtatttgatttttgattgtcctggacaaatcgaactatatacccatataccagtattaccaactatagtaagacatttacagacatcattaaatttcaacctatgtgccacatatttgttagaagccccatttatcattgataattcaaaatttttctctggtgccttgagtgccatgtcagccatgattctattggaattaccgcacattaatatattatccaaaattgatctagtgaaagatgagtacagcaagaaacagttgaagaaatttttgaatcctgaccctttactacttgcaaaacaagaagattatataaatcctaaatttgccaaattaacgcagtccattgctaatttggtcgatgattttggcatggtgcagtttttgccattggattgttcaaaggatagtagaagtgtagagacaattttaagttatattgacgatgtcacacaatggagtgaagctcaagaaccgaaagagcctcatgatgaagttgaattaccagatgaggtattttaa

SEQ ID NO: 6625 - DNA, 3153 bp, Candida albicans
atgtctgctgctagtgaatccaaatattctactgaagtgctttccgaattattgagcaaattacaagttgctgataataaggatgaagctgcttccaacatttccacttttttaaactcatctattgttgaacacgatgttccagttgaatttttcgaagatttgaaaaaacaaattcaatctaaagatgctaaagtttctcttgctgctttggatgcttacaaacacattgcttcaaccaacggtttatccccatccgttgaaccatatgttgttgacttggttagtgaagttgccgttaaagctggtgacaaaaacaaggatgttcaaactgctgcttctgatgctttattggccattgcttctgccatcaccccaactgctgtcaaagccatcttaccaaaattgattgacaacttgaccaacaccaacaaatggactgaaaaagttgccatcttgagagctgtttctcaattggttgacactgctaaagctcaaattgctttgagaatgcctgaattgattccagtcttgtctgaatctatgtgggataccaaaaaagaagtcaaagaagccgccactgctaccatgaccaaatccactgaaaccattgacaataaagatattgaaaaattcattcctcaattgatttcttgtattgccaaaccaactgaagttccagaaaccgtccacttgttgggtgctaccacttttgtttctgaagttaccatggccactttgtcgattatggctccattgttgtctagaggtttagctgaaagagacactgctatcaaacgtaaagctgctgttattgttgataacatgtgtaaattggtcgaagatccacaaattgttgctccatttatggacaaattgttgccaggtttgaaaaacaactttgccaacatggctgatccagaagctagagaagttactcaaagagctttgaacactttaagaagagttggtgccgttggtgaaaacgatagcatcccagaagtttctactgctggtgatatcgatgtcactttgaatgaattcaacaaattggttgctgacaaaaaaatcgccaaaagatttgacgttgctttgaactatattgctgctattgctggtgatttggttgatgaaagagaaattcaaccagaagcttggttacaaaatgttttaccatttgccaccattttcttgcacgaaaaggaagctaaagaaatcatcgaagaattcagaaagagagccattgacaacattccacaaccaccatcatttgaagatgaagaagatgaaggtgaagatttatgtaattgtgaattctctttggcttatggtgccaagatcttgttgaacaagacccaattcagattaaagagaaacagaagatatggtttgtgtggtccaaatggtgctggtaaatctactttgatgagagctattgctaacggtcaagttgaaggtttcccaacccaagacgaatgtaaaaccgtttacgttgaacacgatatcgatggtactcacgccgacacaaccgttgttgaattcgtcattgaagatggtgaagttggtttgaccaaagacgttgttgttgacaaattgagagaattcaatttttccgatgaaatgatcaacatgccaattcaatccttatctggtggttggaaaatgaaattggctttggctagagctgtgttgaagaatgccgatatcttgttgttggatgaaccaactaatcatttggataccgtcaatgttgcttggttagtcaactacttgaacacttgtggtattacttccattattgtttcccacgattccggtttcttggacaatgttactcaatacattatccattacgaaggtttcaaattgagaaaatacaagggtaacttgtctgaattcgtcaagaaatgtccatctgctcaatcttattacgaattaggtgcttctgatttggaatttagattcccagaaccaggtttcttggaaggggttaaaactaaacaaaaagctattgttaaagtttctaacatgtcattccaatacccaggtacttctaaaccacaaattcaagacattaacttccaatgttctttatcatctagaattgctgtcattggtccaaatggtgctggtaaatccaccttaattaacgttttgactggtgaattattaccaaccactggtgaagtttacgtccacgaaaattgtcgtattgcttacattaaacaacatgcttttgctcatattgataaccatttggacaaaactccatctgaatatattcaatggagattccaaactggtgaagatagagaaaccatggatagagcttctagacaaatcaatgaagaagatgaacaaaacatgaacaagattttcaaaattgaaggtacaccaagaagaattgctggtattcacgccagaagaaagttcaagaactcttatgaatatgaaatttcttggatgttgggtgaaaacattggtatgaagaatgaaagatgggtaccaatgatgtctgttgacaacacttggttgccaagaggtgaattgatggaaactcacgccaagttggttgctgaagttgatatgaaagaagctttggcttctggtcaattcagaccattaaccagaaaagaaattgaagaacattgtgctatgttgggtttggatgccgaattggtttctcactctagaattagaggtttatctggtggtcaaaaagttaaattggtcttggctgcttgtacttggcaaagacctcatttgattgtcttggatgaaccaaccaattatttggatagagattctttgggtgctttgtccaaagctttgaaagctttcgaaggtggtattgttatcattactcactctgctgaattcaccaaagatttgactgaagaagtctgggccgttttggacggtagaatgactccatctgatcacaattgggtccaaggtcaaggttctggtccaagaattgaaaagaaggatgatgaagaagaagataaattcgatgctatgggtaacaagattgccgctgctaagaagaagaagaagttatcttctgctgaattaagaaagaagaagaaggaaagaatgaagaaaaagaaggaattgggtgatgcttatgtctcatctgatgaagaattctaa

SEQ ID NO: 6626 - DNA, 1059 bp, Candida albicans
atggcaacttctcaagaattgacagcagacatacaagctcttgcaactagtttccccaagcgattagctaatgatagtgacaattcattacttattaatgttgcaccaactggtcgacaagccaaaagacatattcaacagattaattactccgaagagtttggagatgaccttgattttgatgaattcccatcttcgacacccggtactagaagcttaaatgaaaataaagctcaaatagaagcacaaagatattctcttgcgaaaaacacaccaacgcccaagagaatcttagaaaaaccggtgttatctgagttggttgaaaaaccagtggtgcttattcctatcaaaataatgattgagaatttgaacacaaaccaaaagttgattgattcctttatgtggaacttgaatgaaagcttgattacaccaactgagtttgcggaaattgtttgcagtgatttagatttaccattcagtatggctgcacaaatagcagactccattaatcaacagattgaagagtattcctatgcatctaatttacaactaccaaataagggcccttacaatgttaccattgatttatcagtaaacttaaataaacaattataccaagatagatttgaatgggatatgaatcaaaatgaagttacaccagaaatttttgctgaaatagttgttgctgatttggggttatcgttagaatttaagaatgccatatcacatgcattgcacgaaataattatcagagtgaaaaaagaagtaatagatggtacttttaacaatgaaatgcacaacttgcatctagtaaaaggtataatgtttgaacaaggaattagaattttcactgaaaacagtgttcaaaatggaaatgaccgttgggaacctttggtcgaagtattgacttctagtgaaatcgaaagaagagaaaatgaaagggttagaaacttgagaagattaaagagagagaatatgagaagagattacgatgatcatagtaggagaaggcaagcaggaaaaagaaggtatgatgagttagaaggagcctgggtatag

SEQ ID NO: 6627 - DNA, 3387 bp, Candida albicans
atgactgtaccgtataaaaggaaacatgacgcggattctttattcgatgccagaaatggtggtgaaggcgtgtcagaatatatgtcacaactattgattaactcatctgatcaacccagaaaacgaagaacaatgactcaagcccctagtagaaatggacgtgaaagtgcatcagaaactgaatctatttcaggtgctgattcggattctgacggggaatcagatgatgatgaagacgatgaggacgacgacgatgatgatgaggaggaggatgatgatgatgacgttggttcagatccggctaaagcgggggttattgagaaattaactttaaagaactttatgtgccacgattcatttgaattgaaattgggaccccagttgaattttattattggaagaaatgggtcaggaaagagtgcaatcttaactggtatatctgtagggttaggtgccaaagcaactgatacaaatagaggaagcactatcagagatttaatcaaagatgggaaatctacttctcgaatcacagtggttctcaaaaatgaagggtcagacgcgtataaaccagacgttttcgggaagaaaatcattattgaaagaaaattacaaagatctggttccaatacatacagcattaaaaatgaagcaggaaaagtagtgtcaaacaaaaagagtgttttggatgagattctttacaagttttctatcaccattgataatccactcgccttcttgtctcaagacaaagctagagaattcttaacatcatcgagtgataaaaacaagtatgaatattttatggatggggcatttatcactgatatccttgaaaactatacaagtatttccaacaatgtccaagtgttggataataaagtccgtcaagctgaagaatacaccaaggtggctaaacaagaatacaaagcaattgccaaagttcataatgcgcatagaactaatgatgcattaagaaacaaattggaaatgttgaatgccaaaatctattggttcaatgttcaaaccatcgagaaaaaaattgatcaagaaaatcgacaaaaagacacttgcttgcaagaaattgagcaggccaaaaaccagattgatgtttgtgaaaaagaaattgaagcaaaaattcctcgaaaggatgctgctgatcagcaagttaaggaagtggaaagccaaataaaagatatagtggaagaatttgagggacttcgaagcaaaagatctgagatgaaatctgagttagaaatcaataaaaaggaaacgaaaaagaatattgatgaaatgaatagtttgaaagaagatattactaggaccgagactaagatagaacaggagagaagaagaattcaagaactacaagggggaaacaaggagaaaatggctgaagaattggaaaagttaaactctgaaattgatgagttggaaagtcaattggaaaatttgaaaaaacaacttgtggaaatgcaagataatcctgatcccgagttgagatctgtaagtcaacaaagggagaaatcaagacagaaaattgccgatttacaaaaccaaaagcgtcaattagagaaagagtctgtatcaaaatattcgccttggggttctcgtatggctgaattgataaaagcgattaaaagacatcctgattgggtgcaagagccaatcggtcctattggtagctatattcatgtaaagaatcaatacaataattggaaacctttgttatctaccattttgaataaaaccttggattcatttattgttaccaatgaaggtgatagaagtaggttggacagattactcaagcaatatcaaatacgtagcaacattattgtcaagaaaacagaaagattgaactatgcttccggtaaagcagattctgcattcaccactgttttagacatgttaaatgtggaaaatgatacgattttgtatgctttgattgatataaattccattgaaaaaaatgttatagtagaatctgccagtgaagctagagattcatgcaggagaagaaatgtccaaaattctttagttcttttcagaaaggattccggtcatagaatgagttatcaaaacaacacctttagacaagatcctatatactaccaaaatggaatggccaagtttggggtcgctaatatgtcagatttgatcagtgatctacaacgtgaattggatgaagaacatagacatcaaaatgatttagaaagacgggccagaagtataaaaatgaaattggatgccaagagagataatcttgtatctgaatctcgtgccatcaagagaaatttagatcaattgaaaagaaatcgtagtactttagaggatcaattggaagttgaagttgattattcaaatatcaccacattggaagcaagaatagaagacaataatgaacaaatccgtagattggttgctttgaacgaagcattattagaaaatctttctcagatgaatgaaaattataaggatttgaaacaacaaattgaagattgcaaatccaaaaaagttaaacatgaaaccattcgagaaaaatttgtgaaacagttagttgagattgaaactgaaattgaaacccaagaggaccttaaaaaacgttatttatacaagataactgaattggaagatagaatcaaaagagctgacgatatacttgctgaagggaatcgtaaattggaagaatttgttgccaaagctgaagaacattgtagcagagatagagttaccatataccctaatgatacccaagagacgatagcacaagattatcaagagactcgttttgatttggaaagagcagaaagtgctcttggaacttcattggaagaagtcttggaccaactagaaaaagcaaaggcaaaatgtgacaaagccgagggggaattagaatctttgagttctgcatcaagaaaattaaatgcagaagttaatgctagattcaatttcttacatactataatccaatcttcaattcaagaggcaaaaagaacttttgaaaaagccatgtggttaagaggattccaaggtactttgaaatttgattttgccgaaaaaacattacaattgaatgtacaaactggtaacgatgaaaagaaacgtaccgtggaatcattatctggtggtgaaaaatcattttcacaaattgccttattgttatctatttggaaagtgatgaattctcgtattagaggtttagatgagtttgatgtttatatggattcagtgaatcgttctattagtattaaattgttattgaaagaattaaagagatatccaaaatcacagaatatttttattactcctcaggatattgctgttgttggagaattaaatgataaaggagtgaaaattcacaaaatgtctgcccctagagaggaataa

SEQ ID NO: 6628 - DNA, 1659 bp, Candida albicans
atgctgagtaataacagttcgaaaaaccatcactcatcgaaaagatcgagtcccgctccagtaccttctactgttacaaagaagacaaagatcaccgataaatatttgaaagaacttctggcatatcatgaaccggtgtttgataagccgcctccaacaacaataggaatcttagatatgaatcagttagagcattctactaaaaccatgcaaaaatgcgtgtccagtatacttgaaaaggcacctaattgcaaccaattacaatatctcattgaatcagacgagatagataatggtattagacttgaattacaggacaatccattgatagacacggcatcaaaattgaaatcattacatgaaattgggaagttaccaattttggaccaaatcatcaatgatgaagtcaaaataagtgacgatgatttgaaaaaattgaaaaaaatacctgctaaatctaattcagtcaaagtaaattcacctcgtgatgttgtaccagaaattgcatctacaggggttcaccatgatatgccaccgttaccaccaataaatgaccctaaattgtttgaacgggtctttattcataaatccacagtcaacaacaagcaatatcttgaagctaaccatttattacatagtcataatgaaagattggaattctacggtgactctattttaaataatttagcgactcttataattttcaaagagtttcctgattctactgaaggtgacttatcgaaaattagatcaaaattagttagcaacaaaacattaattaaaattgcctttcaatatggatttgacaaaaagttacgttccagaataagtgatgatgtattgaaaactggtgataaaaaaatatttgctgatgtatttgaagcatatatcggagcattagcaatggagaggggtttcgatttggaagatgtcaaagaatggttagcaaaagtgtatgcaccattgattcatgagttgaaaattgaatacattgaggagccaattgatagagaagccaaatccaaattatatggacttattggccaagatgatttacatccagtatataatactcttcagatgggtgatggtattcataataaatttatagttcaatgcaccatcaatggagaagagttgggtcgtggtacagcaaacaatttgaaagaggcagggttaagagctgccatggcaggattaaataataatgaagttttgaaaaaatactttgtggcacgccaacaaattgaaagaccaattaaattacaacgactcgaaagagaaaatgccaaaaagagggaggtcgcagaaagattagaacaagaaaggaataaccttccttctacaccgctgtcgccaattagaacctcaatgtttcctatttcagttaatgaaaatgaaccattggacattgatgcgaaaaacaaattatatggtatccttggtagaaaaattggtgacaaaccagcttaccttacatctcagataaatggtaatttgttcaaagttgtgttatgtattagaggcattacgatctgtgaaacaactgacccatcgaaaaagaaagccatggccagagcagctcaaacattgttagaaaatgaaagtgcaatgagagaaatctgtaaagatttccgaactaaggactcaccagaataa

SEQ ID NO: 6629 - DNA, 4386 bp, Candida albicans
atgtctgaatcagaatctgattattttactgatgggtcagaagatgattttgttccaacttctaaaaaatccaccaagaaaaacgcgtcttcaaaactgaaacaacctcttggtgatgcaaccaatagcactgtcagttcatcgcgttcatcgacccctaagcctaccaatgcttcagagacatatcaaaagctttcccaattagagcatattttaaaaagacccgatacttatatcggatctgttgagaaaaccaaaacagaaatgtggtgttttgacgcagaaactgaatctatggtgttcaaagaagtcactattgttcctgggttgtataaaatctttgatgaaattctagttaatgctgctgataacaaaatcagagatcccagtatgaagaatatcagagtcaaaatcgatgctgaaaacaacataatagaagtaatgaatgatgggaaaggtataccaattgaaatgcacaccaaagaaaatatgtacattcctgaattgatttttggtaacttgttaacttcttccaactatgatgacgaccagaaaaaagttactggtggtagaaatgggtttggtgctaagttgtgtaatattttctctacccaatttgaagtggaaactgctgatttgaatatggggaaattgtataaacaatcttggacaaataatatgtcaaatgtgtcaaaaccaaaaatcaccactttaagacccaaaaaggaatataccaagattactttcagacccgacttgagtaaattcgatatggactgtttggataatgatcttttatctgttttaagaagaagagtttatgatttatgtggtactgtgaaaaactgtaacatttatttaaatgataagaggttgaacatctccagttttaaaggttacgtggaaatgtatgtcaaagctatcaaagaaaggtcacctgaacctgaaccacaagatggaaccattaaaaatttcaccaccattgtacatgaagtgtttaatgatagatgggaagttgcatttgctgttagtgatggttcatttaatcaagtcagttttgtcaactccattgccacaacatctggaggtacacatgtcaaatacgtttccgatcaaataatcaataagttagtagagaccttatccaagaaggaaaaaggtaagaagaaacttatgattaagcctcaagaagtgagggataatatgtttttatttatcaactgtcttattgaaaaccctgctttcacttcccagactaaagaacaattaacaacaaaagtgtctcaatttggtggtaaagataagtttgttgctaatgataacttaatcaaccgtattttgaaaaccagtatagtagataaaatcagagctattgccaacgccaacgaagacaaggcacttcaaaaagccgatggtagtagaaaactgcgtattaagggtcaagttaatttggttgatgcaaacaaagctggtacaaaagatggacacaattgtactttgatcttaacagaagggctttctgctatgaatttagctgttgctgggctttccgttgttgggagagattattatggatgtttcccgttacgtggtaaattattgaatgttcgtgaagcttcggcagatcaaatttccaaaaatgcagaaatcaactcattgaaacaaattattgggttgcaacataaaaaagtttacacagctgaaaatatcaaatcattgagatatggtcatattatgatcatgacagatcaagatcaggatgggtcgcatatcaaggggttaattattaactttttagaaacatctttccctggattgttagacattcccggattcttacttgagtttattacccctattgtcaaagtcactgttaaagcaagaggtgctggtggtaaacgtgttataccattctacacaatgccggaatttgagcattggagagatactgaagggaaacaatgtcgttggactcagaagtattacaaaggtttgggtacttctactcctatggaagcacgtgaatattttactgccttggatcgtcatttaaagagatttcatgcattgcaaggtgaagataaagattacattgatttagcatttctgaaaaagaaagctgatgaaagaaaggaatggttacaagggtttttaccaggtacccatcttgatcctgagattactgaaattccaataagtgattttatcaacaaagagttgattttgttttcaatgtctgataatgtaagatcgattccgtcggttttagatgggttcaaaccaggtcaaagaaaagtcttgtatggttgtttcaagaaaaaattgagaagtgaaattaaagttgcacaattagcagggtatgtgagtgaaaacacgggatatcatcatggtgaacagtcattagtgcaaactataattggtcttgcccaaaatttcgttggatcaaacaacattaacgtattaaaaccaaatggttcttttggttcgcgtgctgctggtggtaaagatttctctgctgcgagatatattttcacagaattgagtgagattactcgtaaaatattcaatccattggatgatcccttgtacacttatgttcaagatgatgagcaaactgttgagcctgaatggtacttgccagttttgcctatgattttggtaaatggtgctgaaggtattggtaccggttggtctacaaatattccttcatacaatccaaaagatcttgttacaaatatcagaagattaatgaatggtgaagaattgcaggagatgacaccatggtataaaggatggggtggtgaccttgaaccaatgggaccgcaaaagtttaaagtttctggacgaatcgaacaaattgatctgaatacagttgaaattactgaaatcccagtcaaaacttggactaacaatgtcaaagaatttttgctcagtgggtttgggaatgaaaagacccagccatggattaaagatatggaagagcaccatactacatctatcaggtttgttatcaaattgactgatgcggaaatgcaaaagtcgttgcgtattggtcttttggagaggttcaagttggtttcttcattgagtttggccaatatggttgcctttgatcctatgggtagaatcaaaaaatataatgatgttttagaaataattaaagatttctattatgttcgattagaatactatcaaaagagaaaagattatatgactgacaatttacaaaatcaattgttgatgttgagtgaacaggcgagatttatcaagatgataattgagaaacaattgagtgttgctaacaagaaaaagaaacaattggttgcgttgctagaagaacataattttacaaaattcagtaaagatgggaaaccaatcaaatccagtgaagaattattgactggtgacgatgccgatgaggaagaggaaacacaagaacaagaaggtgacgaagacgtcggtaatacctctgtagctaatattcaagaaggagagcccgaacaagcagcccatgttccagaaacaatttattcatcctatgattatttgttgggtatggcaatttggtctttaacttatgaacgttttatgagaataatgcaacaacgtgatcaaaaggaagcagaattgaatgcattattgtcgaaatcagcaaaggatctttggaaccaagatttagatgaatttttggctgaatttgacaagtttttacttcgtgacgaacaagaaagagaatctttggcttctaacgggaagaaaaaatcgacaaagagaagagccaaggctactgctaccaaagaccagccaaataataaaaaagtcaaagttgaaccaaaagaaaagaaaagtatttcagctaagccagttgttaagaaagaggcttcaaatgaaccgcaagcatcatcttcttccaaacctaaagaaaaagatgatattttatcattcttctcttcatcaagtagtagtgctaaaaagacaactaaaccatcaggtagagcaacatcaaataaagaaattgaaacaattacacttttcagtgatgacgatgatgacgaggatatatttaatttgaatctgtcttcttccactaaagttaaaaaagagaccaaatcaaggtctgctacgccagctgctgaaaaatctaaaaaaccgaaatcctccggtaagcagtctattttagacgaattagaagatcttgaaatattaggaaattttgataaaccagaaccaaaagagagaagaactagagaaactgcttctacaacaaagagaaatactaagaaaaaaccggtcattatagatagtgatgacgaggatgaggatgaagaagacgatattgttatgagtgatggagatgacgatgatgattttattgtagatgaatag

SEQ ID NO: 6630 - DNA, 3135 bp, Candida albicans
atgaagatttcaccagagacagtaaataaactacaactggatgcatcgtgtataagaaacatctgtattttagcacatgtcgaccacggtaaaacctcattgagtgactcattattagccaccaatggaatcatttcccaacgtatggcaggtaaagttagatatcttgattcgagagaagatgaacaattgagaggtataaccatggagtcctcggcaatttctttatatttcaaagtcatgcgattgcaacaaggatcacaagaaccagaagttcacgaacatttgattaatttgattgattcacctgggcatattgacttttcgtctgaagtgagtacttcttcgagattatgtgatggtgcagttgttttggtcgatgtcgtcgaaggtgtctgctcacaaacagtcaacgttctacgccaatgttggattgataagttgaagccattactagttattaacaaaattgataggttaatcacagaatggaaattgtctcccttggaggcataccaacacatttccagaattatagaacaagtaaactctgtgattgggtcattttttgctggtgatagactagaagatgacttgaattggcgtgaggctggttctgtcggggagtttatcgagaagagtgatgaagacttgtatttcacacctgaaaagaataatgtaatatttgcctcggcaatagatggatgggcattttcagtcaatacatttgccaaaatatacctgaaaaaattagggttctctcaacaagcattgtcaaaaactctctggggagacttttacttggatatgaaaaataaaaaaatcatccctggtaaaaaattgaaaaataatagtaacagtttgaagccattatttgtttcgttgattttggaccaggtttgggctgtttatgaaaactgtgttattgaaagaaatcaagacaagttggaaaaaatcattgagaaattaggggccaaaatcacccctcgtgatttgcgatccaaagattacaagaacttgctaaacttgattatgtctcagtggattcctttgagtcatgccatattggggtcagtgattgaatacttgccaagccccattgttgctcagcgtgaaagaatagacaagattttggatgaaacgatttatagtgcagtggattcagaactggataaatccaaactagtcgacccttcatttgtcaaggcgatgcaggaatgtgatagttcacacccggaaacccatacaatagcatatgtatcaaaattgttgtcaatccccaatgaagacttacccaaagctagtaatgccgctactggaggattgacggccgatgaaatccaagaacgaggaagaattgctcgagaattagccaaaaaggcatctgaagcagctgctttggcacaagaaggttccaaaaatgaagatgagtttgccattaaacccaagaaagatccatttgaatgggaatttgaggaggacgattttgagaatgaggaagatgagagcgatgcaaacgcagttgaagaatcaactgaaaccatagtgggtttcactcgtatttattctggatcgttatctagaggccaaaagctcacggtaattggacccaaatacgacccttcattacctagagaccatcaaaccaactttgaacaaataaccaatgaagttgaaattaaagacttgtttttaatcatgggacgagaattagtgagaatggaaaaagtccctgcgggtaatattgttggggttgttggattggataacgccgtgcttaagaatgccacaatttgctcaccgttacctgaagataaaccatacattaatttagcttcaacatcaaccttgatccacaataaaccaattatgaaaatagcagttgaaccaacaaacccaataaaactagcaaaattggaacgaggattagatttattggccaaagccgacccggttttggaatggtatgtcgacgacgagtcaggtgaattgattgtttgtgttgctggagaattgcatctagaacgatgcttgaaagatttagaagagagattcgctaagggttgtgaagttaccgtcaaagagccagtcattcccttcagagaggggttggcagatgacaaaatcagtaccaacaccaataataacaacgacgacaatgaagatcatgaattagatgaaaacgaagatgagcttgctgatttagagtttgatatttctccgttgccattagaagtgactcagtttttaattgagaatgaaacgattattgccgaaattgtcaacaacaagcaagatactcatgaaattagaaacgattttattgaaaaatttgccactattattgataattctaatttggctacacaatttccagacaccaagtcttttatcaacaatataatttgctttggacctaaacgtgttgggcctaatattttcattgaagattatgggttaaacaaatttagacatctacttggtgaatctgccactgaatctcgatttgtttatgagaataatgtgttcaatggggttcaattggtattcaatgggggtccgttagcatcagagccaatgcaaggtattattgttagacttaagaaggcagaaaaaagagaagttgacgaggataagatagtcaaccctggtaaaataatcacacagactcgtgacttgatttacaagcggtttttgcaaaaatcaccacgcttgttccttgcaatgtatacgtgtgaaatccaagcagctgccgaagtgttgggtaaagtatatgctgttgttcaacgacgcgaagggtcaatcatatcagaagaaatgaaagaaggtactccgttctttactattgtggcaagaatccctgtgattgaggcatttgggttttccgaggatattagaaagaagacatccggggcagctagtcctcaattagtttttgatgggtatgatatgttagatatcgatccattttgggttccacatactgaagaagaattagaagaattgggtgaatttgcagaaagagaaaatgttgctagaagatatatgaataatatcagaagaagaaaagggttatttgttgatgagaaagtcgtcaaaaatgctgaaaagcaaagaactttgaaaagagattag

SEQ ID NO: 6631 - DNA, 1821 bp, Candida albicans
atgtttagtcagagatatgatcctttagcagaagagaataacggcagtcgaccagccgattctggatttggcgtgagtctaaagaaaagaaaattaagtgatgatgagagttctgatgaggaagaagaagaggaagaaacagatgagtctgaacatgaatcttcccaggatgaagatatcaacgaagaagaaccagaagaagaagatgaagataccaacaaagttgacgacaacatggaaattgatctgcagccagaagtagacccagattatattcacaaacatcaaacaattttcaacaaattcaaacagtccacagaatcagaagcaattgaacaagagaaagaagaagtcgaagaagaggacgcaaatattgagcaacatagtcttgtcccattaccacaaccagcattgccaagagatcgaaaactatcatctgtgtcaactcatacaaagaacctagattggttaactaaaccgcaatatgcttcaccactggataaaaaggctttcacagattttaaattatcgtcatttatgataaaaaatttggaaaaaatgggatttactgaagcattttccgtacaaataagtgttcttaatatgatgctcccagagatcgaagcacaaaaactaaaaccagatcgtgttggtgatattcttgttaatgcatctactgggtcaggtaaaactttagcgtatctgattcccataattgaaagtctataccgaagagtagttccaagagtgagggtgattatattggttccgacaaaacctttaatcaatcaagtcaaatcaacattattacaactctcgagtggaaccaatttacaaattgcagcattgaaaaatgatgtatctataaatgacgaaaaagatctgttaaccaaatctgttcctgacattatagttagtacgccaggtagacttgtggagcatttacttaatgattctatcaatttatcaagcttgcaatatttgataattgatgaagctgatagattattgaaccaaagtttccaaaattggtcgaatgtgttattagataaaatagattcacaaatcaacattgcagaagtttggaaattatcagtgcagaaattggtgttttcggctacattaacaacagatgccggcaaattatcaagtttgaaattttataatccaaggttgataattgttaatgattccaaacaattggttaatgaaatattcactgttcccgtgacattatctgaattcaaaattcatttgggtgtagcaaagaattcattgaaaccattaattttaaccaaatttttaatatcaacaaacaagttgtctaatgtgctcatattcaccaaatctaacgaatcatcaatcagattaactgaattgttaatcagcttatttcaaaaactttctatcaatttaaagattgcctttattaattcaacaaataacagaacatcaatccgttctaaaatactaaaacaatttagtaaccaagaagttaacattttgatcactactgatttaattgccagaggtattgatgtggcatctatcaccgatgtcatcaactacgacttaccaaattcttccagagaatatgttcacagagttggaagaactgcgagagccaaccaagtagggtatgcatacagtttctgttttggtaagggagaaaatagttggttcaaaaaattagcccatgaagtgagtcgaagtaaagaagttgaaaacgtggacttgaatgtaaaagaattaatatccgacagagacgaagagatttatcaacaagcattacatgagttacaacaacaagctaagaaataa

SEQ ID NO: 6632 - DNA, 1275 bp, Candida albicans
atgtcagttgaagaaaaagtatcacagctcaaagttactgaggagtcagaacaaaaaatcactccatgggaagtagaaggtgccgttgtagacgggaaatcaatggggattgattatgataaattaattagtcaattcggtaccaaacatatcactgaggaaacattagaaagatttaaacaagttactggtgaagagcctcatccatttttgaaaagaggagtatttttttcacaaagagatttagatcgtattttagatttatatgaacacggagaaccattctttttatatactggaagaggtccatcatctgattcaatgcatttgggtcatatggtgccattcatatttacaaaaatggtacaagaagtatttgacgtcccattagttattgaattaactgatgatgagaaatttttatttaaacatcaattaactattgatgatgttaaaggttttgccgcagaaaatgctaaagatataattgccgttggattcaatccggaaaatacatttatcttttcagatttacaatatatgggtggagcattttatgaaaacgtcgttagaacatcacgtcaaatcactacttctacagctaaagcagtatttggattcactgattctgattgtattgggaaaatacattttgcaagtattcaaatagcaactgcattcccatcatcattccccgatgtattaggattaccaccaaagaccccttgtttaattccttgtgccatagatcaagatccttattttagagtttgtagagatgttgctgataaattaagatttaccaaaccatcattaattcatgctaaatttttcccagctttacaaggggcatcgacaaaaatgtcagcttctgatactacaacttcgattttcatgggtgatacagcaaaacaaattcagaaaaaaattaataaatatgcattttccggtggtagagccactgctgaagaacatcgagaattaggaggtaacccagaagtagatgttgcattccaatatttatcatttttcagttatgatgatgaaaaattggcacaattagaacaaggttatagaaagggagaaatattatcaggagaaatgaaaaaagaatgtattacagttttacaagaatttgtatctgcttatcaagaaagaagaagtaaagttgacgaccaagttgttgaaaaattcatgaaaccacataaattggtgtttggtaataaggaaagaaaagttcctgccaaacaaagagaaaagaaagccaaaaagtaa

SEQ ID NO: 6633 - DNA, 1443 bp, Candida albicans
atggagttcacagcagttattgtctgtggtaaggggaaagctttgacacccttttcccaagctcgttctacaggaatcccgaaaccattattgccaattgcaaacaaacctatggttcaatatgtgttggattggtgtttacaagccaatttttcaagaataatcgttctttttgaaaaagaggacgaatcttctggtgttctagaacagactataaagagatatcaagaggaaaaagagaagaccaacaccaataaaaacgaatctcacgttagtattgatgttataccttacaattgtgaaaacaatggattaatattatacaaattgtatgaattatacagtgaaaacaaagtttcaaacaacaatttcataattttaccatgtgacttgataaccaatttaccacctcaagtgataattgaagcatatagaaataaaaatgattcagatttaggattggtaattgcatacaagaatcaattggatatagaagataaaaaggcgaaaattttccctcaaagttataccatctatagtgacactgatgagaatgggaatgaaagtccaatgtttttggacacatacagccaagcagatattgaatttcatcaagcattatctatcagaactcaaatgtgttggagataccctgcagcaaccgtcagcaataaattgttgaatagtggaatttttcttggatcgtgcctgcaaatattcagcgttttcgatgagcaaaaagataaatttactgaatcatattttgaaaaacgttctttgatgaaaattgtacgtgatttggctcgaagatcttggaagcatgcattgcatcaagcaagtgttggatttttcattgttcccaaacaagctacttttttcagatgtaacaatttgccggtgttgatggaggctaatagatactttatgaaaaaacaagctattgcaaaatcagcatctcaaaacacacaagcacctaataaacaagataaacaatcaggggcacatgtgggaaacgattccttagtgggagaaaatacagaactaggagaaaagactaatgtcaaaagaagtgttattgggtcgaattgtaagattggtaagaagaataagattacagggtgtttaattttggataatgttgaaatccacgatgacgtgacgttggaaaattgtattattggtcatgatgttattattcagggtaaatgtaaattgaccaattgtaacgtggaaagcaccaacgaggtagctcataacacacaagccaagaattcgaatctattgtgtttgaccttggaaggtctagtaaatgaagacgatcaatatggcgacgacagcgatgacgaagaggacagtgaggagtacgatagtactgatgacgaagatgagagcgagtttgaagatgagtacacaggaaacgaagatggtttatttgcctattaa

SEQ ID NO: 6634 - DNA, 1209 bp, Candida albicans
atggtcccacctgtttatattgtttctactgctagaactccaattggttcatttcaaggtacattatcatctttaacttattcagatttaggtgctcatgctgtcaaagctgctttgaacaaagtccctcaaatcaaaccagaagatgttgatgaaattgtatttggtggtgttttacaagccaatgttggtcaagctccagctagacaagttgccttgaaggcaggtttaactgataaaattgttgccagtactgttaacaaagtttgtgcttctggtttgaaagctattataattggtgctcaaaacattatttgtggcactagtgatattgttgttgttggtggtgctgaatccatgaccaacacgccatactacttgccaactgctagaaatggtgctagatttggtgattccactttaattgatggtattcaaaaagatggtttgttggatgtttacgaacaaaaattaatgggtgttgccgctgaaaaatgtgctgctgaccatggattcaccagagaacaacaagatgaatttgctatcaaatcatatcaaaaagctggtaatgcattaaagcaaggtaaattcaaccaagaaatcgctccagttactattaaaggtgttagaggtaaaccagatgttgttgttgaaaaagatgaagaaattgaaaaattcaatgaagccaaacttaagtcagctagagccgttttccaaaaagaaaatggtactgttactggtccaaatgcttctaagattaatgatggtgctgctgcattgattttagtttctgaagcaaaattgaaagaattgggtttaaaacctttagctaaaatcaatggttggggtgaagccgccagaaatccaattgatttcacaattgctccagctttagctgttccaaaagctgtcaagcacgctggtttgactcttgatcaagttgatttctttgaattgaatgaagccttttccgttgttggtttagccaatgctgaaatatgtcaaattccattagaaaaattgaatgcttatggtggtgctgttgccttgggtcatcctcttggttgttctggtgcaagaattgttgtcactttattgtctgtcttgattcaagaaggtggtaaaattggttgtgctggtgtttgtaacggtggtggtggtgcctcatctattgttattgaaaaagtcgatagtgactttaaattgtaa

SEQ ID NO: 6635 - DNA, 2100 bp, Candida albicans
atggaagtaacacaacggacgcagagtcagacacaaccaacacaacagtcaccgacaactcagacgcaaacccaaagcaaagaggaccagaataggatttgtcaattgatttgctccacgggtcagtttggcaattatgatttgaatatcaacgataaaactatcgtacaaggtaaaatgacgtggtattttggaagagaccccaactcagatttgcaagtggcgtcgtcgtcgagaatttcaaacaagcattttcaaatctggctcaacttcaatgataaatcactatggataaaggacacttcaactaacgggacacaccttaacaacagtcgattggtgaaaggatcaaactaccttcttaatcagggtgatgaaatagcagtaggggttggtagagacgaggacgttgtgaggtttgtcgttgtctttggtgacaaatacaacccggcaaagctacctgattcgaccaacacaattaaagatgaaggaatatacaaagactttattgtgaaaaatgaaacgataggccaaggagcatttgccactgtgaaaaaggcgattgaacgatctacgggcgagtcgtacgcggtgaagattataaatcgaagaaaagcattaaataccggtggtggaagtgccatggcaggagtggaccgtgaattgtccatattagagcggctcaaccacccaaatatagttgctctaaaagctttttatgaagatatggacaattactatattgtgatggaattggtgccgggcggtgatttgatggactttgtggctgcaaacggtgcaataggagaagacgcaacacaagtgatcacgaaacagattctagaaggaattgcctatgttcataatttaggaatctcccatcgtgatttgaagccagataatattttgattatgcaagatgacccaatacttgttaaaatcaccgactttggattggcaaaattcagtgacaatctgacgtttatgaaaactttttgtggtacattggcgtatgttgctcccgaagttatcaccggtaagtatggatcatcgcagatggaactgcaacaaaaggacaactactcttccttggttgacatttggtctttgggatgtttggtttatgtacttttaacttctcatttaccattcaacgggaaaaaccagcaacaaatgtttgccaagatcaaaaggggcgaatttcatgaggctccattaaattcatacgacatttctgaagacggaagagatttcttgcagtgctgcctacaggttaatcctaaactaaggatgacggctgctgaagctttgaaacataaatggttgcaagacttgtatgaagaggattctgtcaaatcattgagtttatcgcaatcacagtcgcaacaatctcgaaagatagataatggtatccatatcgaatcattgagcaaaattgatgaagacgttatgcttcgtccattggatagcgaaagaaataggaaatcaagtaaacagcaagatttcaaggtacccaagcgtgtgattccgttatctcaacatcctgcaacaccgttaccaatgtcacaaccgaaaaagaggccgtatcaaatagaccctagaacaaacaaaaaagtcgatttggaagaacctctgacaagcaagaaagtcaagctaagtgattccgttgttgcggaagactacttgaagttggagccacttgcaaattcgttattccaagaaacaataaatatttcaaagtccccgttttctttcggaagaaatgacacttgtgattgcgagatagacgacgacagactatccaaacttcattgtgtcattaccaaagaaaacgactctatatggttattggataagagtactaactcgtgcttggtcaacaatactagtgttggaaaaggcaacaaagttttgcttagaggaggggagatattacatctcttctttgacccattgtcactgcaacatataggtttcaaagtagtccttgttgatcaactgtctggtgaacataagagtcaagtggaggctttgaaacaaacctcagaagaaatgaatattattccacttatttcgggtttaagtagtataagttcatag

SEQ ID NO: 6636 - DNA, 1908 bp, Candida albicans
atgagtacttctatcgccgatgcattcaagaaattgaatgtgtctccagaaagctcaacttcagaacatgaaaaaatatttaatgtttcttatgaatatttatcaaaagtgaaaaaattcaatgatttaaaagcttcgaaaaattgtcttgtggcattgattaatttggataaatattataaagccgaacaaattattcgcaaacttccttcttcattagtcaatctgttaattcttgaagtggcatatgtatattacaagattgggaaagttcaagaattggttaaattatacgaagctaccaatgaaaatattttaccaaatgctgttgatattggtttgaaacatgtattggcacagtcttattataaaatcggtagttatgaaaaggcattggaattgtataaagaattaattaagaacaaccaatatgatgatgaattggatttagtcattaatgaaaaggcaatagtttcacaattaaatttccaaaaaggtgggaaaattgaatcaagtacgacaactaatgcaaataattatgatttgttatttaatgaagctttgattaagttgtctactttgaacacaacccaaacattagcattgttagacaaagcttctcaagtggtacatgcagaattatctggagaagatttggtgtcagagttattgccgatcaaattaaccacagcatatgtttatcaattaactggtgaatcaaataaaagtttggaaattttggaaagtattgatgttgaaaaaatcaatgatcttttaataaaattgattgtgaaaaataacctttattcacattctacaatcactaatatcaacttagtagatagagacttgaattatcaacaaaatttacataaattgagtcaaaaattgaccgttttgcaatatgaaagagttttgaaaaatagcttggttttgaagtttgctagtggaactttgagcaaatcacaattaaacaatcagtttattaataattttcaacaaactttccctggtgatcttcttccattatcatataaagtgttgtcaacacttaatatagatcacaaagatttacaagatttaacaaaactgaaacagataggcagaaaacttgtcaaatacattccaacacagacagataatgatttgaaaattgttgctacattaattttggtttctgtgaatgctcaaattggatcatttgatcagagtttacctattttagaacaattgacccatgaatcattggctacacccaaggcattaccaggattgattggaactttgatagctgtttatgaaaacacccataataccaaaaaattaactgatttattattgaaagttttagaaaaattattatacactcctaaagaattattatctggagatattaattattacaattttgccaaaattgttgcattcaaagcattgaatcaaggtcatgataaaactgccactcaattgtttgaatatttgtatgaagttaattccaatgatcaattaatccattcaattttatctaatacaaataatgatttattaccccttgatgaattaacaagtaaaaaaccaatagatgaaatattatcagttgatattgatacattaataccaacaacgaaaaataaacctataaaaccaattgtaaaaaaagtttctaaaataactaaaaagaaacaaaaccccaaatttggacctaataaagttttgaagcctatagaagatttacaattggatgaagaaagatggttacctatgaaattaagatcttattataaacctactaagaaagaaaagaagaaagctagtggtggtggcggtcaacaaggagctactgaatctagtactcgtacaacttcgctgtctaataataaaaagaaaaagaagaaaggtaagaaatag

SEQ ID NO: 6637 - DNA, 3630 bp, Candida albicans
atggaacaacaacaacaatctaataaagcccatagaggtggcactaagaaaccaggagctaaaaagaaattacatcaagatggacaaaacaaaaaggcttttgccgtatcagcaccaagaaaattggaacgtatggccagaagatcccatgatgtcaatgaaaaaaaattacatgtaccaatggttgaccgtacccctgatgatgatccaccaccagttattatagctgttgtgggaccaccaggcacggggaagtcaacattaataaaatcattaattagaagattaacgaaaacaacgttaacggaaatcaatggacccataactgttgttagtgggaaaagaagacgattaacatttattgaagttaataatgatttaaattctatgattgatattgctaaagtagccgatttagtattattattgattgatgggaattatggattagaaatggaaactatggaatttttaaatattgctcaacatcatggtatgcccagagttttaggtgttgctactcatttagatttatttaaatctcaactgacattacgtactagtaaaaaaagattgaaacatagattttggactgaagtttatcaaggagccaaattattttatttatcaggagtcattaatggtcgttacccagatcgagaaattttaaatttatcaagatttatatcagtgatgaaatttagaccattaaaatggagaaatgaacatccttatttattagctgatagaattactgatttgactcatccacaaaaaatcgctgaaaattctaaatgtgatcgtaaagtggcaatttatggttatttacatggtactccattacccgttgaaaatgctcatatacatatagctggtgttggtgatcattatgtacattcagtggaaaaattacctgatccatgtccaactccttattatgaacaaaaattagaagaattggaaagagaaagagtgaaaaatgctgctgcatcaggtgaaccattagctaaaactactagaagaaggaaaagattagaagataaacaaaaaattatttatgctccaatgtctgatgttggtggagttttagttgataaagatgccgtttatatagatgttggtggtaaagaaatttataaaactggtactggtacttctgaacttaaaggtgaaggtgaaaaacttgttaatgatttacaagaaatatctcaaaccatgactgaaagattagaagatggacctggtttacaattattttcaagttccaaagcattaaatcaagttgatgaagatgataacaatgaagaagaagatgatgatgatgacgaggaaggacttttatctgatgaagaaaccattgttgatactggtcgttcatctttaagaaaagctagagtttatggaaaatctgttagtgaagatgatgaatttgatgaacttgaatctgatgaagaacaggatggagatcaatttagtgatgatgaagataaagcggaaaataacttaaagagtagaggtatggttgaagtcgattttggtagtaacaacaaatacaaagaaaatgatttggaatatgtggaagactcctcattatcatcagatgaagattattataaaaaatctgctgccaagttgactgcatcagttagaaggaaatgggatatcaataaattgatttatttaaaggatattgatgctaaagaggtgataaaaaaatggagaaataatgatgttcaagatgacgacgacgacgatgatgaagaagaagaagaagacattgaacaagatgatcaagatttttttgttaaaaagaaagttcaagatgataaagaagatttagatacttctttaccacgtttccctacacttgaagtattaaaagcaaaattcaatcctaacactatagatgaaaataatagtgatgatgaatatgaaaatggttacaagattttaaaatcacgattattagttgcaccaaaagtgactgatgaaactgaagaaggaaaagaaataaaagaaaatgatgatgatgatgaattatatggtgattttgaagatttagaagctactgaaaatcaagatcaagaagaggagcaaaacaagagtacaaaaacagcagaagatgaggacgattttgctgattttgatgctgaagaagaaaaggaagaagaagaagacgatgataacgtagatgaagaatcaatgactactgaagaaaaaagacaattaaatgcagctaaaaaagccaaattaaaaatgcagtttgaagaagaagaagatagagaatttggagctagtgaccctgaagatgaatcagaaacctggtatgaatatcaaaaaaataaaatggccaaacaattagaaatcaataaagttcaatatgaagaaatgacaccagaaatgagaatcaaaattgaaggttatcgagctggatcatatgttaaaattgtatttgataatattccatgtgaattcattgataattttgatccagcatatcctttagtattaggtggattattaaccactgaatctagatttgggataatgaatgcgagaataagacgtcatagatggcataaaaaaatattgaaatcacaagatccattgattttatcattaggttggcgtcgattccaaacattaccaatttataccactagtgattctcgaactagaaatagaatgttgaaatatactccagaacatgcttattgttttgcttcattctacggtccccttgtggcacctaataccacttttgtggggtttaatattgttgatagtaaatctactactggtgcatttagagtggctgctagtgggattattgaagatattaattctagtgttgaaattgtcaaaaaattgaaattggtagggtatccatataaaatattccgtaatactgcatttatcaaagatatgttttctaattctttagaagttgctaaatttgaaggtgcacaaattagaactgtgtcaggaattagaggagaaatcaaacgtgcattatcaaaacctgatggctattttagagccacttttgaagataaaattcttatgtcagatacaatatttttgaaaacttggtatcctgtcaaagtgaaaaaattttataaccctgtcacgtcattattattaggtcaacattcagaatggaaaggtatgagattaactggacaagttagagctgatgaaaatattgcaactccattaaatgttgattctcaatataaaaaagtcgaaagagtggaaagaagatttaatccattgaaagtacctaaatcaattcaagccgaattaccatttaaatctcaaattcatactatgaaaccacaaaagaaaaagacttatatgagtaaacgtgccgttgtattaggaggagaagaaaagaaggctcgtgatttgatgcaaaaaataaatagtattagaaaggaaaaagataccaagagaaaagccaagaaggatgagaaatttaaagaaaaattgaaaaagattgctaaaactgaagaacttagaaaagagaaagaacgtgaaagaaagaaagattatttcagtaaagaagggaagaaaagaaagttgggatctagtgatggtcaggcatttggtaaaaagcaaagagtttaa

SEQ ID NO: 6638 - DNA, 3501 bp, Candida albicans
atgacattggcgaaatttagaactttggaaagagaaaagagatttcaaaatccaccaaaggatatggactcatatccgttgttgaaggatgctgttgcacctcatgtgggatcatttaatgcgttgatggatggtccagacggaggtttattgaatcttgctgtaaaagatattgggtccaaaactatttttgatacaccagaaacttctggacgtttaggtaataaattgaaaatcagggttgactcagtacagttggccaaaccaagcgttcctgctaatgataaattatctttgaacagaaaaacatttccaagtgaatgtagagaaagaatggtaacatatagatcaagattaatgttgaatgttacttggagtgtgaatgacgaagaagaagtgctggaagtgagagaagcaggtcaaataccaattatgttaaagtccaacagatgtcatttagaaaaattatcacctaaccaattagtggaagctaaggaagagagtgacgagttaggtggatattttattgttaatggtattgaaaaattgatccgtatgttgattgtgcaaagacgtaatcatcccatggccattatccgtccttcatttggaaaccgtggtgcttcttacacaaaattcggtatccaaataagatcagtaagaccagatcagacatcacaaacaaatgtattacattatttaaatgatggtaatgttacttttagattttcatggagaaagaatgaatttttggttcctgttgtgatgatcttgaaagcattaattgaaaccaacgaccgtgaaattttcgatggtatcgtaggaaatgatactgaaaactcgtttttaactgatcgtttggaattgttgttaagaacttacaaaacatacaatttgtactcccaacaagaaactttagcttatttgggtgacaagttcagagttgtttttggtgcatcaccagatatgtcagatattgaagtcggtaaagaagttttgaaaagaattgtcttggttcatttgcctaataatgctgacaagtttagaatgttattgtttatgattagaaaattgtattcattggtcgctggagactgtgctcctgataacccagatgcaacccaacatcaagaagttttgttgggaggtttcctttatggtatgattatcaaagagaaaattgaagagtacttgcaaaacattaaattgcaaattcaatctgatattaatcgtggtgttggtataaactttgacgatagaaaatatatgaccagggtattcctgagaatcaatgagaacattggtcaaaaattgcaatattttttaagtactggtaacttggtgtcccagtctggtttagatttgcaacaagtttctggttataccgttgttgctgaaaaaattaacttttatcgtttcatttctcatttcagaatggtccaccgtggttccttctttgctgaattaaaaactactactgttagaaaattattgcctgaatcttgggggttcctttgtcctgtccataccccggatggttctccttgtggtttattaaatcacttgtcgcataaatgtaaaattgccactgaggcatccgacgtgtcacaagttccaaaggctttaacccaattgggtgttttaccggccgactcatttgcagctggcccaaacttgtgctgtgttcaattggatggtaaaattgttggttggacgacacatgaacaaggtagaattgtcgctgatacattgagatactggaaagtcaatggtggtcacggattgcctttagatttagaaattggttatgttccaccttcaaataaaggtcagtatcctggtttgtacatttttggtggccactctagaatgatgagaccagtgaagtatttacccttggataaagaggatatcgttggtccatttgaacaagtctacatgaatgtagctgtaactccagaagaaattgagaataacattcacagtcatgttgaatttaccccaactaacatattatccattttggctaatttaacacccttttctgatttcaatcaatcaccaagaaatatgtatcaatgtcaaatgggtaagcaaacaatgggtactcctggtactgcattggtccatagatcagacaacaagttgtaccgtttacaaactggtcaaacaccaattgttaaagccaacttgtatgatgactacggaatggacaatttccctaatggtatgaatgctattgtcgctgttatttcatacactggttacgatatggatgatgcgatgataataaacaaatctgcagatgaaagaggttttggttatggtactgtttataaaactgagaaagtcgatttgtcacaatcaagaagaagaggtgatccaataacacaacattttggttttggtagtgatgaatggccagaagcatggaaggaaaaattagacgctgatggtttgccattgattggtgttaaagttgaagaaggtgatccaatagtggcatattatgatgatactttgggtaaaactaaagttaagacttaccattcatcggaaccagcatacattgaagaagtcaagttattaggtgacgacagcaatgaacaagagggtcaacaaataactatcaaatacagaatcacaagacaaccattaattggagacaaattctcttctagacatggtcagaaaggtgtttgttctagaaaatggccacaaattgacatgccatttactgagtcaggtatgcaacccgatgtcatcattaacccacatgcgttcccatctcgtatgacaattggtatgtttgttgaatctcttgctggtaaggctggtgccttacacggtattgcccaggattctaccccttggaaattcaatgaacaagatacaccagcagactactttggtgagcaattgctcaaagctggttataactaccatggtaatgagccaatgtactctggtgccactggggaagagttgcgttgtgacatttacattggatgtgtttactatcaaagattgagacatatggtcaacgataagttccaagttagatctactggacctgttaattcattgacaatgcaacctgtgaaaggtagaaagagatccggtggtattcgtgtaggtgagatggaaagagatgctttgattggtcatggtacttctttcttgttgcaagatagattgttaaattgttcagattacacacagacaccagtctgtcgctcatgtggatccatcttgactacacaaacgtcagttccaagaattggaagcatggcaagtatcagatgtagaagatgtgcagtcggcttggacaaatatgaaggatatgcagctgattcagatatatgggaagatggacatggcaagaaatttgtgggtggtgacgataccacaactgtggcaataccttttgtattgaaatatttggatagtgagttgtcggcaatgggtataaagatgcgttataatgttgaaccaaaataa

SEQ ID NO: 6639 - DNA, 1689 bp, Candida albicans
atggctcctaaaagaaaatcagtaaaaggtggtgttgaacctaagaataaaaaagtgaagactgcaatccaccaaaaagaacccaatactttattgtctttggaggaactaaccaacttgagtaaagaaattgacgaatcacttaaatttaacaacttggttccattattagaacaattcaaattgataaaaacaaaattgattgaaagtatagaccctgatgttgaaagtacggcccgtaaactatcacttttgctttacagaaactttaataaaattaatgatgaaataatctcgaatggtaacggtgctaaatcttccgcttccgaggataaaaaaatgattattaagtggttactggaaaaatatacaactttcaaagacattatctatggatttattgaagacaaattggctggttcgacttccttgcagttggatttgcttgacatcattttgaatttcattagattagaaagtcaacgaaagtcgtcaacatcacaagtggtatttttccctacccaatcttacaagtcattaactgagagcattttgaatagcaaaaatggggaaattctgtttgatgggactaccgataattttatagttttagaatttcttgataaatttcaaaagtactgggatttacaattctattttttcaacaatttgtcagaagtgttgaatgaatggaagcaagaaaagtctgaaaaagatttgcaacttatttttgccaattttttaactgttttacgaaagggtttgttattcaacgaaaagacattagaagaagagccactttggattgcacccaacaaggaaggtaaattaccgtcttcgttgtataagcatactttgttcaagtcacaatttcaaaaatcagtaattgccatgctttcatatcctttgttacaagaacaatacaagtcggtattgatgatattacacaagagaataataccatatatgtcccaaccgcaatcattgatggattttttgactgattgttatgatcttactgatgatttgattgttcctatactagcattaaactcattgtacgagttgatgaaaaattataatttagagtacccagacttttattccaagttgtattcgttgttgacgccagagcttttatatacaaagtaccgttcaaggtttttccgtttatgtgatttgtttttgagctcaactcacctatcagccaatttagttgcgtcgtttattaaaaaattagccagaatatcgttggctgcaagtgcttcaggggttgttatcatcataccatttatatacaatttattaaaaagacaccccacatgtatgatcatgttgcacaaggaagatactgaatctggttaccaagatccattcaacagtgaagaaaaaaatcctttacatactgaagccatcaaatcatcactatgggagttggataccttaatgacacattaccacccgaacgttgcaactttggctaaaatatttggtgagccttttaggaagcctagttacaacatggaggatttcttagattggagctataattcgttgttacaaagcgagtacgatagaaaattcaaagataaaaactcagctttagaatttgaagagtttgacaaagtacttgatacttcaaatagtgacagcaaaagtctgttgttagaagggtggactttagtttag

SEQ ID NO: 6640 - DNA, 1629 bp, Candida albicans
atgggtaaaaagaaatccaactcttctaatgctgcacaaatattggaatcgtctgtatcgccaattttagaaattaattataatgatcctttattcactgctgcatctcatcccacaaaaccaattttattatcaggtttagctactggtcatgtctattgtaattcttatgatgcagagaaactagaagaattgactcaatcgaaaagagaagaatatgctacattggaaaaacaagcttatactcaaggtaaaataccacacatcaacaaatcagtctctcaactgaagaaaaaatggtggaccatagttcaagacaacactgaaattccaaacgatggagatctcatcaatactaattggaaaacaaaacgtcataagggatcatgtagacatgccatctttgagccattggaaaattctgtgggtgatttcatttatacatgtggaaccgataatattattaaaaaggcatctactgaaactgggaaagtcgtggggaaagttgatgttctgtctgattactccaacaagaaagatttattaactaaattatgccactcggtaactcatccatttttattatcagggacagaggatggacatgtgctagtctatgacagcgccaatttaaactccaataaattaaaattcaaagttgaaagtgcccatgatgattcgataaaccatattttagctatgcccgctgtatcagcctatcattatctaacgttaggatctactactttagcacacattgatattagaaagggtatcattacacaatctgacgaccaagaagatgaattattggcaatgtgtttccctagtgatgaagtatctcaatcaaatgataccgttttggtttctcatggagaaggtttgattactatatggaagaattcaaagaataaactcatggatcaattgtctcgtgtaaaagttaataaatctgcatctatagatacgatcatttcaactatgaatgccgataatgaagatatggcaaactcagtttggtgtggtgacagcgaagggttgttgcatagaattaattataaaagaggtagagtggttgagactcgtttgcattcagtggccaaaggcaaacatggtgcagttgacgaagtgggaattttggatatcgattttgattatagattggttagtgctggtatggacacattaaagatttggtctaacacacaagatgaagaacagaatgatgaagatgatgatgacgataatgatgatagtgatggagatgattctgagagtgtatctggtgaagattcctggagtgatataagctcttcagacgaggagcttgacacgaatccagatgatgattctgataaagacgatgtagacgtcgaagacgatctacagttacgcaagaaacgagatgatatttctcaacttatatccaagcccaaaagaaaaacaattgacattaataaattgacaaaagcaactaaaaacacacaaccagaagatgatgaagaagaccaagaagtgcctgaaccttctcagaagaaacaaaaagtcaaggagaagaagttgacaactaaacaacttcgtaatatgcaaaaacatgaacacggtattagaaaatttgaaggtttgtaa

SEQ ID NO: 6641 - DNA, 5187 bp, Candida albicans
atgagtcgtcaatttccatactcgagtgcgccgctccgttccgtcaaggaagtgcagtttggtttattatcaccagaagaagtaagggccatatcagtggcaaaaatagagtatcctgaaacgatggaccaaaccacaaagagaccaagagagggaggattgaatgatccacgtctaggatctatcgatagaaatttcagatgtcaaacatgtggtgaagatatggcagagtgtcctggtcattttggtcacattgaattggctaaaccagtgttccatattgggtttattgctaagattaagaaggcctgtgaatctgtgtgtatgcattgtgggaaattattgttagacgaaaccaatccagctatggcccaggctataaaaatcagagatcctaaaaagagattcaatgcagtgtggtccttgtgtaaaacaaaaatggtgtgtgaaaccgacaataacgaggatgaaatgaccgaccaaccttctcgtggcggatgtggacacccacaaccaactattcgtagagatgggttgaaattatgggggacatggaagcaaaacaagaattacgacgacaacgaccaaccagaacgtcgtttgttgaccccactggaaatcttgaatgttttcaaacacattagccctgaagattgttacaagatgggattcaatgaagattatgctagacctgaatggatgttaatcacagttttacctgtgccacctccacctgtgagaccatccattgcattcaatgagactgcaagaggggaagatgacttgacattcaagttggcagatatcatcaaagctaatataaatgtccaaaggttggaaaccgatggttcaccacagcatgtgataagtgagtttgaagccttgttgcaattccatgtggctacatatatggataacgatattgcaggacaaccacaggctcttcaaaaaaccggtcgtccaataaaatctattagagcaagattgaaaggtaaagaaggtcgtttaagaggtaacttgatggggaaacgtgttgacttttcagctcgtactgtcatttcaggtgatcctaatttggatttagaccaagtgggtgtgcctatttccattgcaaagacattgacttatcctgaaattgttacaccttataatatccacaaattgactgagttggttagaaatgggccgaatgagcaccctggtgccaagtatgtgataagagatacaggtgatcgtattgacttgagatacaataagagggcaggggatatagccttgcagtatggatggaaggtcgaacgtcatttgatggatgatgatccagtgttattcaatcgtcaaccttcgttgcacaagatgtcgatgatggcacatagagtcagagtcatgccttactccacgttcagattgaatttatcggtgacatcaccatataatgcagatttcgatggggacgaaatgaacttgcatgtcccacaatcaccagaaacgagatcagagttgtcgcaaatttgtgcggtacctttacaaattgtctctccacagtcgaataaaccagtgatgggtattgtccaagacacattgtgtggtattcgtaagatgacgttacgtgatattttcattgaatatgatcaggttatgaacatgtgctactggattccaaattgggacggtgtgatcccgccaccagctgttgtaaagccaaaacaattgtggaccgggaagcaattgttgtcgttggcaattccaaagggtatccacttgcaaagatttgatggtggtagagacttgttgagtcctaaagataccggtatgttgattgttgatggtgaaattatgtttggtgttgttgacaagaaaactgttggggccaccggaggaggcttgattcacacggttatgagagaaaagggacctaaagtgtgtgctgaattgttcagttctattcaaaaagtggtcaactactggttattgcacaatgggttttccattggtattggtgatactattgcagatgcgcaaaccatgagagacgttaataagactattcaagaagccaagcaaaaagtgcaagagatcattattgatgcccaacataacaaacttgagccagagccaggtatgacattgcgtgagtcctttgaacataacgtatcacgtgttttgaatcaggcccgtgacactgctggtagatcagcggaaatgagtttgaaagatttgaacaatgtgaaacaaatggttacttcggggtctaaaggttcgtttattaatatttctcaaatgtctgcgtgtgttggtcaacaaattgtcgaaggtaaaagaattccattcgggtttggtgatcgttctttgccacattttacaaaagatgattattcacctgaatctaaaggttttgttgaaaattcttatttaagagggttaactccacaagaattctttttccacgccatggctggtagagaaggtcttattgatactgctgtgaaaacagcagaaacaggttatattcaacgtcgtttagtcaaggcattggaagacattatggttcactacgatggtaccaccagaaactcgttgggagacattatacaattcatctatggtgaagatggtatagatggtacccaagttgaaaagcaatcagtcgatacaatcccaggatcagacgaaagttttgaacgccgttacaaaatcgatgttttggatactgaaaatgtcatttctgaatcattgcttgaatctggaaaagagattagaggtgacgtgcagttacaaaagatattggatgaggagtacaatcaattgttgaaagatcgtaagtacttgagagaagtttgtttccccaatggtgatttcagctggccattaccagtgaatttacgtcgtatcatccaaaatgctcaacagattttccacaacggtcggtacagggcatctgatttacgtttggaagaaattgttcttggggtgaaagaattgtgtatgaaattattggttgttcgtggtgacactccgttagtcaaggaagcacaagagaatgcaacgttgttgttccagtgtttgttgagatccagattggctgccagacgtgttattgaagagttcaagctcaaccgtgcatcttttgaatgggtaatgggcgaaattgaaacgcaattccaaaaatctattgttcatcctggtgaaatggtgggtgttgtggcagctcaatctattggtgagcctgccacccaaatgaccttgaatactttccattatgctggtgtctcatcaaagaatgttacattgggtgttccacgtcttaaggaaattcttaatgttgccaagaacattaaaacaccagcaatgacagtgttcttggacccagaagttgcttctgatattgaaaaggcaaagattgtacaatctgccatcgagcatactacattgaagaatgtcacttcatcaacagaaatttattacgaccctgatcctagaacaacggttattgaggatgattatgatactgtggaagcatattttgctattccagaccaaaaggttgaagaatctattgacaagcagtcaccgtggttgttgcgtttggagttggaccgtgcgaaaatgttggataaacaattgaccatggcacaagttgcggaaaagatttcgcagaattttggggaagatttgtttgttatttggtctgatgatactgctgataaattgattattcgttgtagagttgtcagagatcctaaatcattggatgaagatgccgatgcagaagaagatcaaattttgaagcgtatcgaagcccacatgttagagtctatttctttgcgtggtattccaggtattactagggtatttatgatgcaacataaggtcagtcacccagacgaaactggtgaattcaagcagggcaaggaatgggttttagaaaccgatggtgttaatttggcagatgttatggccgtgcctggtgtggattcgacacgtacttactctaatgattttattgaggtgttgtctgttttgggtattgaagctacgagatcgtctttgtacaaagaaattttgaatgtcattgcgttcgatggttcatacgtcaactaccgtcatatggcattgttggtcgatgttatgacttcccgtggtcatttgatggcaattactcgtcatggtattaacagatccgatacaggtgcgttgatgcgttgttcgttcgaagagaccgttgagattttgttggatgcagcagctgctgccgaattggatgattgtaagggtatatcagagaatgtgatgttgggacaaatggcacctttgggtactggttcctttgacttgatggttgatgacagaatgttgcaaaaggcaccatcgagtatggctatggatgatattgctgatggtggtggtgctactccatataaggactacgagaatgctagagatgagaacattgacattgacgcaggtgctggattctcaccaattcacattgcccaaatgaatgaaggaaatattggagggttgacgtcatatggtggccagcctacctcgcctgctgccacgtcgccatttagttatggatataactcgattacatctccagggtacacttcaccaggatatggttattcaccaacgagtccaagttactcaccaacgagtccaagctacgctccaacgagtcctgcatactcaccaacgagtccaagctacgctccaacaagtcctgcatactcaccaacgagtccaagctacgctccaacaagtcctgcatactcaccaacaagtcctgcatactcaccaacgagtccgtcctattcacctacttcaccacaatactcacctacttcaccaagttattccccaacatctccatcctactctccaacgagtccaagctattctccaacgagtcctgcatactccccaaccagtccatcttactcgccaacgagtccgtcctattcacctacttcaccacaatactcacctacttcaccaagttactctccaacttcaccacagtactcaccaactagtccttcatactcaccaacatcgccacagtattcgccaacgtctccgcaatactcgccaacgtctccgcaatactcaccaacatcgccacagtattcaccaggctctccgggatatgagccagagcctcctaagaaggatgaaaattag

SEQ ID NO: 6642 - DNA, 2727 bp, Candida albicans
atgtcagacgacgaagcctttgatattgcaggatcacttgcattgaaagatgaagatgattattctgatagttcttcaaatgaaggagaagatttccaagacgaaataatacccctggatgatgaaaaagagccatctccaccaccgaaaaagaaatctaaaccaaacccacaagctttcccatctttggaactttctgacaacgaaggcaacaatgacgacgatgacgatgatgattctaagattaacagttatttcatcaacaataatccaactgccaaaaaggccaaagcaggttcatttgcctcatttggtttgaccaagtttatattggccaatattgccaaaaaaggttataaacaaccaactccaattcaaaggaaaaccatcccacttattatggaaggaagagatgtggttggtatggcacgtactggttccggtaaaactgcagcatttgtgttacccttgatagaaagattaaaactgcgtcaacctggtggtgtgagagcagtcattttatctccctcaagagaattggcattacaaacttataaacaagtgaaagaattcagtcatggaacgaatttgcagtcaattgttttaattggtggggattctttggaagaagatttttcgaaaatgatgacaaaacctgatatcattgtttgtactccagggagattcttacatttaaaagtagaaatgcagtacgatttaatgacagtacaatacattgtatttgatgaagcagatagattatttgaaatggggtttgctgaacaattaaatgaattattggcatcattaccaagtaatcgtcaatcattgttattttccgctaccttgccaagatcattggtcgattttgccaaagcaggattaaccaacccagttttagtcagattagatgctgaatcaaaaatatcagatcaattacaaatggcatatttcaccaccaagaaaaatgaacgtgaagcaaacttattgtacattttacaagaagttatcaaaatgccattaggatcagaagaacaaatcaaaaaattgaaagatatggataaaagaaaaattgattcagattctgaagatgacgacgacgatgaagaacgtaaaaaaggtaagaaaagatacaagtttaagaaggaaagattacctccagcaaatcgattaccatcgccacattcgactattgtatttgtaccaactaagcatcatgtcgaatacgtcaccaaattgcttagagatgctggatatttggtgtcatacatttacggtactttggaccaacatgccagaaagaatcaattgtatcaattcagagtaggattaaccaatgtattagtagtcactgatgttgctgctagaggtattgatattcccgtcttggccaatgttataaacttcactttacccgcatcgtcaaagattttcatccatagagttggtagaactgcaagagctggtaacaaaggttgggcttactcgatagtaaatgaaaaggaattaccttatttgttggatttggaattatttttgggtaagaagattttgctcacatcaatgcacgaagcaaaagtggaaatgttgaaaaaatcactgacaggtacattcataccaccagttgtgaattatactgaaagattagttttagggtcggtacctagagtagatctcgaaactttccaagaactttacgaaaatttgttacgaaataattatgaaatcaaagtcttaaaagatgttgctgccaagggggagaaactctatcatcgaacaagacaacctgcatcgcaagaatcgttaaagagaagtaaagaaattatagagagttcttgggatgatcaacatttgttatttggagaaaatttagaaaagcagaaagatgcatttttagccaagttgcaagatagaaactcgaagcaaacggtatttgaacttaaaggtagtgatgaaagtcttgttgaatttatgaatagaagaagacgtcaattagcacctattcaacgtaaggctaaagaacgtaaagagttgttagctaaggaaagattagctgggttaactcacggtattgaagatgaaatattacgtgccgatggagaaaatggttatggtgttgatgaagatgaattacaagaagcttttgaagatgccgataaaaagaaatcatttagagacccacagttcttcctcagtcattatgctccagcttccgttattcaagatcagcaattatcacttagtacttcatttgccaatgaagcacaagctgctacatttgatttggataatgatgataaaatacaaaccaataaacaagtcatgagatgggataaaaagaaaggaaaatatattaattccaaatctactgacaaaaaatacattatttcagaaaatgggacgaaaatccctgcttcgttcaggtcaggtaagtttgatgaatggagaaaacaaagaaaccttaaaccaacaagtactgttgaagacgattctaataaacgtttcaaacataaacaacaaagagcacctaaattaccagacaagtttagagatgattaccacaaacaaaagaagaaggttgaaaaggctattgaatctggtgttaatgttaaaggtttccatacccctcaacaagaaatcaaatctactgaacagattagaaaggctagattgcttaaagaaaagagaaaagctaagaatgctcgtccaagtaagaaaaggaaatag

SEQ ID NO: 6643 - DNA, 4299 bp, Candida albicans
atgtcatcatcacaagaattatacacatctctttcaaggcgacctccgcaacaacctctaaatgacaaaatgagacatgggtttgacattgattacaattctgaaaaattcttaaattcattagcaaacactttttacatatatttcgatgataaacgtcaaaacacaaatgggaacccattgacagaagaaatgaagcagtccgctgaatactttaagaactatcaacctatatccgattggaaagtcatgaaagagcgacaaaagaccatcaatgcaatattagtgctatgcttaaatttgggtgtagcaccaccggatgtaataaaaccttcaccatgtgctagatttgagtcatggtgtgatccgacaacttttaatgataccaagaaagcaatagaaaatattgggaaaaaccttcagacacaatacgaaaacatttcatcgaaaacaaggtaccgccagtcattagacccctgtgttgaggacgtaaagaggttttgcaatactcaaagaagaaatgcgaaagatgaaaggatcttgtttcactataacggtcatggtgtacctaaaccaaccgctagtggagaaatatgggtctttaatagaaattacacccaatacattcctatatcattgtatgacttgcagacatggctaggtgcccccgtgatatttgtctatgactgtaatagtgctgggaatatagttcacaatttcaaaaagtttgttcaaaagcgtatagatgatgataacgacgggaaccacgatcaaagtgcaccttcgcccacttcggcctatcttgattgcatacagttggcagcttgtaaaagtaatgaattgttacctatgagtcctgatctaccagctgatttgtttacatgctgtttaacaagtcctatagatgtaagtataaggtggtttattattcaaagctctttgaaaaaagggtactatgacgcattacctagaaactcaatagggaatattattattcctggtaatttaaatgataggagaacgccattgggggaattgaattggatatttaccgctattacagatacaattgcatggacctctttgactagacccatctttaagcgtttattcagacaagatttgatggttgctgcattgttcagaaattttttattagctaaaagaatcatgccacatttgaactgtaatccaataagtgatccaccgttgcctgattcggttaggtttcatccaatttgggattcgtgggatttagccatagaccaagttctttccagattattgaaaagtgccaaagaagaaacagttwcaatgccacttgcaggtaacattcaaaatggctccactaaaggrgattctgtgtcttctgcccaacaacaacaagccaatgggtctcaatcggcggcattatttccaaatttgggaaatgttcagtacactacattctttgarcarcaattgacagcatttgagatttggctcaaatttgaaggtccatcgtcgaaaacgccgcctgaacaattaccaattgttttgcaagtattattatcacaagtgcataggttaagagcattaattctattatctcaatttttagatcttggcccatgggcagtctatttatcattgtctattggtatctttccatacgttttgcgtttattgcagagtcctgcacaagaattgaagccggtgttgattttcatttgggccagaataatggcagttgattacaagggtactcaacaagagttatgcaaggataagggatacaattatttttactcgatcctaaattcgccgccaataaatcatgtgggggtgaatggtaatgtagctactactaacacaggtactatgttgattaatgatgatcataaagcaatgagtgcatttattttgaccttgtttatcaaggactttaaaaatgggcaaaggttgtgtttttcttcagaaattgttaccaattgtctaaaatttatacaaaccagtgataatccgttacttagacaatggtgtaatctattattatcgcaattgtggaatagacatcctgaaggtaaatgggtgatttataaaaacaattatatcaccaaattgttgaatttgattgatgatccgatacctgaggtgaggacgtcgattcttgttgcgttgaccacttatctttctgaccctcctcatttggctcctcagcaaccaactaaccctgttgctgtcaacaccaatgatttaagaaaagatgaaattagacaacaagatttgaaattagcgaatacagtgcttggtcttttgggtgatggctcgcctattgttcgaaaagagttggtatttttcattaataaatttgttcaaacatatgcaaaattctttttagttgttgcatttaaccagttgcaagaagaaattgtattgattgaaaatcctaattatttgaatgatttcaggaaaaggtcacctgcgtatgggtcaatattcagttcagtctggaaagcattattgatattgtcagaagatccacactgtgaggtgaagcaattggctgaaaccttgatagattatgtcatggtacagttgaacgaaagtgagttatcaggcttggtaaaagagatgcaagattatttgttaagcaaatcaactatcaacatcagtgaaagtttcaagccaaccaaaccggttgttaataggcaattgggtgaaaaacgattagtctcaagtgcctctattggtaatagacgaaatactttgttaatcgatggatcgtcactaacaacccgatcggcttctgctaacaatatcactagcaacagtaacaatagaaacattaaaggtaatatggatgattcagatgctgagtccattacatcaaagattaaaaatttgtccgtttcaaagcttttcaaaagtttccacattaccgaagaaaacgatttgaatagtttcacaagaatcttgaatcctggtccagttcaatcaaattatggaagtgaatatataccgaaaactgcattttttaagaaaagggatttgtcaaagactcctgaattgccatttgaatctgggtttttcgagtatagttgtgaatattttcaggaaccgcaaatgtcgaaaaatgaaattgatgaaccaggttctaaagagtatgtaaaacgtttatggcgaagaaatagaaatgaatctattattcaagaaactcaaccacaaaaggagatggctttgaggggagaatggaataaagatattcagatccttaacaatataacgcaaccaaaatgtataaagtttacacaatttgaaaaaatattagttgcaagtgatgagaaagataatatgaccgtttgggattggggaaatggtcaaattgtcaaaaaattttcaaacggtaatccttttgggacaaaaattactgacataaagtttctaaatgaagatgattcaccgttattgttgactggttcttctgatggtgtgattaagatttataagaatttccataattatgagaacagtgattctaatgacaaagacgaagatggcttcaatgaagaaaaacgagttgagctagttactggatggagagcgttgactgacttattgttgacttcgaaaagtacgggtttggtatcagaatggcagcaatcaagaggttcgttactagtaagtggtgacgttaaaataattagaatatgggatgctccacgtgagttgtgtttactggatatcccagcgcgatcgtcgtcttcgatcacatcattgacttctgatcaagtggcgggtgatattttcattgctggctttgatgatggtagtatccgagtttatgataccagactagattctcgtgaatccatggtcatgacatggaaaccaagcaaacaacaccctggtttacaacaatcaaactatacaggtttggggtctattagaaatgtccacatgcagcgaggtggatttagggagttgataagtggttcctcggacgggattgtaaacatatgggatctcagattacaagaccccgttttgacctatgccactcaaaacaaatctatgcggactatggatgtccatgaacatgctccaatattgatgactggtcttaaaactgtggatatatggtccacagcaggtgaatgcttgacaacattgaataatccaaatggatcctctggtagatcacttaattatttgtcaagtactacattccatcctcatagaatgatgcttgcaacgaactataaccaaaatagccatatcaatttatatacttgtaacgatacagttgttgaatattga

SEQ ID NO: 6644 - DNA, 1923 bp, Candida albicans
atgcaactttcatggaaggatataccaccggtacctacatctaacgatatgttagatatagtgttgaaccgtacccaaagaaaaacgcctactgttattagaccagggtttaagatcactcgtattcgtgctttttatatgagaaaagttaaatttactgctgaaggtttcactgaaaaatttactgatttgttactgggattccctaatattaatgacgttcatcctttccatcgtgacttgatggacactttatatgaaaagaatcattataaagtttcattggctgcagtttctaaagcgaaaactttaattgaacaagtctcaagagattataatagattattgaaatttggtcaatcattatatcaatgtaaacaattaaaacgtgctgctttgggtagaatggctaccattgtgaagaaattaaaggatccatttgtttatttagaacaagttagacaacatttgggtagattgccaagtattgatccaaacaccagaactttattgatttgtggataccctaatgttggtaaatcttcattcttaaaatgtattactaaagctgatgttgaagtccaaccttatgcattcaccaccaaatcattatacgtgggtcattttgattataagtatttacgtttccaagccattgataccccaggtattttggatcgtcctactgaagaaatgaacaatattgaaatgcaatcaatttatgctattgctcatttaagatcatgtgtattgtatttcatggatctttccgaacaatgtggattttctattgaagcccaagtgaaattgttccattcaatcaaaccattattcgccaacaaatcagttatggtagtaatgaataaatccgatatcattcaagcagaagatttatcagaagaaaaacaagaattattgaagactttaactacagttccaggagttgaaattatgcatgcttcttgtcatgaagaagaaaatgttatgcaagttcgtaatcaagcctgtgaaaaattgttgactgccagaatcgaacagaaattgaaaggtactgctagagttaataatgttttgaataaaattcatgttgctaaacctcaacaacgtgatgatgtggaaagattgccatatatccctgatgctgttaaacagttggccaaatatgatattaatgatccaaacagaagacaattagccagagatattgaagcagaaaacggtggtgctggtgttttcaacatcaatttgaaagacaagtatcttttggaagatgaagaatggaaaaacgatgttatgccagaaatgttggacggtaagaacgtttatgattacttggatccagatattgctgctaaattacaagctttggaagatgaagaagaacgattagaacaagaaggattttacgattctgattctgatattgaagatgaagacgctgaagagattagagaaaaggctcaatggataagaaataaacaaaagacaatgataattgaaggaagaaatagaaaatcattgaagaataaagctataatgccaagagatcaaataaagaaaacattcggtgatatggagaaacatatgtataatattggtcatgatactgagaagttgagagaaaccgtgggtaagaaatcttcagataaagccatgtcaggagttgaaatcttgaaaagaagtcaaggtatcaaagctagtaaattggctaaaaagaaagctgctgctaatcaatctgatcgtcttaatgatggtttgaatgatggtgctttgagatctcaagctgaaagattggctaaaatacaaagaagagaaagaaatagaatggcaagacaaggggaaggtgatcgtcattcaactgctgccttacctaaacatttgttcagtggtaaaagaggtattggttctaccgatagacgttga

SEQ ID NO: 6645 - DNA, 1419 bp, Candida albicans
atgcgtaatgcattgaacaacttggctgatactgttgaaaacccagaacaaacaaccagattcgaaaatgaaatggacaatttctttactttgttcagaagatatttaactgaaaaggcatcaggatccactttggattgggataaaatcagatctccatcttccgatgaagttgttgaatacggtgacttgaacagtgccaacaactctgctaatttatctaaattggcagttttgaaattgaatggtggtttaggtacttccatgggatgtgttggtcctaaatcagtcattgaagttagagatggtaacaatttcttggatttggctgtcagacaaattgaacacttgaacagaaagtatgatgccgatgttccattattgttaatgaactctttcaacactgatgctgacaccgaaaagatcattaagaaatatcaaagccacagaatcagagtgaaaacttttaaccaatccagattcccaagaatttacaaagattctttacttccagttccagaatcatttgatgactctcttgaagcttggtatcctccaggtcatggtgatttgtttgaagctttggttcaatctggtgaattggatgccttgttagctcaaggaagagaaatcttatttgtttctaatggtgataatttgggtgccaccgttgactccaagattttggaccacatgattgaaactggtgctgaatatataatggaattgactcctaagaccagagctgatgttaaagggggtactttaatcaattatcaaggtgaagtgagattattggaaattgctcaagttccaaaagaacacgttgaagaattcaagagtattaaaaaattcaaatactttaacactaataacttgtggatcaacttgagagccatcaagaaattagtcgaagctaatgccattgaagtggaaatcattccaaaccaaaagactatttctcatggcaaatcagatatcaatgtgttgcaattggaaactgccgttggtgcagccatcagacactttaaaggtgcccacggggttgttgttccaagatcaagattcttaccagttaaaacctgttctgatttgttactagtcaaatccgatttattctacttagaacacggtgctttggtattagatccaactagagatgggttctctaacccattgattaaattgggttctcatttcaagaaagtcagtggattccaatctagaattccttacattccaaagattttggaattggatcatttgaccattacaggtaatgttacaattggtaaaggcgttcaattgaaaggaacagtgattattgtttgtaatgatggtgacaaaattgatattccaaatggtgctatcttagaaaatgttgtggttactggtaacttgactatattggaacattaa

SEQ ID NO: 6646 - DNA, 5641 bp, Candida albicans
atggagtatataaataatattttggggctgctgaatcaagtacagctggtggaggaagcaattcctacattatgcaatcgtttacaacatgcaacaatgtcttccgatagaagatcagcagtacttggattgaaaagtttcagtagacaatatcgagaaaccgttgttgaacatggattgagaccattaatctcaacttttagaaaagatattgataatcctcagattgtgaaagcaatattagaaactttactcattttatttattcgtggtgaaagtgatgaagatttgactagaggttggatctctcaacaatctcggcttcaaaatggtaaatacccatcaccattacttatggaagatatttctctagatcaattatcattatggattgctgacgctttgattcaagacgaagaaatcttgcgtctactcattgaaaacctttctgaaactaacgattatcatgccaagttatacacaattcaattattggaatcattggcatcgagtagaggatcaagaacaaaagattgtttattgaatatccccacatccatgtcagtattgtgtctgttgttacaagattcaaatgaaccagtaagaaacgaagcaattcttttactcatggctgtagccaacgacaatttcaatattcaaaaattggtggcttttgaaaatacatttgaaacattatttgacattatagcagaagaaggaggtataagaggatctattttggttcaagattgtctcacattaataaccaaccttttacaatttaatgcatccaatcaaaaattcttcttagagacacagtgtgttcctagattagcaagtttattaggtgaaccagttgatgaaaccggtgatcctgatatgctagatgaaaatgggtttcctgaaattccacctccaattgtctggacagaacaaagaatacaaaatatgattattgcattagaaatttgtcgattattagtttccgaggatacagagtatgtggcgcaaaatcaggataaattatttcaatcaggaatccactacatattgctcaaacttgtgttttctcccttgacagaaaatagtgtcagatcagttgcattacttaccactggtgacacgatttgtgggaaccctaatattcaatttgagttttctaaagtggatgtcccatatatggatccatctttaccaacacaaatccaaccatacgatcgaccaatcctggtcccactttcattgctcaattggtgtttatacataaactcagtacacgcttttgacatcagagttgcttcagcattttgtttgaattcatatttcaaagataataaagactcgaaacttgcatttttaaacgaccaaatcaaatcatacactgatccaacttatttcactagtttacacaaggaagaagaagaagaagaacaacaacaacaacaacaagaaattaatggcaacagtgttccaaccccctttggaaatatatttacaacattgatggattatgacgcagatcttaaactaaacccttacacggcatggtttgcctccttaatcatggtaaacttgtttcttgaggagccagaaaataaagaaattgccagaaacgtgaaaactggagacgaagaggctggagaagaagtaatgaactcaattcaagcaatgtctggactcttggtaacgacactcgaatacaaggatcaaagaattgccatgggatatttaatgcttttaacgatttggttatatgaggatttcgatgccgttaatgattttttgagtgatcaatctattgttaaatcaattctagcattcttatcaaataattcatctgatcaaaatgtgttagtacatgggatggctactattttattgggagtctgttacgaattttcatccaaagattcaccattaccaagatcagatttgcatgctttgttagtgaaaagtttagggaaagacaattactctttgaaagttaagcaatttagatcgaatccagtatttgctgattttgaagaggcactgactttgacttttagtcaagatgcaactggtcttccaacagtatacttaactgatgtttatgtgaatttggtgaaagacaatttcttaagaatcaaaagagcattgtttcatgatccatcatcagagcctcgtggtaaaatatcatacgaactatttgaggagttagataccaaagttttaaacttgacaaaggaattacaaaccgaaaaggaaaatgccgaaagcaatgataaagaattgaatgaaaagattgagaaactaactaatctttccaccaaactcgaaacaaagctcgaagacaaggaacaagaattggccaaaatccaagaagatcacaaactgcttaatgaaaagttcttggtcacggccaacagtttatgcggcataaaggctcggacgaaagagagcgaaactatttcagggccggatcaacaagaactacaagaggctttgaaaaagggtaacacttctgaaagcacattgaagcaattgaaagaaaaacttgattccacagaacaggccaaaaagaaattagaagatggtatcaataatatgactagagacttattccatcttaaaaaactgaagagtgaagctgaaactcaaatcaaacaacgtgaaagagagtttaaaaatttgacttatgaatttgaaaacactaaaaaggattatgaattacaaattaataatttgaataaatcaaataatgaattcaaacagaaaataaatgaattgagtaagaaaatcgaatctttgactgaagataataaatttaatgccaagcaacttgaagagaagttaagagatacagaagaaaacaatgaacatttgatggataaattgagatctgcatcagttgcatacaatgacttgaaaaaggcgaaatcagaatctgaagaagaaacagttaaagccaaagaagagttggaaacacttaccagtaagattgataatcttgaaaaggaattgaaggaacaacaatctaaaaaaaatgaattggaaggacagttacaaaatattactgattctaccaatgaaaagtttaaggaattagaggatgaattgaagagtatcaaaaaatccaataaagaaatctcctcacaaaattcagaattaattcaaaaattggagaaaactgaaaaagatctccaagcaaaagatgaagaaattgataaattgaaagctgagaccaaatcaaatattgataatctaaattcagaaatctctagtttacaatcgaagttgaaagaagcagaagaatctcattcaagtaccaaagatgaacactcttcactttctgaaaatctcaaaaaattgaaagaagagtatgaaaatacaaaaacttcaatgatagccaaactttcagcaaagattgaggagcacaagaaggccactgatgaaattgaaactaagactaaacacatcaccgacttacaagaagaacatgcaaagcaaaagtcacaatttgagagtgaacgaaatgatatcaagtccaatttagatgaagccaataaagaattatcagataatagagaaaaattgtctaatcttgaaaaagagaaaactgaattgaataataaactcaaaacacaggaagaaaagatttctgatttggaaacttcagtggcaatctctgaagataagtcaaagagcttgaaacacgatattgaagatttgaagagagagaaaatcaagttagaaacaacattgaaggaaaatgaggaaacgatgtttgagaaaaaggagcaattgcaagttgtaaatgacaaatgtaaagagcttgaagcatgtttgaaaaaacttactgaaacaaaagagaaagaaattaatgatttaattagaaaattagaagcagcaaagtcagatcatgatactgagcgtaagaaattgtcactattaattgaagacacgaagtcggagtctgaaaagaatgtcatcaagttgaatgaacaaattgagaaactcaaaggtgaaagagagaaggaagtcagggatattcaatctcagttggcagccaaaactaccgattgggaaaagattaaaactacacttgacaaagttttgaaagagaaaagtgatctagaaaagactaacaaggaatcagttgacactttgaagaaagaagtcgaaaacttgaagaaagaaatttcgttgttggaagatcagaaaaaggacgataccaccaaatataaagaacttgctgctcaattagaaactaaaacatcaaatttagactcaaccacaatggaattagaaaagacagagttggagttgaaaaaagtaagaaatgagctaactgaagctacttcagaattaacaaaacttcaagataacaaccaaagtttgacagaagaaattgaaaaaacaaaggctgctctaaccaaatcgtcaaaagatttagaagtttgtggaaatcaaaaactggaacttcaagattcattaaaatcagtgaaaagtgaactcaagaattttgaaaacaaatataaccaagaaaccacttcattaaaagacgaaatagaagaaaaacaaaaagagattgttactttacaaactgaattaaaagataggattctggaagttgaaaaagaaagagctatgcttagtgaaaattctgaaactgtcattaaggaatacagtgacaaaataaagagtttagaaagtaagatcaactcaataaaggagaatcattcaaaagagataacaactcataatgaacaaaagacttctttgaaacaagatattgcaaaactatctcaagatcatgaactggcgcaaactcaattagaagataaggagaatcaattgaaggaattgaaagctagtttagagaaacacaatactgagtccgcaacaagcattgaagaaaagaacaatcagataaaggaactctcggaaactattaagtcattaaaaactgaattaaagacaagtggtgatgcattaaaacaatctcaaaaggaatacaaaactttaaaaactaaaaattccgacactgaactgaaattggaaaaacaattggaagaactagaaaaagtgaagctggatttacaaacagcagatgaaaaattgaaaggaattacagaaagggaaattgcattgaaatctgaacttgaaacagtgaaaaatagtggattgtctacaacttctgagcttgctgcattgacaaaaacagtgaaatcattggaaaaagaaaaggaagaattgcaatttttatcgggcaacaaatcaaaggaattggaagattacattcaaaagcacagtgatatttcggaaaaactaaaggcattaactgatgagcttaaagagaagaccaaacagtttgatgattctaaaaagaaattaactgagttggaaaatgatttgacttccactaagaaggaattggaaactgaaaagacacagacgagtaaattcaaaaacctcgaggaaaggaaagacaaagaaattgtgaaactcaataaagaattagagttattgaaaaatgacaatagtggtgctaaaaaggaactactggaaaaagtatccaagcttgagtcagaaattgagattttatccaagaagttagaagacaaaaaatcggtcatgaaacaacatgatgaattgaaag

SEQ ID NO: 6647 - DNA, 1932 bp, Candida albicans
atgaaaatattgaagaagttattttcctctacaatattttatagtcaaagaagataccattcaatgtcagtcgaaacaattagtgatagtttgaaacaattgggattaagtcaaccagcagccattgaaggtacccaccctcaatataatgtggttgatgtctttagaaactatatcgctgaagaattacatcgtatttcatcagttgacaaatctattatcattcaagctttggatacaccaaaagtattagatcaaggtgatattattgttcctattccaaaattaagattaaaaggaatcaatcctaatgaaaaatccaaggaatgggctgaaaatttcaataaagggaaattcatttctgaaatcaaacctcaaggagtgtttttacaattctattttgctaaaacattattgtataatttggtcattgaagatgttttaaagagaaaatcagattatggttacttacctttgggtgttggtaaaaaagccattgttgaattctcgtctccaaatattgccaaacctttccatgctggacatttaagatctactattataggtgggttcatttctaacttgtacgaaaaagttggctgggatgtcaccagaatcaattatttgggagattgggggaaacaatttggtttgttagctgttggttttgaaagatacggtgacgaatctaagttagcttcagatccaatcaaccacttgtttgaagtttatgtcaagattaatcaagatgtcaccaaggagacaagtgaagccactggtgaaactccagcagaaaccattgatgcttctgaacaggatgaaaagaaaatccaatcctctaccaatgaagaagctagaagatttttcagaagaatggaagatggtgatgaatcagcattgaaaatttgggcaagattcagagatttgtctattgaaaaatatgttgacacttatggtcgacttaatattaaatatgatgtttattctggtgaatctcaagttccacaagagaaaatgaaagaagctaccaaattgttcgaagataaaggtttgattgatattgaccgtggtgccaaattaattgacttgactaaatttaacaaaaaattgggtaaagcattagttgaaaaatcagatggtacttccctttatttgactcgtgatgttggtgaagctattaagcgttatgaaacctacaagtttgataagatgatttacgttattgctgcccaacaagatttgcattgtgctcaattctttgaaattttgaaacaaatgggattcgaatgggcccacaatttggaacatgttaactttggtatggtccaaggtatgagtaccagaaaaggtactgttgtgtttttagataacattttacaagaaaccaaagaaaagatgcacgaagttatgcagaaaaacgaagagaaatatgctcaaatcgaagacccagataagattgctgatttgattggtatttctgctgttatgattcaagatatgcaatctaaacgtattcacaattacgaattcaaatgggacagaatgacttcatttgaaggtgacactggtccatacttgcaatatgctcactctcgtttgtgttccatgcaaagaaaatcaggtatttctatagaggaattagaacatgccaactttgatttgttggttgaaccatgtgccagtgcattagcaagaactttagcgcaatacccggacgttattaaaaaggctgtcaaagggttggaaccatccacaatcgttacttatttgttcagtgtgacacatattgtctcccaatgttacgatattttatgggtttctggtcaagaaaaggatgttgccattgcaagattggctttatatgaagctgctagacaagttataaataacggtatgaccttgttaggtttgactccagttaatcgtatgtaa

SEQ ID NO: 6648 - DNA, 3129 bp, Candida albicans
  misc_feature (1752)..(1758): n=g, a, t or c
  misc_feature (1851)..(1851): n=g, a, t or c
atgtctcaaaataatttagaaacaattcctaaaattttggaacaatctttacatcctcaattttcaaatcaagctgataaaattttaaaatcaattgaaaatgaaccaggatttagtataaatttattacatgttattgcctcgactaatttagctcaatcaattagattagctggagcattatattttaaaaatttaattaaaagaaaatggttagatggtgatggtgatggtaataattatttattaccaattgatgatgtcaataaaattaaattagaaatcattgatataatgattcaattaccaaatcaattacaagttcaaattggtgaagcaataactttaattgctgaactggatttccctcataattggccaaatttaattgaaaatttagtgacaaaattttcattaactaattttattaataataaagccattttattagtatcacatctgatttttaaaaaatggcgagcattattcagatcagatgaattatttttagaaatcaaattagtattgacaaaatttgttgatccatttttaaaattatttattgaattagatcaattaattgataaatctctggataatgaagctcaattgattatttattttgaaaatttattattattagtacaaatttattatgattttaattgtcaagatattccggaatttttcgaagatcatatgaatgaattaatggccataattcataaatatttagtttatgaaaatggattattaaaatatcatgataatgatgaagaagttaatgtattaattaaagtgaaaacttcaattgttgaattattaagtctttatattactcgatatgctgatgtattccaaccattaattcaaacttttataacatcagtttgggaattaattaataattatgtcactaaacaaccgaaatatgatttattagtggttaaatcattacaatttttaacttcaatcattaaaattcctgattatcaatcacttttccaacaagaatcttctattaatgaaattattgaaaaaatcattttaccaaatatttatttccgagaaaatgatgaagaaacttttgaagatgaaccaattttatatgttcgatctgatttagaaggttcagattatgattcaagaagaaaaagtgctactgatttcttacgtgaattgaaagaattaaatagtgaattattaacaacaacagtgatgaaatatgttaatcaatttttaaatcaatcaactaatcatagtgattggagaaataaagatacagcaatttatttatttagttcattagcaacaaagggaagtgtgacaaatattggtgttactagttctaatgttttagttgatgtggttaaatttttcctggataatattgcccaatgttttgccaacaaccaccacaaccacccaccccccactaatactggtgctacgtccgttcatccaattttacaagttgatgcaattaaatatatttatattttccgaaatcaattgactaaagaacaattaatgatgccattacctcgattaattgatcatcttgatattaaatctaatccggtggtatatacatattctgccattacgattgaaaaattattatcaatgacaaattttaatcaagatcataccccaattttcaataaaactgatattcaaccatatattaatgaattattaactaatttatttaatcttatttgtattaacaacaacaacaacaacaacaannnnnnnaacaattcatcaccagaaaaattggcggaaaatgaatttttaattaaatgtattatgagaattttaaatactggtgaagattcattaaatganaataatagattcccaataattaaycaattattaacaattttaaaattaacggcgaaaaatccttcaaatccaaaattttctcattatatttttgaaagtttaggattattaattaaatatggtatcaatgataatgataatgataataatgctgctaatcaatatattgaaattattattcctgctttattagatattttaagtgaagatgttcaagaatttgttccttatacgtttcaaatattggcatttttattagaaaaatatcctaaacaacaaggattaccagaaacttataaaaatttgattcaaccattattatcacctctggtatggcaatttcgtgggaatatcccagggataacaagattattaattgctattttggaacatgatccaaattcaacttttataaatggtggcgaaaaaactttaactccattattaggagtatttcaaaatttattagcaagtaaaattaatgatggttatggatttgatttaattcaatcaataatgttgaatattcctatacaaccatcattacaatcatttttaccaaatattgctcgattaatgttgacaagattacaaaaatctcgtacggataaatatgttaaacgatttgtaacatttttatgtcttttatccaccatatcattacaaggtaccaccactactactaatgttaataaagatattttgaatggtgaatttgtgattcaatttttggaatcagttcaatcaggtcttttccaacaaattttaacatcatttatattaccaacttcatcaattttaactaatttacaagataaaaaattagttaatattggattatcacaaattttagtgacaatttcaacaacttctgaacaatatgcccatttgactccattaattttagaaactttaatatctaatttgaattcttatgaaggtatttcaaagagctcaaccaataacaataacaatggaatcagtagtagtagtagtactattgctactactatctctggtggtcaacaaccattgaatgaattagatttagatttagatttaaattttaattttaattcatttggatcacaatattcaaaaattgtcctgatccaaaattcatcatttgatccattaaataatttaattaaaaataatgattttaataatattaaattgataatttttaataatattaagaaaattgatattaaatatttatatggtttaaattcaacaaatcaagaaattttgaaaaaattgggatttctaagttaa

SEQ ID NO: 6649 - DNA, 1632 bp, Candida albicans
atgcatagttcactggttcatgtgcctcttatagagtttcttaaaaatagaatataccttggcgcttatgatcatcacaaaagggatacagaagatttggcatatttcacagttgaagacgcattaccatataatgcattttacatggatttcggacctttgaacattgggcatttatatcgttttgcagttcttttacacaagaaattaaacgaagactcaacccaagggaagggactcgtgatatatagttcgacatcccctaaggaaagagccaatttagcatgtttactatgctgttacatgatattgctccagaattgggctcctcatcaagttttgcaacctattgctcaaatcacgccacctttacaagctttcagagacgcaggatatagcagtgcggattatgaaataactattcaggatgtcgtgtatgccatgtggagagctaaagagagaggtatgattgacttggccaaatttgatttagacgagtatgaacagtacgaaagagtcgaccaaggagattttaacgttatatccaaagatttcattgcatttgcatctcctcaacaaagcaagcgaggaggattaaacgaaccatttcaaaaagttttggagtacttcgtggaaaacaacgtccagcttgtggtgagattaaactctcacttatacgacgcaaaagagtttacaaagagaaatattaagcacattgatatgattttcgatgatggaacttgtcctactttggaatacgttcaaaaatttattggtgctgcagagtgtattatcaataaaggtggaaaaattgcagtacattgtaaagcagggttaggaagaaccggttgtttgattggagcccatctcatatacactcatggatttacagccaacgaatgtatcgcgtacatgagaatgatcagaccaggaatggttgttggtcctcaacaacattggctttacttgcaccacgatgattttagaagctggagacatacaatgatagtagacaatagacccgatcctttaattggcaacttgttcccattgtgctcttatgaagactataaacaaagactaaaagaggcaaaaagaaaagaaagattgcaattgcaacaacaattgacatctccacttgctgattcttctgtaataaataccccgattagaagacgtaaggtgagtggtgctttggcatctaaaatccaaactgtggtacctatcgagtctcctggacaaccaagaaaatattttgaggactctgaagatattgacgaggtagaaatggtgaacaattctgacgatgaaaacactatgccagatataattcaaagctcaccagcaaggtatgactcagtgacaccaaaaacaaaggataaattcttgattggagagtttttgagatcaatatcaaccaacagtgtatctagtcagcaatcaattcatattatcaagacaacaacaacaaaaacagtcaatgaaacattatcatctccaccaggtacatcccccacgaatgttttgcgcgtgtctaaagccagatccaaaaataggatcgcttctggaaactcacaaacatcaagagcacactctggtggtgtgagaaagttaagtggaaagaaacattag

SEQ ID NO: 6650 - DNA, 4608 bp, Candida albicans
atgacatcttctcaaggcaatgatattttgaaatttcccatccttaatattcaggaggacatggactacccagtcccatttcaagatccttaccaattggcattatttctgcagaacaaacaactattgattgcaaagagaaaactagttgtgatcaaaggatcaatcataatgaaagttctaacatacgaagaagacattgtgacagcaacgtatactcatttctcaaattctcaagaactagaagaggtgttggtcgttagtttgaagaagcatattcatgtatactaccctgatggtaagtcatatgtctgcagtttaccgtttgcattaaaaaacgcattaccctttgaatctggattagtattacaacgagaccaaaatgagtcattaattccccacaacggtgcactctatagcaatacttcacatttgaattcagcagcgattttgaccttggttgaccccatgggcgatttccggattgtagctactgcatcaacatcagtgatttcatcaaaagaagaagtaatgactttcccaagaaaagacatgagtaaagtgtgttccctttgtgttactttcaatgcttcagatgggtctatcagtatatatcacgtcaaagcgcccagccgaactactacgtttggcaaaacacaactggcaaggaatcagaaacgaaggtacggatcaatcacaacacccaatccatcacgtattttggaagaagagaatggaactgagccgttgcactcaatttcactcaatatggaaaagaaaagaacaagcacattattatctgatatctcatctgtgggaagagtgtccagtgactgccacagtttgtcacaagatttttcagggtttaagaaggacatgatactatcaagaatcgagagttttggaaacagattgcaaaaggaccaattgagaattttcaatatctggtttgaagatcaagagggtgttgtaattttcaacagaataaggaaggaatgtgctgttttgatttatagaaacccctcgtttagccgacatctgtcagctttcaaaacttcttgtcttgactgcatccccctaacttccacaaaacatgaagggaatttgatcatattgacagagcaccaaaaattttcaattattaatccatttctcggtgtgaagtcggcttcacatacatttggaaacaaattgaaagtccgttcgttgattgactcatacgattccaaattagctttgaagttgatagatggatcagagatgataataaaaatagtgttagagccatcttctgaacttgttaagatgtgtttgatgtgtttccggtatttatcgggctctagtatcaaccatattatgtggatgctatggagatcggcctatgtggaaattaaatatgccgacgaatgggaagcctttgtcgctgctttgttgtcattgattttccccttcagtgaaggggcacagtgtgttcagaacgaaattaccaaattactacctgtggcaaaacgtattcatgaaacttcagatgttaactataacttgcatgatcttattccatatatcaccatttctttgcatttaattcgagaagaaataagattggattcaacaaaagccaaatgtttaaacaatatcaatttattattatgccaattaactacttggatgggttggccagctccttggatcaagtattattcaatcaagccggagaatatagatccaaacactcgattcttactggcattgattcttgaagcacctccaaacttgttgagatctttagcgagtttatttaccaataacatagtaaggtatctaacattctcacaattagttgaagaaacagaaactgttgatttattggtaactccgagaactttttacgttttgaaactatttgaagttcttgtgtcctcacaatatgggccaagtgcaattgtgagtttgatgttggagtttggcatcaccaaagatttgcttgaaacgtatcccttgggtatatccatacctctaaaggaagccttgctgatatgccaagagagcccagagtttgaatggacatctcagacacttgacttggtgggtcgaaaggacttgaacaaacttttcttggatgcagattttagtgctgatatcaatacggaaccccatacaagcactaaagatttgtcatctttgctcaatgaagttttggaagataacgaaaacttttctccatgggatggacaatcagaagcagagcgaatgaatatcacaaaattgatctttgaggcagacagaagatattttgagataacaacgttgctacatcaaacaaagacccagactgcttatctcaaagtagacgagaatgtgacagaatacgatttggttttacaacaaagagagttggcagtaatagtagctcttcgtacattaactataccattgggtagagctgctttggtatatgctagtcgaaatcccttgttgacagaaaaattccccattccaaaatttaatttgaatacgctaatatcaccaacaatgacaaatattgtttattcggaagatagagttctgaagtctttttcagaatggggtcacttccacaatggtgtttcatctgggctaagcattgggccatttgcaaaggggattagtggtagttggataattttcaataaacccccagaattgaatgcccaacatgctgggtttcttttgggcttggggttgaacggccatttaaaacgtttggaagaatggcacatttataactatctcggtcctaaacatccactcactagtattgggttgttaataggtatggcagctagtttgcgtggcaccatggataacaaattgacaaaagttctctctgttcatgcagtggcgcttttgccgcaaggggcgaatgatttgaacgttccaacaatggttcaaacagcagggttaattggaattggtttgttgtatttagaaagtcagcatcgcagaatgagcgaagttttattgtcacagatcaccgcttcggtattgcagaacgacacagagcaagtccacgaagggtacagattagcagctggtattgctctaggattcgtcaatttaggtaaaggtgatgatttgagaggtttaaatgatacccacgtgattgacaagctaatggctttagctatcgctatgaaggattaccatccagttcaagaatcaggcaagtcatgctgtggggccataatggcattggcattcatatacttgaaaactgaaaatgtgaatgttgccaataagctaaaactcccagaaaccgaacaaatgctagattatattcgtcctgatttgttatttctacggtgcttggctaagaatttgattatgtggaatgaaatttcatgtacagatacttgggttgcctctcaaatgccatcgtcagtagctcataaatacatgtctggcaatggacatgaagtggcttttgagcatcttgatggtgatcagttgacgtatttcaacgtattaggtggagcgtgcttgtcgatggccctaaaatttgcatcttcccataatttggaagccagagatactatactaaaatatcttgacaaagtaatgcaattaagtgcaaaacccgcattaaactatgaccagaaaattgcatacaaggggtgtgtgaatcttcaaaatattttagcactatgcgcttccgtgatcatggcagctagtggtgatttggaagttttccgtcgattaagagtattgcataacgatacaaataaaaaaatgggatttgggtgtttcatggctattaatacggctttgggatttttgtttttaggtggcggacagtatgcttttgacagctcaccatttgctattgcttgcctagtcacatcgttgtatccaatttatccgacagagaatagtgaatatgaaatacacttgcaggctttgagacatttttgggctttggcaatacaacctagatgcttgatcgtgcgagatatcagtacgggcagaccatgcaagattccggttgcaataaacatgaaggatgactcagtcatagagagtatctcaccttgtctacttcctgatatcaacgagattctaactttgaaaacaaactcgagtgctcatttcgaagtgattttagactttctgcttaattccgaggttttagaaaaattcaaacaatctttgactttgtatgttgaaaaaagcaataatcattcagttctaaaaccaaatgtgaggtcagttttacagaattatagtcaaccagtgagaccagaggaggatacgacagatatacttagtcctcaaatgttagacaatcttgatgaaaaggttaaagcagcgtggtatcgtgaaaacactaatcacgtggagctggatttgcgttcgtccagtgtacgttcaggattatcggtattcaacattattgacaaccaattggaattgataaacaatgcacaaacgccaaaatccgttgaagatatatggaacctcaaattattatttgaatatgctaatcatattgctcgaaataacaaattgaattacatatctcttgagttcattgagggattaaaacataaactatggagagttcgtaattaa

SEQ ID NO: 6651 - DNA, 1377 bp, Candida albicans
atggtgcaaataacagaagtaaaagaaaaccaatcatccagagaaagcagaactgctgctcatactcacattaaaggattaggtcttaatgaacaaggcattgccaagccaatagaaggaggatttgttggacagaatgaagcycgtgaagcctgtgggataattgttgatttaatcaaatcgaaaaaaatgtctggtaaagctgtgttaatagcaggtccaccagcaactggtaaaaccgctttggccttagctatatcccaagaattaggtcctaaagttccattttgccccattgttggatcagaattatattccgcagaagtcaagaaaaccctggcattaatggaaaatttcagaagagcaataggtttgagaatcaaagaaaccaaagaagtttatgaaggggaagttattgaattgactcctgaagaggcagaaaacccattaggtggatatggmaaaactatcagccatgtgattgttggattaaaatcagcaaaggggaccaaaactcttagattagatcctgtyatttacgaaagtattcagaaagaaagagtaacmattggggatgtgatctacattgaagcaaacacyggtgctgtcaagcgcgttggtcgatcagatgcctatgctacagaattcgatttagaagcagaggaatatgttcctttaccaaaaggggaagttcataaaaagaaagagattgtccaagacgttactttacacgatttagatgtagccaatgccagaccacaaggaggacaagatgtcttgtcgatgatgggacaattattgaaacctaaaaaaacygaaatcacwgataaattaagaactgaagtgaacaaagttgtttccaaatacattgaacaaggtgttgctgaattggtgcctggtgttttgtttattgatgaagttaatatgttggatatggaaattttcacatacttgaaccgtgcattggaaagctcaatagctccaattgttgttttggcatcaaacagagggttaactacagtaagaggatctgatgatggagtcaaagctcctcacggatgcccacctgatctaattgatagattgttaattgtcagaacattgccttacaatcaagaagaaatcaaaactattattggtaaaagagcaagcttagaaggattgacattgactgatgacgctttagagaaattgtcaaaacaaggtttgaccacatcattacgatatgcagtacaattattgacyccagctggtgttttaagtacaactgcaggccgttctgaaatcactgttcaagatatcgaagartgtgagttcttattyttggattctcgtcgttcaacaaaagtcttgcaagaaaccaaaaccttcctttaa

SEQ ID NO: 6652 - DNA, 3168 bp, Candida albicans
  misc_feature (1745)..(1745): n=g, a, t or c
atggcagtcctgagagatcattattttaaattgggttctgaattacccaaagaacgtttgaatgcagccactctgttaatttcagaattagttgctgcagataatgaagaagaatggtcatatgcgttgaatagattacttaaagggattttaactactagacaatcagcaaaatttggttttagtatggcattaactgaagttgtcaatgaattaaataatcggggaactttaactgttgggaaatatttagatttacttgttgaaactacaaaattaaccagttcaatgaaaggtaaagaacaacgagcagttttatttggtaggctatttggtttacaagtattaattaattctcaaattattattttgaaaagtgaaccggaagatatgttacaatttgttgaaattttaatggaattgagtaattttaaaaattggattcgagaaactggaattttcaccttgatacaatttataaaattattagataacagtaatgttgaatatagtaagaaaatttatatcaagatattgaatatggttaataatttgggattgaatttatcaactgaaggtttagcaatttatttatcaattcctcaaagtgcccaattatcacaaaatgtatctaatatgaaagcaaattggaaaaatggtgatccattctataagggaaatttaccaatattagccaaagttttgaaagatgttgaggtaatcagtgatgaagaaacaggggatgaccaaaagaagaaaaatcaacaaaagagtagttggaattctcggttaccatttgtgtgggatttaatcgttgccaaattcaatcaagttgctgatgattcaaatgttgaagatgaaatgcaagacctgttggtcacttcaaagaagagaaagaaaaccacatcaccaaagcataataataaacgtgctaaaatagaaccagaatatatttcattaaaagaattctggaaagttgttgttgatgaaactttattttcagaaaaatcatctaatgaacgtaaatattgggggtttgaaatttttactaaatttgtcacatctttagagacaacctcactggttcaatatttatttacaccaaattttatgagatgtttaatcaatcaacatgcatcatcaacgagaatgttatacaagattgctcaacaaactttaaaaacttttgttaaaaccattcgagaaaccaagcctgaattgggtcctattgttttactgtgtttattagatgaatctaaaggtggatgttggaattttgatctaattagtaaatctcataccattgatgaaattttacaaataaaaacaaatgttaatcaatatatcaatattttattagagaattttactatcaaattacaaactcaaacaactttggatgacactagcaacaataataaaaattctaatgataatattttaaaatggtatttggataaaattgtttccttaattaaacataataacaataatcaacacaaattatctgatactgttttggaatctattttaacaaaattacttcaatattcatttttcgacaccaatgatattaaaatatcaaaatttttacaatctatttgtaaagaaaaattcaattcaatattatcagaaattatcactttaaaactttcccatagaaattataaaacttggtcaccattttgtwwtaraatcattrmcaaattatctcragatccrgaaaayaaatgtcttgttgaatntgatgatgaaatatctatagttaamcaagaamctgaagaattattatccmccatcattgaattaaacaccaaatcttcagataaattgtatatttttgaattaatgttttcaatgtgtttgatycaattgtatatggaagatgaagagactatccaggtgattaatgaattgaaattagtatttgaaaatcaattyactaccgccaacaaakatgacaacgaagaagatgacaacaaagtagatgataatttagtgttgactgaaattgtattgagttttatttcaagaaaatctactttatttaaaaaattgtcagttctagtttgggaaaactttttatgtcaagttgatgagatygggaaactacgtgtcaatgaagcatgttttaaaytattatttgatgtattagaagccaaagagaataaacaaggtcaagaaaaactttttgagggagatggggaattccaagaargtgacggtgatgaagaagacgaggaggaggatgaagmggccgaagaagccgaagataacaacgagaatgatagcagtagtgatattgatagtgatagtgacaaygacagcgacaatgtcagtgagtyagacaacaatgaagatactatcactgaaattgacaaacaaactaatttaaaactagctcaagctttaggaatccccaccaaggaatcaggtgaagttaaatttgatgagttagaygacctttcttccratgatgattatgaatctgattcaatggacgatgaacaaatgatggcaatggatgatcaattatcgaaaattttcaaacaacgwcargacacaataactaatttggccactggtaacaaacgtaaattggaagttttagaagctaargaaaatatgattttcttcaagaatcgagtattagatttattagagacttttaataaagtcgcagtaaayctgcattttaatttggcattcattgaacctttgattaatttgatgaatttgacattagataaaaatttgggagttaaagctcataaattattgaraaataaaatctccaaaactaaaattgacagtgaagaattaaagaaatattataatgatgatccattggaatattatcatcaattaatcaatttaattgaggaattacaaacaaaggcaaacactacacaaccatctaatcaatcagttgtacaaagttataatcaaagttgtattatcattgccaaaaacttgttgaatttagatgaatcaaatatgcaagcaattgttgatatttattgcaactcattaaaacaatggtgtttacaatctgaaagcaaattgcaaccttctttgtttttcgatttcatcaattgggtcaacagtaagaagagtaatgcttctcataatcaaaaccaaaaccagaaacaaaaacataaatcttag

SEQ ID NO: 6653 - DNA, 1263 bp, Candida albicans
atgtcatttattaacatttgtcgtgataacacggatcctttctaccgttataaaatgcctccacttcaatcaaaaactgaaggtagaggtaatggtattaaaactgctattgtcaatttagctgaagttgctcgagctttaaatcgtccaccagcttatttaatcaagtttttcggttatgaattaggtgctcaaacccaaattttaaatgatagatatttagttaatggagcacatgattcaaatgaattacaagattcattagatggttttattaataaatttgttttatgtggatcttgtaaaaacccggaaacagaaattgttttaaaagggaaagattcattagaaagagattgtaaagcatgtggtaaaatttctatgattgatccaaaacataaattatattcatttattgttaaaaatccacccgataataaaaagggtaaaaaatccgctactgcaactgctaatgttgttggtggtggtaaatccatttccgatattgcttctggtcataatggtcaaggaggtgaacctggaaataataataataataataataatggtggtggtgccaatggtgaaaatggtgaaaatggtgaaggttatgaagatgatgatgaagatgatgatttattagctaaaaaaattaatgctgaagtggcacaattaaaagccatggaaattaaagatgatgaatgggctgttgatatgtcacaagaagcaattgctgctagagcaagagaattagaaggtttatcattacaaaataataaatttgatgaatttggtgaatggttattaaaagaatctaatggatcaaaagatgatttaccttctgatgtcgaaatatataaacgtattgttgaattagaaattgctgatactccagaaactttacaagttttaggtcaagtattatttgatgatgatataataaatcaaattgaacctcatgttggtttattaactaaattaattaatggtgatgaagaatttgaaaaagctttattaggtggtttggaaagattttttggtttagaaaaaccaaatttaattccccaaattccaaaaatattacatggattttatgatcgtgatttaataagtgaagaagttttaattaaatggggttctaaagtttctaaaaaatacgttccaaaagatgtttctaaaaaagttagaaaagctgctaaaccatttgttaaatggttacaagaagctgaagaagaagaagaagaagaaagtgatgatgaataa

SEQ ID NO: 6654 - DNA, 1443 bp, Candida albicans
atgatttcgagatttgtcagaactttagcaacgtcggccaagtttcaggatgttgtgatcattggaggaggacctgcaggtttaacgttactagcagcattgaaaacttcccccaaaactaagcatttgcaatgtacacttattgagggttcttcattggacaatgttcgaaaatttcataacgatccaccagcagactatacaaatcgagtgatttctcttactccaaaatcaattgaatttatgcagaataaagttgggagttgggattttatccatgaagacagagtaaaagcgtatgatgggatcatagcttatgattcacaagacgcaaactcgagaattgagtttgatattagtacaatcggacaaagcacgttagcagcaatgtgtgaggttattaatatacagagctcattgttggctaaaattgaaagcctccaagataaatcaactaccattaaggataacaccaaggttgtggagattgttaacccaatagaaccagatttggataatcacaacttgactgaaatagataccaatgttagtgatcctaaattggattggccaattgtcaaactagaaaacggagaaacaatacaaacgcggttattggtgggggcagacgggtataattctcctgtgcgtaaatatgcccatattgagtcaagaggctggcaatacaatacctttggtgttgttgctacagtgaaattgcaatacgaagatttcagagcagtgggatggcaaaggtttttgactacaggccccttggctatcttaccgttaagtgaagacaatgccactattgtttggtccagcactccggaattagctgacttgcttttgaaagtaaatgaaaaaatattcccacatcttgtaactgctgcaatggtgttggaagaagttgacttgaactacatttacagtgtgttgcaagaagatccaaatgatttttctgtattaaaggacattgaatggcgattatccaaattcaatcccgaagaattggaagaacgatacccattaccagttgttgatgtattgagtggctcccgtgctagattcccattgaaaatgtctcatgctgatacttatgttgctccaagagtagcattagtcggagatgctgcacatacgatacatccattagctggtcaaggattgaacatgggacaatcagacgtggctgctttggttgaagctttggaaaaagggattgatcgaggtatggatatcggttcaactttggttttagaaaattacgttgctaatgcttggccctcaaatcatgccttgctaggcatctgcgataaactacacaaaatattctcaactgatttttacccgttggtgtgggcaagaggatttgggatgaaatctataaattcatttggtgctattaaagagttaatgatgaaaagcatcagtggaagatag

SEQ ID NO: 6655 - DNA, 2736 bp, Candida albicans
atggaaaggaaatcatttttagatcaagaagcacctgaaggatatgttgcaggtctggcaagaggtgctgttggatttagaaccagtacatctccagatagtttcaatcgaggaattgccattgtacaaaatgaagaagaagaagaggatgaagacaacaataataaaaccacaacccaattgaatgaaaatgggattctatctacaaaaaaacgaggtaaagaagatgaagatgatgaagaagccgatcgaatatataatgaaattgaaaaaaaactacaatccaaaaaaaggaaatccccaaataataaaaatgacagagccaagccgacagtcaccaccaccaatgacaattcttctactcagttttctgatttgaaacgacaattggcaaatttaaccgaagatgattggttaaatctacctgaacctggtgatatgacaaggaaaaataaacgaacaagattattagaacaacaacaacaaagaatgtattctgctcctgatacattaatatccacttctagttcagccactggtaccaacacaacaaatttcaaatcattatctgaatcaagagataaattattagggtctcaattggataatttattacctgcatatgttaaaaccaatggacaatcgataaacaattccagtagtgttagtgaagaattacaacaaagcatattgaatatgacaggagttgaacaagattcaaaatatgctaatcttcaaaaaaatcgagttattttatcatcattacgtaaatctgaaccttataaaccaagttcatggattctgtcagcaagattagaagaacaagatgggaagaatttaaaacttgctaaacaatatattttagaaggttgtaaaaaatgtcctagaaatgatgaaatttggttagaaaatattcgattgaatcaatctgatattaaattatgtaaacaattaattactaatgccttgaattataatcctaaatcagaaaaattatggttaaaagctactgatttggaaactaacaacataaacaaacgtaaagtattaatgaaaggtttagaaaaaatacctaataatgatcaattatgggagaaattaattgaattagaaaatgatcctaatatggtgaagaaattattattaaaagcagttcaattatgttctcaaaattgggaattttggtcagctttattaaatatatccaactatgaagaaagtaaaaaaatcttgaatcaagctagaaaatctataaaaggcgttaaaaatatattaaaagtttggataactgcttgtcaattagaagaaagagaatatggtgaagaaacaattgatattaataaattaattaaacttatggataaagccatgaaagaaatttcaatttatcaaatgacaaaggatgattggtataaattagcttgtgattctgaaagagaaaatttcaaagtcactactaaggccataattattagttatttgaagtttaaggggttagatcaatcatcaatatttgaagatgttgataaatttttcaatgatggatatattattgttgctaaatcaatattagattatattgttactaattcatctaatgatattaataaatggaaaaaagtctttagtgtgattaaaaaattcaatcaagaattaccattattgttttcatattatgataaggcaatttctttaaatcctcaagtaccattattctatttgatgtatgctaaagataaatggcaattatctaaagatatcccacaagctagatcaattttaaattcaggtgaattggcaaatccaactgatttatcaataaaatttgccattattaaattagaacttataacaggtaatttactaaatgctgaaaaatatattaaacacataattgataccaaaccaatggaatcagagaaattttggtataaatatattcatattctaagatgtcttaatagtgatataaccgtattaaaagatgtgatacagaaggcattgaaactattcccgaattgttggaaattatatcttcaaaatattcaaattttagaagatattgatgaattggaacaagcaagagaaaatgctttagtgggtgttaaaaaatgtcctcaatgtatatatttatggataaaattatctcaaattgatgaaaaagctcaaatcataattcgagctcgttcaatattagatcaagcaatattgcaaaaccccaataatccagaaatttgggtttataaaatacaatttgaaaaacgaattggtaatttatcatcattacaaaatttaactaataaagcccttaaacaatttcctactgatccttggttatggattattaatttatcattaatcccgaaaatgtctcaacgtaaaacaattttcttggatgctttaaaggcaactaataattcaaatttaatattattgatcagtggggtatttttttggtttgatgggaaatattccaaaagtaaaaattggtttgaaagaagtttacaactggataatactaatggtgatatctggagttggatgtataattatttgaaaaaatttggtaccctgaaagaactaaactcatttttaattgattatgaatcaaaatatgattcaattaataaaggtcattttttcaacaagatcaataaagatattaaaaattataacaaatctcctaaagaaattttagatattgtcgctatagaagttttaaactatatcaaatga

SEQ ID NO: 6656 - DNA, 1698 bp, Candida albicans
atggtggaaaaacagtttaacatagacctagagttaaatgatactggtcatatagatccattcttacaagatgaagataaattgaaacttgaggaactaattccacgaattttatttgaacgtaaatcatttttgaatgtgacggaggattctttgagaaaagaaatagacaattcattgaagatttccgaagaggatgctttagacactgaagaaagtagagaggacacagttgaagcagatcaacaagaagtgttcaataaacacaagtttgaattatcgaaaaatataaacaatgcacttaatgaaacccaactttccttagattttgtatccttattaatatcttcagtgaaaccaagtttggcaaaatctaccatttcaccacacttgtcaaaatttgtcaaaccgacatctttaaattcggatagattgggtcaagatagtaatgataatcaagagagtaaggctactgattcttttggacaaggatggaaattggagtcacttggaaagataaccgatcttttcagagaagctagtactaatttaaacgatcaagttatcaaagaaagacgatattggaatatgataaatttggtgcttgccaacgacgaggttctatttcgaatgagggacccccaaaataatgctagagcaataggagtgaaatatgggtatggagattcaggatcaaattttcacgaccaagggttggcattgttacgcaaggacaaccaaacaggagaaatctcatttcaccccatatcgtcaatcaacaatgctaaaattgtagaaaaagtttcgagatttattagagtgaaaattttgagccaaatagatggggactatatgcttacaggacagtcaatttttaattttgattttgaaaaaagcaagcaaagcataattaatgacatcgaaaaggctagattctttttatttgaggaggacttgtttcatcaattgatacgcgaggccaaattgttggtaaactacaatgtgtcaatcatatcgaataaaataataattgaaatcaacaacattattattgaaatagagtctatcgtgtatgatgagttgaatgaggaggaactagaaaactattaccagaatgtaaatgaatattccaccttacacaataaaaagtgtcagcttattttaaactacttgaaacttatgctttgttgttattacaaatacaatctcaaattgaaacagaaggttccaacagcattgactaaatggaagcagagtaactcccatcctttgattttgcgtccgttagtgggtaatatgaggcatgagttaaatttgctaaatatgaagagtgttttagatcgattaatgcacgctcatgagagtgaactttcttattccaaactagatgtggagaagtttattaacttagccacaagaagcaaaaagcaaaacccattccaaaagtcaattgaaaagccaatttcaaagttccatttagttttatgcaacaaaacctctaatatgttggacgtcaacatacaattgacaactaatgagctgtttgtcaatctaatcatcaatatgacaattattagatttgaaacagaagacgattttaagaacaatgtcaatggtattaacgttctacagcttgggttcagtgatttcaatgaaatcgaagaatgcttggattggtcgatccaaaattttgtatag

SEQ ID NO: 6657 - DNA, 3738 bp, Candida albicans
  misc_feature (1998)..(2049): n=g, a, t or c
atgagtgaagtgaaaaagaggaaaatctattcttcttcatcagttaatgttgattatggattaattgaacaattaaaccagataatactgttgtttgtaccaaaaggagaaaacaccacaaccgccaatgacaatatcaatccattattaatttcatttattgaatcaagaaatttacctaaaatattatcaatatggtcatattattcatcaactaatgatttccacaatttgattgatatatcgattaaattatcaaaaatcacttttcaaattgatcaaattaaatcttatttatcaattccaatcaaacaattaattaatgaattttataaacaaattttaaataattctcaatatatgaaaatcatatatcgagcattaaataatatgaaaccaagtataactatagctaatattcgaattttaattaatatgattaaatttgatcctttgattattggacaagaatttttaaatggatttgatttaacattaaatgtattaccaaaattattaatccctaaaaaatatgaattagaaacagaagcaaattccttgtcagcaaatgaaagtttccaatctagtactattagatctaattttattagattttggtttgaattatgttctaatgtatcatttattcatcgtcaagatttattacttaatcatcggaaaatccttaataatatatggaaatatttatcaattgattcaattgaattaattgaatttattattgatttcattgatttgaaaatatttcaagaattgaattttaaacgatcaattaaatgtaaaatattgaatgaaaatttcatttataaaatatcaattttattcactaaatttagtaacagtactaatactagcaaatccaagtttattacatttattgataaattagctattgattctaaatatggtttaagttttcctaatgataaattatgggaaaaagattctaatattggagttataattgaaattaataataaacaatttaaaattgctaataaattattatacactttagttactagtcttaaacccaatgaatcaaatgatcaattacaatatatcataagagtattaactcataatcaagaattaattgcaccttatatgaattggatagttcaacatggtggtggttatcatgatccttcattaacttcttggtggatcacttatactttattatattcacaaattttacaaatccctccctcaacaggtaataatagtaacaccactaaatttgatagtaaattaattagtgaaaatattattttggcaccattagggaaaactgtcttaattaatggattaacaatcattaaaaaacctttaattattcaattaacatttcaattgattttatatattttaaaaaaattagaatcatttttgaaaatagttaatgttaaacaagatttaattgatttagttttcactcaattacctgatttaaattcaataattcaagtaataaattcacctacacttttaggtcaacaactgcaacagtataaaattattaaattaactgcattaactattattgagaaatatgaatcattattaccttcagttgaaactaccaccactaccactagtaacaataatatggttcaaaaattagtatctatgggtatatctacatttacagaaaacgttgataacaatttaaccaattatgatttaattttatttgatttatatatgaaaattaataataatattgatagtggtcaagattttaaatggtggaataaattaactaataattctaattcatttttcaccgtgttaattaaatttattatcacaactcaaaccattcataacaacagcaacagcaataattcacaagttataattgtaaaaatttatcaattattgaataaattatgtaatgataaaatgttatttaataatcaattattagtatcaccaataatggcattaatttattccttagatgataacatnnnnnnnnnnnnnnnnnnnnnnnnnnnnnnnnnnnnnnnnnnnnnnnnnnnnattgattatattaaattatttcaaatcagtttaaatcagttaaattgtttgaatgaatcacctaatttaaaaaatattgaattgaaatattattcatcaatgattttatatttattatttaattttgataatcataacaatagttctcataacaacaacaacaacaaattatcaacgtttatgaatttacaattattattaccaaaatatttaggtactaatcgaccagaagatttattaattaaatcaattttaattaaaattgaatcaaaaatttcaactagttggatgattaaagtgaataattgggaattccaagaagaagaagaagaagatgatgatgatgattcatcttttaatagacgactcattaaagttgataatggtggacaattaacaatttgtttgaataagaagatgatcaaaaattcattaaattcaattcaattatcattacctaattttaatgatattcttaaaagtaataaaagcaagaataataagacgaccaagacaatgactaatttatcatatgatgaaaaatggaatcaaataaaagaattttatcaaattagtaatagtattcttgatgtgaataaattagcttatgatcatgaatttttaatgatggttattttaaataatgatgaattattgaaatatcatgaaaataaactgaaacctgaaggtaacaataaagatgagaataaatcaacaactctaaaagaatcatcgattaattattcatttaatattaaaaatttaattgatacaggaattttacaagtgattgtcattagtcttggtgataacaataataataatgaatcaattaaaaaaattgctcaaatcattcttggtaacattttacaatcaataaattgtaacattgaagaaggtgacaataacaataacaataataatgacattaataaatcttttaaagataaaaatatttatcgaatttatttatcaacaatattattcacattaagaaatcaacaaacaacaaccattcctcatttgatttggtatatatggagtcaattcattccaatattatctaatcctggtcattttctttatgataaagtcactcgatttgtattatcacatcctatgattaagcccaatcaaatcccattattcaattcaattattaatcattcggataaatataatgaattaattagtataaattctcatgataataacactaatagtagtggttatttttattatcgagaattaaattggttaattgaaatcattaatcaaggaattttaactcaattagatttatcattaatttgtaattatgataatgggattataattgaatttttcattaatttaatcaatttaaaatatttgaattttaaattaaaatcatcaattttgaaatttatttataaattacaatcaattgatcagggttcagatttattaattacacgatttggattattaagtgatttagaattaatcatcatgccacaacaagcacaagcacaatctaaagtagatgaagatattattgataaacaattgaaaatcaatattgatgaattgatattacgatttggtattagtgttggatcaagtaaacgagttagagaatggattggtggtgatgatgaattagagaaaactttgaaacgaattcatcaagaatcacaaatgtcatag

SEQ ID NO: 6658 - DNA, 2208 bp, Candida albicans
atgaatttattgaataattgtgatgaggtttcatcctcttcgtcaaagaccaccaacaactttaataatttaataaattctactacagcagaaccaccacaaccacaacctcaaccacaagggttatcaacatcaacaactacgacatctgtatcaacaagacaccattcaccagatattgtatactcatctcacaccaaatccactttaattagtaaagccccatcagatttcattcaaacacaaccatcatcacctgaaccaacctcatcaatacaaacaatatctaatcaaataactgacgacctacctaatcaagaagtttcagttgtaacaccattcttagttaaacatattagtgatgcaaatatgattcctaaagataatttccataaatattgttatcgtcacaaccctgacattacctgtaataaacataccgatgaagcacgaatgaaattgattcaggatcaattggataaattacctaatggtgatcaacaagcaataactcatgtatggtcaattttcagtgcagcaccagtacaacatcgtcaattaatattacaaggattattaagtcaatgttgtttcccccaattgtcatttatttcacaagaagtttcttcattgattaaaattgattttatatcgactttaccccaagaaatatcactcaagattttatgttatttggattgtcgatcattatgtaatgctgcccaagtttctcgtaaatggaaaagtttagctgatgatgatagagtatggcattatatgtgtcaacaacatattgatagaaaatgtccaaattgtggttggggattacctttgatgcatatgaagagagctcgtgaaatgaccgatgatgataatattaaacctataaaaaggaatgacgaacaacaacaacaacagcagcagcaacaacaagggtcttcacaagcacagtcacaagtactcgatggagaagggcaaccagacaggaaaaaagtaaaacttgatactgaagataatcaccaaaaagttgtgccaacatcggttgtagtgagaaaacgtccttggaaatcagtgtattcagaaagattcaaattagagaaaaattggcgtaagggaactcatacaattaaaacatttactggacacagtgatggagttacatgtttacaatttaatcgtaaatatcttatgacaggatcatatgatacaacaataaaaatatggaagattgatagtggtgaatgtgttaaaactttaactggtcataccaagggagtaagagcattagttttcgataatcaaaaattaatatctggtggattagattcaacaattaaagtatggaattatcatactggacaatgtattgccacttaccgtggacatgaagatgcggttgtttccgttgatttcacaaataaatctattgtttctggatcagctgatcatacagttagagtatggcatgttgattcaagaacttgttatacattgagaggtcataccgattgggtcaatcatgtcaagattcatctggcttcaaacactattttcagtgctagtgatgatacaacaattagaatgtgggatatgaatagtaatgaatgtatcaaagttttcggtggtatggaaaataatggccatataggtcaagtccaatgtattatccctttcacttataaagaagaattaatagaagatgaaagtgaaagtgattctgaaaataatcaaaattcaacaacaacaacaacaacgacatcagcagcagccacagccacagccacagcaatgggtgcaacattaggaaccaataatatatcattaccaaatgatacagctacaattaatagatcgacatttactccaagcaacaacaataccgctactactgctactacccctaattcatatcctacacatttcttaacttctgcattagataatacaatcaaattatgggatgttgccacgggtaaatgtataagaactcaatttggccatattgaaggagtttggtcaattgctgccgatacatttagaatcattagtggtgctcatgatcgattaattaaagtatgggatttacaaaatgggaaatgtttacatacatttagtaataatctgagtgtttcatgtgttggattaagtgattcaagatttgttgctggattagaaaatggtgaagtgaaaatgtattgttttgattga

SEQ ID NO: 6659 - DNA, 1554 bp, Candida albicans
atgaattcaacagaggtcgataacttaccttttcaacaacaactcacttcgtttgttgaattggccgtagccaaagcaactggctcaccaatcaccactttatttacaatcatctttcttattcttctgtacgatcaactttcctatcaaatcaataaaggttcaattgctggtccccgtttcaaattttaccctattattggtccattcttagaatctttggatcctaaattcgaggaatataaggcaaaatgggattctggtgaattaagttgtgtatctattttccacaaatttgttgttattgcttcatctcgtgatttggctagaaagatattatcatctcccaaatacgtgaaaccatgtgttgttgatgttgctattaaaatccttagaccaaccaactgggtttttctcgatggtaaacaacacaccgattaccgccgttctttaaacgggttattctcttcaaaagctttggaaatttacattccagtacaagaaaaatacatggacatttatttagagagattttgcaaatatgatggtcctcgtgaatttttcccggaatttagagaattattgtgtgcattgtcgttgagaactttctgtggtgactacattactgaggaccaaattgctcttgttgccgataattactacagagttaccgctgctttggagttggtcaatttcccgatcattattccatacaccaaaacttggtacggtaagaaaattgctgatgacaccatgaaaatttttgagaattgtgctgctatggctaaaaaacatatcaacgaaaacaatggtacccctaaatgtgttatggatgaatggattcatttgatgaaggaagccagagaaaaacattctgaagacccagactctaaattattggttagagaattctctaatcgtgaaatttctgaagctattttcacatttttgtttgcttctcaagatgcttcttcgtctttagcttgttggttgttccaaattgttgctgatagacctgatatcgttgctaaaatcagagaagagcaattgcgtgtgagaaacaataaccctgatgttagattatctttggacttgattaatgaaatgacatacacgaacaatgtcgttaaggaatctttgagataccgtccaccagtcttgatggttccatacgttgttaagaaatccttcccagttactgaatcctacactgctcctaaaggtgctatgattattccaacattgtatcctgctttgcacgaccctgaagtttatgatgagccagattcttttattcctgaaagatgggaaaatgctagtggtgatatgtataaacgtaactggttggtatttggaactggtcctcatgtgtgtttgggtaagaattatgtcttgatgttgttcactggtatgttgggtaaatttgttatgaattcagacatgattcaccacaagacagacttgtcagaagaaattaaagtttttgctactattttccctaaagatgatttgattttagaatggaagaaaagagacccattaaagagtttatag

SEQ ID NO: 6660 - DNA, 1347 bp, Candida albicans
atgaaatcgtcaaaattgaatccagtcacaacccataaggagttcaatggtatttctggggcgctaggtataacaattggattgcctaccctcactgtattgttctatttgttgtgcaaccaaacgtattcgattcaaggaatcaatgtcgatttcgccaaaattaaaagtcaattaccaatcactcaagatgaattatggcagctagtatttgataaaacatgctggctggcctatttagcttggtttttcattttggtcattttagattacttgttacctggcaagtcattaaatggagtgaaattaagagatggcactgttttaaattataaaatcaatggtttgagcatgggttccttattaattgttttgctattggcacggttattccaactgaacagcgacagctctcttgaatattatttaccggaattacaatttatttacgacaatcaattacagttgatcattatttgttttttgttttcttttatgctagccgtatttgtatacataatttcgtttattccgttagccaaaccaaatggaattggtacaaaagaaagaattttgagtatcaatggtaatactggaaatccattttacgattggttcattggtcgtgaattaaacccaagaataggtagttgggacataaaattgttttgtgagttacgccccgggatgttattatggttgttgataaatttgagttgtttgcattatcagtaccataatttgggctacgtaacagactcaatgattgttgtaaacttacttcaagcattctacatattcgatggggtattgaacgaagaaggttgtttgacgatgattgacataaccaccgatggatttggttttatgctaagctttggtgacttagcgtgggttccttggacttattctttacaagcaagatatttgagcataaagggcaatgaagtcaacttaggatggacattaagtttgttgatcgttggattacaggcattagggttttacatcttccgctcagcaaataaacaaaaatcagattttagacaaggtaagttgccccatttaaaaagcatccaaactaaaactggctcaaaattgttggtggaaggctggtggggcttgtctcaacacattaattatttgggtgactggttgattggattatcttggtgtttgcctactggctttcaaaccccattgacctacttttacgttatttactttgcttccttgctaatccatcgtcaagtaagagacgaaatgaagtgcagagcaaaatacggcgaggattgggaaaagtacgaaaagctagttccttataaaataattccttatgtatattaa

SEQ ID NO: 6661 - DNA, 3222 bp, Candida albicans
atgcttagttttctaacagaagtgactggtgctatagcacaaacttctgctcgtcgaccaattcaatttatggttgtacctgctttattagcatccatcgcgtatttatcaatcattgacgattatattcctgaacatattaaatctagttctggttcatcaggtataagttattatcatccttatacttcttctcattataaatctcaacccgatttggataaatggactgctattgataaagaacatattaatgatgatatttacactcaagctaatcaaattagtgttataccattaagatttagaagatttcaagatgttgttcctaatgttcctaatgccattcacatttctgataatgaacaaatattaattgtcccaactgatcaaattgaaaattctttagatcaattacaagaaatcactaataatggtattacttggaaagcaaggaataatgacaaattggcaaaatattatgattatattagatatggtttaaacaaagttcaagatgccattcaacatgcagaaaatttcgatatacttttaatatttgtcgcctatcttggtatgtggtatgcattaattaaagtatttgttgatatgagaaaaattggctcgaaattttggttagcattttcaactttaacatcatcaacatttgcatttttattggctttattggtgtccaataaatttttacatactaaagtttcattattaagtctttcagaagggattccatttttggtttcagtaattggatttaaacataaagtatcaattgctactattgttgccaattcttcaacagcatcaccagaagatgtccctcatgttgttggtaaagcagtttcttctcattgtttaagtatgttgagagatcatttagtggttattggtggattactttcatgtgccatatatgctcatcatttaaccgggttgagaaatttttgtattttgagttcattgattttatcatttgatttgatcttagtttatacatttttttccgccattttaggtttaaaagttgaaattaatcgtgctcgtcgtactgaagatttacaaaatgcattggaagaagaaggtatttcttcattggtagctgcaagagttgctgaacaatcagctactattgaacatcctaatgaacataattttttcaaatcaaataattcttccattgcttattttaaagtcataatgagtcttggatttttcgctttccatgcattttggttaggcagttcttggttatatagtactactgacggtggtgaaagttttagtcgtttttcattcctttccaatattccaactttaagtcaagatatttctcagcaaattcctattggtaaaaaaggtacagtggtaaccattttaccaacgatattttttatgccttcaggatttatggtacaattggaagatttcatttatcttgtgttgagtaaatttagcagtgccattagagatagtattatttccaagtttttggtgtttggatttgctctttcaattgttactaatgtttattttttgaatgctgctcgttatcaagttagtgctactcataaattaattgaaaaagaaatttcccgtcctcaggatagtagtgtcaccgccactactaccactactgcaaccggtactacctcttctggtgctgccacttccaaagctattggcaataacaaagggttgaaatcagttcaagaaattcctgacaatgaagatgaatcatcagatgaagaacttgaaattaaagccccagtcaaagtattaccacttgaagaatgtgttaaagtattgaaagaaggtaaagtgaaaactctatctaatgatgaagtatcatctttagttgttggtggtaaattaccattatatgcattggaaaaacaattagctgataataaaagagccgtcattgttcgtcgtaaagctattgcaaaattagctaatgcaccagtgttagacacaaatcgtttaccttatgctcattatgattatgatagagtatttggtgcttgttgtgaaaatgtgattggatatatgccattacctgttggagttgctggtccattaatcattgatgaaaaaccttatcatatccctatggctactactgaaggttgtcttgttgcctcgaccatgcgtggttgtaaagccattaatgctggtggtggggttgaaaccgttttaactcgtgatggaatgactagaggtccatgtgttcgcttccctactttgaaaagagctggtgctgctaaattatggattgattctgaacaaggtcaagccactatcaaaaaagctttcaattcaacttctagatttgctcgtttacaacatattcaaaccgcccttgctggaacttcattatttatacgattcagaactactactggtgatgccatgggaatgaatatgatttcaaaaggggttgaatattcattgaaatatatggttgaagaatgtggttgggatgatatggaaattgtttccgtatcaggtaattattgtactgataaaaaaccagcagccataaattggattgaaggtagaggtaaatccattgttgctgctgcccgaattcctgctgatgttgtcactaaagttttgaaatctgatgttgatgccttggtggaattaaatatttctaaaaatttggtgggatcagccatggctggttcagtgggaggatttaatgctcacgcagcaaatttagtgacagcagtgtatttagcatgtggacaagatccagctcaaaatgttgaatcgtccaattgtatcaccttaatggaaaaggataaagaaacgggtgatttgaacgtttctgtgtcaatgccttcgattgaagtaggaaccattggtggaggtacgattttagagcctcaaggagctatgttagatttattaggtgttcgtggtcctcatccaactaatccaggtgcaaatgctcaacaattggcgaaaattgttgcctcagcagtattggccgctgaattatctctttgttctgctttggctgctggtcatttggtccaatcacatatgcaacataaccgtagtaaagcacctgctgctggtgctactactactactactccggcaattactgattctaaagctagtaatggaagtattgcaagtaatgggaaagatttgaaacgtcttgaagaaggttcagtaacatgtattaaatcttag

SEQ ID NO: 6662 - DNA, 4245 bp, Candida albicans
atggttggtggactaataaatactccacttgcgagacacattaatgcaaaaaaagttgttaacccagtgattcaatcctttaaagttgcccatcaaagagttaacatcgatattgacctatctagcaatagtattgatgggtttacagaattgacagtcatacctacatcgaataaacttaaagtgataaagttggattgtcgtgagatggaaataaaagatgttttgattaatggaagtaggtcattgaattatgtatatgacgatttattatacatcaacaaccccgagtattttgagcactgcatcgactctaaagtcataaatgttatggacttgtactccgatacattcaatgtacatcagcaccatctaatacggtctaaattggattacatctttaagaatcccaagcacgacgaagagagtttggactacaacacccaggaacttaagattcttttgccagacaatatgaagtttgagttgaccgatatcaattctatacaaacaccaagcggaactagtcatccagggactactacgcctctgcatctaaaatccaagggcacaggaagcgagtactactacacacctatacagttaaaggttgtttacaaagtcaagaatccacagaatggagtcaattttgttacaaacgaagacattgaaaagaagctctggcatgcatatacaacaaactccaactacaacgtttccacgtcatcatgggtcccctgcattgatgatttgtctagcagatgcacatggtcgttggaagtaaatattccgagaacactcaaagacattggaaatccacgaatgataggatccaaggaagcgttagattatcaacaaatgagaagaaagcgatcaggcgaggctatacaaaactttgcccagcaaaataatgatagtgatgatgatgatgatgatgacgaggatattggcaactacgacatggttgttccatctggtgatttcaacaacgtcaaggaaacgccacaccccattgatttgtcgaaaaaagttgtgtcgtggtctatattcaatcctgtttgtgcccatcatgtaggctgggccgtgggatgttttgaaagctttgttctttctgatgagtcagctggggcaaaagaggatgatgaggaagatacggtgctaagaggtgacgatgctgagaatgtgaataatccagtgacaatctattcacttccggaggacgttgagtgggcaaaaaacactagtattatcaccaacaaggcgttggatttctttctgaaagagtatgggtcgttcccatttagttcttatgccatagtatttgtgcggtacctgccgtgccaaaccagtaactttgctggactctcggtaatgtcatcaaagttgttgtacccaccagatatgattgagccaatgtttactgtaactgatatattattgaaaagtatagccacacaatgggctggcatcaatatatcgccgcaaacattcaatgatatgtggtgcaccatcggtattgctgggtttatggcaatctcgtttatcaaaaaattgatgggtgctaatgaatttcggtataggctacgcaaacaaatggataaggtggtagctgaggatgtggggcgacatgctattgcatcccagccatttaagtaccctgtttcggaagacgatttatcgtttgtgtggttgaaatcgcccattgttttatttattcttgataatagaatgacaaagaccgacaagtcatttgggttgtcgagggttttgccaaagttatttcttcaggcaatgtcaggaagcttacccaacggcacattgaacacagaacatttccgttacgtctgtgaaaaagtgaatcgaaacaagttggaaaatttcttcaagcaatgggtgtttggtgctggggcgcctgttttccgaatcagccaaagatttaacaaaaaaaaggggatgattgaaatgaatatccgtcaggtccagcaccatgaaaggacacccaagaaattggatagttctagttttattggtgatgcagttgcctacttggacaacgaaccgctgccaccgcaacaacatgtgtttactggccctatgactataagagtgcatgagtctgatgggtcaccttacgagcatattgtcgagttgaaagaagcaaacaccaaattggatattcaatacaattcaaagtttagaaagattaaaaagaaggatgatggagttgatcctggtatagcgtttaatcaatttggtgatgtgttactatcccatgccgagatgcaagagtggaatttacgtgattgggataaaagagatgaggaatctttgagtagtgagccatttgaatggatcaggggcgatgtggatttcgagtggatcgctcgaatcgacattaagcagccggattttatgtttggatcgcagttggtctatgatcgagacattgaagcacaattagaggctgtgcggtattttggtgagttagagaaaacaaacacgacgtactgtacagctttaacgagaacattaatggatgaccgttatttttatggagttaggattgctgctgcacaggctttagctgattgttcaaatgaagcaaacaattttattggtttagagtacttgctcaaggcatttggcaagttgtattgttttgacgacagctttattccaaaatcaaatgattttagtgattttaggagctttatgttgcaaagtgcattccctcgaattttgtgtggcgtcaaagataatgacggtaaagttcccaaaaggatacagaatttgttgcttaatctagtgaaattcaatgacaactcgatgaacgcgtttgtcgatagtctctatgtgagcgagttggtcgtttcgctagttaccagtactgtcagtggatggaggaatgacattgaagagtacaatgatactgaatttgctgggaaagtactgtccgaactttttagactccaaaagttggatcgttggataccgtcttaccaaaacattattgaagtaacatgcatacagcagaatatccgaatggctttggttggtgctcgaaaattgtcgtttgaagagttgttgtacatgacattggataaataccccatggaggcgagggtggaagcgtttaggggtatattggagttgggtggattaaaaaacaaaagcatcttacagtactttcttaaggtttgtttgttgaactttgaacgtccactatacagaagcaagttgattgaggcattggtgaagtcggtgtcgtcagttgcaacttacggcggtgtgtctactcttgacgatccagaattccacacaaaagtggacactaatgttaaaagctcctccaaccgtattattattgatgatggatcgcaagataatttagcgatgaaatcaaagagagatgatatggctcgtgcaagtataaagggtgccattgagattttgcgaagagacttttctgagggccaaggtttgcgtgaaacgttgtgggagttgcttcacacatcattgattggtttgcatgaacgtagaagtatcttttgtttgtgccaggtgttgttcaaagaggtagattcatatgttgtgaagttgccggttccaagtatgccagttgaagagtatgttcggaaaaagattgttgccaaagtttcgaactatccaggacaagtgacaatcaaacgagaaggaagattcaagatacagttggctactcgaaagtctgtaatagccaaggtgaagctggaaacagaacacaagccattgaagatatcactaaagcctgttattgaggctaaacagaaggctgcatcagctgtgcatgttgatccggttattcctacaaaggtcacttttaagttgcctggccatagactagctggttttgcgaaaaaagtggaactagatggaacgttggtgactattaaacttggacgtgatatgaaatcaaaagtggatgcgttggcccatcgatatgtgagaataaatacaaagaggagaaaaattgaggtatcaaaggttccatttattgaaaaagaagaggggtctaacacttctggtgtaactgaggtaagtcggaatactggagagaaagaagacgcaaaaagtccatctcctattcttgtcaagaaggagaaaaagagacctaaagtttacattcattttggtggaaatgtgaaaaaacctgaccaaggtagtagtagtagcagctctaaagagggttcaacagaagtagaatga

SEQ ID NO: 6663 - DNA, 1245 bp, Candida albicans
atggcatcagtagaagttgaattaggagttactccagaaaccacttattcaatttcaggaaaacaactaaaatttgattctgaatcggatattgctccatatatcaaggaattgacggaaaaagaaaacgtcaaaaaagttgatttttcaggaaatactattggtattgaagcatcaaaagcattaagtgaagcattattaaaacataaagacactatcgttgaaatcaacttttctgatttatacactggtagattgaatactgaaattcctcaatctttagagtatttgttaccagcattgtcgaaattgccaaatttgaaattgatcaacttgagtgacaatgcttttggattgcaaactattgatccaattgaagcttatttggccaaagctgtttccatcgagcatttgattttgtcaaacaatggtatgggtccatttgctgggtcaagaattggaggatctttgtttaagttagctaaggctaagaaagcagaaggaaaggagtctttgaaaacatttatttgtggtagaaacagattggaaaatggttctgttaactatttatctgttgggttaagaaatcacaaggatttggaagtggttagattgtatcaaaatggtattagacctgctggtatttctaaattggttgagcaaggtttatctaacaacaaaaaattaaaagtgcttgatttgcaagacaataccatcactaccagaggagctattcacattgcagaatcattatctaactggccacttttggttgagttgaatcttaacgattccttattgaagaacaaaggttctttgaaattagtcgaagccttccatgctggagatgaaaaaccgcaattaattaccttgaaattacaatataatgagttagaaacagatagtttaagagttttggctgatgcaattgccagtaaattaccacaattgaagttcttggaattgaacggtaatagatttgaagaggattccgaacatatcgataaaatcaatggaatcttcgaagaaagaggctatggcgaaatagatgaattggatgaattagaagagcttgatagtgaagaagaagaagatgacgaggatgacgaaggagaagacgacacattagaggaagaccttgatttgacacaattagaagaagaattggctggagtttctttggaagacaaagatggtaacgtggatgaaattgccgaagaattatccaaaactcatattaaatag

SEQ ID NO: 6664 - DNA, 3270 bp, Candida albicans
atggctagaagactgacaagaagacaagctgctaaccctgtgtcctatagggagtccagtgattctgaagctgaggagagtttcgaacccgaagaagatgattacagcaccagacccaccaaaagaaaggcaaacaacaagagtagctctgcatcaaagaaacggaagaagtctggaactaagacatctaaaaagtctttgaagcaattagaagaagaattggaagaaaattatttgtataaagcgttatctagcaacgaggtgaacattcaagatatcgctcttgattggattgaagaatatgaagaagatcaagtggatgacaagtatgaatctatcactggtttaatcaactttattttgagaagttgtggatcgttgcatttattccagcctcatgatttgagcaatttagaatccagtgctgatactgtggatgaaattggtattgcctttggcgatcaatcatctcacaaatatccatttaaagctgtaccagtttttaagaaaaatgcattgcagctttttaaggagattattgatatcgcccatgaaaagggtttgttgtacaaatatgacaacaatcgagaagaagaagaagaagaatctttggcatctcctttgatgtggtatattttgacttgggtgacctcgttgtcaagcagtccaattagactgttgcgatacacttctacagaaatattatttgccattcagcttcaattatgtaaaattatagcttcggtggaaagtagtctcgagagatcacagcgtcagttgtcaaaaatcaaaaaatcaaacaaatcaaagtcaactctaataagcaaaacaatagaaagttgtcaacttcaaaagcgtacaattttggagtatttcaatgatactggaaatatcgtcattgacagaaggtatagagacattgatccccaaattcgtttagcatgtttgaagaatttatgtgaatttatcttaatatatcctgatttcttctgtcaaggcatatatttgagatactttgggtggttgttgtcagatccaattgcccaagtaaggattgaaaacaccagaagcttgttaaagttataccgttccatttcaccagctgatttgaccttgggtctccgtcagttttccgaaaagtacaaactgcaaattatcaagatgagccaaattgatagtgatgcccaagtaaagttgaatatcttaggaatttgttgtgaattattaagattagggtttttagaagagaaagatacaaggcaggtaattgaaaatttccccttttctggtccttcaaagctacaaatagaaggagcaagatttgtcacaatcttaaatgaagagaacttgactggaataaacgacaagtataggttgtttatcgaaacttacaagccaaatcaatttgaaacagacttaccattctgtttagatatcaaaagtttgataaatttgttgaagtttgtcgctgacaaacctttacatttggtatttcaaaatatgagtagtcattacgagggtaattgggagatgttggtgaaatactttttactggatatctctctgataaaattttccaagaaagacgaagaggaagaagagtttgttgaaggtgaggaaattgaggagtttagacagtttatcgacttaaactctgacgagaggttgattttgctcaaatttattcaagggtttgttgagtatgtttacactaagaagaaccctgaagaagtagagagccaattggtgcggttgattgagtatttgccacaaattcaaaatgtgtgtgttcgatcttcgaaaatgtttccggtatttttaaatatctggacaaccttgttaaagggtcggcaatcagtgtacaatatatctaacaagttagacaaattggaccaatacgacgaaataagttcagagatcatcaagtatttcaaggattttgacaccgttgctgaattttctagctactttactgcgttatttgattctcacggtttgacaaccaatatcaagtttagtattcagactgtacttgaagaactttgtgaggaagttgttaagaccatcagtgaccaacagtcggaggatgatgatatcgattcgacaaatactgaggtattagagcaaacaaagctaatcaagacacttgaagtagcattgccaatactacaaaaaatcaaacaaatgggtgacttcgtcaacattgccaacttgtccaatatggtagacttgttgtcgtctttggtgaaccgagtgttacgaaagtttgatttagcattgattatgtcgcaatggaagcataactttttggagcagctaccacaattcttgcctgctttgacatgcttatatgatttgacgctagtcgtggtatcgtggaagtttgagaaattggttgaaattgaaaaggacgaacagcgccactatgctatagatttggaatttgacggaatcgttgatttagtcaatcaaactatccgattgatttatgagtgtacaaatagtgtgcagtttcttgacttgaaaactttattgatatcaagatatatcgactttatgttgtcgttcaaagtgttttatgttagattccaagctgacaacagttttgacaatttccaagaattcttcaatagtaacatgcagctattgcttattaaacgagacatgcagtttcagctattagaattgttcttgataaaagaagtgagacttggtcatttgttgaatgtggatttggatagagacgatgaagaagatgttaattacgaagattacactgaaaaaatcgatgaatcctatctacaagaaaaaagtatgtttgacgatgacgaccaaaccctgcaacccagtactgaagatagctcgaccacaagaaaccaagaggtagaagcaaagaaaaaggaaaagatttggaaccttgaaaaagatctctcggtctttacattaaagttgatatcattagtcaatgttctgctagttcaagatgagttgtacaatagaatcaaattgaacaaggataaattagggagtgtgtttgcaaaaataatccaacaacaagacgaacatgctaacaccatcaaaaatcaagcagtttcaaacaaggaacgcgaaagcgaagagtcaagaataagcgaaaatgctcagcagtcgctggtagaagacaacaatggtaacgaggtggttgaaagagacgaaagcattgccattgaagttgatgttcctgagcgaggatctatggtagatattgaaacaccttcatcagtgatttag

SEQ ID NO: 6665 - DNA, 6282 bp, Candida albicans
atgtcagaattaagcaatgataatatcgtcgaaagccaggaactatcactgccggtaaccagggaggagccagtggctaatgatagcaatgatttgtttggtggagacgatcaaagtacatctaatcaacaagacgattttttctccaacatacagcaaccagatcaaccagatcaaccaattattgagaccaatgaagaacttgaaactgtgcataagtcaaccgatgtggaattaccacaagaaataccactcgaacaagagcagattccgcagcaaccacaacaacaagaaaatgtgattgatgatttgtttggtaccagtaacaatgatgatgattttttcagtaatcacaatcaagacggtctaaacagtgctgaaatagaaacagaagagaacgtggaggtgcctttacaacctgattttgagcaaaatcaagatttagaatccgagaaggcaacaatctcaattgacaaaaaagacgaagatcctgttcttgaaagtctaaccactgaatcagatattcttgacaatgatcatgaatcaacgagtgaagctcctggtatctcaactgaactggaagtctttgaagaagaagcagtagtggaggaagtgcaatcaactgcagaagattcgcctgtggatgccactcaaccatcagagcctggacctttatcaacagaacagattaatcttgttgatgaaccagaagctggtgctccaaatactgaagaatcgcaaacagaatccaaattagatcaattctttactgagtcaaatgaaggagatttctttgaaaacattgccagggataatgtagaacaagaagtatccaatccatcaaagacagaggcggatcaaaaactcgaagatcttttcgccggtgctgataacgaaaatggcgaggatcttgattttcttcaacaaccacagcataatgttgcagaggtaaattctgaagctgccgtagctaccgaatcaatcaatttagatttatttggtgaggatgatacagatttccttgatgaattaaactccaaaaaacaacaacaacaggaagaagaagtgagaccatcatcaagttcaactacaaatcctgaggacaaattagcagcattagatttagatgacgatttattattagatgatgattttttggaagaaggttctgtacaacctaaagtagagagttctttaccagaaaataagccagtgaaacaccatcattcttacattcctagcggtccttctgccaatcaaaagtctgtatatgcaccaccacaagtttctggagttaataagaatgattttattaaaaatttagaacaatctaaaaaaaaacacgatgcatacgatttcccagatacattattggtaaacaaatcaagaccagctgctagacatgcaccttcatcaaacaagtatggtccaccatctgtatcacaaacgagtatcccatctatctcatcaacaagtagtttaccacctgcaagagatgtaaaatctagctcactggcacctcctgcagcagcacctccaactggtacaagcacttcaaaagttgccaagaaatcatttttcgaggactttccagatgacgaagaaattcctaaacctaaacgtgcaggcagagcagctgcaccagttaaggcagtgaatcaaattcactcaccacaagttttgaatcagcaggtgcaacaacaacaacagcagcagcagagtcaacagaatgcaccaccagcaccaccaccgtcaaaggtaaacaaacaaccacctgtcaatccatatatgccaaaatctggcacatcgccaatcttacaacaacaaacccctgctgttcataaaagtggtattgcagcaccaaatgtgaatgttccacatgcaaacaattatgctccaccattgaattcatttgcatttccaccacgtcaaccaaatcaaaagactaacgattactccccacaattacagtcttctccggctccaccaccaccacctactagtttgcaaccatttcctctgattggtcagtcacaatctgccccagtttaccacaatcgacaaccttccaactcaattaacactaatgtgaataaagtgccatctattaacagtccatatgttcctaatgctggtccttatgctccactgacacatcagagatctcattcaagagcaagttcattggttggaggtaaaggcaaagaggtcaatccttatgcccctgcattggagacagtggcaagtggcgatattaatcagatccaacagcagcagcagcagcaacaacatctttcaccagcaactgcggttctcccaccagccagagctcgtggattttccaacgcaaaaagcaacatctataagtctgcgccaaaagttgtcaatccggaacaattggttttcagacaatacccaattttcagttttagtatcaattccaattgttcagtcataattccaaacactgggtataaccagggaacaagtattaacattggaccaatctctaatttattgaaagataaagatttgtatgccactttccctggtcctttatccaagagtaaatctaaaaagaaagatgttgaaaaatggttggaactgtcatcagggtatttacgcagtttagggaaaaatgatgaacttgtgttaaatgatattttgttgcatttgatcaaacatgatggtgatgtgaaaaatcaagaattcttaagatcagcatgtctgattctcaatcctaatgtcaattttgatgttaataatcttccaacttctggattagccattggagctactaatgctcataaattggacaattccggtatcaacactgtattcactttgattcaatcaggtaatttggaaaaggcattagaatattgtgtgtctcgtggtgattgggcattagcattaattattagtggtcctgaaaatttcaataagattgctgctgaatacgctagaaatacattcccatttgctaaaacgaacaataaagtgttacatattatgcccataattttgaaagttcttggtggtaatgtttctagtgttattgaagatttgactgcagttccaaatgaaggagaatatgcaaatttgcattggagagaaatcatttctacaattgcaatttgtggatcattaaaggcaactgaatttttgattgaatttgggaaatttttgaaccaacaaggtaattttattggtagtgaaattgcttacatcatggctggattaccttttggccatcagaactttatgatgttggcttctggtcataattccatgtacactgaagtttatgaatatgctttgaatttacacaaggcaatgcatttcccacacttgttgtccttaaagttgaaacatgcattgactttagctgattatggattgatcaatgaatcacagagatatattgatcatattaattctagtatcaagacattgggtaacaaatcaccttttgtcacgcctaatttgcttcatgagtttcagaatttgattatgagaatcactgaagttggatctggggatgatcaaaacaactggttttccggtaagattagtcgagtcaatcttgataagatctggggacaaattgataaatttattgttggtggagatgaactgaaaaatggtaacaataacgatggtaatggaactggcaatggaagtggtagtgttttcaataaatttagtccttccgtgtcgagaaatgcatcaagtgtgaatttacacaattatgcacaaccttcaatgattaggcaaccatcacttttaccatatcaaccacaacaacaaccgcaaccgcaacaacaattattggatcaagttcacattgaaagaaaacctacaactggattcgctccgcaaccaccaccattagttggtcatccatcaacgacatcagttaataaatattctccaagtattaaatcgagtcctcgtcaagcacaacagaataagtttgaaaaatatgccccaagcaacaattcatctcatcataatcttagtcttgttgaagaaaggtcagctgttactagtgctgatggtcctgaataccctcaccaccaacaccaacagagtatcaatgcgtcagcagttcccgtgccacttccaccaccaacaccaccggtaagcatgccacaacatgtatctaggtctccacgtagccatcaactgcaccaaccaccaacattaccaccactgcattcacatcatgttcaacaaccatctagagatcggtcaccattagcgacacgaatctacccttatagcaatagtgttggcggacaaatttctactacgtcagtgggttctattcctagtcaaataccacttggtcgacagactcatgggaaacaaccttctatttcaagtgtaatttctggagatagtattgcagcagttggtttaggagaacaagagaatgttttacccccatcaaccggacaaacagggaaaacagctacaagtgaagtgaatagaaatgargaaggttatggatttgggggtcactatcatcatgatcaacctgaaactataackgaatctccagaattaagaggmttacaacaaccacagtccagtgaagcagaaattagtaaagacatttcaaatgatgtagcattggatagtgctaagataccagaagcttcacaggaaccagaagaagaaacggacgaatcaggtaatgtggcagctgctccaccacctcyaccagttgctccagttgcacctcctagaaaaacaaaatcttctagatctaatccatatgctccatctacagatattggtgctaycagtaatgcaccrtcagcwrtrggrcaaacacytrgtgggaaaccaagtrtgagaaaatcrggatcaagaactaacagatatggaccaccaccaggagttggtaataaacaaccaactattgatgtttcrccaccttctgctactaataatactggtaatgaagattccattagtatgttttcctatggtgsctatcaaaatgagtctagtcctccactcaagcaaccgtcacaatttgatcagactgcagttgcatctgcmcctgcyccacmtccattacaaccacaattggcggttccagaaagagttccaactaaaaatgtygccaatattgatgatagttttgatgaaaatagtttagcagctgatacatyaacaacttacaataataatatggtaaataaaccatatggactgtcaccaatgggaccaactgttgcaactaatggacctggatcagttactctgacacctttgattttaaatcaaggttctgcaaatatgaaattatcaaatctcagtactattagtgtcactggaacyggarccggaactgkkactgggactggtggagcattcgatggatttcctataccaggatcacctgatgaaactactcgaccaaattctatatttggtggtcatactagaggattattttcttcaagattatcagaatcacaaagtgtattatatcaacaatatgcaaktgctgatgatacagttggtgattatattcctattatggaagaagatgatgaagatgatgaagatgaacaagctaagcaacagaaacaaaaagaaaaagaggcacaagaacaagaattgaagagaaagcaggaacaacaacaacaaaaagctgcagcaaagaataacaacaatagtggcggtggtggtggcaaattctttagcttattcggtggtggtggtaataataagaaacaagataatgatgctaaagtttataaagctcatttaggacaaaagaatacttttgtttatgatgaaaaattgaaacgttggatagataaaagtaaaccgttagaagaacaattacaagctaatcttccacctccaccacctccatcaatgaagaaaaaacccaatcctgtctcaactactacaaacagcaataatagtagtggaccaccaccaatggttacacctaatccaactccaattccaggaggtgatttgtctacgacagcaacagggggaatatcaactcctattccagcatcagctccaccatcaagaatgagtaaagatagtactaaaccaacaccatcaataaatagaccaaagagtagtttagctacagcttctggattagatgatttattatcattaacagataataatccaccaccaaatggtagatcaagaggtgttggtggcggtgctacaccaggaggaagtagaagaaataaacctaaacgtcgtggatatgtgaatgttatggagaaataa

SEQ ID NO: 6666 - DNA, 1146 bp, Candida albicans
atgagttcgattaaaacaagtccaaccaaaaagacatctgaatccactaccaaacaagatacccccaatgatcagactaatattgaaaactttgatgaagagccatccatgctctcggatcctgaagattatttagaggaaaatgaaacattggatatgaatctctccaagggggatcagaaagtgtggttagttaaactaccaaagtatttaatggatgattggtccaaccccgactcgatgaatggccaacaattgggtaatgtgaagataaaaaaggacgcacggggtaaattacaggttaaattgttattggacaacaagaacgacaggataccaaaagagtatgatatcaaaatgttaaacacccaagtccgcaattcgtatgtgttcaccgaagagaatttgaaaaagttcaaacaagaagtgactgaagtttcggatatgccagagcagccacaactaaaagagttgaatccagaaaagaagaagttccaagtaagacgaaaatttaaatactttagggtacagaaagagggagagaatggccaaccagttaagaagtatattccgtttgttaaaacaatcccgaaaaagacaagtttaatgggtaaagtgtgccacgattgcacagtggtaccagcaaggacgggcctgaaacatggcgaatcgttaatgaaacatcaaaatatgacccaaggaaaggaacgaccaaaagttacgttgttgaatgagatccctggggtcattcaatctaatgcaggtccgtcaattaaaggaaatgccgcctctatattcttgaagtcgactcaaggtaaaaacaaaagtgaaggcagaaccatcagaatgcccaaaaaggatttattggacttgttgtttagattatttgaggagtatgagtattggtcaatgaaagggttaaaggagagaacaagacagcctgaatcgtacttgaaggaatcgttagaatccattgctactttaatcaagagagggccatatacatcaaagtatacgttaaaggcagaatacagaagattaagagatgccgaacgagctgtcagactcggcttggatgaggatgaccagaataaagaaaacaacgaagacgaggacgaagatgaagaaatggaagatgtagtataa

SEQ ID NO: 6667 - DNA, 2061 bp, Candida albicans
atggcaacaatagaaaacaataaggagtcaccgacaaaagactttcgagtatatattggaaatatatctcctaaacttaaagaaaatgaacaaagtttaactactagaatcgccaaatatggaatcatcaaatcacccttagaatttcatactaaacctttacaattatattattttgcttatgtgactatatctactactgattctgaatttaataaattaaagaaatctttgaatggagttttatttatggggatgaaattgattatttctttagctaaacccaattatttagaaagatggaaaaaatcaaattccaaagacaaagacaaggaaggaggacgtagtaataataatcaaattaaacaacttgaacaattacgtcgtgataaaattgttgaatctagattagaaaaaatccaagaatataaaacaaattatccaactaataaattcacttcaaatttaattacttgttataatgctggatttaatcaaccagaaatatctattctggaacatacaacaaacaacatttcagcaaacacgaaaaatccaccacctaaacatcgattaattggatcaaaatcatatggtgcattaactcaaccaaataaattcaatcaaaatagatttttatatcgatcaggtaaagggattgttataagaggagttcatcgtaaaactcccagactgaatttaaaattaaaacaacaaactttaagaattttaattaatggagaattgaaaatttttaaaaattataaaactaaattatgggggattgaaaaaaataaaactattagagatttgacttggaaatatattaatggtgaatggagatctggtgatgatcatataattgaaaaagttacatgtggtatatcttctggacaacaagcagaaaattatagtaaagataatattataatagataaagaagacaatagtggtaataagttatctagtatcgataatgataatgataatgacaatgacaaggaagaaattgacaagaataaatctatattagcatcaatgtttgattcatacgattttgataaaccaatagaattagaagagactggaaacgaaattcatggtagtggtggtggtaaagttgctactgctgctgatgatgatgatgatgaaattcaagtagattctaaaggcagaaagaaagcaaaacattacgattatgagattgaagggaaaatatcagaggatgaacaagaagaagaagaagaagaaaatgatgctgaaaaaattaataccgttgatattaaatcagctaatcaaattattgaaaattataaacaatcatcaagttttgtgcctactaaagaaacatactatgacgaagatgacgaaggtaatgaaattgaattagatgaatttaataacaagtataccactgaagcaattaaaagtaattatgataaagatcataacgatatagaggtggagagggaggataatgatgatgatgaagaagaagaatttattccaacgtttggtgctccaaaaccaaatacaaataatactgaaactttaagagcattatttaatccaactacaagtaacacaactattcaaccaacatcaatagcagataatggatcatttaaacttggtttacaagacgatgatgaagatcttgatactgataaacaattggataatcttaaacaacaagaattatacaaaaaattacaaaagcaacgtcaagaacaacaacaacaacaagaagaagaaaccaataatcaacaattattatcaagtaataaaaaatttggattattttggtgtcattttgattcaccatttttatctactcaatcacaatttagtaaattaggtggtggtggtggtaatgggaaaataaaattaccaggtgaagaagaagaagaagtggaaggaaaagatgataaagatcaagatgaagatgaagaatcattatatgaaaaatggttttggagtatgagaggtgatatttcacgtgaatgtaaacgtcgtaaacgtgatttattaagaaccatacgtaaaaagaagaagaattga

SEQ ID NO: 6668 - DNA, 1290 bp, Candida albicans
atgggttgtggcgctagtgttccagttgatgatgatgaaattgatctatttcttcaagataaacgtataaatgatgctattgaacaaagtttacaattgcgtcaacaaaactcgaaaaagggagtcaagttgttgttgttgggtgctggtgaaagtggtaaatcaacagttttaaaacaattgaaattattacataaaggtgggtttacccaacaggagagaagacaatattctcatgtcatttggtgtgacgttattcaatcaatgaaagttttaatcattcaagcaagaaagttgaaaatcaaattagattgtgatcagcctaataattcattaattccttataagcagattatattacgaagcgatcctttaaaacaaatagatgctgatgttgctggtggtacagatttcctaaatgattttgttgtcaagtatagtgaagaaaacaagaacaagagacggttgaagagtactgggacaacagatatatggggtaaagatgacgattccaatatcaattcagatgcaattaatcaagctttggaactgtctttgaataaagattctgaacagtttactcgtctttccatagctgaagcaatccataaattatggaagttggactcgggtattaaaaagtgttttgacaggtcaaatgaattccaattggaaggtagtgctgattattatttcgataatgtcttcaactttgctgatacaaattatttatctactgatttggatattttaaaagggagaattaaaactactggtatcactgagacagattttttaattaaatcgtttcaatttaaagtgttagatgctggtggacaacggtcagaacgtaaaaaatggatccattgttttgaagacatcactgctgttttatttgttttggctatctctgaatacgatcaaaacctatttgaagatgaacgggtaaatagaatgcatgaatctattgtcttgtttgattcattgtgcaattccaaatggtttgcaaacaccccattcatattatttttaaacaaaatcgatattttcgaaaacaagatcaaaaagaatccgctaaagaattatttcccagactatgatggcaaaccagacgatactaatgaagcaatcaagttttttgagacaaattttttgaaaataaatcaaaccaataaacctatctatgttcatcgaacgtgtgctacagattcaaaatcaatgaaatttgtcttgagtgctgttaccgacatgattgtacaacaaaacttgaaaaagagtggtattatatag

SEQ ID NO: 6669 - DNA, 1845 bp, Candida albicans
atgactgctggtgataacagtatagaatatgtcaatccttatagtctttctcaaacaataaactcagatcttatatctatacttgatcctaatggatcaaccacatcaattatcaaaccacaattaaattatcaaatcccaattttcaaatccatcgatgtttcaaatctaattgatttgaataatactaaaatccaaactcaaacaaatgaaactcgaattaataaagctaaagattccagtgatgaccaccaaaacaatcccctgtcaaaagattatgacactagcggggagaacattgttggaggaattgatgatattgttgaagatattaaattatatgtatctatagataaattaaagccagaaaattttcaaaatcaattaacaacaatcattattaatcaatttcccactaatttgaaatcaaatttaattgaacaattattaaagatgttaatgaatttgaaaaaatttgtgtggtcgtttattaatcatgaattaattgatttaaaactaatatttataaaattcgatcaattaaaagatttaaaatggtttttattaacttatcgtgatcatatatctcaattgattcctaatgttaccatcattactaatgataaagtcaatgaatatttaaataataacaaagatagctcattagcgaaagttgaaccaagtaaaatcactgataatttgaaggctaaaataaatttaataattaataatccaataaattataccaagggtaaaaagaattctgggactgaagatttagatcaagttttagattcttatagtaattataaagtggataataatgatttaattgatattcctaataatatgaaagagaatattattaaagatataataagattccgttcaagaatgttattgattgaaaaggaacaacgaaagaaagaaattgaaatggaaagaattaaaacaaagaataaattaaaagaattatttgaaggtattaaagagaattcaacggattctactacaagaaaagcaacaaataaagctgctgtaggagttactatttcccctaaagtatcacatcgagatgaatatgaagatatgaatgacaaagaatatgaagaatttattgctgttgaagaacgtaataaattgaatgatcaatataataagaaattgaaatcgtttcaaaataatcaacatgcagaatatatgaaattgacaaataaattgaaatctttacaaaattatgaatctgatttaattgataataaattgaaatatattgataatttgaaaaattatcaaactaatggattagctcatttatatactcataattatagtgattatttaagaatgagatcacaaaagagatcattggaagaaacaaaagatgctgaagatgtgaaacaagaacttgaagagattaaaaagaatggtggacaagttgcaagtacaaacaccaacaccaacacaaagccatccacytattcttctggtgtatcagaattagccacaacaagtgttgaaactcctaaatcaacaacaacaacaacaacaactaacgacactactgatgaaccagtggctaaaaaatcaaaacttgcaaaagaaatcattatcattgacttaccaccaacggttaaacaatcattacaagagaaaattgttgaattggttgaaaattctcttggtataaaagatgaatttttgattcaagtgattaatgaaaatcttgaagcttccaatcttgataataaacaagaattaattgatgaattggtacaagtattagatgaagatgcagaaagtttggtcaatgaattatgggattatatagaaaccatggtgtaa

SEQ ID NO: 6670 - DNA, 2553 bp, Candida albicans
atgtcaattgaagaagaaatatcagaagacttggggttcaaactcgacatcaaggataatggcattccactttttgagccattggatttgcaaaatttagcaacaaagcacttgaaattgttggccatacacgatgatttgatggtggcatcaaatagcaaatgtataaaagttgtatcattaaaggacctagacgacataaccactattgaaggggaatttagtattacccaattgcattttgttggaaacgaattgtttgttcttgacgactctaaaataaaatcgttgacggtagaacaactcaagaataaggactacagttttcgtaccatcagagaagggttcgtcgatatacttccatcgccatctgggatattggcactaaacacaaacaacgagttgtacctcaatgcagataaggttgcttccaatgtctcggcgttctgttggacatcgtcgctgtacatttatgcctcaaaagataagccataccatatcaataacaaaaaaatcaaagtcaaagacgttgacgaactttgtattgttgagatgtttgccataaatgaaaagtacttgtttgttgcttacgatacggtagatgccgagttggattaccacgatgtcaaatcatatattttggaggaaacagataatgactatactgcattagaagctgatatcgccccagcatttgggtctgttgctagagccgtgacttattatcatgcacaattgtcggactggtataaatcaaacaagtttgtgctccttacctcgtcgttggccatagatttaggaatattggacaccactaaaggacaaacaccaaagataattgcacaatcggaagatatcaaccgtgcacaatttcctattgacgacgaatcaggtgacgattgctcgccagttgggtttggtgtatccttaaacgaactaacttcgaaagttcttgaaccgtgtccaggcgctgacgaggttactggagttttgcctagaatatacaccttgcttcatacaggtaacttgatttcatggtgggttttccataagtcagcaatcctaaaaaaagaattgtctttagagaacgcaatcaaggcatcatctactcaaaccaaagaggtatcaaatgaacctgctcaaacaaagagtaacccatttggtaacaccccatcaagtgtttttagtgcgccagctagcaaatctgcatttggtcaaactgggtttggtgggtcggaagccagctctgggtttggaactacaggacttggacagaaacccgaagctacctccgcgtttggaactacaggacttggacaaaaagttgaatcaaaatctggttctggtaactctgctgtcatacaaaatccccaagctacctctgcgttcggaactacaggatttggtcagaagcctcaagctacctccgcgtttggaacaacaggatttgggcaaaaagcccaaacaaattctgcatttggcagctctggctttgcacaaaaacctcaagcaagctctgcatttgcccagtcaagtggaagtcctttttctggattcgcaaagtcaggatcaacaagctcaggatttgccaaacttggatcgggtggtccttcaattttcggcgacaagacctcgtctccagtttctaccccgttagctgatgaatcaaaggaactggaagaagaaagtgaaatatcattacccgaagaaagtgattacagcgatgaagaggaattggctacagatgatgcaaacacatccaaggatttggaagaggtagaaggagaaaatgttacagaaactcaagaggagaaagtggagacagaaatcccaccccctaccgatccaaagccagtacagttttctttctttagtggcttcaccaggatttccaagccaagttctaacgaaatcaaaaacaagatcattaacataattgaaagcacagaaggtaacttacaagttatggatgcaaacagaaaccaattgggagactttatcggccaacacgaaaaaatcgacaagggcatagatagtcttaaattcgccgaggcaagggttccactccgtgataccaccgagactttaaaacgagaattattagagctaaccaacttatctacaaaaattcaaaaatgttttggcgaaaaagtgaaactcgaccgtctttacagtcaattggcattggcagcagaccaaaactctgccaacaaagatgtcctcaaatcccggccattggatttcaaaaacgatttgatgcaaacaaaattgcgtgaaaaactaaacaacgtgagaagcttagaaaagaaagtgttggcgttgttgatgccaataaaagcaaagaattcaatggatgatcaaacaatcgacaacattgaaagaattgtatttcaaatcaatgaacagattttggatcactcagtaggtattgacgatttggcaacacaaatgggagagttagacattgaaggtgacaagaaggttgacgtgttgtcaaattgttcaaagttaaagttgaggcagaaattaagacaaaagtcaattatgttttag

SEQ ID NO: 6671 - DNA, 747 bp, Candida albicans
atgaaaagtacttttctcagtttagataaaaggtgtatagaaaaagcaattttttatttgctcgcaactcccaaaacaaaaaatttctctgtttctttttcatcaacgatgtttctgttcaagggttttgggtcggcaattaggccacttcgatttgttaatcatgggatgttccggtttcagtctacacgtgctgcaaaaccacagggaataaaagccctaatgaaagagtatggatatccggcacttgcggtatacttgggtctctcttgtattgatttgccaatatgttatgttttggttcattctatgggacaagaaaagattgaggtgtatgagaataaagtgaaacaaacgtttgggtacggtatttctgatgaagagttgaagaagaaacaagagattaacaagatccagcaagacattgagtcacaaggcgaaacaacctcggaaaattctgggtcgatggtcagctacatattgagtcaattttcatggacagagtttgccattgcgtatgggatccataaatcgttaattttcattaggttgccaatcactgctgccattacaccgggaatagtgaaactcttgagaggttgggggttcaggattggtacggacaagttgtcgaccactgctagtattgctaaggatttggcaaagtccgggatcaaagatattactgcttcgtcgaccaagtttggagtcaagccaggcaataagaagtggtggtggtttttctga

SEQ ID NO: 6672 - DNA, 4344 bp, Candida albicans
atgtcatttgcaaggtatatctactacaccattgcggttgctgttttattaaattttgtcaaagctactgaaaataacaattttaaacttgaagttgaagcgtcatggagcaatattgatttccttcctagctttatagaggccatcgttggcttcaatgactctttgtacgaacagacaattgaaacaatttttggtttaggagacactgaagtggaattagaagatgatgcttcagatcaagaaatatattctaccgtgatcaactcattagggttaacagatcaagatttggattttattaattttgatttaaccaacaaaaaacatacaccaagaatcgcagcccattacgatcactattctgatgttctaactaagtttggcgatcgactcaaaagtgaatgtgcaaaagactcttttgggaatgcagtggaaacgaaaaatggtcaaattcaaacgtggttactatataacgataagatatattgttcggctaatgatttgtttgcattacgaactgatttgagttctcattctacacttttatttgataggattattggaaaatcaaaagatgcacctttggtgattttatatggaagcccgactgaggaactgactaaagattttcttaaaatattgtatccagatgcaaaggctggaaaattaaagtttgtatggaggtacattccactgggaatcaaaaaactggactcaatttctggatacggtgtatcattgaaaatggaaaagtatgattattctggtgcagaaggaaatccaaagtatgatttgagtcgagatttcaccagaattaatgactcgcaagagttggtcctggtcaatgaaaaacattcgtatgaacttggtgttaaattgacttcattcatattatccaatcgttacaagagtactaaatatgaccttttagatacgattttaaccaactttcccaagtttattccttacattgcacgattaccaaaattactaaatcatgaaaaagttaaatccaaagtgcttggaaatgaagatatagggctatctcaagactcctacggaatatatatcaacggttccccaataaatccactagagttagatatttacaatctaggtaccaggataaaggaggaattacagactgtgaaagatttagtgaaacttggatttgataccgtacaagcaaagctcttgatagcaaaatttgctttactttcagctgttaaacaaacacaatttcgaaatgggaatacattaatgggtaacaatgaaaatagatttaaagtgtatgaaaatgaatttaagaagggtagttcagaaaagggtggggtcttgtttttcaataacattgaattagacaacacattcaaggagtacaccactgatcgtgaggaggcatatttaggagttggttctcataaacttaagccaaatcaaattccgttattgaaagagaacatccatgatttaattttcgcattaaattttgggaacaaaaaccaattgcgggtgtttttcactttatctaaggtgattttggactccggtatacctcaacaagttggagttttgcccgttataggagatgacccaatggatctgttactcgctgagaaattttattggattgctgagaaatcaagcacacaagaggcattagcaatattgtataaatattttgaatcaaacagtccagatgaagttgatgacttattagataaagtggaagtacccgaagattataaagtggattataatcatgtgttaaacaagttttctatatcaactgcttcggtcattttcaatggggttatttacgatttaagagcaccaaactggcagattgcaatgagtaaacaaatatcccaggacatttcacttattaaaactttcttgagacagggaccaatagagggtagattgaaagatgttctttactctaatgcaaaatcagaacgcaatttacgtataattccattagaacctagtgacattatttacaagaaaatcgacaaggaattaataaacaattcaattgcattcaagaagctagataaagcgcagggtgtgtctggaacattttggctagtgtcggattttaccaagtcagcaataattactcaattgatagatttgttattgcttctcaaaaagaaagcaattcagataagaattattaatactggggatacagatgtttttggaaaattgaaaacaaagtttaaattaaccgccttaacaaatggacaaattgatgaaattattgagattttgaaaaaatccaacgcttcaagtgcaaataatgatgaattgaaaaaaatgcttgagactaagcaattacctgctcatcactcttttttgctattcaactctagatattttagattggatggaaattttggatacgaggaattggatcaaattatagagtttgaagtatctcaaagattgaacttaatcccggacatcatggaggcatatccggatgagtttaggtcgaagaaggtaagtgattttaatctggttttgtctggattagacaatatggactggtttgatttggtgacttccatagtgacaaaatcattccatgtcgacgaaaaaaggtttattgttgatgttaacaggtttgattttagctcattggatttttcaaactcgattgatgtaacgacttatgaagaaaatagtccagttgatgtattaataattttgaaccctatggatgaatattctcaaaaattgataagccttgttaatagcattacagattttctgttcttgaacattagaatcttactacaaccaagagtggatctgaaagaagagatcaaaattcacaagttttatcgtggtgtgtatcctcaaccgactcccaaatttgattccaatggcaagtggatccaacattattcagctcaatttgaaagtattccatccaatgtgacctattctactgaattagatgttccacataagtggatagttgttcctcaactgagttcgatggatttaaacacaatcaatttcagcgaaagccactctgttgatgcaaaatactctctaaaaaatatattaattgaaggatatgctagagatattcatactgggaaggcccctgatggtttaatctttagagcctttaataaaaattactcaactgatactttggtgatgacttccttggactattttcaaatcaaagcgtatcctagtattttcaactttagtacgacctcaaatgacacattattgtctgcatcggaaaacaaatatcaggctaataccgaggaattggagagcattgaggtgccagtttttaaaattgatggatcgaccatatatccaagggtaatgaaatctggcaacaataagccaatgctgacgagaaaacatgcagatataaatatttttacaattgctagtggccaactttatgaaaagttaactagcattatgattgcgtcagtaagaaaacataaccctagcctgacaataaaattctggattttggaagattttgtgaccccacaattcaaacacttggtagagcttatctcaataaagtataatgtcgaatatgagtttattagttacaaatggcccaatttcttgagaaaacagaaaaccaaagaaagaatgatttgggggtataagattttgtttttggacgttttgttcccacaagatctcaacaagattatattcattgacgccgatcaaatatgtagggcagatttgacagaattggttaacatggatcttgaaggtgctccatatggatttactccaatgtgtgattctcgggaagaaatggaaggtttcagattttggaaagaaggatactggtccgatgttttgaaggatgatttgaaatatcatattagtgcattatttgttgttgatttgcaaaagttcagatctataaaagctggagacagattgagagcacactatcaaaagctttctagtgatccaaattcgttgagcaatttagatcaagatttgcccaataatatgcaaagactgataaaaattttcagtttgcctcaaaattggctctggtgtgaaacgtggtgctcagataaaagcttggaagatgcaaaaatgattgatctttgcaacaatccattaactagagaaaataaattagatgctgctaagagattgatcccagaatggattgaatacgagcaagaaattgaaccattggtatcattagtacagaataataccgccaaagaagttgttcaagagatagaaattgatacagacggagaacaagaagaacaaaaacaagaaagtaatgatgatgattttattcacgatgaattgtaa

SEQ ID NO: 6673 - DNA, 2223 bp, Candida albicans
atggcgtctcaaagagatttaacttcaaataatcctcatttccatatatcgagttctcgtaacaataccaatgatgatttcaattctgatcataatccaagaaatccatttggtgatgaaccagaagaagaagaagaattagattcagcatcattttcatcctcatcacaaaataatcaaccccatcacccttttgctacatcaaatcaaaccctgagcactaataatcttcatagtaccaacagtattcgaaatgaagctgaatatggcaaaccattccaagcttatagtggctactattcaaatggtggtagttcactgtatttaaatcaagaaggtgtgatttctgatgaaagtagactattatcatcgggtaataataataataataataataataatcgagatgtatctagtgttggtggtggtggtggtagtggtgacaatagattgaatccaaccagtccagcagaatttgatagatatccatcaatggcaggttcaagagtagtatcatctacttcattagtgtcgtttaataatccttccaatatgatgcgtaaccaccatcaacatcaacctcatctcggttcatcttcatctccaacttctagtagcatgaataatgattctatatcagataaatcaactagcccctttcctaatgatttcagtccatttggtggataccctgctagttcattcccattgagtattgatgaaaaagaaccagatgattatttgcataatccagatccagtacaggatgctgaatacgaaaagaaccgatttatgcacgatttaaagaacatggataaacgatcattgggtgggttgattggatttattatattatttatagctgcattagcagtgtttatcattttacctgcattgacttattctggagctactaacccttatcatccagaaagttacgaagttttaactaaatatctgtacccaatgttgagtgctataagaatgaatttagtggatccagatactcctgaatcagcttataaaaagaaggctaaagatggtagtgaatgggtattagttttcagtgatgaatttgatgctgaaggtagaactttttatgaaggcgatgatcaatttttcactgctcctgacattcattacgatgccactaaagatttagaatggtatgatccagatgctgtaaccacagccaatggaacattaaatttacgtatggatgcttataaaaatcataatttattctatcgttcaggaatggtacaaagttggaatcaattgtgttatactcaaggtcatttagaaattctggctcgtttaccaaattatggtaatgtaacagggttatggcctgggttatggtctatggggaatttaggtagaccagggtatttgggatctactgatggggtatggccatattcttacgattcatgtgatgccggtattacacctaatcaatcttctcctgatgggatttcttatttgccaggtcaaagattaaataaatgtacttgtccaggtgaattacatcctaatcgaggtgttggtagaggtgcccctgaaattgatgttattgaaggtgaagtgatgactgatagtagtggtaaaaaagaaaattgtggtgttgcctctcaatccttacaattagcccctatggatatttggtatattcctgattataattgggtggaaatttacaatttttcagtttcaacaatgaatacttatactggtggaccattccaacaagcattatcagcaacaaccatgttgaatgttacatggtatgaatttggtgataatgcccataatttccaaacttatggttatgagtatttaaatgaccctgaaacgggttatttacgatggtttgttggtgatgatccaacattaacggtttattcacaagctttacatccagacggaaatattggttggagacctttaagtaaagaaccaatgtcattaattttaaatttggggatttcaaataattgggcttatattgattgcccaagtatatctttccccgtcacatttagaatcgattatgtaagagtttatcaaccaccagatcaaattaatgttggttgtgatccaaccgatttcccaacttatgattatattcaacaacatttgaatctttatgaaaatgccaatataacttcatttgaagatggtggatataaattccctaaaaatagtttaattggatgttaa

SEQ ID NO: 6674 - DNA, 816 bp, Candida albicans
atgagacaatttcaaatcatattaatttcccttgttgtttccataataagatgtgttgttgcagatgttgacatcacatcaccaaagagtggagaaactttttctggtagttctggatcagcaagtatcaagattacctgggatgattcagacgattcagactcaccgaaatctttggataatgccaaagggtacacaatttctttatgtactggacctacttcagatggggatatccagtgtttggatccattagtcaagaacgaagctatttcaggtaaatctaaaacagtttccattgcccagaactcagtacctaatggttattactatttccaaatttacgttactttcactaatggaggtaccactattcattattcaccacgtttcaaattgactggtatgtctggtccaactgccactttagatgtcaccgaaacaggatcagtgccagcggatcaagcttcaggatttgatactgcaactactgctgactccaaatctttcacagttccatataccctacaaacagggaagactagatacgcaccaatgcaaatgcaaccaggtaccaaagtgactgctacaacctggagtatgaagttcccaactagtgctgttacttactactcaacaaaggctggcacaccaaatgtggcctctactattaccccaggttggagttatactgctgaatctgccgttaactatgctagtgttgcgccatatccaacatactggtatcctgccagtgaacgagtgagtaaggctacaattagtgctgctacaaaaaaaaaaaaaagggtggattga

SEQ ID NO: 6675 - DNA, 2769 bp, Candida albicans
atgtccgatagtgaaagttattatcaaaattcaactactaatcaacctattcctagatctgatgaagtattggatgatcatagaaatcaaatcactaatgattgtgccattagtgatagtgaagatgagttggaattaaaatcagaattagaatcagaagttgtaaaaagcgaaaaacaacaacaacatcatcaagagattacatcagataatgctaaaccattgactcgtaaatctggttcttcaattaagaaaaaatctaatcttaccgataaagatagaattaccaaccctatgagtttatctggtggtgatgatactattaacagcggtcacaaaaatcgtaattataacatgagttcattacgtaaagatttttatttaaaagataatactgacgacaattctactaataatcatactcatcttgcaattccaattccaattccaattccaaccccaattattactaatgctaataaatcaagaagaaaatctcaattggaaaatttacctccattaattaaaaagaaaacaattggtcgtaataattctaataattttgaaaatgatttagttagtcccatgacaaaaatgaaaactaatgatagtgaagatattactaatactagcaccactgctaatcatatgaaacttggtattggtgctacaacccttggtgttggaactggtactaccgccactgccactgccactgctgctgctggtagaagaccatctcgttcatctattgatagtgaagctgattctcatgcatcaagatcatctcaagaaactgaagaagatgtttgttttcctatggttggtgatcatattagagttaatggaattgattttgatgaaattgatgaatttattagagaagaaagagaagaagcttatttacaaaaacaaatgattgctaaaaatattctgcgtattgatgaatttcaaaatctttccaaaaataatactactagtggtgcatctcgtcatccatatcatcatcacagtaataataataaaaaaaataatggtggtgatggtggtggttctagtatggcagcattaaaatatactccaaaaaatattttaaagaaaacattatcaagatttgaatttactcatgaaaattcttcatcttcagaagaaatttatgaattgaagactaaacaacaaccaccttacaaatatgatgatcaattatcattaacttcatctacatcttctacttctggatctggatctgggcaggtgaaatttggtggagcaagaatttctgatgggattaatggaggttcattacctgatagattttcacttttccattctgaatcagaagaaactattcatgcccccgatattccatcattagtatcaccaggtcaatctgttcgagatttatttagaaatggtgaagaaacttggtggttagattgtacttgtcctactgattcggaaatgaaaatgttggccaaagcatttggtattcatcctttaactgctgaagatattcgaatgcaagaaactcgtgaaaaagttgaattatttaaaagttattattttgtttgtttccatacttttgaagctgataaagaatctgaagattatttagaaccgataaatgtttatattgttgttttccatgatggtatattaacgttccatttttcaccaatttctcatccagcaaatgttagaagaagagttcgtcaattgagagattatgtcgatgttagtgctgattggttatgttatgccttaatcgatgaaattaccgatggttttgcccccgtgattcatggaattgaatatgaagctgatgccattgaagatgccgttttcactgctagagatactgattttagtagtatgttacaaagaattggtgaatcaagaagaaaagtcatgactttaatgagattattatcaggtaaagctgatgtcattaaaatgtttgctaaaagatgtcaagaagaagctaattcttcttctggttattatcaacgtcaatataacttacaacaacaacaacaacaggccccaccaccaccacctaatcctattattacttcaccaattaattcaactttgaatcttaatagtttaggaacttcaactggtggaggagtaggagtaggaggaattaattttggtcccaatccaactggaaataatactaatactaatactaatactactggttcaccttcaccacctcaacaacaacaacaacatggtatcactaacaaatctttccccatccccgatgcacgtccaagagctgatattgcattatatttaggtgatattcaagatcatataatcaccatgtttcaaaatttattagcctatgaaaaaattttcagtcgttcacattcaaattatttagctcaattacaagttgaatcattcaattccaataataaaatcaccgaaatgttttctaaaattactttgattgggacaatgttagttccattaaatttagtcacgggactttttggtatgaatgtaagagtccctggtgaaggtggtaccaatttaggttggtttttcggaattgttggagtattaatatttataattattggatcatttatatttgctcaatggtggttgaaaaaattgaataattcaattgaaggacaaaataatggtaatcgaccaatttttaatcattcatcaagaagatcaattagaagtttaggtttaaaaaaacatggtggtaataaatcaattattagtttccccaataaatatgaataa

SEQ ID NO: 6676 - DNA, 1830 bp, Candida albicans
atgtatttaatactattggtggtattggccgtatatgtcacatataaactcataacaactgtattaccacatcatttactcattcctagtcaaaattggcgagagaaaatatcatacgttgttaaatatccaaaaccaatttatttaaaagttggaactaaacgatcaagttatcgtcgcagattgattttagccagtgaaaatcctgccttttatactaattttatcaataataaattgaaaatatcacctaatgattgtgaaaatggagatggatttcttaatgaaatgagtagaagagatattgatgatccaaaacgtcgtattatttatggatttttccatccatatgccaataatggaggtggtggagaaagagtattatggcaagcggttaaagcaacattattagctgatgataagaatatttgtgtcatttataccacaaatattgaagctcaaccattagatattttaaacaaagccaacaaaaaatttcaaattgatggattagatcattcaagagttgttttcatttatttaagaaaatttaataatttgattgatggcaattattggaaacattttacattgattggacaattatttggtgggatattattaagtcttgaagccatgtatgaattatcacccgatgtatggattgatactatgggattaccaagtagctatttacttgtttctctttcattgaaaataccaattcttgcctatactcatttccccatattacaagaagatatgtttggtaaattaaaattccaaaaactaaaagatttatggaaatttaatattattaaatttaatgattattttgcattagggaaatttatttattggtcaatattatattatttttatgtttatttaggttcaaaagttaatatcgctttagcaaatggaagttggacatttaatcatttatcgaaaatttgggttttcaatactgctttaggtaatgttttagatgtattatatcccccatgtggtaccgagtttttaatcaaacaagccaatttaaatcaacctcgatctaataaattattatacttggcacaattccgtcctgaaaagcgtcatgctttattattaaaagaatattccaattttttatcaaataatttccccaatgtgactcaaatcaccaacaaattccctacattagtatttgccggatcttgtcgaacggctgatgatactgcaactttgaaatttttacaagaacaagttgccaaattagatttatcaagatttgttgaatttagaattgatatatcttatgatgaagtggtagagttattatctagttgcaaatttggtctaaacgccatgtggaatgaacattttggtattggagtggttgaatatatggctagaggatgtatccccattgttcatgcttcggcgggtccattattagatatgataggaagaaacgaccaacaagaaaattgtttgaacaattggaaaactgatggtggatttttctttaaaagttatgatgatcctgatcttgatcccaatttacaaaaaaatactgaaactggttatattaaatttgaattatttgatcaatttattgattatcctacatttgaaacattattaaaagaattatatgtcaatgaccctacaattattgaagattctaaattacttaaaatgagacaaatcgatcaaaacagagttgcagaaaagttttctaataaagcgtttaataaaaaatggattgaatatattaatgatttgaatactttagaaaaacagtatagagaagagaaacggactaaagttgaacaagtttattga

SEQ ID NO: 6677 - DNA, 1509 bp, Candida albicans
atgatcaataagtattctctcaatgatagagtctccacaattgacaactatttgggcaccattaggtatattggtaacctacctgtttggggaacaaacactgttgcattaggaattgaatgggacgatcctagcagaggcaaaaataatggtgatttgaacggaatccaatacttcacccccaaggttactggctcggggacattcataaaatcatccaatcggtctttaaaccatattcgaaaatcttttgttcagatcatacacgaaaactatttggatactgaatataaaacgaagaatattcagtttggaatcaaaactgtggaagaacttggatgggacaagttaaacaaatttcattccaacttgagaaacctagattcattaacattggactattgcttgataaatattgcttaccatgataatgaagacaagcaattgttcgatgaacttgtcaatttaaccaatttagaactaagttgtaacttatttactgatgtaaatgaaatatgcaaaataattgacaatattcccagtttgactagtcttaacattaatggaaacagatttagtcaattttcacaagaacaaagaactcataatggtatagttctgctaaagttatcttcaacaatgatgtcaaccctgatgctagagaagttaattaagaaatttcccaacttgaaagaactttacatttcagggaacaattattgtaatgctgatattgaaaatatgaatctcaatatgccgttaacgattttggatttgtcttataatagactagagcacatgccaattttaccactcgtgtcagcattaaacttgtcacataattatttatccttacaaatcattaaaggcacttttcccaacttaaagtctttggacttgagggcaaatcagataaaagattggactgaaattgacaaaatatccatacatttacccgatttaaaggaactaagaattaaccacaacccattatttcaagaattgtctgtggatgacatgacgatgcagttgataggccgtatcaaatgctccccagaacacttaaggaaattaaacggtagctttttaacaaatgaagagattgaaaattcagaactctactttatctcaaaagtggaacaaggaaaataccacatagataatgaacaacaatggtcatatttgctttcaaaatataataaactggttgaatctagggtgtcttacacttacacattaaaggactggatgcccttaactatagtattgccagattctaaagagatttctaaaaaattcacgaaaaatacgtctattcttcaattcaaagggttgctatccctgtggatgaacgatttgtccatactaaaattctctgcctactactacactaacgaaaactcgacatttgcagaaaagcacgagttaacaaactatttaagtacgttagatagttattcattactgtacgaccaaagaatttatatttctatagaggcatcaatataa

SEQ ID NO: 6678 - DNA, 432 bp, Candida albicans
atgtcacaaaacactaagacctacagagatgcatttgcacttttcgataagaaaggtaccggcaaaattccagttgaacatttgggtgacttgttaagatctgttggccaaaacccaactttggctgaaatagctgatttgcaaaagactatcaagggaagcgaatttgactttgatacctaccaagaaatcatcaacagaccagacggtttcaaacctttgggtttacctgaagattacatcaaaggattccaagtatttgacaaagatcacactggttatattggtgttggagaattaagatacattttaacctcaataggtgaaaagttgactgactctgaagttgatgagttattaaaaggggtcaatgtaacttctgatggaaatgtggattatgttgaatttgtcaaatcaattttagaccaatag

SEQ ID NO: 6679 - DNA, 2778 bp, Candida albicans
  misc_feature (2049)..(2101): n=g, a, t or c
  misc_feature (2039)..(2101): n=g, a, t or c
atgtcccactctataccaataacatcactgccacctccagcacttaaaaagttgaaactcccaaatggatcagaagaaccatctgaattcgaaagagaattgctcgacataacccaagctgttcacgattctacagatcaaacatgggatagaccaccattaccatcatctttcgaagacatatctttccaacaactagatgcagaagaataccatgatcgtggaaatacatatgctaggttttttggtatcacacaagaaggacactctgtcttgtgtaatgtaactgggttcatccactacttttactgtcctgtccctaaaggattcgaagaaaacttgacagaattcacaaactatttaaaggctaccttcgatggtattgaacgggttgaaataacatctaaagaatcaatttgggggtatagtaacaatatcaaaacttcatttttcaaaatatttgcgaaaaacaacatatccaaaataagatctgctttccaaaatggacaagtacacaatatcgacccgtgcattacttatgacaacatcaactatttattaagattaatgattgattgtaagattaccggtatgtcttggatcacattgccacgtgacaaatataaaatagtcaataataaaatctcaacctgtcaaattgaatgttcaatagattaccgtgacttgatatcacaccctccagaaggggaatggttgaaaatggctccacttcgtatcctatcattcgatattgaatgtgctggaagaaaaggtgttttcccagaagctgaacacgatccggttattcaaatcgctaatgtggtgcagaaatccggtgaatcaaaaccgtttgtgagaaacgttttcactgtcaatacatgttcgtcaattattgggtctcaaatttttgaacaccaacgagaagaagacatgttgatgcattggaaagaattcatcaccaaagtagatcctgatgtgataattggttataatacagcaaactttgatataccatacgttttaaatagggccaaagccttggggttgaacgatttcccatttttcgggagattgaaacgggtcaaacaagaaattaaggacgctgttttcagttcaagagcatatggtactagagaaaacaaggttgtcaacatcgatggaagaatgcaactagacttgctccagtttatccaaagagaatacaagttgcgatcatacacattgaactccgtttctgcacattttttgggtgaacaaaaggaagatgtccaacactctatcattactgatttgcaaaatggaaccaaagaaacacgaagaaggttggctgtttattgtttgaaggatgcctttttaccattgagattactagacaaactcatgtgtttggtcaactacactgaaatggcaagagtcactggtgtgccattttcatatttgttatccagaggtcaacaaatcaaagtcatttcacaattgttcagaaaatgtttacaagaagatattgttatccccaatttgaaaagtgaagggtcaaatgaagagtatgaaggtgcaacagtcattgaaccagaacgtggttactacgatgtaccaattgcaactttggatttcagttcattatacccatcaatcatgatggcacataacttgtgctatactacattgctcaacaaaaattccataaaggcatttgggttgacagaagatgattacacaaaaactcccaacggcgactactttgtacattcaaatttgagaaaaggtattttacccaccattttggacgaattgttaactgcaagaaaaaaagctaaagctgatttgaaaaaagaaacagatcctttcaaaaaagatgtccttaatggtagacaattggcattaaagatttcagcaaactcggtgtatgggtttactggtgccactgtagggaaattgccctgtttggcaatctcttcgtcggttacagcatttggacgtgaaatgattgaaaagacaaaaaatgaagttcaagagtactactctaagaaaaatgacannnnnnnnnnnnnnnnnnnnnnnnnnnnnnnnnnnnnnnnnnnnnnnnnnnnnnnnnnnnnnnaattagttatcacaaaggcatactccaagcacgactactcggctaaacaagcacacgtcgagttggcagaacgaatgagaaaaagagatcctgggtcagcaccaacattaggagatagagtggcatatgtgattatcaaaacaggtggagataaaaattatgaaaaatcagaagatccattgtacgtgttggaaaattctttaccaattgatgtaaagtattacttggaccaacaattgacaaagccattggaaagaattttcattccaatattaggtgaaacaaagaccaaagagttattgacggggtcacacactagaactatcaaggttgcggcaccgaaaaccggtgggcttttaaggtttgccaaaaaatcagaggtatgtgttagttgtagaacaccattgaaaaaagacaatcttggagctttatgtccaaattgtatcaaagatgggaaaggtccagatctttatggaaacgccctttcacaaatgaattatttggaaaataaattctcaagactttggacagaatgtcaacggtgccaaggctctttgcatcaagaagttttgtgttcaaataaagattgtccaattttttacatgcgtacaaaggcacaaaaggacgttcaccaacaagcattggaattggtcaaatgggataacaccaattggtga

SEQ ID NO: 6680 - DNA, 1398 bp, Candida albicans
atgggtcaaggtccttcaggaataccaggtggcgataatctcaacaaaaagaaagatgataagaaaaaggaaaaaccaaagtacgaaccaccagtggaatcaaagtttggtaaaaagaaaagaaggggccccgatacagcagttaaattacctagcgtgtaccccaacaccagatgtaaattgaaattattaaaattagaaagaatcaaggatcatttgttattggaagaagagtttgttaccaaccaagaagcattccaacctacagaagcaagacaagccgaagaaagagaaaaagttgacgaattgagaggatatccgatggcaattgggacattagaagaaataatcgacgatgatcatgcaattgtgtccagcactgctagttcagagtactatgtgtcaatcatgtcgtttgtagacaaggggttattggaaccaggatgttcagttcttttacatcacaaaacagtagcagtggtaggtgtgttacaagatgatgctgatcctatggtttcggtaatgaaactcgacaaatcccctacagaatcatatgccgacattggggggttggaatcacaaattcaagaaatcaaagaatcagtcgaattgccattgacacatcctgaattgtacgaagaaatgggaatcaagcctccaaaaggtgtgatattatatggggctcccggtaccggtaaaactttgttggccaaagcagttgccaatcaaacaagtgccactttcttgagaattgtcggatcggagttgatccagaaatatctaggtgatggtccaaggttgtgtcgtcaaattttccaaattgctgctgatcacgcaccttcaattgttttcattgatgaaatcgatgccattggtacaaagagatacgagtctacatctggtggtgaacgtgaaatccaaagaaccatgttggagttattgaatcagttagatgggttcgatgatagaggtgacatcaaagttattatggctacaaataagatagagtcacttgatcctgcattaatcagacctggaagaatcgatagaaagattttgtttgaaaaccctgacgccaataccaagaaaaagatcttgactattcacacgtcaaagatgagtttggcagatgacgttaacttggatgaaatagtcactggtaaggatgatttgtcgggtgctgatatcaaagctatatgtacagaagcagggttattagcattaagagaaagacgtatgcaagtcaaagctgaagatttcaaatctgcaaaggaaagagtcttgaaaaataaggttgaagaaaacctcgaaggtttgaatttgcaagtgcatagaaatacaattattgtacaacagatttttttttttgtaagtttttttttcctctccatcacttag

SEQ ID NO: 6681 - DNA, 669 bp, Candida albicans
atggccgataacagcgacgattactcctacgattacgaatatttatataaaatagtgttgattggggattcaggagttggtaaatctaacttgttatcacgattcacccgtgatgagtttaatttggaaagtagatcaactattggtgttgaatttgctacgagaacattagaaattgatggtaaacgagttaaagcacaaatctgggacactgctggtcaagaaagatatagagctattactagtgcgtattatagaggagctgttggggctttgattgtgtatgacattgccaagaccgaaagttatgaaagtgtaagtcgttggttgaaagaattgaaagaacacgctgatgctaatattataattgaattggttggtaataaatctgatttggatcatttaagagcagttccaactgaagaagctaagaattttgccatggaaaacaatttgctattcaccgaggctagtgctttaagtagtgataatgttgatttgagtttccatcaattattaaagaatatctacgaaatgatttcaaagcatcaattagaaaacaatgattccaaacaaaccaacactgctggtggaccaactatttccttaactcccgctcctcaagaaaagaagaataagaataacgggtggttgttgttaaggcattag

SEQ ID NO: 6682 - DNA, 750 bp, Candida albicans
atgtcaattgaagatttaaaaaacaccgttaccaaattacaagaaagaatccaagaattggaaaaaaaagctggtattattcctgatgttccaaaatcagttcgtatggttttgatcggtcctccaggttccgggaaaggtactcaagccccaaatttgaaggaaaaattctgtgcttgtcatttagccactggtgatatgttaagagcacaagttgctgctaaaaccgctttaggtgttgaagcaaagaaaatcatggaccaaggtggtttagtgtctgatgaaatcatggtcaacatgatcaaatcagaattggaaaacaaccaagaatgttccaaaggtttcattttggatgggttcccaagaactattcctcaagctgaaaaattggactctatgttggaaagcagaaagaccccattggaaaaagctgttgaattgaagatcgatgatgaattattggttgctagaattaccggtagattggttcacccagcttctggtagatcttaccataaacttttcaacccaccaaagaaagatatgacagatgatgtcactggtgaaccattagttcaaagatccgatgacaacgaagatgccttgaaaaagagattggtcacctaccacaaacaaactgagccaattgttgcatactaccaaaagactggtatctggagtggtgttgatgcttctcaaaaaccaactaaagtttggtctgacattttgaaatgtttaggtcaaaactaa

SEQ ID NO: 6683 - DNA, 1230 bp, Candida albicans
atggatgattttgaaaacgaacaaatacttactaagaaaagtgtacaacttcataatgatattgattctttgatttcaaagttagaaagtttagttgaagcagttgatattgctagccaagacaaacaaagacttattcaaattaccaccacgaaaatcaatttgattataaatgaatttgaaaccaatccaaaactattagattctcatttgcaaaattatattactcgattatgtgatttatatttgaatcaattatcagttcgatcacattgtggtgaaattgtttataatttggccaaaattcgacaaatgaaaaatataattttatatttccctagtgatttatatttaatcaataaaatactatcaattgtaacaacaaccacaaaagccaatgagtttataacattttttgctttattatggatttgtaatttgagtttgttaccattcccattgaattctattgataaaaatttatcaataacaatctataaattaggtattgaaaatttacataaatatcataatgggagtaaaaatcaaattgcttcactgattttattatcaaaattattaactagaaatgattgttctcatttacttcaacaatttttccaaaatatagatatcaataattgggttattctagatgcaaattctaaattaagttattatttaacggtgaataaattattgaaaagtcaaaatattgttggtgaagatgaactattgaaaataaatcaatgtataaataatgatttattgcaactgaagagtttaaacccttcaaatttgaatgtattgtatctggttaaaatatttagtaaattggccttaaattatatttcacgaggggatttttcccaagtccaatcaattattaataatttaataaatgatatattgttagaggcaggaaatttggattataatttacgttattgtatcgcaaaggcattgagtaatattgttgacaaattatccaattatgcaatcaattatcaacaacaattgatagaatttatactttcaaatttagatattactgatgatgtcagtatttcgaaaaatcatactattttattgacattggggtatttatgtttgaataaaacaatgtcgaaacagtacattggcaagttattaaatattgtccatgcgacaatgtttataaaaataagaactcatagtcaaaaggcagatttaggaaattgtattcagtga

SEQ ID NO: 6684 - DNA, 849 bp, Candida albicans
atgagtgatttaaatatatttataacttctaatttaacttcatcagaaagaagaatatcacctcaatggaatttaaaatatttaaaacaaaaattagaatcaatcactgggatttcacctcaaaatcaaattttacattattatccaaataatcattctaatgaatataaattgattccccccattaatggtagtactactactgatgatgacgatgatgatgaacaaattttattatcatcattgaatttacaactgtatagtcgaattcatgtaatagattctgatcctaatagtgatgtcaataaattacaacaacaacaccaacaacaccaagaagaagaagaagaaaagtcggaaatcgaagaaggagatgtcgctggttttacagaatttcaattactggaagaagattataaaactcgtcaaaattctgttttgaattggaaaaaaatcaataaattgggtcgatttgatcctcaatttcaatcattacaagaaaaattacatcatgaaacagaaatgaaattgaaaaccatgtcaattggttcacgatgtcgattaattaatattgaaaataatgaaagacgtggtatcattagatttattggcaaaattatgccattagataatggagaaaatgattgggttggaattgaatttgatgaaccagttgggaaaaataatggtagtattgatggtgtgaaaatatttgaatgtaaaccaaatcatggaagttttgttagacctagattagttgaagttggtgattttcctgaattagatccatttgctgatgatgatgatgatgataatgatgaagatatggatgacgatgaagagttgtaa

SEQ ID NO: 6685 - DNA, 1479 bp, Candida albicans
atgccacaagtcactaaaactaataatgaaaatgagtttagacttactagatcaaaagtacagcatcaagagtcgataagtaccatcaaaaataccaccatatccaattctcagcataaacaacaaacacaacaacaaatttcatcaccacctcaagtctctgtaacatcatctgaaggagtttcacatgtcaatacacgtcaatatttgggtgatgtttcaaatcaatacataacaaatgccaaaccaacaaataaaagaaaaccattgggtggagacaatgcccctctacaaaaacaacagcatagaccatctagaccaatacccattgccagtgataacaacaataatggtagtaccagtagcagtagtaacagtagcaacaacaataacaacgacgcaaatagactagcatctttggcagttccatctcgattaccccaaaaacgacaagctactgaatcgtcgacaaatttagtagagaaattaagagtaccacaaccagaagtaggggaaagaagtcagtcataccataagaaatcacgtttaattgattatgaatggcaggatttggatgaagaagatagtgacgaccaattaatggttagtgaatatgttaacgaaatattttcgtactattacgaattagaaacacgaatgttacctgatccgcaatatcttttcaaacaaacattgttaaaaccaagaatgagatcgatattggttgattggcttgttgaaatgcatttaaaattcaagttattacctgaatcactttttttggcagtcaatgtaatggatagattcatgtctgttgaagtggttcaaatagataaattacaattattggctacagcagctttatttactgctgccaaatatgaagaagtattttctcccctggttaaaaattatgcatatttcactgatggttcatatactccagaagaagtggtacaagcagaaaaatacatgcttaccattcttaactttgatttgaattaccccaatccaatgaatttcttgaggagaatttctaaagctgatgattatgatgtccaatcaagaacgctaggaaaatatcttttggaaatcactatagttgattacaaatttattggtatgagaccatctttatgttgtgccctggccatgtatttagcaagactaatattgggcaaattgccagtttggaatgggaatttgattcattatagtggaggttatagaatcagtgatatgagagaatgtatcgaattaatgtttcaatatcttattgctccaatagaacatgatgaatttttcaaaaaatatgccatgagaaaatttatgagagcaagtactctttgtcgaaattgggctaaaaaattccaagcatcaggaagagatttgtttgatgaacgattatcgacccataggctaacattagaagatgatgacgaagaagaagaaatagtggtagcagaagcagaagagtaa

SEQ ID NO: 6686 - DNA, 945 bp, Candida albicans
atggagcaagaattactcctcaaaggcagaaagaaagactctattgagcagtttattagtggctcccagctatttcttgagaatggtttgtcgcagcttcgatacatggtactagtagaaggattatcaacacctgaaggatacgatcagtgtccataccgctcatatgtatggagcatactatgtcgagttcccccatccccaactgaacagtatttgcaattgctagaaacctcaagtcagaccctcccagatgaattactaatcaaaataaaaaatgatacttttcgtactttgatgaacgataaaaaattccatctgaaagtgaacgaggaatctttgattaggatactatcgtgtattggaataactacggaagttggctatgtacaaggtttaaatgttttattggcacccatcgcatacgtttgtcacaaaagtgaacctcaggcatttgcaatcttgcacaatttgataaccaagcaaatcccattatatattactcctaacatggaaggagtccacacgggtttgcaattggttgacgcagttttgaaaataatagatcctgtcttgagtgactatctagactctaagtttttaaaggcaaagatatacgctttcccttcgatactaactttatgtgcgtgtactccgcctttgaaatcagttttgaaactatgggactttctatttgcgtatggcactcatataaatgtgctctttgttgtggcacaattaataatatgtcgttcgagcattttggaaagtgaacaaccaatgaaaatcttgagaacttggccaaatttagaagaaaatgaaatcataaagttgagtctcagtttcatacctgaactaccagagaagctctatgatctaatagctagacatggttacgatagaaaagttcctaaagaattggcaagatttttagaagaaaaataa

SEQ ID NO: 6687 - DNA, 1476 bp, Candida albicans
atgttaagatcattcaaatctattccagccaatggaaaattggcccagtttgttagatatgcatcaaccaagaaatacgacgttgttgtcattggtggtggaccaggtgggtacgttgctgccatcaaggccgctcaattaggattaaacactgcctgtattgaaaaaagaggtgcattaggtggtacttgtttgaatgttggttgtatcccatccaaatctttattgaacaactcccatttattacaccaaatccaacacgaagccaaagaaagaggtatttctatccaaggtgaagttggcgttgattttccaaaattgatggctgccaaggaaaaagccgtcaaacaattgaccggtggtattgaaatgttgttcaaaaagaacaaggttgactacttgaaaggagccggttcttttgttaacgaaaaaaccgtcaaagtcactccaattgacggcagcgaagcacaagaagttgaagccgaccacatcatcgttgctactgggtctgaaccaactccatttccaggtattgaaatagatgaagaaagaattgtcacttctactggtattttatcattgaaagaagtaccagaaagattagccatcattggtggaggtatcattggtttggaaatggcttccgtttacgcaagattgggctctaaagtcactgttatcgaattccagaacgctattggtgccggtatggatgctgaagttgctaaacaatctcaaaaattattggccaaacaaggtttggacttcaaattaggtacaaaggttgttaaaggtgaaagagatggtgaagtggtcaagatcgaagttgaagatgtcaaatccggtaaaaaatctgaccttgaagccgatgtcttgttggttgccattggtagaagaccatttactgaaggtttgaactttgaagccattggtttagagaaagataacaagggaagattgattattgacgaccaattcaagactaaacatgaccacatcagagttattggggatgtcacattcggtcctatgttggcccacaaagctgaagaagaaggtatcgctgctgctgaatacatcaagaaaggtcacggtcatgtaaactatgctaacatcccttctgttatgtatactcacccagaagttgcctgggttggtttaaacgaagaacaattgaaagaacaaggcatcaaatacaaagtaggtaaattcccattcattgccaactccagagctaaaaccaacatggacactgatggtttcgtgaaattcattgctgatgccgaaacccaaagagtgttgggtgtccacattattggtccaaatgcaggtgaaatgattgctgaagctggtttggccttagaatatggtgcttccaccgaagacatttcaagaacatgtcatgctcatccaactttatctgaagctttcaaggaagctgctttggccacctttgataagccaatcaacttttaa

SEQ ID NO: 6688 - DNA, 2811 bp, Candida albicans
atgttgccaataaaattactaatatttatattgggatatttattatcaccaactttacaacaatatcaacaaattcctcctcgagattatgaaaataaaaattattttttagttgaattaaatactactaattctcaaaaacctttaattgattttatatcccattataggggtcattataattttgaacatcaattatcatcattagataatcattatgttttcagtattgataaatctcatcctcataattcgtttttaggtaatcataattcaaatgaatataatttaatgaaacgacaattaggtcatgaacaagattatgatgaattgatttctcatgttgaatctattcatttattacccatgaaaaaactttctaaaagaatacctgtccccattgaaatggaagatgtggtgtttgataatcgtgatgatactggttctgataatcatgaggcaacagatgaagctcatcaaaaattgatagaaattgctaagaaattagatattcatgatccagaattcactactcaatggcatttaatcaatttaaaatatcctggtcatgatgttaatgtcactggtctttggttagaaaatattttaggtcaaggtatagtcacagcattagttgatgacggagttgatgcagaaagtgatgatattaaacaaaattttaactctgaagggtcatgggattttaataataaaggcaaatctcctttacctcgacttttcgatgattatcatggtactagatgtgctggagaaatagctgctgtgaaaaatgatgtttgtggtattggtgtagcatggaaatcgcaagttagtgggattagaatattatctggccctattacttcatctgatgaagctgaagctatggtatatggattagatactaatgatatttattcatgttcttggggccctactgataatggtaaagtcttatcagaaccagacgtaatagtgaaaaaagccatgattaaaggaattcaagaaggtcgtgataaaaagggagcaatctatgttttcgcttctggaaatggtggtagatttggtgattcttgtaatttcgatggttatactaattctatttattcaattactgttggtgccattgattataaaggattacatccacaatattctgaagcttgttctgctgttatggtggttacttattcttctggatcaggtgaacatattcataccactgatatcaagaaaaaatgttcggcaactcatggtggtacttctgctgctgcacctttagctagtgggatttattcattaatattatcagctaatcctaatttaacttggagagacgttcagtatatttctgtattaagtgctactcctataaatgaagaagatggtaattatcaaactacagctttgaatagaaaatattctcataaatacggttatggtaaaactgatgcttataaaatggttcatttcgctaaaacttgggtaaatgttaaacctcaagcttggtattatagtgatgtcattcaagttaatcaaactattactactaccccagaacagaaagctccaagtaaacgtgattctcctcagaaaatcattcattcatcagttaatgttagtgagaaagatttaaaaattatgaatgttgaaagagttgaacatattactgttaaagtaaatattgattctacttatagaggtagagttggtatgagaattatttctcccacgggggttattagtgatttagcaactttccgagttaatgatgcttcaactagaggatttcaaaattggacatttatgtcagtggctcattggggtgaaactggtattggagaatggaaagttgaagttttcgttgatgattcaaaaggtgatcaagttgaaattaatttcaaagattggcaatttagaatatttggtgaatctattgatggtgataaggcagaagtttatgatataactaaagattatgctgctataagaagagaattattagaaaaagaaaaacaaaatagtaaatcaaccactacaaccagcagtactactactgctactaccacaagtggcggagaaggtgatcaaaaaactactacactggcagaaaataaagaatctacaacaaaagtggacaatctggcaagcattaccactagtcaaactgcatctttgacatcatcaaatgaacaacatcaaccaactgaatcaaattctgattctgattctgataccgatgatgaaaataaacaagaaggtgaagaagacaatgacaatgacaatggcaacaaaaaggccaattctgataatacaggattttaccttatgtcaattgctgttgttggattcattgctgtattattagttatgaaattccataaaactccaggaagtggtcgtcgtcgtagaagaagagatggttatgaatttgatattattcctggtgaagattatagtgattctgacgatgatgaagatgattccgacaccaggcgtgctgatgaagattcatttgatttaggtcatagaaatgaccaaagagtagtatcggcatcacaacaacaaagacaatacgatagacaacaagatgaagctagagatcgattatttgatgattttaatgctgaaagtttacctgattatgaaaatgatatgtttaagattggcgatgaagaagaggaagaagaggagggacaacaatcagcaaaagcaccatcaaattcagaaggaaattcaggaacttcgactaaaaaatataaggataacgaggctgacgaggatcataaagatgttgttggtacacagtag

SEQ ID NO: 6689 - DNA, 5655 bp, Candida albicans
atgaaaccagaaattgaacaagaattatcccacactttgttaactgaattgttggcatatcaatttgcttctccagttagatggattgaaactcaagatgtctttttaaaacagcacaatactgaaagaatcattgaaattggtccttcaccaactttagctggtatggccaatagaactatcaaagccaaatatgaatcctatgatgccgctttatctttgcaacgtcaagtcttgtgttactccaaagatgctaaggagatttactacaagccagatccagcagatcttgctcctaaggaaacaccaaagcaagaagagagtaccccatcagctcctgccgctgccactccaacacctgctgctgccgctgccgctgctcctactccagcacctgcaagtgctggcccagttgaatctattccagatgaaccagtcaaggctaacttgttaatccatgttttggttgcacaaaaattaaagaaacctttagatgctgttccaatgaccaaggcaattaaggatttggttaatggtaaatccactgttcaaaatgaaattcttggtgacttgggaaaggaatttggctctactcctgaaaaaccggaagacactccattggaagaattagctgaacaattccaagattcattcagcggtcaattaggaaagacttctacttcattgattggtagattaatgtcctcaaagatgccgggtggattttccatcactactgctagaaagtatttggaatcaagatttggtttgggtgctggtagacaagattctgtcttgttgatggctttaacaaatgaaccagctaatagattaggttctgaagccgatgcaaaagctttctttgatggaattgctcaaaaatacgcatcaagtgctgggatctccttgtcatcaggagcagcctccggtgcaggcgccgcaaatagtggtggtgctgttgttgatagtgctgccttagatgctttaacagctgaaaacaagaaattagccaagcagcaattagaagttttagcaagatacttgcaagtcgacttaaacaagggagccaaatcttttatcaaggaaaaggaagcttctgctgttttacaaaaagagttagatttgtgggaagcagaacacggagaattctatgctaagggtatccaaccaactttctccgcattaaagtctagaacttatgactcctattggaattgggcccgtcaagacgttttatcaatgtatttcgacattatttttggcaagttaacttctgttgatagagaaaccatcaaccaatgtattcaaatcatgaacagagccaatccaactttaatcaagtttatgcaatatcatatcgaccattgtccagaatataaaggtgaaacttataaattggccaagagattgggtcaacaattgattgacaactgtaaacaagttttgactgaagatccagtttacaaagatgtttccagaattactggtccaaagactaaagtcagtgctaagggtaacattgaatatgaggaaactcaaaaggattcagttagaaaatttgaacaatatgtgtatgaaatggcccaaggtggtgctatgaccaaagttagtcaaccaactattcaagaagatttagctagagtttacaaggctatttccaaacaagcttccaaagatagcaaattggaattgcaaagagtttacgaagatttattgaaggtggttgaaagttccaaggaaatcgaaactgaacaattgactaaagatattttacaagctgctacagttccaacaaccccaacagaggaagtagacgatccttgtactccttcttcagatgatgaaattgcttctttaccagataagacttctatcattcaacctgtctcgtctactattccatctcaaactattccatttttgcacattcagaaaaaaaccaaagacggttgggaatacaataagaaattatcttctctttacttggatggattggaatcagctgccattaatggtttaactttcaaagacaagtatgtcttagttactggtgctggtgctggctctattggtgccgaaattttgcaaggtttaatcagtggtggtgccaaagttattgtcacaacctctagattttccaagaaagttaccgagtattatcaaaatatgtatgccagatatggtgctgctgggtctactttaattgttgttccattcaaccaaggttctaaacaagacgttgatgcattggttcaatacatttatgatgagccaaagaaaggtggtttgggttgggatttggatgcaatcattccatttgctgctattccagaaaatggtaatggtctcgacaacattgattctaaatctgaatttgcccacagaatcatgttgaccaaccttttaagattgttaggtgctgttaaatccaaaaagaccactgacactagacctgctcaatgtattttgccattatctccaaatcacggaacttttggttttgacgggttgtactctgaatctaaaatctcattggaaaccttattcaacagatggtattctgaagattggggatccaagttgactgtttgtggtgctgtcattgggtggaccagaggtacaggtttgatgagtgccaacaacattattgctgaaggtattgaaaaattgggtgtcagaactttctcccaaaaggaaatggctttcaatattttaggtttattgacaccagaaattgtacaattatgtcaagaagaaccagttctggctgacttgaatggtggtttgcaattcattgataacttgaaggatttcacatctaaattaagaaccgacttgttggaaactgcagacattagaagagccgtttctattgaatcagctatcgagcaaaaagttgtcaatggtgacaatgtcgatgcaaactactccaaggttatggttgaacctagagccaccatgaaatttgatttcctaactttgaaatcttatgatgaaatcaaacaaattgctccagaattggaaggtatgttggatttggaaaatgttgtcgttgtgacagggtttgctgaagttggtccatggggtaactctagaaccagatgggaaatggaagcctatggtgagttctcattggaaggtgccattgaaatggcttggattatgggtttcatcaagtatcataatggcaatttgaaagggaaaccatactctggatgggttgatgccaagactcaaactccaattgacgaaaaggatatcaaatccaaatatgaagaagaaattttagaacattccggtattagattgattgagccagaattgttcaatggctatgatccaaagaaaaaacaaatgattcaagaagttgttgttcaacacgatttagaaccatttgaatgttctaaagaaacagctgagcaatacaaacacgaacacggagaaaaatgtgaaatttttgaaattgaagaaagtggtgaatacacagttagaatcttgaaaggtgcaacattgtacgttccgaaagctttgagatttgatagattagttgctggtcaaattccaactggttgggacgctcgtacctatggtatcccagaagacactattagtcaagttgatccaatcactttgtacgtgttggttgccactgttgaagccttgttgtctgctggtattactgatccatatgaattctacaaatacgttcatgtgtctgaagttggtaactgttctggttccggtatgggaggtgtctctgctttgagaggaatgttcaaagatagatatgctgacaaaccagttcaaaatgacattttgcaagaatcatttatcaacactatgtctgcttgggtcaatatgttgttgttgtcttcctctggtccaatcaagacaccagtcggtgcttgtgccactgctgttgaatcggttgacattggtattgaaacaattttgtctggtaaagctaaagtagttttggtaggtggttacgatgacttccaagaagaagggtcttatgaattcgccaatatgaatgctacttctaattctattgaagagttcaaacacggaagaacaccaaaggaaatgtcaagaccaaccactactaccagaaatggtttcatggaagctcaaggttctggtattcaagttatcatgacggctgatttggcacttaagatgggtgttccaatccacgctgtattggccatgactgctactgccactgataagattggtagatctgttccagcaccaggtaaaggtattttgaccactgccagagaacatcatggcaacttgaagtacccatctccacttttgaacatcgagtacagaaagagacaattgaacaaaagattggaacaaatcaaatcttgggaagaaacagaactttcttacttgcaagaagaagccgagttggctaaagaagaatttggtgacgaattttccatgcatgagttcttgaaagagagaactgaagaagtgtaccgtgaatcaaagagacaagtttctgatgctaagaaacaatggggtaattcattctacaagtctgatccaagaattgctccattgagaggagcattggctgccttcaacttaaccatcgatgatattggtgttgcatccttccatggtacttccaccgttgctaacgataagaatgaatcagccacaatcaacaacatgatgaaacacttgggtagatccgaaggtaacccagtatttggtgttttccaaaaatacttgacaggtcatccaaaaggtgcagctggtgcttggatgttgaatggtgccattcaaattcttgagtctggtcttgttccaggtaacagaaatgcggataatgttgataagcttttagaacaatacgaatatgtattgtacccatcaagatcaattcaaaccgatggtattaaggccgtttctgttacatcatttggtttcggtcaaaaaggtgcacaggctgttgttgttcatccagattacttatttgctgttttggatagatccacttatgaagaatatgctactaaggtctctgctagaaataaaaagacctaccgttacatgcacaatgcaatcaccagaaacactatgtttgttgccaaagacaaagctccatatagtgacgaattggaacaaccagtttacttggatccattggctcgtgttgaagaaaacaagaaaaagttggtattcagtgacaaaacaattcaatcgagccaatcttatgttggagaagttgctcaaaaaactgctaaggcattgtcttctttaaacaaatcatcaaagggagtcggtgtagatgttgaattgttgtcagcaatcaatatcgacaatgaaacctttattgaaagaaactttactggtaatgaagttgaatactgtttgaatactgctcacccacaagcttcattcactggaacttggtcagcaaaggaggctgttttcaaagccttgggtgttgaatcaaaaggtgctggagcaagcttgattgatattgaaatcactcgtgacgttaatggtgctcctaaagtaattttgcatggtgaggccaaaaaagctgctgctaaagctggtgttaaaaatgtcaatatttcaatttctcatgatgatttccaagctactgctgttgctttaagtgaattttaa

SEQ ID NO: 6690 - DNA, 1305 bp, Candida albicans
atgtcagctgattattggaattcatcacaacgtaatcaatggcaattaactcgattttcattattagaagccagaagaagagtattattacttgaacggaaaatgattcaaaatggattaattaaagattatcccaatataatatatgattataatatgaggatttatttacataatttattaattaaattaggtcgaagattaaatattcgacaaatagcattagctactgctgaaatttatttaactcgatttcttacccgagtttcacttaaagaaatcaatgtttatttattaataactacatgtatttatgttgcttgtaaaattgaagaatgtcctcaacatattcgattaatattatcggaagcaagaaatatatggccagaatatattcctcatgatgttaccaaattagctgaatttgaattttatttaattgaagaaatggatctgtatttattattacatcatccttataaatcattaatgcaaatcaatgaatttttatctaataattataatgtatttggttttaaattaacagtggaagaattacaaaatgcttggagtttaattaatgatagttatataactgatcttcatttattattacctcctcatactatagcggtggcagctatatatatcacagttgtattgaaaaaaaatttatctcgagtaagacaaggtaataataatgataataatattaatattaatactatgcatatttctactggaagtagtaccaatccaatcaacatcaacaacaacaacaacactaataccagtaataataatggaactacttctactactactaccaccactgcccaagaaactcaagttcttggtcaagatgataatactgaaatgaatatagatgatttaatgaatttgactaaatcaagtaataatagtcaagataaatcagatgataaaatggatattgataatccactacaactgcaagtaaatttatcacaaattcaaaatcaaactcaacatcaacatcaagaatctacccataataacactagtagcactaatactgggcgaaatggaataaatggacaaatctcacaatcaaatcaagaattgaataattttgatttagatatattagatgaagacaccataaaaattaataaatttatgaattttttagaacattcccatatcaatctcgatgaagttgttgaagccgtacaagatatgatgaatatgtatgtattatggaatcgatataatgaacaaggggttaaaaaggcattacaagtgatgttactcaatcggatttaa

SEQ ID NO: 6691 - DNA, 2430 bp, Candida albicans
atggcatataatagcaataacaacagttctaattataattataattttaatcgacacaattctataggaggaaattggcatttaccaccaccacctcctccaccaactcaacttacttctagtggtgcataccaccaccaccaacaacaacagcacccgcagcaacatttatcacctaatcatcctaatggtcaagatattttatcatcatcagattctcaatttctgtcacaattaaaacaaaatcaaattcctggattccgtaacccttggttttctcaacaacaaaattctacccctaatatgttatcatcttcatcatctgcatcatcttcattatctcaatcaccgactaaatcacatcaaataccattattacaacaacatcaacctccattactaaataaacgattatcatttacaaataatttaccaataacttatgaacatgaaagtagtagtaatagtagtagtaacaacaacagcagcagcaatggcaatggcaacaataataacaatgataataatactaatgtaccaccatatatacatccaccaactcgtgctgataatccatttaatcattattttgccactcaagaagttactttgggtagtaatgaccgaagaatgtcggctgctgtagatggaactcattataatccatatggattcaatcaacaacttaatgcttatccttctggtcctgctggaattgctggtactcaatatcttaataatcctaatttgggtccactggtaaatgccaatagaagatcatctgtaggggtattacccaattattatcgtcaacaacaacaacaacaagttcaagatcagtctactgctgctgctgctgctgctgctgcggcagcggcatattatcttccaccagctagattgggaagatcagctctgattgttcaatatcaacaatatcaacaagcattacaaaatcaaagaataactaaacataagaaccctgcacccaaggcaaggaaaatatataataaattggatttaacgcctaaattccatcaacaacctaaatatagacgatgttctataaattcaattcatatatcaccagtcaatgccttatcgatatatttaacagaatcatatagtttatgtcaaccaagaaaattccaatattcgaaatcaactaatcctaaacgagtattaactaaaccactggaacctaaatataataatgggtatgataatgaagatagtgattatattttatatgttaatgatgtattaggaagtgaagaagggaaaaaatatatggtattagatttattaggttcaggtacatttggacaagtagttaaatgtcaaaatcttaataatcaaactgtttgtgctgttaaagtgatcaaatcgaaaccagcatatatgaatcaatcattaactgaagttcgattattagaatttttaaatgctaatagtgatgggaaaaatttcattcgattattggatacatttatgcataaagaacatctttgtttagtatttgaaatcttggcatcgaatttatatgaattaattaaacaaaatcaatttcaaggtcttaatatgaaattagttaaattattaactaaacaattgttagattcaatggctcaattgaaaaatttccaaatgattcattgtgatttaaaaccagaaaatatcttattatgtcaacccgataaacccaatataaaagtcattgattttggtagtgcttgtttcacaagaaatactatatatacttatattcaatcaagattttatcgatcaccagaagtaatattaggtttaccttatactgaatcaattgatatgtggtcattaggttgtatcgtgggggaattatttttaggtttaccaatgtttcctggaacttcagaatataatcaaatttttaaaattgttgatatgttgggtcctccaccaagacatatgattgaagttgggaaaaattcattcaatttctttaaaaagaaagtcaacaccaccaccaccaccatcaacaacaataataataatacttcagaaacaaaaccaatttatgaacttaaatcatttgatgaatattgtcaatttttagaatataaacgacaaaaacaagaaggtgctacatctacaaccaacaacaatactaatagtagtagtagtagtaatcatcataataataatcataaaaaggaacaaccaaataaaaattattttaaacataaattattaaaagatattattattaattataaattaccttcaaaaaaaatgacaaattcaatgattgaaaaagaatatcatgatcgattattattaattgattttttaactaaagtactcaatttaaatccattagaaagattaacacctcaagaagctttaaaacatccatttattattgatgttaataccactgatttataa

SEQ ID NO: 6692 - DNA, 585 bp, Candida albicans
atgttaaagatacgccagttgcagaagaaaaaacaagaggaggccgaaagacttgccaaatctcagtctacgacacccaccccaggcgattccacgtctacttctcaccaaagagtttctccagcacaaattcgtgtgcaaaaggatatctcagagttagatttaccttcgtcaataagagtgacatttccaaacccaaatgaccttttcaattttaatttacaattgataccacaagctggatactacaaaaacgggaaattcgaatttaaaattgaaataaactcaaattttcccattgaccctcccaaaatcaaatgcttacaaaagatataccacccaaatatcgacttacaaggaaatatatgccttaatatcttgagagaagattggtcacccgtgttgagtttgactggggtgtttatgggattgaactttttattcttggaccctaatgcaactgacccactaaacaaggatgcagcaaacgttctagttaaaaacaggaaacaatttgaaattaatgttttcaattcgatgcgaggtggctatcttgatctggtttattacgatcgagtcatttag

SEQ ID NO: 6693 - DNA, 1317 bp, Candida albicans
atgcagttatcatttatcttaacatcatcggtatttatattattgcttgaatttgttaaagccctggttatttctaatccatttaaaccaaatggaaacttgaaattcaagagaggaggcggacataatgttgcttgggattatgataataatgttatcagaggtgtcaatttgggtggttggtttgtccttgaaccatatatgacaccatcactttttgaaccattccaaaatggaaatgatcagtctggagttccagttgacgaatatcactggacacaaactttgggtaaggaagctgctctgagaattttgcaaaaacattggagtacttggatcactgaacaagactttaaacaaattagtaatttgggattgaactttgttcgtattcctattggttattgggctttccaattgttggataatgatccatacgtccaaggtcaagttcagtatttggaaaaggctttgggctgggccagaaagaataatatcagagtttggattgatttgcacggtgcaccaggctctcaaaatgggtttgacaactccggtttaagagatagctacaatttccaaaacggtgataacacccaagttactttgaatgtattgaatactattttcaaaaagtatggtggcaacgaatactctgacgttgttattggtattgaattgcttaatgaaccattgggtccagttttgaatatggataaattgaaacaatttttcttggatggttacaactctcttagacaaactggatcagtcaccccagttatcattcacgatgctttccaagtctttggctattggaataactttttgactgttgctgaaggtcaatggaatgttgttgttgaccatcatcattaccaagtgttttccggtggtgaattatctcgtaacattaacgaccacatttcagttgcttgtaactggggttgggatgctaaaaaggaatcccattggaacgtcgctggtgaatggtctgctgctttgacagattgtgctaaatggttgaatggtgtcaacagaggagcacgttatgagggtgcttacgataatgctccatacattggatcctgtcaaccattgttggatatttcccaatggtctgatgaacacaaaaccgacacaagaagatacattgaggctcaattggatgcttttgaatacactggaggctgggtcttctggagttggaagactgaaaatgcccctgaatggagtttccaaaccttgacttacaatggtcttttcccacaaccagttactgatagacaattcccaaaccaatgtggctttcactga

SEQ ID NO: 6694 - DNA, 1359 bp, Candida albicans
atgaagttctcaatatatttaataatatctttattttcatcattttcgcatgcaatttggcttgacaccaataatgaaacaactattcgtgaggattgtaacatcattgccaaaggtctattagattattatgaaggtactaaatatggtggtgtgattggtatgtttagttggccatactattggtgggaagctggtggtgcctggggttcattaatagattatacattttattttgataatgacactttagtgcctcttattaccgatgcattattatatcaaactggtgatgatgacaattatattcctttaaatcaatctactactgaaggtaatgatgatcaagcattttggggtatagctgttatggcagctgctgaacgtaatttcactaaccctaaagatccgacaaaggcatggttaactttagctcaagcagttttcaacactatgcaagcaagatgggatactgaaacatgtaatggtggattaagatggcaaattttccaatggaattctggttatgattataaaaactcggtttctaatggggcacttttccatttggccgccagattagcaagatacactggtaatgattcttatgttgtatgggccgaaagagtatgggattggatgtatggagttgggttattgacggaacaaaattggtggtttgtttacgatggggttaaaattgctaataattgttctaatatcaccaaatatcaatggagttataatcaaggtcttatgttagcaggatgtgcatacttgtacaattacactgaagaagagaaatggtataattatacaattaaattattagagagtgctcaagtatttttcaaaaatatcagtggaagtatggttatgtatgaagcagcttgtcaaccttcgaattcatgtaataatgatcaacggtcatttaaagcatatttttcacgatttcttgggttaacatctgtattggtacctcagactgaacctgtaattactaaatggttagttgactcggcaaatggagctgctggttcatgtagtggtggttccgatggggttacttgtgggttgtcatggactgactggtctcaaggctgggacggtaaatgggggttaggtgaacaaatgtccgctttagaagtgatgcaaaacttgatggttcataaacgtccagctccttacaccgccgatactggtggttcatctattggtaatcctgcagctggttatggtaaacttactagtgatgctacacctttgtctatagatggtggtgataaagcgggagcgggtattattacagcaataattggtgcatccttagtagggtcctgtgtgtggttgatattatag

SEQ ID NO: 6695 - DNA, 1893 bp, Candida albicans
atgatactaaaaattgtattcaaactaacatctggtccacctaatacaaatgcagatggaactgacaatggtggtggtggtggtgaagaaaaatcatttaaattgacatttactaatagaccaaccatgaacactattaaagattctctacaaacaattgttgctagatcaagaactagagttgaaggtaccagtactccaactccagctccagctccagcttcaacatttgggtcagcaccacaagctgattctaccagagattcgacatcatcatcaacaccaataccacctacaacatctggaacttctactagttcatcattattatcattagcagcatcacaatcattatctgatgcaaatttattgaaaaatttcgaactacagcaaaaacttttattagaagatcgtcaattacgtgatgttttcactaaatcagtcatgcaatttaaattatctcctcaagtattttggtcatcaagattaaatcaattacgaacatttgctttgacaatatctcaacataaaggtccatataatgtattgagtacaattaaaccggtggccacttctgataatcaagtgaatgttaatgttacgcgtgataccattaatgaaatatttaccatttaccccatcataaagaaagcatttgatgatttggttcctaacaagtttaatgaaggagaattttggtcgagatttttcaattctaaattgtttagacgcttaagaggtgataaaatcagtattagtaatagtcgaggagatgttgtattggacaaatatttgtatatagatcaaaactatcaagaaaaattacaaaaatcatctactttggaaaacaacggttctggttctggtggtggtggtggtggtggtggtagtggtaattcagaacaaggaatacaaacattggaatctccacatgttaaaaaatttcttgatttgatgggaaatcaacaagataattcacaaaaattggggaatagaccagattttactatgagatatgatgaagacacaaatttagatgatgataataaaaaacctactttaggaaatgaaaatgaaatgattatattgatgaaaaatatgaatcgattatcgtcgaaaatgatgagtatgagttctactaatggaccagagaaaccttcagaaactacaattgatggattatctgctgctgaattgaatgaatatgaagaagaattagatttgcatgatttaaatgattcagaaaatttacaatatataaaattaaacattaatactgatattgccaagggaacaaaacttgattcatatgaaggatcaaatactaataacaagatttctcaagatgaattacataaatatttacaatctcaaactttccaaggacaaatagaattaacagaaacttatacttgtaaaagtgaagaaattgaaaaaacctccatggaaatagccatgcttattaaacaaaatttccgaacatttaaattaattaataaagaaaatgatattgcggggacaaacattgttcctaattcattaatacaagaaatcattacttataatattacgatagttgaatttttatctcatttttggaagatttttttacatgggaataatcctggtcaattaaagaaaattttcaccagtttgaaaaattgtcaatctggtttaatagaattagaaaataaagcgattgatcaattcaaatctatggatatattacaaaaaaatcaaaaattacaagataaagttttaaaagattttgcatcatgtcttcaacccatgaaaatagcattagataaagcatgtaatgaatatgttgaagcagtaaagaaagctaaacctgaattaaatgaaaatggtaaacgtcctctaccagaggagtga

SEQ ID NO: 6696 - DNA, 1296 bp, Candida albicans
atggctgaaaagattagatattatttggaacaatcagttccagaattagaggatctcaagattaaaggacttttcgataaaaatgaaatcaccatggttatgagaagacgtaccgatttcgaacatagaatcactggacgtggttgtaaaccaaaagattttttgagatacactgaatttgaaacaaaccttgaaaaattgcgtaaaaagagatataatagattaagcaaagtgggaatgattgaaactaaacccagtataagtgattgggcaggaactcgtcgtattatgtttattttcgatcgagcaacgagaagatatcctggagaaactgagttatggtcccaatacttgaaatttgcaaaatcaaatggtgccatcaaagtgatatataaagtatattctcgattattacaattacaaccaagaaacattaatgcgtggttatcagctgccaaatatgagtttgagaccaatggtaatgctaaaggtgccagagttttattccaaagaggattgagattgaattcggaatcacttgagttatggttaaactatgcccaatttgaactaacttatatctcgaagttattagcgagaaggaaagttttgggattgatcactgaaaagcaacaacgtgaagcaatggaaaccgaagaagcaaaattagaacaagaaatcaagaaatcagatgataatggcgacgagttaactggtgataaaatagaattacctagcactgaggaaataaaggatcaattgaatcttttaccggaagctgatatgaatatgttagggaatccagaaacaaaccctgctttgaaaggggatgtggtgttaactatatttgatttatgtatcccggctttgcttgagtccataccaaaatattctacagcaatcaagcccgatgacaaggtatttgaaattgttgagaaattcttagcattgtttgacaaattccctgatttgaatagagattacttgtatttgcatgtgttgaactacattcaaagggaatacgccaatgatttaagaacactacttactgatataacattgccaatcagagctgtcactgtcaacagtgacaacttggcggaggcattgcaattagctgtgaacaaatttattgcctataaacgcaagttacaagatggtgcagaaagggacatgttgactaatatgtttattaaccaattaaatactcaattcttcaacgacaaagagcatccctctcaaaaaatcgatgctttgctcaaagcaattatcaaaaaatgccgtaccgttaattaa

SEQ ID NO: 6697 - DNA, 825 bp, Candida albicans
atgaaagactacacgattacagtattaggatgcggtgttatgggcacagctgtaacatcagctattttgaaatccaagtttgacccatacccaaagaaaatcatagcatgtaccattccaagccaagaacaaagcttgaaagaaacctttgctgatcagccattagttcatgtttctgccggagttgaaaacaacaacaaggcagttactgaggcagatgttattattttaggatgtaagccatatatgtatgaaggcatttatgaagaagtcaaggaatcattaactggaaaacaattattaatttcattattggcaggaaccactataaaggaattgtctattttcactccatatgttgccaaagtcatgaccaacactccagctagatttggttgtggaactgcggcaattgcatttgctccagaagttggtgaagaaagccaagagttggtaatgaaattgattgatactgttggtatgactgtaaagattccagagaagaacatggacattgcaacttcattgattgggtccggaccagctttttgtttattgatgatggagtccatgatcgatggtgcagtaagaatgggtatgccatacgatgtagcatctgttgctgccgccaaggtaatggaaggaactgcccgtatggtcttggaaaccggcgaacatccagctgcgttaaagagcaaagtgtgtactcctggtggtactacaattggtggcttgttgaccatggaagatcgtggattaagaagtgctattgctagaggtgttgaagaggctgctaacatatctgcttcatttgccaaaaagtaa

SEQ ID NO: 6698 - DNA, 1026 bp, Candida albicans
atggtccatcaagctgaatttttaccttctacaggtaattctatatcatctgtcttacaaggtggatataatcatccattgtctagggaatggcaacaggaaagacaattgaccaaaaatatgttcattttcccattgtttattactgattcaccagatgaagaaactgcgatccccacattgccaaacatcaagcgttttggtgtaaataaattgattccctatgtgaaaaacttggttgaaaaagggttgagagctgtgatattgtttggagttccattgaagccaggtgtcaaggatgcattgggtacagctgcagatgatcctgaaggaccagttattaccgcgatcaaaaaattacgtgaaaatttccctgatttatttatcatgtgtgatgtttgtctttgtgaatacacagatcatggacactgtgggatattgaatgaagatggatcattgataagagaggaatcagtacaaagaattgccgcagtggcggtcaactatgcaaaagcaggtgcaaactctgttgctccttcagatatgatggatggacgtatcaaagatatcaagaccgggttaatgaatgctggtttagccaacaagtgtttggtcatgtcgtatgcggccaaattctctggcaacttgtatggaccatttcgtgacgctgctggaagtgcaccaagtcatggagatagaaaagcataccaattaccaccaggaggtgctggtttggcacgtcgtgctttgatgagagacatgagtgaaggtgctgatgcagttattgtgaaaccaagtaccttctacttggatattgttagtgatgcagccaaattatgccgtgattatccaatatgtgcataccatgttagtggagaatatgccatgttgcatgcagcagccgataaaggagttgttgatttaaagggaattgcatttgaagcccatcaaggatttttacgagcaggggcaagattaattattagttatttcaccccagagtttttagaatggttgcaagtatga

SEQ ID NO: 6699 - DNA, 1593 bp, Candida albicans
atgggtatcaagaaaatgtttcaaaagaaagaaccaaccgaacaagaaattcgtgaagaattaagtcgagttggcatttctacaagatcaaataatactcgacaagagaagtttggtgcatttaaaaattatgctcaagaacgagctaatatgaaaccacaattaggaccagttggtggtaatccttatgccaatattaatcctggaaccaacaacaacaataataatccatatgccaatgataatgggaataatagtaatggcaaccccaacaacaacagcaacagcaacaacggtggtaacccctatggtggtggtgctactaataataacccttatggaggctctggtggtaatggaagaggatcatcacctagtccttatgcatcgactacatcgacaactactagatcatctaatccatatggaaataataatggttctagatcaagtcaaaacacttctagtccttatgccaaatcaactaacaattcatcatattctaactcaccgtattctggatcaactgtaaataatggtaatcgtggcggccatagcaacaacagcaatagttctgctggtggtaacccttatgctactggtggtagaagttcacaatctcaaaattcacgagacaatgtatatacagttcctgccactcgtacatcaactagacaaactcaaggatatggaggtggtgatactgattcgactcttgaccttaatgccattccatcacatcaaatgtttgataataagaagcctattaaaagaaatcaacaaagttcacaacaaccagctaatgattataatttagatttgaatgatgaatatggcgaagaagaagacttgaatttagatattagtgaagtacctgaagaacaacaacaaatcaattctgaagatgaagaagtagaagccattaaacaagatattaaatttgtcaaacaagaatcagttcaaagtactagaaatactcttagaatggcacaagaagctgatgcatcgggtactaatactttaggaatgttaggatcgcaactggaacgattatataatgctgaacaaaacttattattagcagaaacacaaactcaaatagctgatgaaaaagttaaagaattgaaacgattaaatcgatcgattttcataccagctaatggtaatccatttaataagaaatctcgattacgtcaacaagaagaaagaattaagaatcaaaaattacaagaaaaatatattcgtgaaaataatcgtcaagaaatgtttgctagtgaacaacgtataaaacaaggaatcaccaataattcaactaataatgatgtttataataaatatcaagatgaaaaaaatttatcagctgctaaaagatatcaatttgaaaatgatagtgaagatgatgacatggaaaaagaaattgctctgaatttgaatcaaattgatcaatatgctaaaaaattgaaaggattagctaatactatgggtactgaagttgataatcaaaatactagattgaagaagattgaagaaagtgctgataaattggatattaatgttcatatgaatacgactagattgaataatattcgttag

SEQ ID NO: 6700 - DNA, 993 bp, Candida albicans
atgagtgagatgttagtatcagataaagcacgtcatctttatacaaagatgagggagtatccaacttccaaactttttgatcaagatgaattacaaacactatttgatattaaaaagggatcagaattaatggaatatttacaagaattagtcaatggtaaatatgttaaaattagtaaaatgggagatcaattaaaatttcaaactgttgctgaagaagaagccaaaaaagtatcgtcaatgtctgatgatgaagcaatgatttattcttatattgaagcttcaggtcgtgaagggatttggactaaaaccattaaagctaaaactaatttacatcaacatattgttcaaaaatgtttaaaaaatttagaaaataatcgatacattaaaagtattaaatcagtgaaacatccaacaagaaaaatttatatgttgtataatttacaacctagtattgatgttactggtggtccttggtttactgattcagaattagatactgaatttatagaaactttattggaagtgtgttggagatttattgttgggaaaaccatgtatataaaggatgaagaagctgataatgaagatataaatccacttcaaacaacatatcacaatcatcatccaggggtgaatttggatcaacttgttgaatttataaacaatagtaatatcaccagtgttgagttgggtattaatgatattagatcattatgtgatgtgctaatctatgacgatagaatagaagaagttggtgggaatcaagaaaatagtgggatttttaaagctacttggcaaagtataatagataaaggtaacactattttgcaaaataattatcaggatttgaaaaatgttgtttctgaagattgttttaattatttacaacaaaatcaatcagattttagtgtttttcaatataaatctactattcaagatcttcaagatgaatcggatctagtgtatttagatagctggataaatgaataa

SEQ ID NO: 6701 - DNA, 1770 bp, Candida albicans
atgtcaatatacaagagtggctgggtttcccctttgaaagctttagaaacattatctttgacattatcacgaggaatgaaaagagccgcatcaccaagagctgaacaaccacctcatagcaaaaaggtggttgatgctaaaggatttagagtacgtcaacaaaacatcgataaacacaagataactagtgaaagcacggcaactcaaaaatcaattcatgaagaagaaactgaaggagccaattatgtaattgaaggtagattgcgtcgagttacgccgtacttctacacatatctaacctattgcaagttacgttggcaagataggaaattgatcgatgttttcattgatgaatttagagatcgtacccctgatgcatatcgtatggcagtagaggaagggttagtcaaagtcaattctcaagttgcaaatttggaaacgattttgcgcaatggtgatttgatttctcatagaagctatcgtcgtgaaccacctgtcagctccagagatataaaaattgtttttgaagatgatgatttgcttgtgatagataaaccaggtgggataccggttcatccaacaggtagatatcgatacaacactgtcaccaaaatatttgagcatgaaaagggtaaaattgttcatccatgcaatagacttgatagattaacctcgggtttgatgtttttggggaaactgtccaaaggagcaaataacatgatgctgcagattagagatcgaaatgtgacgaaagagtatattgccagggtaaaaggtgaattccctcttgaccgtattattgtggataaaccattgtctacaaagtctcccaaattgacattaaatgttgtcgatatggaaaatgggaaagaagctaaaactgaatttcaaagagtgtcatatgaccccattacaaatacgtctgttgttaaatgccacccattaactggtcgaacccaccaaattcgagtgcatttacaatttttgggatatccaatagctaatgacccaatatattctagtgaatttgtctggggtaaaaatttaggggaaaacggagaagctgatttggatcaagtgatggaaaggctagatctaattggtaaatctcgtgcagcaacttcatggatccacccggaaggagatggggaagtcgcattagatgagatctgtcccattactggcttgcctctttattccgatccaggttcaaacgatttggatttatggttgcatgcatacaaatatgaagccgatgataaatcttggtcttataaaacagagtatccggaatgggcattagaaccaagtagaaaattcatggagatggcaatagaagaggctgaaaagtgtggagaaactcaaactcaatttaacgttggctgtgttttggttcacaatgggcaggtaatatcgacgggtcattcacgtgaattgcctggtaatactcatgcagaacaatgtgctttggagaagtatttttcgaaaaatggtggggaaagagaagtacctgcgggaacagaaatatttacttctatggagccttgttcgttgagactaagtggcaatctaccttgtgttgataggattttacaaacgaaaaacatcaaaacgtgttttgtgggtgttttagaaccagatattttcgtaaagaataattcctcctacaaaaaattattagatcatggggttgagtacatccacattccagggtatgaagaaacgtgtcttgaaatagccaaaaggggtcatgaacatattcaagaataa

SEQ ID NO: 6702 - DNA, 1482 bp, Candida albicans
atgtcttcagaagaaattttgcaaggagtagaagatatacatctcaatacttcttctgactcagatagtgaatatgaacttgaagaagaaaccacgacgaaaagtttgccactgagctctcgtactattaccgaaaaggaggatatagtcacaaaatatgcagacaaaattaaaacagatccaatcaaaaaggggccaaaaattaccaaggatagagctaacagggctacagttgaacaagttttggatccacgtactcttcgattcttagcaaaaattataaataaaggtatcatttcaagaattaatggatgcataagtactggtaaagaagctaatgtgtatcatgggactagtgatgacccagataacgatagagaatacgctgtcaaaatttacaagacatctattttggtgttcaaggaccgtgagagatatgtggatggtgagttccgattcagaaatacaaaaaatcaaagtaatccgaggaaaatggttaaagtgtgggctgagaaagagtttaggaatttgaaaagaatttatcagaatggaataccgtgtcctgaaccaattgaattaaagtctcatgttttggttatggaatatttgacaaagggtgatggacaaccatcacctaaattgaaggattatctgttcaaagatgtacaagacattgtcaactattatcacaagatgttgttctatatgagaagattataccaggaatgccgattagtgcatgcagatctaagtgagtacaactcgattgtgcacaaggacaatttatatattattgatgtttcgcaatcagtggagccagaacatccaatggcacttgattttttgagaatggatatcaaaaatgttaatgattttttcagcagaagcaaaataaatgtgtaccctgagcgtttgatattccgatttattacatcagaggggcatcttttgggaattgccgataatagcgaccaagaattggaaaaatatcttgagacattgccgttaaagacagaagatgatcaggaagtggaggatgaaatttttagatcattacatttagttagatctttgaataatttagatgagacggactttcagaaattctctgaagggaaggttgatacaatgaaagatcttgttgccatgaaagaaggcgaggttgcatctcctggtttgcaaactgctaatggcaacgaggtagatagttctgaagatgaagataatgaaggcgtatccgaggaagaggaagaatcctcatctgaagatgatgatgatgaagaagaagaagtggatggtatatccgaaaaggaatgggttgaacgtgaacaaaatgctccaaggggtaagaaatacgaagataaagacgagaaaaaggctagaaaagaggcagcaaagttggccaagcaagagaagaggaaaacaaaaatgaagaaacatattaagaagaagatcataaataaacgtaaaacaggtaaatag

SEQ ID NO: 6703 - DNA, 2550 bp, Candida albicans
atggctaggaatagtattaaaaaatctcctgtggtgaagaaaaaggatactccaatagttagaaaaagaaagccaatccaacaagaagcagaagaagattccaatgatgaagaatctgaagatgagttaaatgttgaaggattgatagatgcaagtgatgatgaagatgaagaagaagaacaagaacaagaagaacaaccccaagaagaggaaaataacagtgatgatgatgatgatgacgatgatgatgacgatgacaacaactcagaagcagattctgaagaagaattaaatcaattattaggtgaagaagaagaagaagatcctagtgattataattctgatgaattttctgatgaaccaaaagatgatgatttatcaaggatcaacatcaaatcattatcagtttctgatccttcaattcaaaaaaattcaatttcaaaattttctgatggttcaataagaattttaaaaccagaaattgaacctaaatatgatagtgatgatagtgatgctgaaaatttcaacactattggtaatattcctatttctgcttatgatgaaatgccacatattggatatgatattaatggtaaaagaatcatgagaccagctaaagggtccgctttagatcaattattagaatctattgatttacctgaaggttggaccggtttattggatcaaaatactggtacttcattgaaattaactgatgaagaattagaattaattagaaagattcaacaacaagaaaatactgatgaaaatattaatccatatgaacctttaattgattggtttactaaagatgaagaaatcatgccggtaactgctgtcccggaaccgaaacgaagatttgttccttctaaacatgaagctaaacgagttatgaaaatagttaaagccattagagaaggtagaattatcccaccaaataaagttaaacaacaattaactgaagaagaagaagaagatcaatttaattttgatctttggcaagatgaaattgaaatatctgatcatattatgaatttaagagctcctaaattaccaccaccaactaatgaagaaagttataatccaccagaagaatatcttttaactgaagaagaaaaatctaaatggttacaagaatctcctattgatagagaaagaaatttcttaccacaaaaatataattcattaagacaagttcctggttatcaagattccgttagagaaagatttgaaagatctttagatttatatttagctccaagagtacgtcataataaattgaatattgatcctgatagtttgattcctgatttaccttcaccaaaagatttaagacctttccctattcgttgttctactatatatgaaggtcatactggtaaaattagaactatttctattgatcctcaaggtctttggttagctactggttcagatgatggtagtgttagaatatgggaaattttaactggtagacaagtttacaaaattcaattaattaataaagaaatcaataatgaagatcatattgaatgtttagaatggaatcccgattctagttgtggaattttagcagtttgtgttggtgaaaatatttatttaattgtcccaccaatttttggatttgatattgaaaattctggtaaattaagaattgaaagtggttggggttatgatacttttggtaataaaaagaaagatcttaaaatttcctcccaaaaagaggaagacaataaagaatcagacaacgaagacgaagacgaagaagaagataatgatgatgatgatgatgatgatgaaccagaaactagctcaactgttgaaccaaagaaagaagttgctaaatggtatccaccaaatactgaacaagcttctatgggtatatcagcaattattcaatgtcgtaaaacaattaaaaaattatcatggcatagaaaaggtgattatttcgtcacggtttctcccgatagtaaaaacactgcggtattaattcatcaaatttctaaacatttatcccaatcaccatttaaaaaatctaaagggattataatggatgctaaatttcatccatttaaaccacaattatttgttgcttcacaacgtcaaattaaaatttatgatttagctcaacaagtattattaaaaaaattaatgcccggggttcgattattatcaactattgatattcatcctcgtggtgataatttaattgctggttcttatgataaacgtgtattatggcatgatttaaatttaagtgctaccccatacaagacattaagatatcatgaaaaagccgttagatcaataaaatttcataaaggaaatttaccattatttgcaagtgcttctgatgatggtaatattcatattttccatgggacagtatatgatgatttaatgacaaatcctttattggtaccattgaaaaaattaaatggtcataaaattattaatcaaattggtatattggatttaatttggcatcctaaagaaccttggttatttagtgctggtgctgatggaactgctcgtctttggactacatag

SEQ ID NO: 6704 - DNA, 1335 bp, Candida albicans
atggttaagaaagttcttttgttaggatctggttttgttgctaaaccaaccgttgatattttatctgaacaaccagacattgaagtcactgttgcttgcagaaccttatctaaagctaaagaattagctggtgataaagcacaggccatttctcttgatgtcactgatgctgctcaattagatgaacaagtagctaaacatgatttggtcatttcattaattccatacactttccatgtcaatgtggttaaatcagctattaagaacaaaaagaatgttgtcacaacttcgtatattaaccctcaattgaaagcattggaaaaagaaattgaagaagctggtatcactgttatgaacgaaattggtttagatccaggtattgatcatttgtatgctgttaaaactattgaagaagttcataaagctggcggtaaaatcgtatcattcttatcatattgtggtggattaccagccccagaaaattccgataatccattaggttataaattttcttggagttcaagaggggttttattagctttaagaaaccaagccaaatattggctcgatggtaaagtcattgatatttctagtgaagatttgatggctagtgctaaaccatatttcatttatccaggttatgctttggtttgttatccaaacagagattctactacttataaagaattgtacaatattccagaagctcaaaccgttattagaggtactttgagattccaaggtttcccagaattcattaaagtgtttgttgaccttggatttttgaaagatgaaccaatggaaattttctctaaaccaggtccatggaacaaagctttagctgaattggttggagctaaatcaagctctgaacaagatataattgataaaattaaccaattgactaaattcaaatctccagaagaccaagaaaggattttggctggtttcagatggttaggattattttctgaaaatcaaattactccaagaggtaatccattagatactttatgtgccactttggaagaattgatgcaatatgaaaaaggtgaacgtgatttagtcattttacaacataaattcggtattgaatgggctaatggtaccaaagaaactagaacttctactttggtcgattatggtgatccaaatggttattcttcaatggctaaattggttggtgttccttgtgctgttgccactaaacaaatcttgagtggtgaattatccaaaaaaggtttgttggctccaatgagttccgacattaacgattctattatgaaagaattgaaagataaatacgatatttatttggttgaaaaaactatttaa

SEQ ID NO: 6705 - DNA, 1218 bp, Candida albicans
atgacatccatggaaccagcagacacaagcatcaggtcattaaacgacatcaacttacaagaacttgccaacaaacaacatcaacgaaatatatatgctcaaggatcacctacactagaagattcaataacatcaaatggtaatgatattaataatcccaacaataatataaataaaaccaataataacagtaattcaagtctttccttgaccaagaaaacatcaagacatatcaataaagacactacaactaaaggcaaatatacattaaatgattttcaaatattacgaacattaggaacaggttcctttggtagagttcatttaactcgatcgattcataatggtagattttatgctatgaaagtattaaagaaacaacgagtagtacaaatgaaacaaatcgaacatactaatgatgaaagaagaatgttaaaattagctcaacatccatttataattcgaatgtgggggacattccaagattgtcataatttatttatgattatggattatatagaaggaggtgaattattttcattattaagaaaatcccaacgattccctactccagtagctaaattttatgctgccgaagtatttttggctattgaatatttacacagtttagacattatttatcgagatttaaaaccagaaaatatattattggataaaaatggtcatatcaaattaactgattttggatttgctaaagaagttcaagatgtgacttatactttatgtgggactccagattatattgctcctgaagtggtggcaacaaaaccttataataaatcagttgattggtggtcatttggtatattaatatttgaaatgttaactggttatactccattctatgatcctactccaatgaaaacttatgaaaacattttaaatggatcaattacttatcctgattatttacctccagatatattggatcttctacaaaaattaattgtcaaagatttaactcaaagattaggtaatttacaaggtggttctgatgatgtgaaaaatcatccgtggtttaaagaagttatttgggaaagattgttgtcacgtgatatagaaactccatatgaaccacctataacttctggtgttggtgatacttcacaatttgatcgatacccagaagataaagatttggattatggtataagtggagttgaagacccatatcgtgatcaattccaggacttttaa

SEQ ID NO: 6706 - DNA, 2196 bp, Candida albicans
atgttgaatctgatatcttggatatatattttctatttattcataacatcgattctagcatttgattttggattaggacctacttattataaacatggagataaagttgatttattagtcaataaaatagaatcagatactacacaattaccatttgcttatcatagtttaccatttgtttgtcgtcccattaatggtgctaaaccagttcatttatcattaggtgaattacttaaaggtgatagaatttggcaaagtggatatcaattagaatttggggttgatgttccttgtaatcgattatgtgatatggtactttctactcatgcaattaaacgagcttctgatcttataaaagatggttatgttgttcattggaccgttgatggattacctgaagccacaacttttgaatcaactaaccaccgtaataaatattatgccgcgggattccccttgggatttgttagccctagtgatgatgagcaattgagttatatatataatcatgttatgttagtgattagatatcatcgagaaaaagaaaccgcatccaaaaatggtggggatcctaaatatactattgttgggtttgaagtttatccgaaaagtgttaatgatgaacattgtcctggatctctgaaaaattatcaaaatttaccattattttattctgttgatgataaaaatcaattgattgaaagtaaaacaacaattgcttatacttattcagtttattggcgggaagacaattctattgattatgattctcgatgggaattatattatgaaaatgaaactaatggtgctcatgttcatattcattggatatcatttataaattccattattcttatatttttagcatcattgatagttatgattgttttaattaaagttttgaaaaaagatattgccaataatgggaataatgataacattagtggtaatactgtattacctttgatcaaaaatgatatttctatagatatagatggtgacagttcctcatcttctgttactaataatattggatcgggttggaaaaatttaattaatcaagtcaatcaaatacctcaatatccaatatttttaatcactttagtatcagccggtattcaaatagtaattgccattatgggagtaatcagtatattgatgataaattcaattggaacaaaaaataatttttttaatagtcatcaaggagcatttttcagtatttcaatattttgtattagtattctgggttcaatatcttcatattttggtatattattacataaatatttctaccaccctcacccccaccttcatcaaacttctggcaacaacaacaatcacaataacaacaacaacaacttaggtaaaacttatgatcaattgacaataattaaattatcacttttatttagtgctgcattaccagcatttttatttttaattatatttatcctaaatttttttgtatgggctaaagaatcatcagcagcattaccatttggtaccattgtggtatttttattaatttttatattaattcaatgtcctttaggtataattggtggaaattatgcaaattatgcaaattatgcaaattatgcaaattatcaaaaatcattatcaatgcctcaaaaacttttttttgcatcaatgaaaactcctccatctagtccattatatgaaaaacaattccaattccatagcaaaaataaaccttctaatgattcattattaacaaaatttataagttatggaaaaaccatattaatttatggattaattccatttggtatagtttacgttgaattattattcatattcaattctatttggttagaaaaaacaactttttattatatgtatggatttttattcatcaccaccctaatgttatttattataattattgaatcagccatagtggcaatttatatatctttagtggtttataataaatccaattggatttggttatcatttcaagtaggatcaagtattggttggtatatttatggttattcaatttattattttttaagaattttaaatgttgatgattttgttagtggattattatattttgtttatatggctttagcttctttaatgattgggattgcttcgggttctattggtgttttaacgggattgatttttattagaaaaatttatggtgccataaaagttgattaa

SEQ ID NO: 6707 - DNA, 852 bp, Candida albicans
atgccaccaaagaagaacgtcacatacaaggggaagatactatttctccatggatacactcaatctgcatctttattctatgccaagacttctgcattgagaaaaaagctcatcaagttgggttacaaatgtgtgtatcttaatggaccttatgtgctaactccagcagatttgccaacaactgattccttatccaaatttggatctgccacaacggacacagatgatgtgacataccgtgcatggtgggtcaaaaaagataaaaccaacgatgccatcaatttggacgagtctattgcaacaataaagaattacatacaaaaaggcgagatcatcgcagacaatgacttgaaagtagaagaggaaactgaagaagaaaagaagttgcctattgttggtatacttgggttctctcagggtgctgcatttggtggagtcgtagcacataaatttcatgaattgtttgaaacagaccctttaaagtttgttgttttatattctggatttaaattggacacttcaaaaaaggcaggtaacgacaagtacgatgaatattaccctcacacagaagaagaagttaaaagtggtggtttcaaatatcttcacgtgttgggagagttggacactgtggtagcagaagatcgtggctattcgttgtatgaacatacgaagtcatcttccgatattttgaagcatccaggaggtcactttgttccgaactccaaaatgtatgtcgacaatgtagcgaactggattgaagcccatcaaaatggatctcagctgaagtctgaagcgccagaagacgatatcgattcgttgttggacatgatggataatttcgggaaagcgtga

SEQ ID NO: 6708 - DNA, 813 bp, Candida albicans
atggacttttcaaacttgctatctaacgaaatcaataagaaacgtaaaaaggtagctgcaaatggaaggaaacgcagcaaagtgtctaccaccgccaaagaaccggcggtagttgttgagcatgcatcagaaacaatcaacccccagcctactacgacaaacgatgagccaagtgaagaacaattagatacaaagttgtcacaatttggtgaactagatacgtccttatcgaaatcagaaaaggccaggaaattgcaattactactacaacagcaaatcaaaaacacaaagtacaaggcatggctagatcaagaggctccgttgtaccaagaccccgaaaagcaattgatcacgcttgatttgataactgatataacaaataaacaagacgaagtatacctaaagctacgggtatacataaagcagctaattaaacaatggcaagaatgcgataacgacgaccaagagttattgatggaaacgaaaaagagtatagtcaaattgttatacaagctaaggagccataaactttctttggacatgctaatatcgctcctgaccattgtttactatatccaacaaaacgaattcaacaaggcaaacgaaagctacatgaaactaagtatcggcaacgtctgttggccaattggggtggtcaatgtaggtattcatgcaagaagtgcagcactgaaaataaccggtgcctctaacgtcagtaacataatgctaagcgagtctacacgaagatggattataagtataaagaggttgattagttttaaagagagagtatataataatgcacgtgattag

SEQ ID NO: 6709 - DNA, 462 bp, Candida albicans
atggcaggtagaaacgctataaataaaccaaaaatcaaactccatgctcagagtcatgctaaatcattagggagaaaaagagctgcacgtagaactacggctacaagatcgtccacttctcgatatgccgccaaaggaaccactgcaccaagaccaacagactccaaagcagttgctttatatactggaaatgctcctcagccaacctcgaccatgacaacccagacattatctaacaaaagagctaaaaagattgccagaaaccagcggtatttagctgctaacaaactcaaggaaaacgaaacggccatggaagttgacaacacatcagaacaagagaagcaaacgaagttagatcaaatcaagaaggcactatggagtgttattgagaaccatcaaaagaatgggtattcagttgtttctgatccagaaggaactactttaggtatacagtctttctaa

SEQ ID NO: 6710 - DNA, 1467 bp, Candida albicans
atgtccgataaacaaatcaatcaattcaaatcaatgaatattaatttccgagataaattacgtgaagcatatttaaacaataaacatgaatttgatgatcaagataataaaatcattcaaccaatattaaatgatgtactatactctaatgataatggtgttaatggtaataataatttaagggaattaataaagaaaaaatgggatggattaagtaaagatataaaagatattaataatagtcgatttgatataccgtcaacaaatggtaatgatgtagaagatggcattaataataaggttcatgaattggatggagaagaaggagaaaatgaaatgaatgggaaatatgaaaatagaaatattcatcatcaaaataagacaacaactaacaataacagtatcaagtcaagaatcccaactatacaatcaaatggtaataaatcacaagtacgatttcaacaacaacaaccctccaaaaatgatgatgatgatgagataaataaattgaaaaaaattattgaatcattaaataaaaaaattaaacatcaaataattgaaaggaaagatataattgaagaatttcaaactaaagaaattcgaatgatgaaaaatcatcaaaatgaaattaataaattaattaaaaaatatgaaacaaaattgaaaaatgaacaacaagagaggcaaacatctaataataatgatgatgatgatggtattgtcaatgaattgagaatctcaattgataaattaaataatgaaattgataataaaaatttacaaattttacaatttactaatcaattaacaaatttaaaagatgaaaatttccatttaaaacaagaaaataatcgattaagatatgacaggaacaacaacaacaacaacaacgataataacgtgtcaccatctaaagaaactaatcaactggcccattctgaaagtcaagaattaaggaaaatgattgataatttaacaaaagagaatattgaattacgatcacaatttaatcaattgaaaaataccaatgctggtgctggtaatggtagttttcaatacggtagtgttcaaggtgatgatagtgatgatagtgatgatagtgatgatgatgaggttgaagaagaagaacaagcaaatgaagctagatctcgatataatgagaatggtgttactagggtttcaaaatcacccgatagactacaatatgacacacaacagatattgaagaaagaatatgacaaagttctgagaattccatcgtcattatcaccgccaccacaactacaaacagttgataataatgatattcctacccctactcctactactagtgatgtgatgagaactgcggccaatgatgaggcagagttagaaaaatcaaattcaatgaccatagatttattaaaagtgaaaaaagaggaagaaatagatactactcaaaaaatgttacgtaaacattggcattaa

SEQ ID NO: 6711 - DNA, 942 bp, Candida albicans
atgtcgctgctgcaacctcaaatgtcttttgctcaaacttatatattagccagcaaagttagatccaaattaactagagaagctcaatctcctaaatcttcattaagaaatttggtggttcaagctaatatgttggataatattatggattatattagtgatgaaactaaaagaagaactagtgaaaaattaacttccaaaaccaacacccagaagagttctagtgggtaccttagtcctgaatcttcaatggttcaatttgctccaactccagttagacaagcttataaaacttcaattactgaatatgaaattgatagtgattcatccgatgatgatgaagaagaagaagaagaagatcatgaagatgataatgaagacgattacttttatgaagatggtcaaaatgattacgatgatcttgatgattatgaagattctgttgttatggaacaagatgaattagctgccattaaaggtgtttactacgaagaagatcaagaagaagaagaagaagacaatttatctgaaacttcatcaatttattctaattcatcagattctgatttagattctgattctgatgaatattatatttattctgattccgatgaaatcattgaagaaaataatattgccatagaagctactattcctagaaatttcaagagtttatcgattgtcccaccaccatcatcaacaacatcatcaacaacatcaacaacacagtcgccattgccatcaattgtacgttctaattctaccccaatcaccataacatcattgcatacaattgatgaacaacaagaaattgaagaagaaaaacaaccagaattgttattacatgaaaataatcaaactatagattggaaattgaaaaatcataatcatccacaaagtttatataaaaatcaaaacatttctttagatcaatttttttaa

SEQ ID NO: 6712 - DNA, 381 bp, Candida albicans
atggataatatggttagtattctggaaaatttcactaattcgttcccacgtaatattactgctttgaactcccaaaaaaggggtatgccactacaagaaacatcaccaaacataataaacaaatcaccgataaaacaacaaccagtttcagtgatttcatcaaagaaaaggttagcagggagccctgtatctttacaacgcgaatctgtgcggttgaaagtcaataaaccagaatctactccaacagattttgatagtacatttggaaccactgaagctgaaatcgaattaaattatagaaattggttgctagaaaggcggttacagcaagctaatgaaatgaaagattttctaatactagagcaagaagtatcgatatag

SEQ ID NO: 6713 - DNA, 303 bp, Candida albicans
atgatcagactatttccaaaacaaatacgtcttctttcttatttgacgaagaccactatcaatccagttgatttccagttaaaaattccagagcaattcactccaaaatcattgctagttttatcgactccgacaaatctacctcaagtcatcgaggactcaatcaaattgtcccaaaaacaagatttgcaattggttgtagcaggtgtagatacagtcgtaccttattcacacagaaatggagtttctgagctttggttggacgaacctattaatattggggactcggctctctcggaataa

SEQ ID NO: 6714 - DNA, 642 bp, Candida albicans
atgccaatccataatgatcctgagaatgataatgaattaatcaatcaatctattcctgtgacaaccattgctagactattcaaagaattatcttttaaagatccccagaccagaatcaccttgagtacattagaattgtcatcggaatatattaaactattcatcaatgaagccattattcgagcaaatgaagagcgtatagatgaaggtgacacattagtacaaatagatggtattgataatgtgacatccacagcaaaaaataatcaagagactcaatatcctacaatagatgagattgaagattctatgagaattgatgatgatgacgatagtaataatattaatattggtactgttaatgaagatgatgatgatgaattgattgatgatgattatttccaagatgaatcagatacacaaagacaattacgtcaagcaatggatgctgtgaatgatacaactcggaataataatcataacaataatagaaataggactactactactactactaataataataataataataataataataataataataataataacactgataataatcatgctgataatattttagattcaagacatctagcgaaaattgctgggattttaaccctagatttttag

SEQ ID NO: 6715 - DNA, 1563 bp, Candida albicans
atgtccacaccaattgaattcaaatcgtccaattctgtcactaaggacgatcatttatataccaaatttacttatgaaaactctgttgttgaaaaagatgctaatggtaaattcatcgttacaccaactgctagtgactatgaattcaaagttgatttaaaagtccctaaggttggtttattgttagtcggtattggcggtaacaacggtactacattgttaggtgccacattagcaaacaaacacaatatttcttttgaaaacaaagaaggtgttgttaaaccaaattactatggttctgttactcaagcatccactgtcaaaatcggtgttgataaagaaactggtgaggatgtttacgttccatttaactccattgttccaatggttaacccaaatgatttggttgttgatggttgggatattagtggtttgccattagaccaagcaatgaagagagctaaagtcttggatgttactttacaaaagcagttgtatccatacttggagaacaagaaacctttggaatcaatctactaccctgatttcattgctttgaaccaaagtgaacgtgccaacaatgtttttaaccaagtcaatggtgaagttaaaactgataataaatgggccgacgttgaaaaaatcagaaaagatatcagagatttcaaggccaaaaacgaattagataaagttattattttatggactgctaatactgaaagatatgctgatgttttgccaaatgtcaatgacactgctgacaacttgatcaagagtattaaagaatcacacgaagaaattgctccaagtactgtctttgccgttgcttctatcttggaaaaagttccatatattaatggttcaccacaaaacacatttgttcccggtgttattgagttagctgaaaaatacgactcattcattggtggtgatgatttcaagtcaggtcaaacaaaaattaaatcagtgttagctcaattcttggtcgatgctggtatcaaaccactttctattgcttcttataatcacttgggtaacaatgacggttacaatttatcatcaccaaaacaatttagatctaaggaaatttccaaacaatctgttgttgatgatattattgaatccaacgaattattgtacaacaaggaatctggtgacaaagttgatcactgtatcgtcattaaatacttgccagctgttggtgattctaaagttgccatggatgaatactattcagaattaatgttgggtggtcacaacaaaataagtattcacaatgtttgtgaagattcattgcttgctacaccattgattattgacttggtggtggctactgaatttgcaactagagttcaagtcaaaggtcctggtaaatctgattatgatgaattgtatcctgttgctagtttattgtcttactggctcaaggctccattagcaagaccaggattcaaacctatcaacggattaaacaaacaacgtcaacaattagtcaacttgctttcagtgttggttggtttaccaattgacaacgaattaagatttgaaagaattctcaaataa

SEQ ID NO: 6716 - DNA, 1230 bp, Candida albicans
atgacatacaaagacgtgacagaagaacagttacaaactaatccatatgtcaagcttgtgccgggacaaaccatagttgaaatccctgaatacacactagagtgtggcgaaacattacataattttcctgttgcttacaagacctggggtaagttgaatgagaccgctgataatgcattagtgatatgccatgctttgagtgggtcttctgatgttgacgattggtggggagaattacttggaactgatagagcttttgatccttctcgatatctcatcatttgtataaattttcttggatcgccttatgggtcttgttcaccagtcacaattgacaagagcactggtaagccttatggtccctcattcccattagtaacattcaaggatgatgttggaatacagagattgatattagattcattgaatgtcaaacggttagctgccgttgttgggggatccatggggggaatgttggcattagaatacctggcaatttacaacaataccggatacgtacagaaagtagtcgcattggctactgcagccagaacttcagcatggtgcatatcttggaatgagacacaaagacaatgcattttcagtgatcctttttacgatgacgggtattactacgaaactggaaataaacctgattctggattaagtgccgcaagaatggccgctttgcttacttatcgttctagaaactcgtttgaaagtagatttggcagaaaattgggtccgagatctcctaatgatggtggtgccagtcctagaaccaaacacgaagagcattctttattgcataatgacgggtcaaagcttatcaatggagctcctgtaaatgaaaaatatccaccaacttatttctcggcacagtcatatatgcgttataacggttccaaatttatcaatagatttgatgcaaattgttacatagccattagtcgaaaattggatactaatgatctttctcgaggtcgagtcaatgcacccaacgacgctaatggtgatccattggttcatgttttaaaggatctttcaacccctacgttggtcataggaattgaatcagatcatctttttacaataactgaacaaaaacttttggctgacaatattccaaatgctatatttgagacgttggacagtgaagagggacacgatgcatttttgttagagtttgagaaaataaatagtttcatcactagttttttgaataattga

SEQ ID NO: 6717 - DNA, 1530 bp, Candida albicans
atgattaccccatttttcacaatatcacaagatgatgaatttatttatattgatgtgaaaatatctcacattaggttcagtgcaccaaatattgaaatgacggtggaaaatgaattgtttgtattttccttacctccatactatttacgtttaaggtttccgtacccttgtattgaagatgatagatcacacgcagaatatgattccaaaactgaatgtgtgaaaataaaaatccctaaagaaacaaaaggtcaatttttccctgatttagacttgacagcaaaattgttggctagaaccaatgaaccaaaagtgggtgatataggacaagccaattcatcgaaaccattgattgaagagttagatgtcgacaacactaacccaggtgctcaagcagaaagggatttggcagaacgtgaacaattcaattgggaggttaaacaagatgtgccaaccaatccggatttaacatctacagctactgacaattctgacgttaatttgaaaccaataaagtatggatttaataaccaatatgataatattgtcggcgtatcagttgctaatggtaacgatattaatgaattagctgacccagagaatacacccgaaaatgctcgtataattgaaagactaattaaagagaatataaaatttgatcctgaaatgtatgctgccgattacataatgaaagtacatccagaacaagacgacgaaaacaaaaattttaaggaattaattgattggaaaaatccattaattcagaaattcctaaaatggtataaagcagacaagcaattacccgaagctgaaagaacatcaattatgccagtcgaattttcaaaagaggaacaagaaaaaatgatgaatttaccaaggaaatcatatttgatagatgatagttataaaccagagattttgcttactacaatatgtttattgtttgcttatcattttgatttgagggaaaatgaaggtgatcataatattgaaagtgcttggacaattggtaaaatagttcctcaattttcatttcttgactccaaaattgtgattgaaaataactataatgttttgagagcggccataataacatgcatcagacgtgcactaacttatccctaccacagaaattttgacatgataactaaagtatgggatgatgtgtattataatttgcgcggtgggaaacgacttgtcctcaaagcgttattggacttgaaggaattattccgttttcacgacatttactatgtttacgataagatatggttagaagatttgtgtgcatatttgataagcgataatgtttctgaagcaacaatcagaaatctcgcccatgatatacaaaaagaggtgtcaagcattaagaaagcagatatcacctttgaaaaagctaacctagagagtgctgaaactgttgatgataatgaaggcaacggcgaagacagcgaattgattgcgttaagtttaccagaaatagaggtcatggctgaagagatgttccaacaagttcaatcacaacaataa

SEQ ID NO: 6718 - DNA, 1527 bp, Candida albicans
atgaactttctaattagaaacactattattggtcagacatgcaattccaaacaaatattctacaagcatgctagaacgttggctatcaaatcgtcattgaccagttctataagatatcccttgcagccaagtttacacaacaatctcaatgccaacacaatcaatttcccgttggtgaaatcgttcataagacacaactcaagcaaaccgcagaagtcattactgctgcctgaacaaataaaggaaaaagcattagagacgctagaaaaatcaccagctactgaattagtacacaagacagcagaggaaccaaaaaaatctatttgggaaaaagtcaagcatgaggcaaagcattattgggacggtacaaaattgttgggatacgaagtcaaagtgtcaactaagttattgctcaaattgatggcaggttatgaattatcacgtagagaatcgaatcagttgcaaagaacaattgttgatgttgtcagattagtcccattcgccatgtttgttattataccatttgcagaattattgttgcctattgccttgaagatatttccaaacttgttgccttcaacgtatgagtctactgttgacagacagaagaaattggctaaattgaagaaaaccagaaaggctgcttctgagtttattaaaaatactatggctgagagtggcggtttgaaattactgaaaaaaatcactgaccaagaaagagaaaattttgtgcaatttttccactgtatttccatgggtaagaacccagatcgtcagcaattgattcaagttgcaagattatttaagaacgatcaagttttggataacttgtctcgtcctcaattggttgccatgtgtaattatatgaacttgagaccttttggtactgattcgattttaagataccaaattagacatcgtttgttgaacattatcaaagacgataaggttattgattacgaaggggtcgacagtttgtctatacttgaattgcaattggcatgtctgcagcgtggtatcaaaacaagtgataagtctcctgctagattgagagatgatttggaaacatggttggacttacgtttgagacagaaaatcccaagtaccttgttaattttgtctagtgcatacacgtatggagataaagggaattccattgagtcatattacgatgcattattggctgtgttgtcctctattcctgacgaagtgtataatgttgccaaattggaattatctgacgactctaaattgaaattgaacattttgaaagaacaagaagaaatgattgaagaagaaaatgaaagagaaaaggacactgttactaaagttaaagataagatcaaattagatgattatgaagagactgcaagtgagggaataaaaattgaggctgatgatcctgtagaaggtaaaaatggcaatgaaacacaaaagaaagaagaactgtcaagtgccaaggaatccaagcaagataaagtatcggcatccaaagaaccaactaagaaggaagaagttaaggtttaa

SEQ ID NO: 6719 - DNA, 1476 bp, Candida albicans
atgcaagaaggagttcagtttgcagcagcaactaatttgaaatccagaaacaaacaggggaatggtacagccgctgaatctccatcgttgtctccacagatatccgatcacagcaatgatgctggaaacaagtcaaacaatcattacaaggagagattgtccccatttagatacaaattgagatcgctcatattgcccttgattcgtcaagaaacaatatatctagccaagatgcaatcatttttgcggtgttctgtttttgacttttattttgcatggacagcaaaccttgccagccacacattctatgttttgatgttgccgccaccaatatggtttggagggagttatttgaccagggacttggtgtatgttttgggtctaggcatttatttaactggatttttgaaagacttcttttgtttaccaagaccacgatcgccacctttgcatcgtatcacaatgtcatcgtacactacacaagaatacgggtttccctcgtctcacctggccaatgcaacaggtgtttcattattgttgttgataaagattctttcacttgagaatgtatctaacactacgtactactcgctaatcgttgggttatcattatattacatttctttgatatttggacgattatactgtggaatgcacggatttttggacatcattatcggtggtttagtaggtctgtttgtgtttttgtttcgacactattttgggctacaatgggacaagttgttgtttgacaatggtttaggacttgtcgccagtacggtaattataattgcagtatttgttctgttgatccatttccattcagaaccagttgacgactgtccctgttttgacgattcagttgcatttgttggagttttaattggattggatttagctcatttggtggcttatcagacaaagtattttgcaaagatgaacttgaccggtaatccttatttgattccgtttgatgtaaatcgtggagtattaaattcagtttccagattcttattaggggtcgccttggttgtgacgtggaaaaccttagccaagccaattgtttttaccattttacctcctatctacaaagctgttggtgtgtatttaccaagaagaagctatatttcaactgctcatacacagacatcaactcgaaaaattagatcaacgtcaatgtccaatgactcaaatatgggaattggtgatataaacaatttcataaagggagtgactgaccacaataagaaggacgaagttggaccggaaacagaaattgattattacgaaatgctatcctatagccagaatcaaaatagcgacaacacgacaattcaaactccaccaaaatataacagtggtgtgttcaaatatcgttatgatgtagagattgttggaagattgattatatatgcgggaatatcgattactgcggtgtggacttttgcatttgcaagtgactatcttaatttatag

SEQ ID NO: 6720 - DNA, 1704 bp, Candida albicans
atgagtgaagagaatccgccgcagcaagatcaacaggcgccaaacgtatctgataaacctcagggagatctgttaataactcctcgtgaaacacatttccacaatgtattcgtgaaatatttgataatgcttattagtgccttgggatcagttatatacacaactgtgctatgtactggttctatactcaatcattggtttgatattgttagtggaagggaaaagaccgtacttgcagatattgagcaaagaagtcacggatatgtgcctcgagaaccatacgatgaattgtcgaaaatgaaacccactagtgatttacagtattatttgcagcagttgaatttggatttgcaagagtacagggttaccacatgtgacgggtacatcttaaccctacatagaattattgatcccagggagctggaagaacagaggcagcaaagaaaacctgttcttttgcaacatggcttattgtcatgtagcgggacatggatagtgagtggcaagaattcattaggatactattttcatgagcaaggctatgatgtttggatgggaaataatcgatcgtggttcataccgcaacacaaaactttgagtgggagtctttacaacaatgaacaatactgggactggggagtgcaagaattggcgtaccatgatttaccggctctaatatcaacagttttggcgaataagaaatatttccaaaaattggttttattggggcatctgcaaggtggactccagagttttttgatgctcaagaatccacgtttgggagaaatacacgagaaagttgagctcttctgtccattggctcctgcagtatatccaggaaagttattctatactcgtcaattcattaaatttattaataaccgtagtgaattcatgtggttgatattgtttggatgttgtgcatttttgagaaatttgtgtcttgtgagacactacattgcaagttcatggttgtttgggaagttgtcgtactacatgtttaagtatttgtttggatggactgggagaaattggggaccatataaaaaagtgtggcatttctgtttcattttcaatatgagttatgcatcggtagaactaatgaagtattacttgtcaaagcattccgattgtgggtttaccaccttgttacaaccaaaagctgcctattcgagtgatgcacattttaccgagaatgtcactgacgacaaaaaaagttatttccagtttgacactacctggttcagtggcattaaggttcctatgattgtatttataggtgacgaggattttttggtagacggagaaaaagttgttgcacatatgagaaagtatgaacccggatatagagaaggaagtaattttgaggcagtttcgattcccacttacaatcatcttgatatcgtatgggcagaggatgttattggaaccattggatatactatatgtaacaaattaaaacaaatgaaagctcgcgatgtgcaagaggggcttacgctggaaagtaaagaacaggctgttaccatcccggaaggatcttccggtcatcaccaacagcaagaagaagtgggtttgaacgaaaagattgtgctggtatcagaagatatacatgatactgaacttacaactaaagtgaaacataacttatcggcagatatcccgctcacagaaactagaaagctaactacaaccgaagtattctaa

SEQ ID NO: 6721 - DNA, 825 bp, Candida albicans
atgtttaataaagacccctttaaagtatatcatgacaatgttaataaaaacattgaaaggatgaaaaaggagaagaaactattagtttcttcacaacatattccaggtgacagacaacatcatgcacatcatcacaaaagacagcctttaagtaatataacatcagccagaataaacaagcctacgtcaacaagcaaaacaaatcttctatctacacgaaaactattatcaaagtttgagaaaccaaaacgagaaattttttcaaataagtcgtacgaatttgaagtgcttaataatcgtggatcgaataataaatataccaaaattgaaaatgaatttgacagtaaaaatatcatttccaaagatctaactattaattcatttttaaagaagtttaaagaaatggttaattggtacaaattgaacaaatttcaatttgaaataacaaacacaacctctaaagagggtgtcaacaataatggttattttgagcaagtcaataaaaatgtaataacgggacaaataatgcaaaacatagttaaaagaaattatattcgacctgaatatagtaaggccaaaattactgcaactcataaagtcaatcagataggtaaattaagtgaatttatgtacgctgttaaagtttcaggtgaaacgagtaacgatgataaccaaacacaaacggaaaaaacagtattgctcatgaacgtgggaaattgtgagataaaagtcaacgatagacttaacttgaatgatttgtgttatttaatggattatcagggaggaaaattaggagtgtacttgcgatggcatgtagttaaataa

SEQ ID NO: 6722 - DNA, 555 bp, Candida albicans
atggatataattaagaagaaatatccattttggaaacgcttattacataaatggcaatctcgtagagatatccccttccgtaaaaaattcttcattggttatgatttatatggtaatacatattgggaattcaccattgatgggaatatgtcaagattacgacgtaaattagaaccatttcgtaaagaattatttgaagttgattattttaaaactattccaccacaatggttacaatggttaagaagaactagggaacattcacctagtttaaatgaattaattgaagatcaaattagacaacaacgaattaaaattttggcacaacaagctgatgagaattggaaattggaaaaattaagattagaaagagaacaacaattgaaattatcaaatgaattaaataaagtgaaattagaaaatgaaaaatttattgaaaaacaaaaacgaaaagaaaaggaagcattactaagggttgaagatccttggaaacaagctgaagaatcgaaaaatgaaaatcctattgaatcaacaactataaaaccgagatcatag

SEQ ID NO: 6723 - DNA, 360 bp, Candida albicans
atgagatttaaaggatctcggaacggtttacatttaatgttaataggagaacattttgcaagactgataaatattagctatgttgaaatttatagaacacaagggtatttaagattatccttcccactatcatggggtaaccagctattcctacataggacattcaaatatatattccattatataacctacataagagcaaaatcatcaattcaaaccagtatttctgatactctaagatctattatggagaccaataaaaacgtcggaaattctctttgtttacttttgcaaccaaaggccgaagagtcaaaaaccaaaattccaccaaaaaaaacaacagaaaaaaaaatgaactag

SEQ ID NO: 6724 - DNA, 363 bp, Candida albicans
atggttgttgttgttgttgttgtttctggtttgtggtccatatggtttgtagccttaattgttcatttattcttttgttcacttgcacgatttcacacccaaaatttcataaaacgccccagaaatgttcaaacaaagaggcgatacttgtcattgttaagtaaaactagtaagtttcaagtgagtgttatccacgcggaagagcaatgtttgatccgatattcaagatttgttttcttggaaagcattgcaggcttcgcttacagattccacttgataatgaacgtcactacttgtgcgcgcgtatgtgttgtgagatttcaaacttacttacgaactattcattacattactaacaactaa

SEQ ID NO: 6725 - DNA, 1068 bp, Candida albicans
atggaatctacatacacagaaagtacaatttccaaattggaagataaagaggaaacgatcaaatttgatgaatctgaattggaagaacaactgcatcgaggaagagataaaaagagaagattatcatttcattctcgtcattcttcagccagtagacataaaatttttccaatacgtgaatcagttgatcctggttcagtattacctactgttttcagaactatttctcataatattgatattgaaaaaaatcatcaaccaattgattctagcgatgataatgatgataaagttgacaaagctgacgctgctgctaaaaccaaatttagtaattattcatttaatagtgatgatattggtgatattgttgaaaaattcaagactgatttgactaatggattatctgcaagtcaatatcaagaaaacttgaaaacttatggtatcaacaaacaatctaaacctccatcaggattattgaaaagaatattcatgtatttctttggtggatttggtttgttattattagttggtggtgtattatgtatcatttgttggaaacctttaggttcacctccagcagttgccaatttggttcttggggtgattttattggtggtgtttttaattcaagctggattcaatttcattcaagattattcaagctctaaagttatggaatcaattcatagtttggttgccagtgaaattatgtgtattagagatggtcaaaaaattaaaatcagttctcaagatcttgttcctggtgatattattatttttgcccctggggttaaaattcctgctgatgctagagtcattagtaattcccctgatttgtcatttgatagagcaattttaactggtgaatcgaaacctatcatggctacttctttcagtgaggaaccaggtacaaattatttggaaagttcttgtattgctatgcaaggtactttttgtgtcaatggtactggtagagggattgttgtatctactggtgataacacaatttttggttcaattgctcaattatcttcaaaacctaaaactggattatctccacttcaatag

SEQ ID NO: 6726 - DNA, 471 bp, Candida albicans
atgttatccagagtatccataagatcattgccgctttgtacacgtgcatttgcaacaacttctatattaaaacaatctgagcttactgccgctacagattcaagtggtaaagaaattgtttctggtgccccaagagaacttgtgacagaaagagttgtcagaatctaccaagaagccaagcctgctacacaatctggtcaccacaatggtagccactggaaattggactgggacgttttaggcaaaggaaatagatgggagaatgatttaatgggttaccaaggatctgccgattacatgcaaggtaccataatgaagtttgacaccaaagaatctgctatcaaatttgctgaaaaccaaggatgggatcactacgtgcaagaacctaagaaaagacatttcagaaaaaaagattattcagcaaacttttatcattcagctggtcctttgaaacatatcagaacaaaatag

SEQ ID NO: 6727 - DNA, 1659 bp, Candida albicans
atgacagaaccaaagagacgcaagtacaacaaatcccgccgagcaatatctaccaatagctttttagttaaacatcctttaaatgtcaaaccaggtggaaactcattcattgcctcgactcccatcctacaacaacaaagaaaggactctttgggtgatttctgcatattaccagatgagataataatgaacattattagttacattactgacattccatcattattgcatttatctcacacatcaagaatactctatgcatttttgtatgacgaagaaatctggaaaagagtatatttgcagaataatgaacactatgataccaaaccatggctaggatcgtggagaagtactgtgttgaatattatggaaaacaaggagttgttacagttacctgataatttgttgtgttcagatttgctatatcgacctattcagtgctctcaaatcgattataccaaattatttcatgaaattatcagggaagaagaagtatatcatcgagatgcgatgttaggccaacttgatgacttaccaagaggtagaatacaaagaatccaagaatccagtttaagtttggatgaatttaatgcaaattatcattcctcgccatttatcttagtgaattcggattctaaccgttggccaaattggaattttgacttgttattccatcggtttcctaatgtgaaattcagacaagaggcagttagttgggatttgcaaaaatattcacaatatttacacaacaataaagatgaaaatccattatacttgtttgattgcaaaagcgatgccatgaaagttttgaagcaagaatacaaagttccagaaatatttcaagacgatttatttactgtgtttaacagtaaacaatttaattgcagacctgaccacgcctggataattatggggtctgctagatctggttccactttccacaaagatcccaattctacttctgcctggaatgcagctatacaaggccggaaattatgggttatgttgcctcctcatatgacaccaccgggtgtgggaactgatgaagaagaaagcgaagtaacgtctccagttagtgtagcagaatgggtgatttcaggttttttcaatgattcaaccaaaattgatgaatgtttgattggaataactttccctggtgaatgtatgtatgtgcctagtggatggtggcatacagtgataaacattgacgactcaattgccattactcaaaactttgtgcctaaatcaaagctagctgaagttttaaattttttgaaaaataaaccgaaacaaataagtggtttcaggttaaaagaaatcaaacaatgtttagatttcattgctaaagatagcagtgatgaagttttgactcgatatttagaagcttttaatctgttgacaattgatctagaggaggattgtggtgaattacaagatttgcccgatatgccaatttttgagattttcaagcaattactaaataataatggcaaaggtgaaattttaaatgatgctttggaaaagttacaaaagattgaattaaagaattatgagcgtgaaactggtaaaagcaaggcatgggagaaattgacggaaccaactaattcagggactgctactttttcattcaactttgatgaagaaagtgatagcgaatag

SEQ ID NO: 6728 - DNA, 1767 bp, Candida albicans
atgacagtaacctcttcctcatctaaacaacccaattttttaatcattgttgctgatgatttaggtttcaccgatttatcaccatttggaggtgaaatcaatactccaaatttaaataaactagctactggtgccaatggagttcgattaactgattttcatactgcttcagcttgttctccaacaagatcaatgttattaagtggtactgataatcatattgctggattaggacaaatggctgaatttgctcaacgtcatcctgaaaaattcaataatcaacccggttatgaaggttatttaaatgataaagtggttgctttaccagaaattttacaagataatggatatcatacatttatttctgggaaatggcatttaggtttgaaaaaaccttattggcccaataaaagaggattcaataaaagttttacattattacctggtgctggtaatcattataaatatattaccagagattcacaaggtaatcaaatcccctttttaccagcaatttacgttgaagatgataaagaattattacaaccggaaattgaattacccgatgatttttattcaacaaattatttcactgataaagccattgaatttattaaagaaacccctcaaggtaaaccatttttcggaatgattacttatacagctcctcattggccttatcaagcaccacaagataaaattgccaaatataatggagtttatgataatggaccagaagaattacgtcaaaaaagattacaatctgccaaaaatttaggattaattgatacaaatataattcctcatccaattaaaactattcgtaaatcatgggatgaattaactctgttggaaaaattgaaagaaattaaaatcatgcaaacttatgctgctatggtggaaattttagatgaaaatattggtcgattaattgatcatttaaattcaattgatgaattaaataatacatttattttatttatgtcagataatggagctgaaggtatgttaatggaagcattacctttaactaatcaaagaattaataaatttatcgatgaatattatgataatagtttatctaatattggtaataaaaattcattcacttattatggtgatcaatgggctcaagcagcaactgctcctcatgcaatgtataaaatgtggtctactgaaggagcaattgtatgtccattaatcattcattatccaaatttattttcttcttctgccgtttctggtggtggtagcggtgatggtgatggtgacggtgacggtggcaagattcttaaagaattcacaacggtgatggatattttacctacaatattagaattagctaatgtatcacatccaggagaaacttataaaggtcgtcaagttgttaaaccaagaggtaaatcatgggttaattatttgattaataaaactgatcaagttcatgatgaaaataccgttactggttgggaattatttggtcaacaagcaattagaaaaggttcatttaaagccatttacattccaaaaccatttggaccggaaaaatggcaattatttaatataattgaagatccgggtgaaattaatgatttaagtgaatcatcatcagagtatcaaaccattttaaatgaattattagatcattgggcggtttatgctgctgaaacgggattaattgaattaggtagtgatttatttgaaaaagaaaaaattgaaggtgaatcaaatgaagttgtttatagaaccatccttgataataattga

SEQ ID NO: 6729 - DNA, 2166 bp, Candida albicans
atgtcatataaacggaaaagctataacccgtcaccattatcttcacccaaatccaacacatcgctacgacatgacataaccgtaacatcatcagagtacaacaattcagacgaatatgaagtagaggacaatgtccccaccatttttttaaatcagttggcaacattcccattgttcaagaatgccccaaccagtttccacaagcaagtagcagctaatttacgattaatacattaccgaccacaagagtttataataaaaaagggagatctttcgaggtcaatgtattggatattgaaaggaacagttagtgtcacatctacagatggtgaagaagtttatgccgagttaaatcaaggcgagttctttggagaaattggaatattgtacaatcgaccaagaacagctacagtaatagccaaaacgaggattcttctaggggttttaacagcagaatcattaaacagggtattaaaaaatttccccttgattgaaagacgaattcgagatgaggcacaggaaaggttggcaatgcaggacaaaaagaataaagagccattgtcaattcagagttttattacaaatttaccgttattccaatttctacctcctgatatcatacacaaacttgcattgagtgttgagccactagttttcagtccgtttgagtatattcttcgcaagggtgatacttgtggtgacatctatttcatcatagaaggggaagtagaagtgttgaaccaagaaggtgtgatagagatcccattggcgaggttatcaagtggaagctattttggagaaatgtcatttttaaactatctacaaaacaagcccaggatacgtactgcaactattagatcagtcacttattgtgagcttatggtgataaaatcagagtatttggaaaaactatgtgacgactaccctaccattattgaggacatgaaaataaccgccgaggaacgaaaagtggtcaaacctgcgcaaggaatatttagacctaattggtcaataaacccaacaagaactattccaccacaaaagagacaacgagaaaatgaaaatgaaaatgtagattatgttccatttactaagaggatgagaatggcatcaatgaaaagaagacgatcttctgctcttgccattgttgaacctttacctgaaactattttgatgaagatatttggatatttgtcattgccagatttaatgaaattgagaagagttagtaaaagatggagaaaaatggttacaacaacagctccactagaggttttggatctaagtcaatatagcaccacaattgataacaaggcattgatcgcaattactgattttgctggctctcgaccgagagttattgatatatctggctgtttccatataactgatgaagggttttcacacatggtcaatgaaatagggattggtgggagattggaagtgttacgaatggcgtctgtatgggaagtcactggtatggcaataatggatttatgttttccaggagaaaaattggaagaaattgatttaacaaattgtcgtaaagtcgatgacaatgtagtgcaacgattactacaaaaatgtcatttaaaagttttaaatttgagctactgtaagggtatttcagacagcgtggtaccatacttcaataatttggaaagtttggatttgactagatgttctggtataactgatgccgggtttgcccaattaccgtttctgccatcacttcgaaagttgagtttaaagcagtgcagctatttgaccgacaatgcaatatactcaattgccaatgctgctcgaaatcttgagattttgaatttaaatttttgctgtggtttgaccgatggctctcttctggcaatagccatggggttcccctatctacgggagatcgatttgtcgttttgtggactggctgtgagtgactcgtctgtggcatcattgtcagtgctttattacttggaaagagtattggtccgagggtgtgttagattaactcgtgctggtttggatacgttatttggaggaccgtgtccgttaaattttattgatataagtcaatgccgtaatgctcatgtgtatccagggaattttcccgccccaccttttcaaagcaatttggtaagagtatcaaataaaataatttacatagttgtatag

SEQ ID NO: 6730 - DNA, 1407 bp, Candida albicans
atgagaggtattgctgttttccttgctttaatatcattaatatttgcctcccccttgactgtaaagtcaccccttgtggacgacttctatactgctcctgatgggtatgagtcagctaaattgggagaaatcttaaagttgagaaaaactcccagtaaactcagtagtatgttttttgaaatcgatattaagaactcctggcagcttttagttagatctgaagattcatttggaaatgcaacagcaattgttaccacagttatcgaaccatacaacgctgacccatccaaagtcctttcttatcaaacttttgaagattctgcaaatattgaatgttcaccttcttacggtatgcaatatggtgccccttggtcaactgtggctactcaaattgatatggctttaatggtacctatgttgaagcaaggttattacgttgtcagtcctgattatgaaggaccaaaatccacatttactgttggtagacaatctgggaaagccactttagattccattagagctattctaaaatccaacaaattcactgggatcaagagtgatgcaaaagtcgccatgtggggatactctggtggttcattagcttctggttgggctgctgcattacaacctaagtatgctccagaattgaagaaaaatttgattggtgctgcccttggtgggtttgtcactaatattactgccactgccgaagcaaccgatggtacattatttgcgggattggttccaaatgccttgagtgggttagctaatgagtatcccgaattcaaagaaatactttaccaaaaagtctccaaagctgctactgacaatttgcgtcaaggtactgaacattgtattggaggtgctattctttactttgctgaagaccaatacttcactggcgatgatagagctttccctggaggttatggattacttaaagaagaggtggtgaacaagactattctggaaaacaatttgatgcaaatggataaagattatttaccagatattccaatttttgtataccatggtgcattggattccattgttccaatcagtaacgtccatgtcacttataaaaattggtgtgattgggggatcaactcatttgaattttctgaggatttattaaatggccatatcaccgaaactattgttggggccccggcagctataacatggttagaagcaagatttgacggtgaaccagtcgtcaagggatgcaaaaagacttccagaatcaccaacttttcttatccaaacatttctgattctactagtagtatcttcgaagggattctcaattctgttactggttccgaattgggtccaggtgtcacctctgataacataacgttggatggattaaccggattcttggggaactttattgacttaaaatag

SEQ ID NO: 6731 - DNA, 1191 bp, Candida albicans
atgtctgttgcattagctactccaatcaaagactttatcgaattgaaatggtctgatactgctatttccaaatatcataacatttggcttagagataattgtcattgtgaaaagtgtcattattcattaaccaaacaacgattattgaattcagctactattaaccctgatatcaaacccaaatcaattgatcttaaacaagatggattgaatattatttgggatcaagaagatcatgaatcaaagtatgattttaactggctcagattacattcttatcaaccacgtttaatccctattgatgaaaaattaaaagatggtaagaaattattgaaacgtgaattctggcaagttaaagagattgaaaagaacttacctacagttgattacaataaaattatggaatcgaccgacaataataatgagaatgctattaaagattgggtattaaaaatttggaaacatggattttgtttaattgataatgtccctgtcactcctgaagatactgagaaattatgtgaaaaattgaattatattagacctactcattatggaggattttgggattttacttctgatttagctaaagccgatactgcttatactaattttgatattagtagtcatactgatgggacttattggtcagatactcccggattacaattattccatttattatatcatgatggtactggtggtaccacttcattagttgatgcattcaaatgtgctgaaatattgaaacaaaaatacccggaaagttatgaaattttttgccgtatccctgtaccagctcattcagcaggtgaagaaaaagtttgtattcaacccgatgaatataatccaatttttaaattagatgatcaaggacaattattacaagtaagatggaatcaaagtgatcgttcaacaatggataattgggaaaatcctgaaactgatattcccagattttatcaagctatacgtaattgggtagaaattattacttcaccagaaaatgaaatgtggtatcaaatgaaacctggtcaatgtttaatatttgataattggagagttttccatctgagaagtgaattcacggggaaaagaagattatgtggagcttattttgaaagagatgatttcgttagtagattgaaattactcgtattaggtagacaagcagttttagatgccatttaa

SEQ ID NO: 6732 - DNA, 1470 bp, Candida albicans
atgagtaagtccacatttatagtcaacgggtgtcaaaaactattaacgtttcaactggtgccactaacgacaacactggaaactggatttgctgatccaggatttgaagcatactcgacagaaaatattgacattgacgagaaaatcagaaacaacccatattcccaaatagattgcatttgcttactcacaccaatttggaatcatgaccaattgaaaaaacttcaattatactatgatgtacacggatctactacattgtcacatgcgtacaagtatttttctttggcaatctcaaagttgatgtatactagacgtagctcgaatgttgccagttgtgttgttaaatctcatgtacaaaccagatacaagattttggatattaatgggtataaggaaatgctgttggcagacttgatcaaatcaatttcatccttgcctagtgatgataagcgactcaaaaatcttttgttaagaaattatcttcaattcaatttgatttatttgacggttcagagtggaatcgaaattgttgatgatttagtcggttgtgttttgagacaagaaaggtttgttgaaaaaatgaatacaacgctcaattggctacgttcaccattcatttatcaaacattatcagaatctgcaaacaggtatgtaaatttttttcacatgttgacgtccagtgacttgaaacgaatgcttgtccctactttagatatcgatcttatgtggcacactcatcaattatggaattatggttatttcaaagattgtttggaatcaccgtgtcatacggggattgatcatgatgatactgttgatgaaaataaattggacgatggttatgaatacacctgtaaaatgtatcgcaagttattcaaacaggaatattcagtttgctattgtcatccttgtgttgtgcgacgcatggctgctgctagcaaattctcaatattattgaaatctggtaataaacaatcacaaccagaggaaccagcaatcattaacaatccattattcagtaaagatgaagggttttcacatatcagtacccataattctattaaattgccaacatcacgagcggaactgaaacgaaaaaaatctattacagcttcaatgttggaaaaagatagaaacaactcccattactattattatcataattcttcgatgtttgttatggcacctggtgctccagtagattcagcaaattctgaattgtattctaatacgttgtgctgttctattgctaactctacaagttcatgcggcaaatgtggtgggaaatgcataggcggtagcggttgtggtaatggttgtggtagtactggaggttgtgttagttgtggtggcagtagtagtggaggaggtggtggtggttgtggtagtagcagtggaggaggtggtggtggttgtggcggtggaggaggtggttgtggcggcggaggaggaggtggtggtatttga

SEQ ID NO: 6733 - DNA, 1092 bp, Candida albicans
atgactagagaaactgatccattattgaaaaatagacaacaaccccaacctcaaccattggtaaaaccattgtttaagaaattgttaacaattatcattccattatcattaatcattatatctagttattacatcatgacacaccaccaccatcaccaccaccaaaacgacccaaacaacactgatggacctattttaactttacgattatatactaataatattcgatttgataataaaaattaccccgataaatatgaacaaccatgggaaatcagaaaattccaaagtattaattcaatgcaattcaatacatttcaaggtaatggcaatattatttgtttacaagaagtattacataatcaattaatagatatattacaaggattaaatgatattcaagaatggaattattatggagttggtagaactgatggtgaaaaatctggtgaatttgctccaattttatataaagatcaagattttaaaattattgaaaattcaacattttggcttagtcctacacctcatgtgcctagtaaaggatgggatgcagcattagaaagaatagtcacgatggttacttttcaaagtcgattaaacccggaaataaaatttaatatatttaatactcattatgatcatcgtggtgttgaagcaagaagaaaatcatcacaattaatcgttgataaaatgaaaaattataatgattatccatcatttttatgtggtgattttaatactgaaccaaatgatgaaccatatcatattttgactaaagctgggttcaaagatgggaaaatattaattgataagaaatcagcttatggatttgaaactacattcacagggtttgatattaataatgaaccaatttccagaattgattatatttggtctccaagtttcactcgtactttatcaaattcagaaaatgatactaaccaagactcagatgatgataatgataatgataaatcttatgaagtgactttgaaacaatttggaatattgagtaattggtttaatggacatcatttctctgatcatcgccccgttgtatcaacttatgaattaagaaagaagaaataa

SEQ ID NO: 6734 - DNA, 492 bp, Candida albicans
atgtcaattgctcaagaatttgaaaaagccaacacacattattcctccaatttcactaaaagagatttaccacttccaccagctagaaaagtagccgtggtcatatgtatggatgcaagaattgatcctgcagcatcacttggattaactgaaggtgatgctcatgtgattcgtaatgctggaggtagagctagtgatgcattaagaagtgttattatatctcaaagattattgggaacaagagaaattgttgttgttcatcatactgattgtggtatgttgacattttctgataatgatttaagaggaattgttgccaaagaaacaggtcataatgttgatcattttgcctttttaccatttggtgatttagaaaaaagtgttaaagatgacgtcgaatttttcaagagaaaccctttggtattggatgttcctgtaactggatatatttatgatgtgaaatccggtgcgattaataaagttgattcatag

SEQ ID NO: 6735 - DNA, 2451 bp, Candida albicans
atggctgtggagctaattaattggcaatttcgtcaaatatccaatcatgcagaatcaccattaattccaaaccaatggtacgacaccaagaattttacatcacatcaaatacacactgatcttttagaggcaaacattatacctgatccatttatcgatgataatgaaatccacgtacaatggattagtgaattaaattggcaatatcgatgtatatttgatgcaccaggaaactctaatagtaatgccagtttgatattagaaggtattgatacatttgccaatatcaaactaaacaacaagactattttaactaccgataattattttcataaacatgttatacccattataatgaatgataataatgagttagtaattacatttaatagtagtttaaggattggtcaagagttagaacaagaacatggtaaattaccagtttggaatggtgatagttcacgagtttatgttcggaaaccacaatttcaatatggatgggattggggtcctaatttgaatacatgtggatttgaatctattaaattgattacagatgaagattatgttaaagattttttcataggatataatttaaatcaagaactagatattgctgaattatcaattgagattgaatatttatttgacaaaagtccagaaaatatagaaattgaaataaaggatgacacaggtattgttgttgatcgtattgtgccaactattcctgtaactaattacaacattactaatgtcaaattatggtatcctataaatcaggggaaacaactgctttaccagttttctttaattattaatggaatttgcaagactacacagaaagtagggtttaggaaaatagaattagttcaagtgaatgataaatatggtaaatcgttttattttaaaatcaacaatataccaatacaaatttgggggacaaattggataccagctcattccttccaatctcgattaaccaaattagattatcaacaatggatcaatttaataattcatggtgggtataatttaattagaatttggggtggtggtcaatacgaaaaagatattttatattcattatgtgatgaagctggcattttaatctggcaagattttatgtttgcttgtgggatttatcccgaaaccattatagaatccgtaacccaagaagttgaagatcaattaattagattaagacaacattgttcaattataatttatgctggtaataatgaagattatcaaattgccgaactgataaatcttgataccaataattccactcaattcccagcaaaaaatatctatgaatatataatacctgataagatcaataaattgtgtaattttacaccgtaccattatggatctccttattctgacacttcacacaaatcttcagatccaacaataggagatttacatcaatggaatgtttggcatggtactcatgaaccataccaaaattggccagaattatctggtaggtttgtatctgaatttggaatgctttcaattccttctttgcaaacattgacaaaatatatcaatgaatcacaattatcaataaattcaaccttattaaatttccatactaaagctgctggcggcattgaaaatttggataattatttatgggataatttccttaaaccggaatcactagatatttctcattatatttatttgacacaattacttcaatctgaggcaatgtctttagcttatcgctattggagacggaattgggaaaattataaaacaggtggaataattatgtggcaattaaatgattgttggccaagtatatcgtggtccgctattgattttttaaaaattcctaaattggtatattatggtgtaaagagagaaattcaacaagttgggatagcttgtagaaggtatcaaattaaacaacaaacttataaacaacaaaatgtatttgaagttaaaaattgtttagatatttggggatttggtgaatttttggatattggtgttaaaattgagttttatactgaatatggagacttgtatttttccaaatcaatcaagaatttggttttccttaacaatcaagtgaatatggttgctgaaaagctttgttttgataacataaacgataatactattatctatttgaaattaattgaaaatgacaaaattatagctcgatctagtgattggccccaaccgttgaagaaattaccatggaataagttgtcgacaaatttaacaatagaatatcttggacaaggagatttccaaatatccacgaccaaacctgttaagagacttgaattgtattttgattacactcataattacctatttgatgataatggaattgatttattcccagatgatcctcaaattatacatatcaataattttgatgaacttgatgttgaaaaaatacgatatagacatttaggaagtatataa

SEQ ID NO: 6736 - DNA, 1719 bp, Candida albicans
atgaatttctacgtctttgaagaaagcaccagacaatgttcaataccatcatcaacccacaacatatgttcatttatacagaaacaatgtgatacaaattatttcaaaatttcagaactttattattgttacttgacttcatcattaccaagtttattgttaagctcactactaatattggttttgctagtggtcatcctaatatcacttagtatattggtgtcaaattatttattccaaaacttacacaacttaaccaatgtgctagggttgaacaatcaaatattatcctttatattaattcccttaacaaactctctacctgatatactaaactattatatagcattggattctggctctaccgatttggtcattggccaactaatggggtccctactaattatgttcactgtcattattggatcgattagtattttaaatcgagggtacataatagatcacccaaaaatacttatgctagatttggtaatagtattgattgttttgattttgtttctggaaatactatctgacgggaaaatcacaaacttggagtgttggactatgatcacaggatactttctatacatcttgtttttgatattttttgacaaagataaacttaaagaatcagcagatgaagagcagatttggattgaatacctgaataatggcctgttcactcatccttataatatcgaggacgcaatcagtattttgtcctctaacgatgacgaaattgcgagctatggaccagttttttccagatcaccatcaccactaccagacaacacaaactcacccaatgggtcactttctttatcaataagctcactgtcgccaagatcgtcgtcaccattatgtggacctactgaactggtgacagaagaatctccattgttattgtcagttcctgggaaattctccacctccgaatcatcaccgtctatttcagtgaatgaagattcagaggatgagattatcatccaaatcccatcacgatccaaatcttttgtacagcgagcgtttgatctagttgactgtttgttcttgacttttgtcccatactatagaaagatagagtccaattacagtaaaacaataatatgttggtacattatggaaaccaccgccattatcaattatcagttctttcaaatcccatacaaatacgtgatacccttatcgtacatagttgctgcaatcttggttcatgtacaggtctccaacaacgttcagatagtttctatttcagtggccggattaactgtaagtttaataattgtttcaaatttagctataataactttgcaattattgaaaaaccttggtgtaatctggcaaatttccgattatttgttgggtctaatcgtgtttgcaattagcaattcgctaaatgatggtatcacaaatgtaaccatttcaactaaaataaaccctatattgggtataaatagttgtattggtactcctttattgataatactattaggcataggtgggagtggattgatagtcaccagtagatcgcataaagatattttgttcaacttaactgacaatgttgtaattagcgctgctggattaatttttagtatttgttgcttaattatttacttgccatggaataattaccgagttgatgctaagattggtaatttcttgttgttgctatacattgtcatgacaggtgtagaaatatgtttagaatattga

SEQ ID NO: 6737 - DNA, 912 bp, Candida albicans
atgcaatccgaattatactcctcaacctacggtaaaggtaatgtcaaatttttaaaggtcaaaaaagatccatcaaacccaactgtgcaagatgttcttgaagctaatgtccaggttttgttgagaggtaaatttgatgaatcgtacaccaaagccgacaactcgtcgattgttcctactgatacggtcaaaaacacgattttggttgaagccaaaaccactgatgtttggccaattgaaaggtttgctgctcatttagctaaacatttcaccactaaatacggacatgttgatgggattgaagttaccattattcaagccaaatggtcaaagattaagttagaaggtaaggaacatgctcattcattcaagcacgaagggccagaaactagacgtacttatttgaactacgacaagcacaccaagaaattacaattgtcgtcctcaatcaaggacttgacggtgttgaaatcaactgggtccatgttttatgggtataatgtgtgtgactacaccactttgcaacctaccaaagatagaatcttgtcgactgatgttgatgcttcgtggacatttgatccaacacagatcgctactttagacgacatattatcgcaaccaaaattgtttgacaccacatataatactgctagagatgtcacattagaattgttctgtaaagaaaattctccttcggtccaatccaccatgtacaacatgtctcacaagattttggaaaccgtaaagcaagttggtactgttagctatgttttaccaaataaacattacatcttgttcaatttggaatggaagggcattaaagacaacaaagacttgttctacccagcacctgatccaaatggtttgattaaaagtactgttggtagaaaaggtgacaaagccaagttttag

SEQ ID NO: 6738 - DNA, 894 bp, Candida albicans
atgactccagctccaacttctacacttgcaacaacagaaaatcccaacacaaaaacctcatcaaaaggttatcaaattgatgaaaacagtttccacaaattagcaatcggaggtagtttacccaaccagtatcctaaatttaccgataaattacaagaaagaaagtttatcttagaacatactgcagcaacattcaggatatttgcccgcaatgggttcaatgaaggtgttgctggacattgttcagttagagatccccttgagccaaacacattttggataaaccccttgggtttacactttgcattaataagggctgaagatttagttcatgttgatgaagatggtaatattttgcctgatggtaaccaggatccaattaatgctgctggatttgccattcatagttccttgcataaggcaagaccggatgtgaatgctgcttgtcacacccactcattatatggacgggcatatagtgcttttggtaagccattggaaatgattaatcaagactcatgtacgttttttaacaatcaagcagtttacaactcctttggaggagtggctattgaaaaagatgaagggaaagccatagctgaagcagctggggatgctagggcagtgatattacagaatcatgggttattgactatgggtaaaaccatcgatgaagcggcttatttgttcatgttgatggaaaaaacatgtcatgcacaattattggctgatgctgctgagtcaaaagataaaccaaaacaatatattgctgatagtgaagctgaatatactgctcgtatcactagtaatcctgctattttatatactgttttccaatcagattacaagttggaagaaagattatctaatggtgatttcaaatttgcaggttag

SEQ ID NO: 6739 - DNA, 987 bp, Candida albicans
atgtccgcaagatcaatagctaaaatcgttactgctagacaacaagctgaaggtgttggtgctagagtaagaagatcaattggtgttattaatcaaaaatcattcaacccatttttaatgtttgatcatttttccagttctggtactaatgggttccctgaacatccacatagaggtcaagaaaccattactttggtattacacggagctatggcccatgaagatttcactggatcaaagggtatcttgtatgctggtgatttacaattcatgactgctgggaaaggtattgtccattcagaaatgccagttgccaatgaggatggatctccaactgttgggttgcaattgtgggtcgatttaccagatgcattgaaggatactgaaccaagatatagagatttgagagaatgggagatcccacaagtagtcactgatgatggtaaagtcaccatcaaggttatttcgggaagatcacatggtattgaatcaatcaaagaattggcttatactccaatcaactattactattataaagttaaagctggaggtaaattcaaacaagaattacaaccagaatttaattactttttatatgttttaaatggtaatgatctttatttaaatggtgaaaagaagattgatcaatatcaaaatgtgttttttgaagaggaaggtgattacataactggtgaaaataaggctacagaagataataaagacacagaagtagaattcatattggttggtgggaaaaaattggatcaaaaagtcgttcattacggaccatttgttgctgattgtgaagaaaatattgaacatgctataatagattatcaatatgctcaaaatggatttgaaaatagaaaaacatggaaaactttgattagtgacggggtgacaaaagatatgattgaaggtccattggatggtaatcttgataaaagagaagcaaccaagaaatcatatttggaatccaaacaataa

SEQ ID NO: 6740 - DNA, 1518 bp, Candida albicans
atgactgcttctaccaattccaccaatgacaagcaaaatagagctccattaatttggaattcattttgtatgggatgtctgggtttacaatgtcctggtttgtggtcacatcctgatgataaatcacgagactttaataccattgagtattgggtcaatttagcacaattattggaaaaggggaaattcaatgctcttttcattgctgatgtgttgggtccatatgatgtttatgatggtccaggaaattttagatccgttgccaaaagtggagctcaattcccaactacagaaccaagtgctgttgtttctgcaatggctgctgttacaaaaaatattggttttgggataacattcctgacaattagcgagaacccatatcattttgctagaagattggctactttggatcatttgacaaaaggaagagttggttggaatgttgtgagttcttatttggattcagctgctaaaaatttacttaatggagaatctttgccacctcatgcagaaagatatgaaagagctcaagaatatatcgatgttgtttataaattatttttgagttcttggagtgacgatgccgttgaattgaaaaatcgagtattcactaaccctgataaagtcagagaaataaaccacaaggggaaatttttcactgttcctggacctagtattaccgaaccaactccacaaaggttacctgttattattcaagctggtacttcaaaagcaggtaaggagtttgctgccagaaatgctgaagttgtgtttatcacaacgttttctccagaagaattaggcaaacaaatcaaggctatcaaaacacttgccaaagaaaaatatggtcgtccagaaggttcgatcaagtttttgcaattaattacccctgtggttgctgatactcacgaattggcagaagagaaatttaaagaattgcaactgtatggggatttagatggtgcccaagcgcttttttcagggtggactggtattgatattggcaaatatgattatgaggataacatcactgataaaggcaccaatgctgtcaagtcatttttagagttgtggaataagacatctcccggtgaacctgcaaatgtcaaaaagactagacgtgatattgctcgtcaaatcaccgttggtgggttgggaccagtgttttatggtacacccgaagaagtgacagatgagattcaacgttgggttgatatttcaggtgttgatggatttaacgtgacttatgcaatttctccaggaacttttgaggactttgttgaaaaagttgttccattgcttcaggaaagaggattaacacaaaaagattacccacaggatttagaccactctttgacatttagagaacaattgtttggtagtgacagaaaagaaccttattatttattggaaagtcacccggcttatgatttgagatggagagccggtgaatctaaagatgaatttgaaagaagactcaacaagaaaagaaaaagtgaaacccaagaaattgcataa

SEQ ID NO: 6741 - DNA, 1116 bp, Candida albicans
atgccaattccagcttcaatgaaggcaattgtcttctatgccccttatgatgttagaaccgaagaaagaccaacaccaaagatcaaagatcccaaagatgttattgtcaaagttagatactctggattatgtggtacagatctccatagttatcgtggtcatatcaaaggtcccgtgggtacaattataggacacgaattcgttggtaccgtggtcgctactggtgataatattacaaaattctccattggtgatgatgtaattagtaatttttcaattgaatgtggtgaatgttggtattgtaaacatggatattctggacaatgtaatgttaccaatacatttgggaaagttggtttagatgggggacaagcggaatatgttcgtgtgccatatgcagaaacaactttaaccaaaaaaccatcaaccacaaattccaatgacgatgttgatgattcagtttatgtgcttatggcagatattttcactactggttattatggggtgaaaaaaatcaaagattttctttcaatttcagctgcagaagggatcaaacctcaatcatttgaagaaacgacaatattacaattaggggctggtcccgttggattatgtgccttgagaattttgaaatattttggatttggtaaagttgtcgttgtcgacaatgttccatctagattagaagaggctaaaagattaggcgcaactgaagtgataaattttgaaactgaacccgatggtataaagaaatacatcactgaagaaactgatggtgttgggtttgatgctgttttagaagtagtgggatctgctgctgcccataaaacatcatttgacgccgttcgaagaaatgggtttatttcgtcgattggaatgggccacgaacctttcccatttaatggattagatgtctatttgaagaatattaatatgtcatttggaagatgtcattcatggtcattatttcctgaatctttggctatttttgaagagatgaaaggtgatttggcaagttttattgattataaagctaaattagaggatagtaaagaagcatttgatatgtttgataaacataaagttaagaaaattgtctttgatttgacaagctaa

SEQ ID NO: 6742 - DNA, 1401 bp, Candida albicans
atgaaaggtttggttttcttacttggtttattaccaacaatctatgcttctttagtacacattactcctgctagtgaagatgacttttataatcctcctgctggtttcgaatctgccaagaatggtgatattttgaaattgagaaattcccctaacagacttgctagtttctatttccctattgatgtcaagaatgcttggcaactcttggtcaaatctgaagattcctttggtaacccaaatgcttttgttactacgcttattgaaccttataatgctgatccatcaaaagttgtgtcttatcaaacttgggaagatgcttccaacattaactgttccccatcctacggtgctcaatttggttctccattgagtactattactacccaaattgacatgactttgattgttcctcctttaagaagtggttactacgttgtcactccagattatgaaggtccaaaggctacatttgctgtgggaagacaatcaggacaagcaactttggattcagttagagctattttgaaatcaggatctttctctggtatcaatgaagatgctaaagttgccttatggggatactctggtggatctttggctactggttgggctgctgctttgcaaccagtctatgctccagagttgcaaaagaatattgttggtgctgctgttggtgggtttgctgctaacatcactgctattgctgaatctgttgatggtactattttcgctggtttgatcactcttgcattgaatggtttagctaatgaatacccagacttgaaaacagcattctacgaagaactttccgactttgctgttccagaattcaaagccggtgctgaaaattgtttggctgaaaatatcttccattacccattacatcaatatttcactggtccaaagagagcttttgaaaaaggttggggattgcttaaagaggatattttcaacaaatctatccaagacaatttgttaattggtttgaataagacttacttgcctcaagtccctgttttgatttatcatggaactgtcgatgaaattatcccaattaaagatccacatgctcaataccaactttggtgtgactggggtattgaatctcttgagtttgctgaagatttgctgactggtcatttggctgagacatttactggggctcctgctgccttggcctggattgatgcaagatttgatggtaaaactccaatccaaggatgtctgcacacaaccagattgacaaatcttttgtatccaaatacttctgattctactcacctgtacttccttggtatttaccaagcagttttcggtaccccattaggaccaggtatcaatggtgataacattactattaatagtggattacttggtcttgtaagcagtattatttaa

SEQ ID NO: 6743 - DNA, 594 bp, Candida albicans
atgtctacgttttttgatgaaatgagcaaatcgtttgctgacgtcaaggtcagtgacggtaagattgatactgctgactttttacaagcatctgagtcgttggttaagttgtttgatcttttagggtcgtctgcatttactgtggtcaagtcagatatgacgggaaacattacgaagatacgtaacaagttattagaagatccagccaactccgccactttacaggatttggtgcttactgaagccaagaccaagaccaaaactgccacgcaaggtttgttgtggttgtctcgtgggttgcaatttacagcacaagctatgagagagacagttgatgctcctggtaaggaattgaccgttacattcactgatgcatacaccaagacgttgtctaagttccatggtatgttggtcaagccagttttcaagttggcgatgaaggcgtgtccatatagaaaggacttttttgaaaagttgggtgctgatcaaactaaggttgctgagcaattacaaaagtggttagaggcattagaaggtattgttaagattattatggacttttttgcatctggaaactatggtaagggtttatag

SEQ ID NO: 6744 - DNA, 777 bp, Candida albicans
atgtcatcatatactgaattgccacaatcagcaccaccatattctgaaggcgagtcaggatcaccaccacgtcaatttggtgataatatacctgatgatttcaaatattctgtttcggtagcatcatgtgaattacctttacgacaattatttattagaaaagtatatctgttattaactatacaattaatgggtagtgttattatgggatttattattcgatcatcggatctgtttaaaatttgggcgatgacaaacacttggttattgattttatcatttattggatcaattggatttatgattggtgcatttttcaaagctcgttcatatccaatcaatttaattttattgggtggattcactatttgtgaaagttatactttaggagttgcttgtgcatttattgaaagtagtatattaattgaagcaatattattaactttaattatatttattggtttgactatatttgcattccaaacaaaatatgattttataagttggcaaggtaccgtaggaatgatgctttggggtttaattggttgggggtttgttatgatgtttatccctcatcaacaaaattcaatgatggaaaatgtttatagttttttgggtgctttgatattttccatttatattattattgatactcaacaaattatgaaaactttacatttagatgatgaaattattggttgtatttcattgtatcttgatatcattaatttgtttttattcattttaagaatcttaaataataatcgtgatgattag

SEQ ID NO: 6745 - DNA, 2601 bp, Candida albicans
atgactgattcatttgatattgataatatattatctcaattgacattagaagaaaaaattggattagtaggtggaattgatttttggcatacatatccaatttctcgattaaacattcccaaagtgagattcactgatggtcccaatggtattagaggcacaaggtttttcaatggtgttcctctggcttgtttcccctgtggaactggattagctgctacttttgatcatgaattattattgacaaccgggaaattaatgaacattgaagctaaatttaaaaatgcgcacgtgatcttgggtcctacgatgaatattcaacgaggcccattaggtggccgaggatttgaatcattttctgaagatccttatttaactggacaaattgccagtgctataattaagggtattcaatatgataatgaaattggtgccacggttaaacattatgtttgtaatgatttagaagatgaaaggagtgctagtgattctttggttacaccaagagcattgagagaaatttatttagaaccatttagaatagctattaaagaaagtaatccaatttgtttgatgacagggtataataaagttaatggtgaacatgtttctcaaagtaaatttttcttgcaaaatatattacgtgatgaatggaattggcaagggacaattatatctgattggtatgggacatatacaagtaaaaaagccattgaaaatggtttggatttagaaatgccaggatctccaattttccgtaataaacaattgttgactagtatgattaaatcaaaagaattgcatatcaaacatttggatgatcgtgtaaagaatgttttaaaattaattaaatttgccaaacagtcaagtgttgtggtcactgaagatggtaaagaatcatcggagaataacactcaagaaacaagagatatactacgcaaactagctcaagattcaattgttttattgaaaaatgataataatttattaccattgaaaagggatgacgtcgacttcagctccaagtctattgcaataattggtcctaatgcaaaaattgccgcttattcaggtggtgggtcagccactttaccagcttattacaccactactccttataatgccattgttgagaaattatcttctatttccaaatttgatattacatcacaactcaaatatactattggtgcaaaagcatataaatatttaccagaattaggtccacaagtgatcaatcccaaaactggtaaacccgggttttccatgaaattttataaaaagccaaaatccgttcctaatgaaaatcgagaattatttgatgaattagatacagaaatatctgatattttattaggtgattattatcataaagatatcccttctaatgggttatattatattgattttgaatgtgaattcacaccatcaaaaacccaacattatgaatttggtttaactgttcatggtacagcacaattatttattgatgataaacttgttgttgataataaaaccaaacaaattaaaggagtttcatttttgaattctggaaccattgaagaacgaggatcaattgaattacatcaaggtaaaacttataaaatcattgttgaatatggttcggcacctacatttacattaaaagatcaagttggagaatattttggtggtgggattcgtcttggtatgaatgaaattattaatgatgatgaacaagaaatcatcaatgcagtaaatttggctaaatcagtagatttagtgattttaattattggattaaataaagattgggaaagtgaatcttatgatcgtcctgatatgaaattacctggattacaagataaattgattgaatcggtattggacgttaatccaaacaccattattgttaatcaatccggtacacctgtggaattttctgaatggttggataaactgaaagctttgttgcattgttggtatggtgggaatgaaagtgggaatgccattgctgatattttatttggtaatgtcaatcctaatgggaaattatcattgactttcccattgaaaaataatgataatccaacttttttgaattttaaaactgaaagaggtcgagtattatatggagaagatatttttgttggttatagatattatgaaaaattgaatcgtcaagttgctttcccatttggatttggattatcatatactaaatttgaattttttgatttgaaattggagaagaaaacaaaagataaagaagaagaagaagaagaagaagaaagtcttgttgtttcattgtcggtgaaaaatattggtaagatgactggttctgaagtgattcaagtttatgtatctaaagtggaatctgatgtgattaggccaattaaagaattgaaaggttttactaaagttaatttacaaccaaatgaaaccaaatctgttaatttgaaattgatcattaaagattcagtttcgtttttcgatgaatatgccaatcaatggtcagtacaactgggccaatacaaagttcatgttggtaatagtagtgataatataccattgactgagagtttcaccatagagaaatcatatttttggtcaggactttaa

SEQ ID NO: 6746 - DNA, 849 bp, Candida albicans
atgactttcacctcctttatcaaaccagaatcagacccaaatatcatcgttccaaccaagccattcaatttatctccgaatattgttgaaaggttctcacttaaagacaaagtcacagtcattactggtggagcaggtgctattggaagtgctattgctgaaggttatgcacaagctggaggtcatgttatcatattagaccatgcatcatctgacaatgggttgaccaaaagattatcatcagcgtatggagtcaagtccaagtttttccaaatcgatgtcacaaattctcaacaagtccaacaagtaattagtgaaattgacgaagagtttggtaccatcgacgtgtttgttgccaatgcagggattgcatggtatactggatccattttgaatgaagactcaaccccagaaaattggagacgtgtttttgatgtaaacgtgaacggtgtcttctactgtgctaaatatgctggagaaattttcaaaagaaatggcagcggatcctttattatcactgcatcaatgtctgctcatattaacaatgtaccaaactatcaaacatgttataactccgccaaggccgctgtaatgcacatggctaagggtttggctgttgaatttgctggttttgctagagtcaattctgtatcccctggttatacaaacaccctattatcggaaccaataccaaaaccacaaagggcaaaatggtggggtttaactccgatgggaagagaagctgaaaccgatgaactagtcggagcatacctttatttggccagtgatgcatcttcgttcacaaatggttcagatatcagagtagatggtggatactgttgtgtataa

SEQ ID NO: 6747 - DNA, 1335 bp, Candida albicans
atgtttcgtccaagtatcaaattcaaacagctgactttgtccataatagcaagaagattaaaatcttcagcacaacatcaacctttgagatccagttttgtcccttctccaattgtctttgttgccggattggctgtggctgcagttggtggatattactgtttagattcaagatcagcaatccatgaatatgttttgtgcccattaatccgaactttcacagatgcagagctgggacataagttggggatttttttcatgaagtatggattgtccccaagattattggatgatggtaaaaatgaccaaagcgacgttttaggtgtccaagtatttggccataagttgaagaatccaataggtttggctgctggtttagacaaagatggtgaagcaattgagtctttattcaattgtggcttttcttacgttgaaattggttcgataactcctgaacctcaaccaggtaaccctcagccaagatttttcagattgccaaaagatgatgctgttattaacagatatggtttcaattcaagtgggcatttcaatgttttggcaacattgaaattgagattcaataaattgttgaataaatttggaacctcacactcttcggagcaacatccattttccaatgcattccaacaaggcaaattattaggtatcaatttaggaaaaaacaaattcggtgacgaggtcaatgactacgtgaagggtgttgaaagattgggtccatatgccgatgtcttggttatcaacgtgtcgtctccgaacaccccaggattaagagacttgcaaagcgaagccaaattaactaatttattaactactgttgtgaaagaaagaaacgtattgggcaaaaacttgttaggaaataagccaccagttttggtaaaagttgcaccagatttgacggaaccagaaatcgagtctattgctaattctgccaaagaggccaaggttgacggtatcataatttctaataccacaattcaaagacctgttgatagattgttgactactgacaagcaattgattaatcaagctggtggtttatccgggaaaccattaaaaccattatccttgaaggccttgcgaaccttgagaaagtacaccaaggactctgatttggtattgattggttgtggtggtatttcaaatggtaaagatgccttggagtttggtaaggccggtgctacattcattgaattgtacactgcttttgcttataaaggtccaggtttagtaggtaaaataagagacgaattggctgaagaattgaggaaagaaggtaaaacatgggagcaaataattggctctgatgataagtga

SEQ ID NO: 6748 - DNA, 1437 bp, Candida albicans
atgttaagatctgccagtagaatatctagacataggttatatcaatctttgtcgtctcaaatcaacaagcagtcagccagatgttatgcagcagcagcctcatcgggtcctgaaaatagaccattggtaaccccattgggtagacacccacaaaagtattcgaccccagcaccagggtttggtcctactacattcactgaagtgttagatgatgttaatattacttgggataaaaacgatgacccagatagattggaaaagcaaaataccaaaattcgtcatttcactataaattttggtccacaacatccagctgctcacggtgtcttgcgtttaattttggaattacacggggaagagattgttcgttctgatcctcatgtcggattgttacatagaggtactgaaaaattaattgagtctaaaacttatatgcaagccttgccatattttgatcgtttggattatgtttccatgatgaccaacgaattggtgtttgccttagccgtggaaaaattgttaaatgttgaagttccattgagagccaaatacattcgtaccttgtttggagagatcaccagaattttaaaccattgtatgtcggtcttgacccatattatggatgtcggtggtttgactccattcttgtggggtttcgaagagcgtgaaaaattgatggaattttatgaacgtgtttctggtgctagattacatactgcatacttcagaccaggtggggtttcccaagacttgcctgctggattattggatgacatttatatgtgggccacccagtttggtgatagaattgatgaagttgaagaattgtgtaccgataaccgtatttggaaagatcgtaccattggtgtaggtgttgtttctgctgaagatgctttaaactattcattgagtggtgtcatgttgagaggttctggtattccattcgacattcgtaaatcacaaccatacgatgcatacgatttagtcgatttcgatattgctgttggtattaatggtgattgttacgatcgttatttgatcagaatggctgaattcagacaatcattaagaatcatattccaatgtatcaatgatattcctgaaggacctgtcaaggttgaagactacaagatctcccctccatcaagatcattaatgaaagaagatatggaagctttgatacaccatttcttattattcacaaaagggtatgctgttcctcaaggggaaacatatactgctatcgaagcaccaaaaggtgaaatggcagtctatgttgtttccgatggtagtgaaagaccatacagatgtaagattagagccccaggttttgctcatttaggggcttttgatcatatcgctagaggcaatttattagctgatgctgtggccattatcggtactatggatttagtgtttggtgaagttgatcgttaa

SEQ ID NO: 6749 - DNA, 972 bp, Candida albicans
atgactatttcggttggttctaattttagaaagtttttaaatattaatgcaaagaaaataattgcatttggtggatgggatttttctacttcatcatctacttataatttatttagaaccgcaatttcaagtggtagagaacaatttgccactaacttggttgaatttatggatgattacgatttagatggctttcattttgattgggaatatcctggacaaatagatatacctggtatacctgttgggtctaacgatgatggtgaaaattataatgaattatttaaattgttagctaaaaaagcacccaaaaagttaaaatctatagcattaccagcatcttattggtatttaaaaggatatccattaagtgatttagaaaagaatatggattattttgttttaatgaattatgattatgttggacaatgggattatggaaaaccaaatatgggtttaggatgtcataatgatagactgataacggaggaatctatcaaaatgatacagaaatctggtattgacactactaaagtatatggtggtttagcaaattatggtagatcttttaaattaaaagataaaaagtgtaagtcttataattgtccgtttgatgggccatcttcacctgttcctggtggatctataactactactcctggtttcttatcaatagctgaattaaacgatattaagtttagtgaaactcattttaattctacatcaaagtgttctcatggtgtttttggtgacaataatgaatattgggttgcatggatggatgaattggttatcaaagatactgaagattggtttaaaaatgaaatgaatttaggaggatctgctctttggttagaaaattataaaactgagaatgaagaaaagtatggtaatctagaatgcgatatggatatagaagatcttactataacttgtaaatatattccaataagtaatagaagatggttttaa

SEQ ID NO: 6750 - DNA, 1827 bp, Candida albicans
atggtttctccgtccacagataaagcaccatccattgtagagttgactccagaaacatatcaacaagatgtttcctcagattcaatcgatttggaatcaggtacaaaaaagctccaaaatgaatcagctttgcaatcacacgagtatactaccaatatcgatgaaacttcatcaagcaacactgcatccaagttgacttatatccaaaaattgaaaataagatttccttattacagattagcaattgacatttttatcggttgctttttcactgcatggtggttatctatagtcattcaacctaaacatagacatcaatggttgattccaacggttatttggggtatgattatggtgagattgatcacttggcacataaaaattttaccatggttattaaacaaagtcaaaattgtttgggatttctttactggttatgtgtataaagttttatcaaaaaaatatcaaagattaatcactggtgctgtgattactgttggtgttattttattaggtacatttgttccttcagaaactgaatattccaaaaggaaagatagagctatctcctttttcggttgtattgttgccatattcttattgtttgtcacttcaaaagctccttcgaaaattaattggaatgcggttattggcggtatgttgatgcaatttattattgcattatttgttttgagaactaagtgtgggtacgatgtatttaatttcatttccactttggcaagagaattattgggtttcgccaaagatggggtggcatttttaactaataaagatgtctctcaattaggaatgttctttttcaccgtgttaccttcagtggctttttttgtggcgttcattcatatttggtattatttcggtgttattcaatgggccattagaaaatttgcttactttttcttttggacattaagagtttctggtgctgaagccattacagctgctgcctctccgtttatcagtattggtgaaagtgccattttaattaaagatttgatgccatatttgactaaagcagaattacatcaaatcatgacttcagggtttagtaccattagtggtgctgttcttgttggttatattggtcttggtcttaatccacaagctttggttagtagttgtgtcatgtcaattcctgcatctcttgcagtatcaaaattaagataccctgaacttgaaaacccaatctcaagtggtacagtaatgattccaaaagttgaagactctgaagcagcaagggaaaaatcaaaagatgaacctcaaaatgtcttgcaagcattttcaaatggggccactttaggattgagaattgccgggacaatgatgattcagtgtatgtgtattattggacttgttgccttatgcaatggtattttaacatggtttggtaactattggaacattgatcatttgactttggaattgatactttcctacattttttacccaattggattcttgttgggtactccgcgtaatgaaattttgcttgttaataaattgattgcttataaattcattcaaaatgaatatgttgcttataatttgttaacaaatgaagctccttataatgaaatgtctaaaagaggaacattaattgccacctatgcttgttgtgggtttgccaatttaggttctttgggtattactttgggtgttttgaatacattgacaaacaattctagagccaaagatatttcttcaagtattatatctgctttgttctgtggtgccattgccactatgttatctgctgccattgctggtatggttatgcatgatttaaacactttccacattaactag

SEQ ID NO: 6751 - DNA, 1536 bp, Candida albicans
atgggtacagcttgggaattaacacaggctctcaaagatcaaatattcaaatatgcttccttcaatcaaaccccggtgtcgttgagacagatggtccaatttggtcctgttccttccccaggttcaattttcttagcatcaagatttattgttgaagaattaccaatccgattagctaaaaaagtgaaagatttggagaatgcaccattaggattgaatgaaatgccatccacaattcaggtgaaaaattggtacgcccaatcctttcaagaattaacagaattacataaaccgaaaattagcgacgagttggcaaagctcttgtctaaaggtgccagcaaacattctctaccagaggattcgataaatgaaaaacctcataccaagcaagagattcatcgtatacccgacctgctagaagataacccagccatcaataatatttttagcgacgatgggatcgttgttcgacatcaccaccatcaccattccatttccagagcaagaccccgtttaaatgacaatacccaaacaagagttgaatcacctacatatggtatgtcgtactttaacccatgtccggggaacattgtgtggccaaaagaagtctatgactacaacaaattggttcgtgaaacattggaaataatcaagaaaagacacgatgctacagtggcaactatggcacaaggggttcaagaatggaaaaataaaaatcaaactgtgatggtcaattcccaaattcagacatttttagatcgtttctatatgtcgagaattggtataagaatgttgattggtcaacatattgctttgaatatggctcagaattcaccaacaaaacagagattaagctcattgattaatggttctcaaggaaccaccaaaaagccacgttcaaattatgttggtgtcatttgtactgattgtaatgtcggggagattgctgaagatgctattgaaactgccaaatacatttgcgaagaatattatgggttattcgaagccccagaaatacagttgattgcacctcaacaagatataaatttcatgtatgttcctggacacttgattcatatgctttttgaaactttgaaaaactcattgagagcaactatcgagttccatacaccaaagttgaaacaaaagttgatagatgaagatccaaatttgaaattcgacgagattgatataaatgatttgaaatttcctcctataaaagtaattattctggaaggtacagaagacattgccataaaaatttccgacgagggaggcggtatacctaggtcatcattaccattgatttggacgtacttgtacacaaccgtgaatgaaactccaaaattagagcctgaatatgatcaaacttcatttaaagcaccaatggctggttttggttacggtttaccaatcagtagattatatgcacaatactttggtggtgatttgaagttgatttccatggaaggctacggaactgatgtttacttgcatttgaacagattaagcagttctaatgaaccgcttccatga

SEQ ID NO: 6752 - DNA, 1053 bp, Candida albicans
atgcaagctcaatcaaatcattccactgattcttttgatcctgatacttataaaaagtcccaagcagcaattaccgatcaaccaactcacaaaccagagatggtgttgaacaattttgccagaagttatgagcaacctccaatgactggttatcaaagttttatagccgggttgggttcaatgtttggtacctgtgggttattttgttgtctttgtcgaaacccatatcaagaagttgaacaaggtgaagttggtcttatccaaacatttggtgcattgacacgtacagttgaaccaggtttatcatatgtcaacacttggtctgagaaattgactcgagtctccatcaaaatcaatattagggaaatcccagctcaaaaatgttttacaaaggataatgttagtatcactataacttcagttgtctattataatataattgatcccatgaaagccatatttgatattgataacatccatcaagccattattgaaagaactcaaacaacattgagagatgtgattgggggtagaatattacaagatgttgttgaaaaacgtgaagaagtggctgaatctatcgaattgataatttctaaaacggctgctgactggggtgtaaatgttgaaagtattttgattaaggacttgacattacctgataaagtacaagcttcattatccatggccactgaagctaaaagaattggtgaggccaaaattattagtgccaaagctgaacttgaaagttccaagatcattagaaaggccagtgatattttggcatctaaagcagctatgcaaatccgttatttggatactatgcaagcagtgtctaagaatgctggaactaaagttattttcatgccttcagctgatcaagttgaaagaattgcgatgtctaacatgcaagaccaacctccttcaggtaagggtaagcctttagatttagaagaagataaggattgggtaggtactccacaaagtattggtattaacaataataggcatatcagtgagacagttgcattgcaagaagccatgagagtatga

SEQ ID NO: 6753 - DNA, 798 bp, Candida albicans
atgcttttgaaccaatatactttcagtgctgagagatgcactactcctacatcgatttctcatcctcctttggcatgtcctacatctccaccaccaacaaattcattaaatagataccagcacaaaccagtcacattggctccaactgtcgatcatggttgtgagataaatggaaccaccatagattgtatacctaaagattccaagttctaccaactaatcatggatttgaaacaattattggctggtaaaggattaagcaatgaagatatcgatgtggaaaaagtcaaacaattaatggctgattatgattcaaatgaaatcgattggcaacatttggctcttcatgatccatcaagaaattattcgcgtaacggtattatcaatttgaatggtaatgccaatttgttaatattggtttggtctccaggtaaatcaagtgccattcatgatcatgctgatgctcattgttgtgtaaagatgcttgctggtgaattgatcgaacatttatatgatttcccagatcatgaaggggaagaattacaatgcagacaagaaactagtatgaagagaaacgatgttggttatatcaatgattccattggtttacataaaatgtcaaacccattgcaaaatcgagttagtgtttcgttacatttatacactcctccttatgcttctatgtatggatgctcaatgtatgaagcaagtagcggtagaaaacaccatgttgacatgtccaaatactacagttggcaaggacaattggttaatgagaaagaatctctgacttgttga

SEQ ID NO: 6754 - DNA, 1545 bp, Candida albicans
atgtcagatattgaaaaaaaacaaacaaaaatttcacctgcatcatctgtggctcatgatgaagatactttggccaacgacgaattgttccagttaactgactcggttttaaataaaaaattgaaattaattaacgacgcaattgatgaaattgggtttaccccatatcatctcaagttattctttctaaatggaatgggatattggacggatacccaattaacatatcttgaaagtagtgttagaacatttgtcaactatcaatttggctacaagtaccctgtttcaaatgaaatgttagctgcgggtttgcttgtgggagcactattttgggggttttctgcagatttgattggaagacgtttagctttcaatttaacattattattaagtgcacttttcaccattttaactggtgtcatgaacaatatggcctcatattgtatctttgtatttttgagttgttttgctgctggtggtaatttagttttggatacctgtatctttttagagttcttaccccataaagaccaatggttattgaccttttttgcattcttttggggtattggtcaaaccatcgccgttgcattagcatatgcatttttaccaaacaacagttgtgagtctgctgacaactgtccttcccacattaaccgtggttggagatacgtttattatacgaatggatccattgttttagctatggctattttgagattaacccttatcagattgcaagagactcccaaattcttagtttcaaataatcgtgaccaggaagctgtggaaatattgcaaagaattgctcaaaagcacaaccgtacatgttccttaactatcgaggatttagaaagtttaggtaaagttgaaatcaatgacgattacagaaaacacattgacataaaggggacttttagattggttacccatcatgttcagattttattttcaaatagaacaatggcaaggtcttctgtattagtttttgtatcatggctcttgttaggaatttcttatccattatattcgtcattcttaccggtatatttggccacaagaggtgcaaatatttctgcaccagacgttcacggagtgtaccgtgacaacttgatttccaattgtgtctccatgggtggtcctctcattgctggtgcattgttgttttgctttccttggttgggtcgtcggggagttttgtttattggcggtgttgcttctatggcatttttgttcggatacactcaaattaaaacaagagcccagaatgtggcactttcatcaatatcatttgcttctatgtacatttactattcagccttatacgcctatacccctgaagtattcccctcagtagctcgagcaaccggaaatgcaattgctattgcctgtacaagagttatgacatgtattgtgcctgttattgcctactactccaatacttcgtcgtcagtccctatttgggtgtgtggtgcatttgttggagtgattgggttcttagctttactctttccatatgagccgagtaaacaaagggttgtatga

SEQ ID NO: 6755 - DNA, 672 bp, Candida albicans
atgtattcattatccaaaagaacattgtttcaacaattaaacaaaagaatttcatccactaccacatcttctactattataccattatcatcattatcatcatctagtcatatatctacacgtcgttatgtatctactaaagaattaacaccacaaactttacctactgatttccctttaatgtcagagaaaaaggccactaatgctgctgattatgtattaacttcattagatatgattgctaattgggcgagaaaatcctcattttggcccgttacttttggtttagcttgttgtgctgttgaaatgatgcatgtatcagcaccaagatatgatcaagatagattagggattatttttagagcttcaccacgtcaatcagatattatgattgttgctgggactttaactaataaaatggcaccagctttaagacaagtttatgatcaaatgcccgatccaaaatgggttatatctatgggatcatgtgctaatggtggagggtattatcattattcttattctgtcgttagaggttgtgatagagttatccccgttgatatatatgttcctggttgtcctccaactgctgaagctttgatgtatggtgttttccaattacaaaaaaaaatgatgaaaactagaatcaccagattatggtacagaagttaa

SEQ ID NO: 6756 - DNA, 1161 bp, Candida albicans
atgttgaaattatcagcaagaccaataagtagatcaataggagtcttctccagaagatcggtctacacatctgttctagaatccgatatcaatattaccaagaatggtaaagtcaatgttgctgtaggtgctggcggtcgttcttccagaactgggtacacagccactgtatttggtgcatctggatttttgggccgttatgtaacctccaaattggctagacacggtactaccactattgtcccattcagagatgatatgaaaaaaagatttttgaaagtcactggtgatttgggtgttgtcaattttgtagaaattgatgctcgtaatttacaaagtattgaagattcagtggcccattcagatattgttatcaattgtattggtgttgattacgacactaaaaactttaaaatggccgatgttaacattgccttggctgaaagaattgctgaagccactaaaaaagccaatgttcctcgttatattcatgtctcatcatataacgccgatccaaattcagaatcagtattctatgccacaaagggtattgctgaacaagttgttagagacattatcccagacaccactattgtaagaccagcaccaatgtatggtagagaagattcattattaaactatttgggaccaaaagttaaaatgtggactccaaacaaaaacgctaaagaagtttggccagtatatgttttagatgttgctagagctcttgagagaattgcttatgatgattctactgctggtcaaacatttgaattatacgggccagaaaaagtcactttccaagaaatcagaaatatgattcatggtataactgaaaattacgcccaagtaggtccatggtcatatcaatttgctgattatgctataccattaccattagctaagaccattgctaaagttcaacaattggtgtggtggaaattaactaacccagaccaagttcaaagacttgtcataaaccaaaagattgatccaaatgctaaaactttccatgatttgggtattgatgatttgactagattaccagatgtgttattcagttacgtcaaacaatggagacatccattaattgctcaaaagggggctccaggtaagaaagaattagaaagattaagagacgtccaacatttcactccatag

SEQ ID NO: 6757 - DNA, 684 bp, Candida albicans
atgaattctataaaatcacatatattaagatcatcaaaacgttacatatcggcatcgagcaaaagattagctgaagttgaagttaccgttgatggaagaaaagtatccatcgaagctggatcttcaatcattcaagctgccgaattggcaggagtaaccattcctcgttattgttatcatgataaattagccattgctggtaattgtcgtatgtgtttagttgatgttgaaagaatgccaaaattaattgcttcatgtgctatgccagtacaaaatggtatggttgttcatactgattcagaaagaatcaaaaaagctagagaaggggtcaccgaaatgctattagaaaatcatccattagattgtcctgtttgtgatcaaggtggagaatgtgatttacaagaacaatcacaaagatatggttctgatcgtggtagattccatgatgtcgttggtaaaagagccgttgaaaataaagctattggtccattagtgaaaacttccatgaatagatgtattcattgtactagatgtgttagatttatgaatgatgttgctggtgctccagaatttgggatctcacgcgtagaggtaatgatatgcaaattggtacttatattgaaagaaatatcaattcagaaatgtcaggtaatattattgatttatgtcctgttggtgccttga

SEQ ID NO: 6758 - DNA, 3393 bp, Candida albicans
atgtttatctcacatatgtctgcgcctccaagtatcccaacaataaccactccaggtacatcttccaccaatacacgcagagtcgctagacgagcttgtttgtcgtgtcgtgaaaagaagatcaaatgtaacggagaacccatgactactataacagcagctgacggtaccaatagaatcatacccgagaaaaccagaacatgttccaattgccgatttttgggtataccatgtgtgtttgtacaaagtaatcgtggtgggaaaaggaaaaagcgttcgacagaacaccaactatctgattccgaagcaacaactgcccctgctacacacccaaatcagttaggtcaacatcagcaattaccaccaataaaaaaaaccaaatcaacaccttcaattcacaatctcgacagtggagtggtgataccttcaatcaatcaacaacaagagaggcatcaagatggatatcgcaatgaagaattggcgtctaccgaaagagtcagctcatatattttagacggaaataacagcacaaagttaccatcaccggttttaacacataccacatttgactcacgaagggatgaaggccagagattcaataatcaattacgccgatcttcaactacaacagcaggttttctgttaccaccaccccaagaattattgggaagaagactggtcagttattcccctggaccttcttcaataaagagccaattgcctcacttaacgtcgtcgtcgaccacaacatccagtgtgcaatcacctccaccaccaccaccacctccgcaaccaccccgtggaatgggcatacagtttcatgaagcaagtcaccaaccaggcatatttcctcctcctcctcctccaccaccgccgccgccaccgcatcccgatcacttacatcaccagtattatggctacccaccaccaccgccaccgccaccgccacctcctttgcatcatcaccatcattacccgccctctcatcatccaggatttgggttcccaccaccgccaccaggtccaccaggtccgccaggtccgccacctgtaccaccaccacctcattatcaccaatcggcacctccagaatctccaccaaaagaatttaaacatcgacatccaaagtattttcataaacaaaataataaaggacatcgacatcgacatcacccacacctacatcatcaccatcctcctcctcctcaccaccaccaccaccatccccgtgatttccagcagcataatggacaggatgacataaaatctaagcatactgatgagaatagtcaaaattcaaaaccgtcactgccacgatggcttgataatatgtcagtttcgtccctggattcatctagatcagtttcatctccccaaagtcagcataatgacaagtcacaatattctaatcacaagtcatctacccagatgagtagttgcactaattctgtaacacaaacactcgatagactaccaaagatagtctctactcaacaaaataatctcaccccaacttcaaaaattctttcaaacagtccatttactgaatcagaattggcaaaatatgatttaccaaaatgggaggtccttaataaaatatttaattactattatatatataatcaacctagccatcaaatattccctgggaaagcaatattacttgaaaacttggcattaaataccgacagttcaattattcacgccattattgctaccacatgtttgataatttccaaatatgattcctccattaatattgtcgctgatgaattgtactggatcaataaaatgcataaattttgggataatttaaacgatttagggatactatgttgctacaaacttttagtgaaatgtacttcaattcgattcaatattaaaaagatgaacgacataaatatcaaactttgggaaatgatcaacaataatcaatatgtcgatattttcaaacagaaaaaatttgattttcaagagtctagaattatacccacattcggcaccaaacgccagaattatgaacgagagttaacattaaagattatatggagtttttatatcaataatattattttattacggtttaatcaaggaagaccatattataagttgtcatcaattatgaatgggtttaagtttgattatgatcgtgatcaatattctaataacattttattgccaatgagtgatattgattatctctcgttgaaatcagctggtaatagagccaattggaatcaattatatgaaaaatcgcatattccaactgacgccactagtttgattttgagtctgaaaagttttgagaattcattatctaaattatctaataaagacattacgtttagcaatttaattagtaaagatgaattccatgttgatttacgcaataaattgaaaacaaagtattatgaaataatccatgatgaaaaattggttgttataaataccaattattggttttcaaatataattttacgattgtcagagttaattcaatacaattatattttatgtgatatcatggttttcaaaatgtgcaaatatgactggaaaaccgatttaggatgtaatagtgatgatcgaggcgacagtaaagataccaacaccacacaaggtgaaaaatgtcgggatgctgatggaaactcgatacaacacaaggaagattacaaggattccgtaagtaatcctggtttattacaacatcctttgataagtgacgaaattcaactggttgaaggtttaactaccaaattgaaaagcttgaataataatgattggaaaatcttaattgaaatgatcaaatcgaccaacgaatacgtcgatttaataaaactaataccactgtccgagtatacagactattctattgttgttgggccaacaacttttgacgacaattataataacgaaaatgaaacaacgaaaagatttaggaatctaatcaacaattcttcagagtggtggaacaaacaagagttgaaatcctctgtacaacagtcttgggctaaattgcctatatacatattatcatttacttcaagggtattatcgataatttacagtttagcagttttgacgaaatacattaaattcaaaaagtcttttaaatcaggcgatttgattgttgaatttcttgagacaaacgaagttagaactattgaaggttgcaacattagtgttctacaacagaaacagatgtcagatgtgtatgagattttcactgaaattcatatattgagtcaattatttgttttatgtgagtacgttaaattcaaattgagttatagtaatgaggatcttgctgcgcttagtatccaacgattaaacaatctaaatcaacatctcgatgaagttttacaacaaaactttacaaaaataaaaccggaatag

SEQ ID NO: 6759 - DNA, 2055 bp, Candida albicans
atgatgttacgatttaggtcattttctactacgactcacctattgcgtggacaaaatttaactgaaaaaattgttcaaaaatatgctgttggattgcaaccactgagtaaaaaagtgtacagtggtgattatgtcaccatcaaaccggctcattgtatgtcccacgataattcatggccggtagccaccaaatttatgaatttaggagcatctaaagtgaaagacaacagacaaattgtgtgtacattggatcatgatgtacagaataaactggaacaaaacttaaccaaatatacaaatattgaaaaatttgccaaatctcagggaatcgacttttacccagctggtagaggtattgggcaccaaatcatgattgaagaaggttatgctttcccattgaacttaacggttgcctcagattctcattctaacacttatggtgggattggtgcattgggtacaccaattgtacgtactgacgctgcatcaatttgggccacaggtcaaacatggtggcagatccccccagtggctaaagtcgagttgattggccaattgcctaaaggcgtcacaggtaaagacattattgttgccttgtgtgggatatttaataacgatgaagtgttgaatcatgctattgagtttgttggtgatgatgcgatatctaaattacccattgattacagattaaccatagctaatatgacaaccgaatggggtgcgttatcgggattgttccctgttgacgaaactttggttgaattttatcaaaacagattgaagaaattgaataaaccagatcatccaagaattaataaccaaactatcgatcaattgattaacaacaaattgaccctggataatgatgctgtatatgctaaacatttacaaattgatttatcttcattatctccatacatctcgggtcctaattctgtcaaaatttctaattcattatacgacttgtcccaacaaaacattgccattaataaagcttacttggtttcatgcaccaattctcgattatctgacattcaagctgctgctgatataatcaaaggtcacaaggttaatcccaatgttgaattttacgtggcagctgcttcatcattagtgcaaaaggacgcagagcaatcaggggcttggcaaaccattttggacgctggggctaaaccgttaccagcaggatgcggtccatgtattggattgggtactgggttattgaaagatggagaagttggtatttctgccaccaacagaaacttcaagggaagaatgggttcaaaagatgcattggcatatttggcgtcacctgaagttgttgctgcatcagcagttttggggaaaattggtggtcctgaagaattgaatggtgaaccagtcaaacaggcaccacgaattattaaatctatagaaacagagagtaactcggccaatgaagcagaatcaaccagtgaagaagcttctggatcaattgatatattaccaggattcccacaatccattgaaggagaattaattttgtgtaatgccgataatatcaacactgacgggatttatccagggaaatatacctatcaagatgatattaccaaagaacaaatggctaaagtgtgtatggaaaattatgattcacaattttactcgaaaaccaaaccaggtgacattataatatctggatacaattttggtactgggtcatcaagagaacaagcagccacatgtatattggctcgaggcatgaaattgattgttgccgggtcatttggtaatattttcagtagaaactcaatcaataatgccttgttgacactagaaatacctgatttgatcaataaattacgtcaacaatatgaagggaatgatgaattgacaatcagaactgggtggttcttgaaatgggatgtgactaaggcgcaagtaacagtggttgatggtgacgataatttgattttgacacaaaaagttggtgaattggggactaatttacaagatattattgttaaaggaggattagaaggttgggttaaaagtgaattgaaaacaaaccaataa

SEQ ID NO: 6760 - DNA, 2109 bp, Candida albicans
atgtctgctttacttaaagaaacattcgccagatgcaaaaaggaaggacgtaatgccttagttaatttcatcaccgcagggttccctaccattgacgataccattcctattttacaaaacatgcaaaatgccggtgtcgacattattgaattgggtgttcccttctctgatccgattgctgatggtcctactattcaacaagccaacaatattgccttagataacggaatcactgttcctaaatgtttagaaattatatctcaagccagagatcaaggtgtcaccgggccaattattttgatgggatattataatccaattttgaaatatggtgaacagaaatttttaaaagatgcagccgaagctggtgccaatggtttcattgtcgttgatttgccaccagaagaagcaatcaaattcagaaccgagtgtaccaaatatggcttatcatatgtcccattggttgctcctgccacttctaatgatagattaaaaattgtgggagaaatcgccgattcatttatttatgttgtttctaaaatgggtaccactggtgcttcaactaaagtttccacggggatccaagaattatgtgatcgagtaagaaaatatgctggacccgatactccattagccgttggatttggggtttctactagagaacattttttgaccgttggtgaagttgccgatggtgtagttattggatcaaaaattatcactttgattggtgattctaaaccaggtgaaagaggtaaagttgcttatgattacgtccaatctattttaggtaatgacttcaaacctaattatcctaaaacttttgaaagaaataacaataaccaagctaaagaaactaaaccagttttggaagaaaaccacaaatataatccaagattcggtgatttcggtggtcaatatgtccctgaagcattacacacctgtttggctgaattagaaaaaggatttgaagatgccgttgctgatcctgaattttggaaagaatttagagatttatattcatacattggaagaccttcttctttacacaaggcagaaagattatctgaacatgctgggggagcacaaatctggttgaaaagagaagatttgaaccatactggttcccataaaatcaataatgctttggctcaagtgttaattgccaagagattaggtaaaaagaaaatcattgctgaaactggtgctggtcaacatggtgtcgccactgctactgcttgtgccaagtttggattggaatgtactgtattcatgggagctgaagatactagacgtcaagcattgaatgttttcagaatgaaaattttaggtgctaatgttgtcccagttaaaaatgggactcaaactttaagagatgccacttctgaagcttttagattttgggtatctaatttagaaactactcattatgttgttggatcagcaattggtcctcacccatatcctactttggttagaactttccaaagtgtcattggccaagaaaccaaagaacaattcaaagctttaaacaatggtaaattgcccaatgcagttgttgcttgtgttggtggtggttccaactccactggtatgttttctccatttgaaaacgataaagaagttaaattattaggggttgaagccggtggtgatggcttagatactgaacgtcattctgccactttaacagctggtattcctggtgttttccatggggttaagacttatgttttgcaagataatgatggtcaagtccatgatactcattctgtatctgctggtttggattatccaggtgttggtccagaattggcttattggaagagtattggtagagccgagtttgttgctgctactgatgcacaagctttggaagggttcagattattatcacaattggaaggtatcattcctgctttggaaagttctcatgctatttatggtgctgttgaattggctaaaacaatgtctaaagaccaacatattgtcatcaatgtatctggtagaggtgataaagatgtccaatcagttgccgaagtattgcctaaattgggtgaacaaattggctgggacttgagatttgaagaagatccttcaaaagtatag

SEQ ID NO: 6761 - DNA, 1272 bp, Candida albicans
atgacaaagcaattcaccatagtcattaaacttgggacctcatcccttgtagatgaggttaccagagaaccaagaatagccaacatgtcgcttatagtcgaaacgatggttagactacgccgccagggccacaaaatcgtcattgtctcgtctggggcaattgcatgtggaatgaaacaagttggattagaagaaaaacctgcaaatttatcagcagtgcaggctttggcttctatcggacaagtgcgacttattagaacctttgatgatttattccggcaattagaacaaccgatagcccagattttactcacaagaaacgacataatggacttcactcaatacaagaacgctcaaaatacattgaatgagttgatggatatggggatcattcctatagtcaatgaaaacgatacattatcagtttctgaaatcaagtttggtgataacgatagtttgtcggccatcacagccgggatcattcatgccgattatttgtttctcatgaccgacgtcgagtgtttgtataccgacaacccaagaaccaacccagacgcacaacctatattggtagtcgacaagattgatgatttgcatgtgaagactgataccgagtctggtgctggatctaaagtcgggactggtgggatgaccacgaaattgattgctgccgatttagcaaccaatgctggtgtgaccacgatcataacattatcgagtcaaccatattacattattgatattgttgcccatatacaggctcatgcagatacattatcggttgaaaaccagcgtcttgcgttacaaaaggatatccaacagggtaaaattccattgcatacaagatttttgagcaagccccaagatacattaatcaaatctgatcgcagattctggttattacatggattaaaaactaagggagcattagtcatcgaccaagggtgtttccaagcattgacaagacgtaatcgtgcaggattattaccggttggtatacttcatgttgtggggaattttcaccaaagtgaatgtgtatcgatcaaagttgtccctgataagaatggtgctattgatgatgcagttgaagtgggccattgcagagtaaattacctggccccagaaatcaccctaattaaaggtcataaaagtagtgaaattgaagcaattctaggttatgctgatagtgaatatgtggcacatagagataatttagcattcccaccagtcatgccaccttcaacagattcgttgatctcggatagtttatag

SEQ ID NO: 6762 - DNA, 1638 bp, Candida albicans
atggttgaagataaagatatagacttgaatattaataatttgaaaattcacgatgcgccaacacgaacaccaccggtaagcctgccaccagctttaccaacaccaccaactccctcagggattctgctcaacactacaatgcaagctaaattgatggcctttcaacaacaaagatcgaaagcagcagcagcagcagcagcagcagcttcagtttcatcatcatcatcaggtacgcaggcgtcatcgtcatctatatcagcttcaacatcggaatcgagtgtatcaacaataccagcaaatattaaccgaactgtatcgggtaaaaagaaacccaaaccaaacttgaaattaagtgatttaccattgtcacgtaataatagtttacaccgttctaacactagtgctagtgattcaagtgtgactacgccagaagcagatacccctaccggtaagatttcaaatgaaccacaacctcaaggtttgtttgctaattattctgattatgttgatataaaatcaggtcaattaaattttgctggcaaagcatcattacattctaaagggattgattttctgtctgggtcttcatttagagtttcattagatgaatttgagtatttagaagaattgggccgtggaaattatgggtctgtactgaaagtcttacataaacccaccggtgtattgatggcaatgaaggaagttcgattggagttagatgagaataagttcacgcaaatactaatggagttagatattttacataaatgtgactcgccatatattgttgatttttatggggctttttttgttgaaggtgcagtttacatgtgtattgagtacatggatggaggttcgttggatagaatatttggtaacgatgttggtgttaaagatgaatatgaattagcctatatcactgagtcggttatacttggacttaaagaattgaaagataaacataacattattcatcgtgatgtcaaacccactaatattttagtgaacacccagggaaaagtaaagttgtgtgattttggtgtgtctggtaatttagttgcctcattagccaaaacaaatattggttgtcaatcatatatggcaccggaaaggatcaacactatgagacctgatgatgccacttattcagttcaatcagatgtttggtcattggggttgacgatattagaattagctgttggccattatccttaccctgctgaaacatatgataatattttctcgcaattaagtgctattgttgatggtgaaccaccaaaactttacccaaaggtatactccaaggaggcacaaatatttgtcaaatcttgtcttgccaaaaacccagatttaagaccatcttacgcggcattattgaataatccatggttgatcaaaaacagaggtaaagagaccaatcttgctcagacagtaaaagatagagtagaagaaattgcgaaattggagaagaacaagagtgtcagtcgaagcaacagcatgaacaaatcagcagccgcagtgcctcctccgagaaatgttgaaagtgttcaatcattattgagaaacaaagtgaaggctccggcattacatagaggtggtttacaaaaagtgaatagaagctttcttaataatcattga

SEQ ID NO: 6763 - DNA, 738 bp, Candida albicans
atgtcttcagtacaaacaacagtagcatcagaatattcatcagaaatacaaactgtacccattgaacatagattcaatccatattctgataatggaggtacagttttaggtattgctggagaagattttgctgttttggccggtgatactagacaagttgaaggttattcaatacaatcacgatatgaaagtaagattcatgatgttggtgatgatattttaatgacggctaatggatttgctgctgatggagtagcattaatagatcgatttaaacaactgttaatttggtataaatttgataataatgggaaaaaattggcaattaaaagtgctgctagatatattcaacaattattatatggtaaaagatttttcccatattatgttagtactttaattgctggattagatgaagaaggtaaaggtgcagtatattcctatgatccagttggttcatatgaaagagaacaatgtagagctggtggagctgctgctagtttgattatgccatttttagataatcaagtcaatttcaaaaatcaatttgttccaggaactgatggtaaagaaaagaaaccattgaaatttttaacgttagaagaagtgattcaattggttagagatgctttcacttcagctggtgaaagacatatatatgttggtgatggattagaaataaaaattgttactaaagatggtattagaacagaatattatccattgaaaagagattaa

SEQ ID NO: 6764 - DNA, 1896 bp, Candida albicans
atggcaaaaaaagaacaggtagaaaaaaaaaaacgaacacatcaagttcaagttcaagttcaactatcaaataaaaaccaacctttatattatccacaaatgtcatcaattatacttagatttagatctaaagatggaatgttccgtattacaacggattcatcatcaaatttcactttagttttagaacaattaattgagaaattatcacaatcaggtaataatggcaatggcaatggtaataataataaaattgatttacaaagtttaaccattgctaataaacctcaagataaaggtaaatcaagttatgaatttcagaatcaaactgtgaatgaattaggattgaaaaatggtgatatgttatatgtcaattatgaatcggtcaccaatgacagtggacccacaacaacagcaacaaatactactactaatactgctagtggcaatactattcctattactggccccgttccttcaataccaatcaactctgtggttactctgcatggtccattaaaagttgaagaattacctatagatcaagaattagataaagaagatggattaattactcgtccattatcatcaatgtgtcgacatggacctaaaggaatgtgtgaatattgttcaccattaccaccatgggatgaaaattatcgtaaagatcacgctataaaacatatatcatttcatgcttatttaaaacaacaattggaaaaattgaaatcatccggtggatcatatttcccccctttagaccccgtggattattctattgatttaacatgtaatcaaggtcataaaccttatcctaatggtatatgttctaaatgtcaaccatctccaataactttacaattacaaaaattcagaatggttgatcatttagaatttgctgattcatttattttaaatgattttattaatgtttggagagttagtggtgtacaaagatttggttatttatatggtagatatgctaaatctgagaaaacacctttaggtataaaagctattgtggaaactataattgaaccaccacaacatgatgaattagatggaattacattattagattgggatcaacaagaagaaaaaatggtggatcaagtggctaataaatttggactttataaagtagggatcattttcactgatttaactgatgctggtactaaaaatggtaaagtattatgtaaaagacataaagatagttattttttaactaatttagaaatcattatggcagctaaatttcaattgaaatatcctaatatatctaaatatagtacagcaaagaataatggtcaattttcatcaaaatttgttacttgtgtcatatcgggtggattaaatggtgaaattgaaccaagatcttatcaagtttcaactagtgctgaagcattagttaaagccgatataattactggttgtactcaaccttcacaaatttatgttaatgaaagtaataatcatcgttatgtccccgatattcaatacctgaaaattaataaatatggattagaagttaaatcaaatgctaaacctacattccctggtgaatttttattggtttcattaactgatctgttcccattacaaccaactcctattttcactaattcttatgtcattgaaaatcgagaatttttaggtgatgaaaatcacgatattcaaagtttgaaaactttacataattatttgaaatcaaataatgatcaaatttttaatttccattttattttacatttaattaaaactcatattttaaatgatcaagaaatagatttattgattgaatatattaagagtaaaaatttggaagattatttgaaattagttgaatccaatggatggatgactttaatgactatattagaacagagtgtataa

SEQ ID NO: 6765 - DNA, 1680 bp, Candida albicans
atgtcatcgtcaatccaattacttaatcctaaagcagaatcaataagacgtgcccaagcactacaagtaaacattaatgccgctcaaggcttgcaacaagtgttagcttccaatttgggacctaaaggaacattaaagttgttagttgatggatctggtggattgaaattaactaaagatggtaaagttttattgactgaaatgcaaattcaacacccaacagcagtgatgatagcccgtgctgccactgcccaagatgaaattactggagatggaactacaacggttattttgttagttggggaattgttaaagcaagccgaaagatttatcagtgaaggtgttcacccacaagttattgtcgatgggtttgaaattgctcgtgaaacttcattggaattccttgatcagtttaagcaaaaggttgaaacttttgatcgtgaattccttttgcaaattgctcggtcatcattagccactaaagtcaccaatgaattagctgatgttttgactccaattgtcactgacgccgtattgactgtcaaagaagaatcacaaagaaatttggatttacatatgattgaaattatgactatgcaacatggccattctaaagaaactgaattgattcaaggtttggttttggatcacggagctagacacccagatatgcctagaagagtcaagaacgcttatattttgattcttaatgtctccttggagtacgaaaaaactgaagtcaactctgggtttttctattcctctgccgaacaaagagaaaaattagtggcctcagaaagaaaatttgttgatgataaattacgaaagattatagaattgaagaatgaagtgtgtgatttgaactccgataaagggtttgttataataaatcaaaaaggtatagacccaatgtctttggatgtgttggccaagaatggtattttggcgttaagaagagctaaaagaagaaacatggaacgtttgcaattgatttgtggtggagaagcacaaaactctgttgatgatttgagtccggaaattttgggatatgctgggctagtttatgaaaacgccattggtgaggataagtttacctatgtcacagaatgtaaagacccaagagctgctacaattttgatcaaaggttccaacagccatgttttacaacaaactaaagatgctataagagatggattaagagctgtttctaatgtgattaaagatgcctctatcttaccaggtgctggtgcattttggttaagctgcaataattatttattacaaagtgatgctagtaaaaagattttgaaaggtaaaaacaaacctggtatcaaatcttttgctgaagcacttttggtcattccaaaaacgttatctgccaatgctggtttggatcaattggagaccatttccaactgccaagatgaaataatcgatggtcacattgttggagttgatttgaaatcaggggagccaatggacccaacagtagaaggtatttgggattcttttagagttgttagaaatgccatatcttcagcaactggtatagcttcaaacttattgttgtgtgatgaattattgaaagctggtagatcgtcattgaaggaaggtgctggaggaccaccaggagcaggaggaccaccaggtggaatgatgccacccgcaggaatgatgtaa

SEQ ID NO: 6766 - DNA, 4797 bp, Candida albicans
atggataactcgttggatcaaaaactattggcgttcatatcatcacagtcatcatccaaaccgttgtcaccaagcaaatcaaataaccttcccaaagctgatataaaatcactcgagtcattgtgtgtcacttcattggatactttattgaataatattggaggttctactactaataacagcattttgccattggactcgcttgatgctattgaagtacgattacgcgggttgtacttaatttatgctgatgacccacgcaagtcatttgatatactacggaaacatcaattatatattgttaaactatttaatattaaacaaattgactatgtttatcaaaatttaaatgttttattagctcaaattaataaagtatttaaaattgaattcacttcgaaaagcactatttttacaggaattgagtttactgatttcaataattggaatgatgatacaagttttttcaatgtaaacagaaaagatataacccaattgataattgcatttcattttttagttttacaatggatagcccaatatgtttccaagaatttaaaatcaatattaatgcaaaagaatcagtttattagtcttgacgaattttgcaatattccccaaatgtttttaaattctagcaattttagaaaatggcaattattaccaagtaatgaaaacattggcaaatataacaccaataatgttaaattgatttctggtttcataaaagtattccaaagtattaaagtgtcatcatcattatctaaatatgttggcttgactaattgtttgaaattgaaactatatgaattgacaaaagacgagtcattattagagtccattggattttcatctaatttgattccatttatcaatgatgctaatataaatatcaatgagtttattcgcaaacacgtaccaatagaatctgagggttccaatgaattgcagactcggttattgaaatcaccacaacttgtcactgacagtgattttcttcgaaatctacaaaatgattcacaattatcagtagataaatgtcaaataataatttcatcctttaatgggtttaaagacaatctcaagacactcctgaaccaacaattatcaattcttgatttaatcacaatacatttgaaggattcattagatgaatcagtggtccccatattgtctcaactgtttcaaatttatagtcatttcaaattgatgaaaagaatgagaaacatttccaatttgttgttcaatttggggaataaagtgcacaatgaaatatatcgcaacttggcagttgattatgagtgtgcaatattcggaatttctcctaataatgacaatttcaaacagttgtataataaattgacgagaactcaggttactggctcagtattaggtaatgttttacaatgttttgaaacctacataagtttgacagacaacaaggacgatcatatcaacggaacaataattcaattcatttgtaaaactttgctgcaaacatcaaactttgcctcgttgaataacatcaagaatgaaaatttgaaatacgacattgttaatgatatttttcaatttatggagaaatcaaataatacagctgaaaaaactaaaatttgcaactcaattattgaatccacttcttggtgtaatcaattaattgaatgtaaaatatactatcaatactacaatgtcaatggacttgaaaagtatttggatttggaggagaaatcttgtgataatcaattggtaacttctggtatacaatttcagagattggtaacatttgggtggaatgaaactttgttagttgaatgtttgaataatttaaaatatgggttaaattacaactccagtgaatttgatttattcgaattaaacataatcaaacaagttttattgtatataaaatataatggaatgatagatgaattggttgacattattgaaatttcactagccaaatcaattaaagatgaacaatttgagaaatttctaaaatttgaatattgtcgagcattattatctcaaactaacaacaaccctaccaatgatgttaagttttcacaaatatttttggatttgaagaaacgctcacagaattggaaatcatttgatgatattattcaattgagtttattacaactacaatattgcatatatgccaagaattcaataaaggcaaaagatagatttaatggaatcttacaaacacttttgaaaaaaccacaattcaatatatcaaaatcaaagaatttacccattgtttccaaattacagaattttttaattttaggaaaatttcaattacttgcatgtcatgtaaataatcatattatacataataaaattgaagcgtttaataatattaaaacaggtattcaattattatattcaattgtcaaaaaacttcctactaatatcaacaaaactttatggcaagaacttaactgggaaatcactcgattattatttgatagttataaattggcaattgatttatctattgatattgggatatctcgagacatcccattatttttgaatgaatgggttaaactcaataatagtattgacaatgatgtaccgattgttaattgtatcaatgagtttgaaatcggtcgatatggattgctttccaataatgaatttcaaaaatatatcagaattgctcaaggaagactcggatatagccttgtgaagaataatagtgctgttcaacaatatattaatagagaccgggatgacgaaatttgtggacacgcttcaagtagtcgtcgattaaagagtcttgtgagaactattttcaattcagataattcactcagtgaattactgaaatcggtacaattattaccttgtattattggtgacagctctactatgtgctctaaggggttacttgataagttggttcaactaaaaaatgaaatattaactgaagtaactaattatgagaaatccagttcattatcgttaaatcagcaacaacaactaattaataatttgaatcaagttgtttgtttattgtcttctttgactttgtttaaaggtgatggtttgttatcagagatttattatcttcaggattatgttagaaatctaccatttgctaatgaacgtaaattgatggattcttcaaagcaagatgagagtaataatttgttaccccatgcattagatttcaatcaagttgttgaagatccaagtaacaacactattaacaatagtatgatagattttaatgttgatttacaactttatttaccccataattggattcttgttacattagacatttgtcagaatactggagatttattgatttccaaattgactaaggggtcaccaaatccaatttttatgagattgccattactgagattcccttcaagtttgggttttcaacaattgatgcaaaattttgaaaaaatcattgatgatagtaatttatctacaaaaaggaaaactacttctaaaattttaactgttgaagatagaaaacaatggtggagatctcgattcactttggattttcaattacaagatattttgcatcatgttgaaagcaaatggtttggtgggtttatttcaggtattttcactaatgacaatgacgttgaaaatgaatccaagaacgtgtttcataaattcaaacaagatttaatgaaaattttgaaagattgtttaaccgtaagtgacgataaatcgaatatagagaggtttcttcagtttaatgaatttatttattactgcttttactcaatggaggaatataattatgaattggttgatgatttgataaaatttataactataaatatgaattctcatggcagaatagttaattttggcactaatgttaaaattaataaattacacgaattaattaagaaatttgatgataaagttattaagaccaaccaaaatgtgactagcaacaacaacaacaacaacaacaacaacaacaccaacaacaacaacaacaacaacaacagcaacagcaacaactcccaacatattgttttgatacctaatgccaactgttccaatttcccatgggaatcgatggaatttcttcgtagtaaatcaatttcaagaatgccatcaattcatatgttacttgatctagtcaaatcaaacaccaataacaagaacaagttaatgtttgttgataaatctaatttgtattatttgattaatcccagtggtgatttaattcgatcagaaaatcgattcaaaaaactatttgaatcaaatcatttatggagaggggaaattggaaaattatcaagtaatgaacatgaagattatcaagattcaatattatgtgaaatcttgaaaagtcatttatttgtttatattggtcatggtggttgtgatcaatatattaaagtatcaaaattatttaaaaaatgtggcaataatcaagatttactgaataaattacctcctagtttattgttaggttgttcatcagttaaattagataattgtaattataactataattccagtatgttacaaccactgggtaatatttataattggttgaactgtaaatcgtcaatgatactcgggaatctatgggatgttactgataaagacattgatatttttacactttcattactacaaaaatgggggttaatagatgattataatggcagtggccatgattatggtatgaagaaattggatttgactaattgtgttgttcaaagtcgaagtaaatgtactttgaaatacttgaatggatcagcacctgtggtttatggtctaccaatgtatttaaaatag

SEQ ID NO: 6767 - DNA, 831 bp, Candida albicans
atgtcaaacccatcacataatccaaaacatcatcttcgtgaagaagattccaatggaactcaagatggaccaaaatcaactgtacctatcaaaagatctaaattggttggctcatccaatttagtatctccaaattttttacctagagatttaatagaaactccattgcaaacacgtgctgcatctccattgactttaaacccaccaattgatagcgatggattatcatggccatctcaaggagcaagacttagaatagagcaaacctcagaagaagctaaagccagagaagaacgtattgcctcggccgtaaaagtaatcttggaagaattgggcgaggacacttcacgtgaaggattattagaaacacctgaacgatatgctcgtgccatgttatatttcacaaaaggatatgaagataatattagggatgttattaaaagagcagtttttgaagaagatcatgatgaaatggttattgttagagatattgagatttattcactttgtgaacatcatttagttccatttttcgggaaagctcatattgcatatattccaaataaaagagttttaggtttaagtaaattggcaagattggcagaaatgtattcaagaagatttcaggttcaagaaagactaaccaaacaaattgccatggcattaagtgaaatcttgaaaccaagaggtgttgcagtagtcattgaagccactcatatgtgtatggtcagtagaggggttcaaaaaactggctcttcaactactacaagttgtatgttgggttgtttccgtgatcaacaaaaaaccagagaagaggtcttaacatattag

SEQ ID NO: 6768 - DNA, 1794 bp, Candida albicans
atgataatgccagaagtcacacataaatcaaacaatatagaagaagatgaagacaaagcatacaatcaatatgtaaatagtactgatattccagatgatcaaattatagaatcaatattttcagaacgaaaaactgcccatgctgaagatgccatcgattatgaagatatagacgaattggcagaagaagaagatgtgatggaggatctacccagggatgaggcaataaatggattaaactcaaacaacaacaacaaccacgataaagatgatgatgacgacgatgaattcaataggttacttcaagaagggcagcctgaattgacaaatgatgaagaaatggcagctcaagctgctgctgaatctcaatttgatgctttgtttggaaactctaatgattttgatagtaatattagccaccatgatcatatgggcggggacagtaatggtattattgatgataatcaccacagcagtgtaaacgaccacgatggtttattcaacaatttaggaaatggtaatcatttgctagatgatgataatgatggcttgaatgatttaggtgaactatttgatgatcaacaagaggacagcaatgttatcaacactaagaagcataagctagatgacgatagcaacaacgatggcaagactgctcaagaagatcaaaaagagaaagaaaataaacgacaattgaaacggcaaaaactacaaaagattgttaaacatcttgagaaggaacaaatcaaacgaaatataaaatattatttccctacttattcaagacatagaccatttaatttccacaaatttttttcaccaagtcctcagtattaccgttatcaaagaccagcaattgccttgtcgaaaaatataaaaccattaatacctacaaaagtaaatcttgaaatcgaggttgatcaaaagaaaattttcaaattaagaagtgctgatactgcatcgttgtcacacgaagacaaaaatgtcaccaatattactcaagatgacttggattttatcaaaaatttagaaagcaaaagatcttctattgattcgtttattaaagaaattgattacgttaaacgtgattggactaattgcgacaagtttgatcattattcgaaagatttagttctatctaccactgattgggatgatgatgctattataaatgctggagacaatgagtactctattgtgaagccaatcaatgagcttttgctcaacaatcccttggacaatagtaaacagaatagccaaaaaatcgagaatgacaatactaccaacaactataaccaaaacaatagtaatgtccaagatgaggaggaggatgatgatatcttcaatggacaaataaacttggataaattgaaacttgatatgaatgatcctaacttgttatttgttcctagtaaaaaagtcgatgctaccaaatcagtggttccaagtacagataaattattagaattaaagttcaacatatctaacgatcaagagtatgaattattgagaaagaattacaacaccaaacaaagatctcaattgagtaatcttaatattgaacattcagttcccgcattgcgattacagacaccttattataaagtcaaacttagcacagatgaaacgagatcattccatcgaccagtgtttaatgtcagacctggtacattggtgagcttttctaaattgaagttgcggaagcggaaaaaagacaaggggaaatctttgcaacagatttcctccaatactagtgacttgacagatgctgatactggtaatataattgcctta

SEQ ID NO: 6769 - DNA, 1413 bp, Candida albicans
atgtggaaatttttcattacattaggagttatattctccatatgtagtgctcaattattagacacggtttcatttgattccaattgggaaaatttacattatatacgtaatgttgatcttaataaaggatttgttaaagaaaccgatttaattgagattaaaaatataaattcaaaacctcaagatgaatattatttcactattaatgatggatttgatagtgttaatgaattatcagttttttctgcttttttaaatgacaatctacttgaagttaaagttgacgaaattgttgccaataaagttttcaaattgaaattaccagttccaattgctcctaattccaatgttgaacttaagattaattatgtttatattgatactttagttcctattccaactaaaatttccatggatgccgttcaacaattgttattcaagacaaataaattcccatattcaccttatctcactaaagaatatactttatctctcactgggatgtcaaagggacaagaaatgcaattacatatcgatgtcaatgccacagaaggtacaccagaccttaaaccaagagttgataaccaaacattgaaatatggtcctattgccgaagacattcaagcttttacattactgccaatgggattattgtatgatcataatcgtccagtaacaaaagccgtcaatttaaatagatctatttggttaccagcatctgatgtcaataaagtatccattgaagaatactatgaattgacccatgtcggtgctgccttggattcaggattttctcgtattgattggatgaaaggtagatacgaaggaactagaaaccattgggcattaagtcatttagaactccctttgttagatagagatttagatggttattattataccgataaagttggagttgtttcatctcacaaggttgttaaaaaccatctattattactgccaagatatccattatttggtggatggaattataatttcacttttggttggtctgaagatttatcaagatttcttcataaattacatgatacctctgatgaatatattatcaaattccccattttgaattcacttagagatgttacttatggtgatgtatatttagaattctatttaccagaaaatgccgaatttcaaaatgtatcatctccaatcccatttgaatcaatcactattgataatgaattatcatatttagatgtttctaaaggacatactaaagttactgtgcattataagaatttatttgatgatttacataaattggatgtatttgtcaagtacaaatataccaaaattaactttgtttataaaatcgtcagaatttccggatttgtctttataggattgattagttattacttgttaggattacttgatctttctatttaa

SEQ ID NO: 6770 - DNA, 1671 bp, Candida albicans
atgtcagtactaacccgcaaacgtgtcatctccccatctgattcacctaataagaaacaaaataccatgtcagatgaccagttttcagagaaaatgtacactacatacgtcaagtcggcattgctatccctagaaaccgatgccttgcccatcaacaccatcacagataaaatcaatctccccattggccaccccgaatcaatcacactcccccaatttcagatcgtcttgaacggactcgtgtcaaatacctcacgcttggacaacaccgcatgcagcaacctcatctttgccattttgagatacaactggctagacatagccgataccgatgggtaccaccgtttcgctgaatcgtattcccaattcctcgttgcattggtgtcgacgctcccaaaatacctccatgaagtgacaaacaaacttatccaggaatttgactcgccaaatacgacccaccaccacgaaatactcaccaaaatcatcaaatacgttcccacatcaatcaactcaatcccacaactcttgcaaaaaaacttcccccaccacatttcgtcctcgacaaaggaacttaccaactacgtgcagaacctagtccgcgtcttggactacactccagagttacaattcagtatatggcaactaatcatcgagtcgagtataaaactagacgttgaactccagaacgaacttgacgacctagacgacgaagagatcgaagatttgattagtggcgaagaagactccgacagcgaagacgaatgggaggtcaccaccacctccatcaaatccctcctgtccaaactcgatagcattatcagcaccctcttgactaccaccgccaactcattcaccatcgaagaactaaacaacggaaacggtgtcaacctcttcaacaccatcaactccctcttcaaaagccacatcttgcccacccactttaccaaactgatccagtttatcctattccacatcacccagttccaacctgaattggccgactcatacttggtattgctcatcgatgtggctttcaaccccagcgaaatcttggaaaagcgtctcaaggcaatgcagtacttgtcgtcatacatcgccagagccaaaaacctttcccgccaccaggtcatcttcattgtcagttatcttgtcggttggctcaacaagtttatcatcgaaagagaacaagaggtcgagtctagtggcgacaaacaagtcgggggtatggaacgattcaaactattctacgccgcatttcaggcattgctctacatcttctgtttccgccacgaactactctccaccaccgaaaacgactgggagtgcgacctcgacaagttcttccaaagagctatccttaccaagtttaacccgctaaagttctgtgacgagaccgtggtgtacatatttgccaagttggccaccaaactcaatgtctgctactgctactccatcatcgaacacaataaacgcgagagaatgttgcacacaaacgcattgccttccgcagttggcaactttaaacagaaacaagagttcttggacttggaagcctacttcccattcgatccattggtcttgcccatcagcaaatccatcgtcgctccaaactacatagaatggtcagaagatacccatgccgaagaaaccgatagtgaagacgatatatag

SEQ ID NO: 6771 - DNA, 2061 bp, Candida albicans
atgagtgcatttgcagctcttaaaaataatccatttggtgaatcaatatttaataataccagcaatggcgataatcacagtcgggatgatgtggaagaagatgaggtggttcaatacatagccaattcctctgatgaagatgatgatgacgacgacgacgacaacgacaacgatcaaggtaatgaggataataatttgttcccattggaaatatctgcacctgaagatacctcaatatcttcaacaccagcgccaatactcaattcccgtattactcaatccaattacacgccgaatgaatcaaatctaaaattttctgataatcatgttacaataacattaaatccatcagaatatataataatatcaggtcaatgcaatttgaaaataattaaaggatcaatcaagataaatcagtgtcattgtttaactagtgaagacaacaaatcttataatataattgcattacaatcacaatcattaccgattataagtcactatacaaccccagaaatggaggaggatggggtaccttcagtttcaataataaaattggagaattcatttagtggtattgaaaatatttctcaaattgaaccagcgtttaaaaatttgatttctggacaacctaatgttgaagaacctagtttatttaaaaattattcatttgatataatactaacagaaacaaatgggggatatggattagatataaattcttattggataaatgaattgaacctattgaaatcaaataaagatgatccaaccccgaaaataatcatgattattggtaataaaaacactggtaaatcaacattttgcaaatcattaataaatgaattactattaactaatcctaatcgtccagtatcatatttagaaatagatcctggtcaatcagaatattcaactccttatgccttatcattatcagaaattgttcaagctcaatttggtttagtggcattaccccataagaataacaatattgttaaatctcgtgttgaacattattttggattcactagtgctgttaatgccccaacacgatacgtggaaataattgaggaattatttaatcatcatcaaactaaatttagtcaaagaaatcatttaattataaatactcctggttgggttaaaggttatggtaaagaattattgaatcaaatcactaaaattatcaacccggataaattaatattattatctaataatttaaatcaagaatacccggataacgccaatattttacaagatttaacttatcaatcattatctataattcctggtgtttatcaattatcaaaatattcagccctacaaatcagaactataaataaattgttgtatttccatcaaaccacaacaactggaacatttaattttaatgatcatttattggattcctcgccattgaaaatatcatatgcttgtggcaattcaccaaataacccaggaatatattcaacaacaattataaatcataatatagataatgaatttagtcatcgagatttatgttctttagttgaagtttcaatttatgggatttactcgataaaaagtaatggtaacactaagtttgatgaaatgtcttgttttagaagagatgatggcaattcacccttttatttaaatccagatgattttgataatttattatctaatgaaacgataaccagtaaattcattggattaattatggttcatagtattaatcctaatgatcattatatgaatatctatgctccggatataataatcaatcgattacgaaaagtcctatcgacaaattcaaatcagactaatgattataaattaattatgataagaggtgaaggtgatataccaaattgtgaaatgttatatcctgaatttataaataagaaaattgattatttaaaactgattaaaaagaggaaagctgccactacaagtaggaaattggttgatttgaaattaccatatattagttttgaaacaaaactgaaagttggtggcatttggaaagtgagaaagaatataaaacgaagaggtcatcatcaaaaagggtag

SEQ ID NO: 6772 - DNA, 2964 bp, Candida albicans
atgtctgattggttgaatgaaaatgcatttgcagatagcaacagcaatgacgattttttgaattccatttttgatcagagccaaggagagcaacaagctccacaggttgcgcaggtttctacatcaatgtcaaacccaccacttcaatcacaatcagccctgtctacttcaagaatctcacaagcacacactccaatgtaccaacagtctcctgttactgctcacactataccgcaaaacagtcctcaaagtatgccgaatcaagtagcacagcctcaacaacaaataccaccaccccctctgcaacacttacaacagacaaccgcccaaatgcttcctcaacagcaacagcaacagcaacagcaacaacagcagcaacaaaaacaagagcagctatacagaatgaagcaacagatttaccaacagcagatgctaaaaaagcagcaagaaaacatgtctcgtcagccttctcccatgaattcagctgggcataacacacaacaaaatacgccaatcacccagaatgcaaaaacacctcaaaataattcaaaattgcaatcaatgcaaatggaattgtttttttctgttttgtatgactttttgcagcggagcgggatctccattccccaatcattagctatcaatggtaagagagtcaatttgttcattttgtatatcttgagtcaaagattgggtggatacagggtcatgaaggcttttctacttatgtcaccagagcagcagcgtatgcagcaacagaatccttgggcactaatggccgacaaaatggggtttcatgataaaggggaggaccccatggccaaagaaagaattgctagagaactttgcaattgctatagtaactttattttaccatatgaagagtattatgccacacctgaagggaataaggatattgaagctagcaaacatagattccaacagcaaattgttcagaaatatctgtccaatgtccccacaccggctcctaatcaacaaagtccaatgataagtagcgctccaacaccacaccaacaaaggaagttatctcgtactagcaactcggtgaataactcaccaaatgtcagctctcctttccataacacccctcgacaagttccagcaccagcaccggcaccggtacaaacggccgcgtctatgcctccgccaacacctgttacagccaaatctcaaacaacaaaagcagatgcccatattttgaaaaattatactcctttcaaaaagattgtagaaacgcatggtccattcaatatcaaagagctctcgcaattgtctactgaaatcgaggtgacaaaaccagtttatctttttgctccagaattaggaatcatcaacctccaggctttgacaatgtcagtaaaaagcaatagtgggatccaaagctcagaagttgtgaacgcccttaacacattgttggttgctacatcagacgttaattatgcttttcaaataaaggatatcatggagttattagacgcattatcttctttggggaaggatgttttgaacaaaattgtaggagtcaacacagaagaggattgcgtgaatgctgatgtgacaaaattgtctgccaatggtcggattgatgatatttttaatcgttatgttaaaggacaaggcgaagatatactgtatgtggttaattcgcttacaggggaagttgtttctgacgatgaggatatcgaggaacttttttcagtatgtgatgacgggaatctggaatctcctattgacaagctgactgatctgttagatgtgcttgagtttcatttggatgattatcttacagcattgaagaatttcaaatctgaaaacaaacaccattttagcaaacttcaaacacgaagtgccacggatgatcaaatattgttagtcgatgaattgataactataacaatgatcttgagaaatatttcttttgctgaatataataaagaacctatggcaggaaatcgtcttttcaaggatttattgttttcaactgtcaaaagcgttgctttaaacaatgacaaatttgtgtttagccgcaaacggttatgtttactcaaggattgtcttttaatgctagacaatatttctttgtttactcatttgcatactttagaggaagcatttttatcatttgttttagtagcatcctttggacctaagattgaagatcaatacaagatcccacgatgcaatattgaaacccattcgtattttgcctttggtcttgatgccttcaccaagttgatggtcagagagccatacaatagatcattaattcaggcagttttgaatggaactttgaattccagtatgacaggatattctgtcagtttacaggatcaagagtacacaagaaagttaatcaaggcttacaacaaagattataagtcagcatcacttttgagtcaagctttccagatgtatatgagtatattgccttttgatgccaacacatttgaattgtcaaaattcatcttcatgaggagtccaacaatttcacagatgttatttggggccaaattgttaatagacatggttccagttgatgatttgaacacacatcataacaagttgtctctttattggctattggaaaaccgggagttattattgggtaattttgccaggatagtcgttgctttatctacagaaactggaaaattcccacgcgaatcgcctgagcacaaggttttgtcgctggtattacgcaaggccctcgttgttatcaattcattggtcgacaatgcagttttggctaaggaaataggagacctgcgacacaccgacttgatggagagtttgacagattgtttggctttcccaagaataatacccgatgccattttgacattggacacgtttttggcacctaccattgataccaatttaggtaaagaagttgtcagattacttaggtatttgaaggatttaaaggcttgtgaggggatctag

SEQ ID NO: 6773 - DNA, 573 bp, Candida albicans
atgtggatttttgactggtttcaagatatattatcatcattaggattatggaataaacatgccaaattattatttttagggttagataatgctggtaaaactactcttttacatatgttaaagaatgatagattggccactttacaaccaacattacatccaacttcagaagaattggccattggatcagttagatttactacttttgatttaggtggacatcaacaagctagaagattatggaaagattatttccctgaagtcaatggtattgtctttttagtcgatgctgctgataccgaaagatttgctgaatccaaagctgaattggaaagtttatttagaattgaagaattgagtcaagttccatttgttattttgggtaataagattgatgttcctactgcagtaggggaaatggaattgaaaaatgcccttggattatataatactactggtaaagatactggtaaattgcctgaaggtactagaccaattgaagtgtttatggtttccgttgttatgagatctggatatggtgaagccttcaaatggttatcacaatacatttaa

SEQ ID NO: 6774 - DNA, 531 bp, Candida albicans
atgatttctcgtattggattattgaaaagacctactgtgtccactttaaacaactatgtcaaattacaatcgacattagcccttaaaagatacacatcaaccgtaccagcaacttcaaatcaagaacaagaaatattggttgcccaacgtaaaaatagacctacatcacctcatttacaaatttatgaaccacaattaacttggatcatgtcatcattccatagaatcactggtgttgctatggccggtgccttttatgctttaacttgtggatttgctgctacttcaattttaaatattccatttgatactactactttagtatctgcattcaccacattaccaacatttgctcaatatggtatcaaagctatttgtgcttatccatttgtttatcatattggtaatgggattagacatttggtttgggattttggtaaagaattaaccatccctggtgtttatagaactgggtatgctgttttggctgctactgctgtcattggaagttatttagctttcttatggtaa

SEQ ID NO: 6775 - DNA, 1323 bp, Candida albicans
atgtcttacgccactaaaatccacgccagatacgtctacgactccagaggtaacccaaccgttgaagttgatttcaccaccgacaaaggtttattcagatcaattgtcccatctggtgcctctactggtgtccacgaagctttggaattgagagatggtgacaaatccaaatggttaggtaaaggtgttttgaaagccgttgccaatgttaatgacatcattgccccagctttaataaaagccaagatcgatgttgtcgaccaagctaagattgatgaattcttgttgtccttggacggtactccaaacaaatccaaattgggtgccaatgctatcttgggtgtttctttggctgctgccaatgctgccgctgctgctcaaggcattccattgtacaaacacattgccaacatttccaatgccaagaaaggtaaattcgttttgccagttccattccaaaacgttttgaacggtggttcccatgctggtggtgctttagctttccaagaatttatgattgccccaactggtgtctccactttctctgaagctttgagaattggttcagaagtttaccacaacttgaaatctttgaccaagaagaaatacggtcaatccgctggtaacgtcggtgacgaaggtggtgttgctccagatatcaaaactccaaaggaagctttggacttgatcatggatgccattgacaaagccggttacaaaggtaaggttggtattgccatggatgttgcttcatctgaattctacaaggacggtaaatacgacttggactttaaaaacccagaatccgacccatctaaatggttgtctggcccacaattggctgacttatatgaacaattgatttccgaatacccaattgtttctattgaagatccattcgctgaagatgactgggatgcttgggtccacttctttgaaagagttggtgacaagatccaaattgtcggtgatgatttgactgtcactaaccctaccagaatcaagactgccattgaaaagaaagccgctaatgctttgttgttgaaggttaaccaaattggtactttgactgaatctatacaagctgctaacgattcttacgctgctggttggggtgtcatggtttcccacagatccggtgaaaccgaagatactttcattgctgacttgtcagttggtttaagatctggtcaaatcaagactggtgctccagctagatctgaaagattggccaaattgaaccaaatcttgagaatcgaagaagaattaggttctgaagctatctacgctggtaaagatttccaaaaggcttctcaattgtaa

SEQ ID NO: 6776 - DNA, 3117 bp, Candida albicans
atggttttaggttttggatcattactaggctccccacaaggtagatcgcaagctgaagcgccgcgtcctgaatttacacctattggtaaacgaagtggatcaacttcttcttttcaagtgtatcacagctacccacaagaacaaaaaacacaaacatcaccgcctagaaggaagttatttcgtccattagctgactcaaaccttgctgcacactattctcacgattctggtctatttgatgacaccgttgaagatttcgaaaaactctcccccatccgtccacaacgctcaccaatagcacaaagaaatagaaggagccctgatagacacgattttatcaccgatgacagtggcgggattgccgcaagacaactggaagaaaccattaaagagttgcgactggagaattacggttggaaaatcaagtataaggaactcatcagatcattggaaaatatgcctgctcatgagagggaagtaagaaaggaaaacattgaactaaaggaaaagttggcaaccttgcatcaacatattcaacaattggaatcgcaaatcgccgaattacaaaataacaaagagaatattactaccaacaacaacgattcccgtgaaaaagacaacattatccagcagttgaataataaaatttatgagttgcaaaaacagttatcgtctgaaaacaaactaaaagagtcacaacttgaaaatgaagagataattcaagctttgaaatctgaaagaaatgagttgacagcaaaagtttccgaattagaagactatatgaaacattctgaagttgaatttgatgttgtaatgaaacagaatgacgagtttcaggaaaggattcacgaattggaagctgcaattgacacgttacatcaaaccgaggccaccattcagcaacagtcccagctgagagaaaacactgaactccaacttcaaaaattatcaactgaattagataaacaacaagaaatgaaccgacttttagcatcaaaaaatgagaatcttgaaatggatttgtctgaaaagacagataacctcaaagaactaaacaataaggttttgagtcaagcccaagaaatcaatttacttgagacaaaattggatacattaaactcccaatttgaaaataataccgatgggaatgagaaattaatgaaaaacttggaactgctacaaaacaaggtacagacacaagaagcttttattgatgagttacaccatgaacaaaagaccattgataatgagtacaaggcaaagattaaagatttagagtacgagaatgcccagctatccgaagagattctgagaataagggcaaaaaatagccaatatgaccctgaggctcaacattatgagatcgatcaattaaaacaagaaaatgcacaattaaaagacaatgttaagaagtatttgaataatttcaaggagttgaaagataaagaagttgaacatgcacatcaaattgcattttacgagttggagtttgaaaaagctgaaaaagagaatgaaaaactacggaaagaaataaaactgttaaaagcgcacgagagtgagtttgctgaaagtgaagttaacaaccgggaaacacacaggaagctaaaggaagtcgagcgtgcaaataaagagttgataagaaaattggaaaatcttcaatccgaacatgctgcagataaagagcaacattacaaagaattagccgaacttgaaagagtatcgttatcaaaagaaaaggacttggcgagattcaaagccgaacttgaaaatttgcaaaattcagtttccgaaaaaacagaattacgagctgacaatgttcatcttagtaatcagcttgaagcgtcttggaaggaaattgctgatttagaaaaccaactttcagaattaaggataacacaaaaccaattaaaatcagaaaagagaactgaagtcgactatgaaatagaaagcctaataagaaaattaaagaatgatctaacagatttggaaagagaaaatgcaagattgaaaaccttagagattgaaaatattaaattgaagcaacaggcagacaaatttttggatgatcgagaattatactctgataatattgaattactggaaaggttgaaaaaagcagagtcagctagagcagctgctgaaaagaaggtttctaaaatggagttggatattgcagatctacaagaaattgtcgaagaattgtacacacgcaacaagttttccttgcatgacaatgaatctactgaattgaagaaagaggttcaagaccttaaaaacaaaatcaaggcaagtgatgactatattgatgagttagaacggaaccttagacattcacaagccgacaacaacattagtgaaaagttacaaaaagaattgaccgatgcatacgatttggttcaaacttatgaaagcaaaatgaagcaattggaaaaagaagtagaaaaaatcaaacaatcaccagaatcgtcaactattgagcaatacgtggaattccaattgaagcttactcgcgatgagttggagaaggcaaatgcccaattgaaatcgactgaagaaaagtacaagaaagaaatcacagagttgcaaaccgaaaagcaaaacatggatatcgaactattaaaggcaaaatccaacaacaaagatttgaatcgtcaacttgaagctctgaatcaagagttatcgacaatgactcgaaactgcaagaggttagccataaaggcgaccgagtatagacgactcgggaaaaaattggataacacagactggattgaatatattcaaaatgagaattattactttaaagaaagatacagagacacaaatatcaaggcccgtgactttaagttcttgtataactttaccattaattcaattcgcaactccaccgaggttctaacaaacaaggaggataatagcaatttggccaaattaggaatttaccccgagtatgtgaaccaatcgagggggaaacgaccaaagttaacgtttgcagtattggctaaatttgtgctagcagctgttcgaataagacaaagaacccgggatcaagctgagagatacagagagttgacacgagttagaggagaagtagacgtggccagacttaaatacaattaa

SEQ ID NO: 6777 - DNA, 1380 bp, Candida albicans
atggccactgaaacagaaattgaaaaatttgatgacatacagagggaaatttcagatccgattgacgatgaatcattaaaaagcacacaaaaaccagagtccttagaaactgaaaaagtagaagcagacgccagtcacaaaggtctagctgatgaagcagaacaattgtctgacgaagaaatcaacgttgatgatatttctagcgatgacaatagtgaaagctcaagttcagaagaaagtctgggtgatagttcttcagatgaatcgagtgatgagaatgagacttctaatattgattataacgatgttgaggatgaagacgaggattcaaatgaaggacctgtcaaatccgtccacgaaataattgatgaaaaggcaccttctttacccgataactatgaaatatcgcctaatacacctattgaggaaattggtgaaattacaggattggtcgaaaatactatgataatcaaggcaagaacatctggagagtttagaattctacaagaaaaatcaatattttgttttgaggatagaactgtgataggccccttgtttgaaatatttggtagggtacaacaaccagtttacagtgtcaaattcaactcggaagaacagtttctgaaattcaaggaaagcaaaggaaaaactgtgtattatgttgtacctgactcacagttcttgtacaccgattcaattaagcacataaaaggaactgatgcaagtaattgtcatgatgaagagctcccagaggaggaacaggaatattcagacgatgaaaaagaactggcagcaaaactggccaaaaagaaaaagaaaaataaaaagactaaagacaaacagacacacacttcggggccatcattaccaaacaaaagacagaaagtttcggcatattctcctataacaacttactctcagaacgctgtccataatagaggaagacaaatcctgcctcaacacaatactatttacagcaattatggtcaacaacaaccacctcaacaacaacaacaacaatcgcctccagttgctcagtatggacagccttattatccacaaacagattcttacaatagcttgatgggtcaaactccacagtatccacagccaacttttggccaaagccaacatttctatcaaaatgcatacaaccaaccagtgcaaccccaatatgagccagcataccaaccacctcaacaatacaaccagtatcaacaacaaccccaagaacaacaacaacaacaacagttcaaccctaatatgccaaatgcacaaacgcaacaacaggttgaccctgcacaattagagcacttacaaagattacttttacagcatctacaaaacaatcagaatcaataccaacatccacctcaataa

SEQ ID NO: 6778 - DNA, 963 bp, Candida albicans
atgaaagtgacaaagagagcaatttctgatacatctggctcgagtaagagaatcaaattggaacatattgaagttgagatcgaatctgaaactacagaacttgccccaaatgtattcacaaaagtagatcccgaagacatggccaagtgtaacggtcctccaaaatggtcagaaatctataatcaattagtttggatgagaagtaaattttttgcacccgtggatacccaaggttgtgaacgaatgccaaacactatcaatagaaacattaaaaccagaaacccaaaaatatatcgctttcaacttttaatatcattgatgttatcgtcgcaaacaaaggacgaagtgaattacgaggccatgaaaaacttgcacaatggattgttaaaagtgcacccagatggattgtgcattgaaagtgtactaaaattgtctgaatctgaaattgatgcttatataaaaaaagttggattccataataggaaagcacagtacattagaaaaacctgttctatactaatggagaatcatgatggtgatataccaaaaacgatagaagagattgtcgcacttccaggtgtgggaccaaaaatggggtttcttcttttacaaagtggttggggtattaacgccggaattggagttgatgttcatttgcatcgattggcgctcatgtggggctgggtttctccaaaagctaatacacctgaaaaggctcgaatagaactacaagaatggttaccaaaggattattggacagatataaatccattggttgttggttttggacaagtgatttgtgtaccacgtgctgcaaattgcgatatatgcacattggccagagacgggttatgtaagggtgtaaacaagaagttgctaaaaaccccgttgtctgaagaacggattaacaagttgtcgaaacaaagagctgatctctctcaactacttaaggagtttatgtaa

SEQ ID NO: 6779 - DNA, 2724 bp, Candida albicans
atgtttacgaagaatcatagaagaatgtcatctacatcaagtgatgatgacccatttgatgttgctgaaaaatattatggtgaggaaagaaagaaaaaattgaatcgtgttagaacatttagtgcctttgaaagtactaaatatggtgctggtccaatatcacctctacgacccacttatgaaccaccaccagtgattaaagaaacttcagaaccattatcttcatcatcgtcaacatcatctccaccgactttaactcctcaaactagtcaagttcaatttaatcttggtgtgggtaaaactaaaaatggttcagcaattcattctgattctgaggaggaggaagaagatgaagacccagttagtaatactaaaaaaggtgaagcagacgaaaaggatccatttgatactactgattctaaattagaaaatgaaaactcaactccatcttctattactggtaaagaaattattcctcatccaactggatttcgtggatcttcagaagaactggccattagaaggaaaccatcaattattcctatttatcatgataatatatctcaagaatcggttataagaaatgccaatactccaacaacttataatcgggaaaaattccatttacgtcgtggatcattagatgaatcaacttttattcgacccaagaaatattatattaatgatgttcaaggaactcttagagaattattagctaatgaagatactgataataattgtcaaattaccattgaagatactggccccaaagttttacgattaggtacagccaattcattaggaattaatcaatcttcaattagaggtacttaccgattaagtaatttattacaagaattaactattgctagtagatttggacgtcatcaaattgtattagatgaggcaagattaagtgaaaaccccgtggatagaatgaaacgattaatttctacatcattttggaacaatttaactagaataattactaaagaaaacattgttgacatggctaaagatacaaagattaaagaatcttggattgatgatcaaggtaaattacatgaaaatcaagaatctcatagaatttatgttccttataatcgtaaagatcaatatgaatttttccaattgattaagaagcaacgttcagatattcaattggatgtacaatatttaccacagaaaatcgatgctgattatattaaatcaatcaataaaaaacccgggttattatcaattgccactagacctgatccccaagcgcctgatagtggaagtttgattagttggccctatgttgtacctggtggtagatttaatgaattatatggatgggattcatatatggaaacattaggactattaactgatgtcaaaattgatccttcaggtaatccacgtaatttgagacatttagaattagctcgtggtatggcggagaatttcatttatgaaattcaccattatgggaaaattttaaatgctaatcgatcctattatttaggtcgatctcaaccaccatttttaactgatatggcattaagaattttcaacaagactatagaagtaaccccagaactcatggatgaagctatagattttttaaaacgggctacattagctgccattaaagaatatgaaacaatttggtgtgcccatccaagattagatgacaagacaggactttcatgttatcatccagaaggtaaagggatcccaccagaaactgaacctactcatttcaatgcattattaaaaccatatcttgccaaatataatgatattgatcaacttgatttcattgaaaaatataattccggagaaattaaagaacctgaattagatgaatatttcttacatgatagagccgttcgagaatctggtcatgatacaagttatagattagaagggaaatgtgcttatttagccactgttgatttgaattcattattatataaatatgaaaatgatattgcctttatcttacaatcatttttcaatgacaatttacaagacccatatgatgataataacagctacaaaatccatagttcgaaaatctggttagaaagaagtcatcaacggaaattaaatgttgataaatatttatggaatgaacaagatggcatttattatgattataatgttaaattacaacaacaaacaaattatgaatcagcaaccacattttggcctctttatgctaaattagcatcatcaaaccaagcagcaaaattaattgatcaatcattacataaatttgaagaacatggtggattagttgctggaacattaaaatctcgtggtgaagtaggattaactcgtccttcaagacaatgggattatccatttggttgggccccacaacaaattttggcatggataggtttagtcaattatggctatgatggaattgctcgtcgtttagcttatagatggttattcatgatgacaaaatcatttgttgattataatggagtcattgttgaaaaatataatgttacaaagggagcagtacctcatagagtagatgcagaatatggtaatcaaggattggattttaaaggggttgccactgaaggatttggttgggttaatgcttcatatgtatttggtttgacatttttgaatttatatgctcaaagagctttaggtagtttgactcctccagaaatctttttaagaaatatgcatcctgaacaacggaaacaatataaataa

SEQ ID NO: 6780 - DNA, 360 bp, Candida albicans
atgtttcgtacattattaaccaaaagactattcaatacatcaacaatggtttcatctcaagttaagaacaaggtcgaacaattgatcaaaaccaaaccagttttcattgcctccaaatcctattgtccatactgtaaggctaccaaaagcacaattgaagctataacaaaggatgcttacattcttgaattagacgaagttgacgacggtgctgaaatccaagaagcattattggaaatcactggtcaaagaaccgttccaaatgtctttattggtggtcaacatattggtggcaattccgatgtgcaagctttgaagtctagtgacaaattagatgacaaaatcaaagctgctttataa

SEQ ID NO: 6781 - DNA, 1830 bp, Candida albicans
atggggagaacaaatacactggaccagttgaatgctatctccgataagaataccaaaaggaaatctttggcattagataacgaatatcataacaattcttcttccgaagatgatagctctaagatagagctttcatatactattcccgataacaataacataattctgcaagaaactacaacgtcagtagaagatgttttatctgtatcaagtgctccacaaaatgagttgcgattgaggaagcaaaagagcaacaatcaagactcacctgttgatttaaatggagttatagtcgatgtttcaaaaagagaaaagatttttttaaaaaggaaaagacaaatcgataacaagcatggatctgataagtctaagtacttatctcgattcaatgatatcacattcaaagcaaaatcttcgacgatctttgaatcggatgaattttataaaacggatttctttgggatgtatgttttgttttggttggcaacagcttttgctatggtaaataaccttattcatacatattttgaaaactcaacccctattttgcaatggactgtggtaaaggtgtttaagcgagacttgtttaaagttggattagtcgatttggcaatgtatttatctacttattttgcctttttcgtgcaatatgcttgtaaaaatggatatttatcatggaaaaaagttggctggtggctacaagcagcatttgatggtttatttttatttttttggttatggatagctctggaatattgcttggatttcccatggattgccaaagtatttttagtgctccacagtttggtatttattatgaagatgcactcttacgcattttacaatggatacctctggctgatttacaaagaagggttatactcagagaaatatcttgataaattaacaaatggaaaagttacattaccaaaaggacacaccaaaaacgaaacagaaaaagtacttcaggaaagtatagctttcaccaaatatgaattagaatatcaatcccacgctactacagagaatcccgacgatcatcatgtattcgatatagatcagacagataagtcaattgccaaactacaacaagaagggttgatcaaattcccacagaatataactttattcaattattttgagtacagcatgttcccaacattggtgtacactttaaatttcccaagaacaaaaagaattagatggtcatatgtatttggtaaaacgtttgggatttttggtcttattttcttaatgatccttattgctgaaaacaacttgtatccaatagttcttagatgtgagattgccagaaagttgccagtactggaaagaatcccacaatattttttcttattgatggatatgatcccaccattcttgatggtatatttgtttacgttctttttgatttgggatgccattcttaatgcaattgccgaattgtcgaaatttgctgatcgtgatttttatgggccctggtggtcatgcactgatttttcagaatttgccaatcaatggaatcgttgtgttcacaagtttctcttgagacatgtttaccattccagtatcagtgcattcgatgtgaataaacaactggcagcaataatcacgttcttattgtcgagtttagtacacgagcttgtgatgtatgtcatttttggaactttgagaggctatttgttattattccaaatgtcacagataccattgattattatgagtagaagtaaatttatgaaggacaaaaaggtgttaggtaacataatttgttggtttggttttattagcggtccaagtattatttgtacactttatttagtgttttaa

SEQ ID NO: 6782 - DNA, 3531 bp, Candida albicans
atgcctgaacttgtgccaccaacaaacaatcggccccatatacatgagacacccgagttatcctcgcaaccttctttggacagtaatagacaaccccgtgaattatgcaaaaaatgtaatcagttgatagttgagggccacgcgtacgaattaggcgacgatagatggcacattcattgtttcaactgttcaaaatgtaacacgtctttgggttgcaattctaactttttggttttgggtaatggaaatttgatttgctcaaactgttcctacaattgtaagcaatgtggcagaaagattgatgatttggcaatattgactggggatcaagcttactgttccaattgtttcaaatgccgttcttgtaagaacaaaattgaagatttgagatacgcgcgtacatcgaaaggattattttgtatggattgtcaccagaaactaatggccaagaagaagaaatacgatgcgaaaaagaaacatttggcattacttcaggagaaaagagtacagttggaacgagaaaaagatcaacgtgaattgcaaatattggaggatcataaacgatcagtcaactcatccagaaacagtctaattcaatcatatatgaataaccaaaacaatcaatcaggagagagtttattgtatcaacaaaacaatcgctcagtaacatcagttacatcgtccaagaacaagtcattgcctttaccccctacatctacatcaccagcaagaccaaccccttattctgcaaattcatatcagtccaaagagtcaatttctgggaagaacaaaacagacacatctcttggttctttatcaacgtcacaaactttttcagaacacacaaacaaaggaggttcaactatgcacagtagtactgggcttcataatccaccaatatttcaatcagacaacgacttttccattgaggaagttcaaaatagctcggactcggattcaaatggcgatgaaaagaaatcaaacagcacttcgttgcgaaataagagttctaatagaaattcaagagttctgccttttgtaaaccagtactcaacccctccattgtcttcagatcacttgaatactgacgaaatatcagcagatactggtgaaagaacagtttacttggacgttatagatactcctccagaatcccaagctgatccacttgccggaaatcaattaaaaccagctcttgacgtgtcaccaggacgaaacaccgagcaaaaatccaagagctttcttattttatcacctaaccaattccacgataatgagtttcataatactagatccccaatgattgattctccaggaacaatcattagtctgaactcgaaccaaaacacgaaagcagtcaacttatcagtagaggataggcctcgttcagcatgcccttctccatttgccaaagttaatagacaggcaagagttgttgaaacgaatgatgaaatcctgacagatggagttgacgaggatttagcaatcggaactccgagacaagaacattcgagggcaggtaccttgaaatcagtgtcttcaccaccaccaaaggtgccattacctagtactccatcgagaggtgaagatatttccaaaaaattcagttttgttgaaacacccaaaggtttgggattggagggcgtggactacgataatcacgaagaccaaagaagttatatcaaactgcaacaagatcaaagacagcatgatattagcgagaagactagcccgtcttcaataatgtctacgcccaaaagggttgtaggcaatttttcacctgcagtaaccaacttggaaccaaagaattccgatttatcaaatgaccaacaacacaaacatctgcaaaagaaccagaatgtttcacgtacagcttcacttatcaagaacttgaaacacaaacgttccacctcaggaaatcaaaataaactagctgcacttttcactacaggcagtaaagaagatcacagaaatggccatacaagacaaacatctgatgggtcactttttagtagtattgccaatgcctacatttcgccaccaataactaatggcgctttagggggacgtaatcatattagactgacctcagactccacagtattgttatcagatgaagaccaccactacagcaatgttgcggttaagaatgatattgagcaattgaatagcagtaaggttttgctagaagaggatgttaagaagttgagagatgaaagacataagctcaatgaacagttgaagatgatacaatctaagatctcttcggaatcgattagatacgacaatttggtagctgaaatttccgagttgcagatacagaagacaaagatcacaaacgagaataaagatttgattgaacaacaaaaaaatagacaagcttctggtgccactggaaaattatcaacgtcatctagcaatgactctgatcctgacgcttctacattgggcaagagtgtgaatacacatctctcaccttacaaaagttcttctgatagtacactggttgtatcaagagagaattttgaatatctggaccacttgtctcctgatagacatcaaggtcaatttcaacaacatcaacaataccaacaacaatatcaacaacaacagccacagcaacagcttatagaggacgaacaagcacataaagccacacggttgaaattttggagaagaccaaaagtaggaacaacacaggttatcctgtctaatgagtataataacaatggtaacggacacaacaatggtgcaagaattccaaatagtttttccactcaggcattacgtatacctgctcataactccggtagttcattcaataacaatggagcaaacaacaataaccaacagaacaaattctcgaaatctaaatcaagtaacgtattggactcattgctttctggagactccagccaggtaccacttttcaacagcactttacaacagcgtgctgagtatgagaaaagtcaagttccaattattattaccagatgtctagctgaggtcgagaaacgaggcttagatttcgaagggatataccgtatttcaggtgggaattctgctattgtttctattgaaaatgcgttttccagcttatccaatgatcccgatgagaaacaattaaaccgagtggatgagactttggatgtcgatattcatgccgttacatcagcattgaagagatatttacggaaattacctgatccagtcattccatttgacttgtacgacgactttattaaagtatcaactaaagcttcccattccaaagaggtccgtattgcagaattgcagaagattgttaataaattgccaccagcaaacagagagacattaagattaattgtcaaccatttgcatttggtaaattctttgaaggatataaataaaatgggttataagaatttgtcagttgtttttgccccaactttagcgaaggatgaatccggtgtaaaagaaatgaccgatatgggatttagaaatgatacaacagagttactattgacagaatcacatagaatcttttag

SEQ ID NO: 6783 - DNA, 1008 bp, Candida albicans
atgacatatagtgaattcttacataatttgagtgtaaaagatagtcaagatgagtcagctgcatatgaagaacatttaaatattgttgaatatcctgttaatgacttgatagttatgttatcctgtttgttgacaaagataattgaagcaaatgataaattgcatccaaatcattttgaaaatactattgctataagacaaagactaaaagaagagaaacgacttaagaaattgcaacgtcaaaataaattacaactggagaatgatgacgcttatgacgaagatgatatagatgtcgatagaacagaccgaagctttcatggtaataatgatggcatggatcaagacgatgattctaacgcaaatgtacaaaacaatgacaatatcgataatgatgatgaagaagaagatgacgatgaagacgatgagatgaaaaataaatatttggccaatgttttggcattccatgggacaaatatccctgggatttcattacaatcttatttgggtcgtgttttaaagtattgtcctgttacaaatgaagtctttttatctttattggtttattttgatagaatagcgaaaaaggcaaacaatttgaatcaaaaaaagaagaattccaatagtaatggtaattctactggtggcactggttctgataatcaatcatctgaagctgaacaattatttgtcatggattcttataatattcatagattaatcattagtggaattacagtctcatcaaagttttttctggacattttttataagaatcttcgatatgccaaagttgggggtttaccattagaggaattaaattatttggaattacaatttttactattattagatttcaaattgatgatttctgttgaagatttacaaaattatggtgacttattattaagattctggaaacgagaacagattgctaatgaattagtacccaataataatgataatgaaactaaagaacatcaaacgcaaacgcaaacacaaagctaa

SEQ ID NO: 6784 - DNA, 4146 bp, Candida albicans
atgtcgagtaatagttcttggtctaacaacgattcttaccaactgaggaacaatcctaataatggtaataaccataacccacatttaatgtcacaacaacactcacaatctgtaaatattccttctcatttgttgcctcaagcatttatagaacaacaacaacaaccaccacaaccacaaccacaacaatatccgcaagacggccaagctcataacaaaaacccaccaatcaataatcgttttcatcaatcacaaccaccacaactgcgccatcaatacatcccatccaaacaagaacaaatgcaacaaccttacccaactgccgaacaaaataatcaacactttcctccaccacaggaaagatcatatagtttttcatcgactatggatcctggctcacctagcaaaatgacgccacctaatttttcacaaaggaaccaatcattttctggctaccaacaaccaccaccacaacaacaacagtatccgcagtcaccccataaggcatataaccaacaaacccacactcaccaaggtggacttcaacagccatacattgcgcaaagacaaaacatgccacctggatatattaaccagaatccatattctcagcaaaatagatcagtatcatctttgactcaagataggacaggagcaccagtacaacaccttccttatcctgtcaacaatgatgatcctggatatcaactacaaccactggcaattcaatcacaccacccaccacaacaacaacaacaacaacagcctccactccagacacgtagacaacttcgtaaggccccttcgagcaacttgcccccaattcaaactgatcaagtttactatagccctgatgctagaagaattgtttccacacctacacaccagcagaattttcccactcccataccaccagaagctagaacaaaatcacttacttcggcatcattaaaacaccagaaacaaccactgcaacctctgcaaccatatttccaacaaatctctgaactgccaggtaaagacagcaacgctcgtaattcctccagcagttcccttcatcatacattttccttaacctcaaaatcgcgatcatttacatctatcagtaaattgtcgtctttatcaactaagaaattcggttcctcttcatccgtcaataccaacaaattagatcgttatcaatccagtggaactattagaaacaatcacaatcataaccacaccaaccaaactagccacaacattcattatgctaaaccatcagtatatcccgcaattttatctgaagtggccaaattgtttaaagaggcgattattttgacgatcaacaccaaggatggtttggaataccatgatacttttaccgggaaaatggcagttgatatattatgtcgcattattcgaacaaatgatcgtaacttggccttgttattgggaagatcattagacgctcagaagtttttccatgatgttacttacaatcatagattaagggattcggtacatgaaatttatgcctttaacaatgtttataatgatgttgattttttcaacgaagaaaatggaggagctggtctggttagcaatggggaaaatagtgcattaaattccaaacatgggtcgtttcttgatagcagcacacagttacagaatgctttgaatgaccatatatccgattatcatacctcacaaagcagtggatcattaactaaaattgctagtagtgccactggtaatggttcagtaggtgttgctggtaaggagttgagtgcaagtcaacaaacaggtgttaatggagttttcactattttgacagaatgttattcgcccacatgtagcagaaatagtctttgttacagtattgcctgtccaagaagattagagcaacaagctagattaaatttgaaacctcaaggtggtttgcaacgtgctgtttcaaaattatcattgcatgatcaggaagaaaccgaaactttatggcacaagactgtacctcaatcagttttagataaattagacaagcatgaaaagactcgacaagaattgatttatgaatttgtttatactgaacgtgactacgtcaaggatttggaatttatgactgatttctacattatgccgttacgaaatcctgccaataatattattcctgattaccaaagagaaacatttattcaaactgtgtttgggggagtgcctgatttgttgagattggccaagagactcagtgaagcattaactcgaagacaacaacaacaaaagcccgttattgagaccattggtgatgtatttttagattatgttggtgattttgaaccttttgtgacatattctggaaataaagtgtttgctacttttgaacatgaaagacaacaacaagttaatatgaaatatgctagattcttagatgcgattgaaaagaaaccagaatcgagaagacaagatttatcatcttttttaattaaaggggttcaaagaccagcaagataccagttattgttatcgggtattttgaaacataccaagccagagtcacccgactacaagtatttgacgaaagcaaaagaagagattgagaaattattggtgaaaatcaatatccaaactggggaatgtactgatcgacacaaagtcatggttttgcataggttattgggcaaacaaactttggaaaataggtttaatttcaaattatcctacaataatcgtattatctatcaagtgactttgaatagaaagagggataacgaaaaaattgatttatacttgtttgaacatgcgttgttattagtgaaacacaagattcaaaacaagcgtgaacaacataaagtatttgaaaaaccaatgtatttaccattgttatttgtcaatagtggtatggagatccccactaatagaacaatcatgcctcatagataccatggatccttggtatctgatactagtataagacctcaaagagcagaatctaattatattggtaatactttgaattcttcatcaacacctaaattccaattgaatttttttgggttaggtagtaatcaagttcacgcctcattatttgctgatgacttgactattcagaaccaagtgttgctgcaaatatcggcccaacagaagaaattaattgatgctaatgacattttttcattgtgtaaatttgaaacgagaagattcactgggaataataaaatcaattgtgctgttccttgttatggtgggaagaaattgttgtatggtactgattcaggggtatgggttagtactgttcgttcaattagtgccacatctaatgaaaaaatctgtagtgatcccactatggtcatttccaaaacttatgtcactcaaattgaagtgattgttgaatactccaagttgttagtattgagtgacaaatcattatatgaatttgatttatcttgtaccgattctttggatcatgtgaagaataccaaactggggaaattgcttttgagtcatgtgtcatttttcaaagttggtgtttgtgatgggaaattgctagtgattggtgctagaacaggtagtctgcattcaatttgtatatttgagcctgttaatccatttgataaatcgaataagaataagaacaagagattagaaattcaagaaattaatttcagttctgatccaatttccatctcatttttgaagactaaactttgtattgggtgtgctaaaggttttgaaattttatcttctcaaacaggaaccaaagaatcgattttggatgaagcagacccttcattagattttgcaacacaaagagaaagtgtgacaccattagcaattcatcgattaggacgtgatttcttattgtgttattctgaatttgtatttttgatcaatcgaaatggatggagaacaaatcatgattgggggatattttgggaaggtaatccacaaaatgttgcgattttcttcccttacttgctatcatttgaacctggatttgttgaaattagagatttgcatacaactaatttattaagagctttaacgggagagaatattagatttttgcattcgaacgaacatgaagctatgtttgcttgtgaagaaaatggatatgatattattatttccattgatttcttgaatttgaaaccaaagtctccaacataa

SEQ ID NO: 6785 - DNA, 312 bp, Candida albicans
atggttcacgttgtcactgaagttaacgaattccaaacccttttaaaggaaaacaacttagttattgttgacttttttgccacttggtgtggtccatgtaaaatgattgctccattattagaaaaattccaaaatgaatattctaatattaaatttttgaaaattgatgttgatcaattgggttctttagcacaagaatataatgttagttctatgccaactttgattttattcaaaaatggtgaagaagtcaatcgtgtcattggtgctaacccagctgctattaaacaagctttggcttctcttgcttaa

SEQ ID NO: 6786 - DNA, 852 bp, Candida albicans
atgttcagtctaccttcattaacacaaaagcttgcaataagtaaagcaagtttcttgactccaatccgacaacttggagctttaggttatttgaaacctcatgaaggttctacattcaattataaaaaattgggtcgtggtcaatcatcaggtaaggggaaaacagcaggacgtgggcaaaaaggtcaaaaggctagaagtaaagttccatggtggtttgaagggggtcaaacaccatattacaaacgtttcccaattactggttttagaaaaccatatcaaacagtattagaagaagttaatttactgaaaattcaagatttttgggataatggtagaattccattacaaaaaggtgaaactttgaatataaaagtaatgaaagattgtggacttgtaactgggagtttaaaagatggtattaaaattttgggtaaaggagttgagaattataatgttccattaaatattgaagcttctagagctagtgatattgccattcaagcaattgaaaaagcaggtaattcttttacagcaagatatttcacaagattgggtttaagagctcatgtgaacccagaacaatttcttttaaagagaggttacgtccctttacaagctagaccaacacacaaaagagatattgaattttattctaatcctgacaaaagaggatatttacaaaaggatagatcaatattgttggatcctttggaaaaagctcgtgaagaacttgctaataaaaaaccaaccaagaagttatctaaatttaaatcattggaagaacaattagaagaagcttctacaattagttacaaaccatcaaaaacaatcagtgttagcgatgtctag

SEQ ID NO: 6787 - DNA, 1053 bp, Candida albicans
atgaaggtgatatctgatcaggcagtgactgagtttttgaacaaaactctttccaaagaatcaattctcgatgcatttcaaccaacattactcaagagtttgacaacttattcccaagattctgaccatatagtacctcccagaactgttcaaccatccaataatcccaattcagataccacacacatatatatgccatgcatatctccagatgaagtaggacttaaggtaatcagtggtggtcctggaaataattccaaggggttgggattccaaggatgtgtattgataatggatgaaatcaccggacaattgaaggctgtacttaatgccaataacttgacagcttttagaacggcattggcaagtagtttaggtttgacaaagttaattgcccctagcaatgcaaacattttaccagaattgagtgctttcggtgtcggtttgcaagcttactggcacatcaaactagccttgttattgtatgaaggtaaaattaaagaagtcaatattttaaatcgtacattgaaaaatgctgagacattagcagacagactttccaaggaattcaaaaacgtcaagtttaacagtttcctgtatcaagatgaattactgggattcattcctcatgttcaaaatagttcaattatatttggatgtactccagcaacgtctccaataatcaaaaaggaatatttgaacacaaacccagaagtccccaaattcatatctttaattgggtcgtacaagcctcatatgattgaattggatttgaatttatgtaaagaactcaaacaaaaggccatttctatcatagttgattctaaggagcatacattgcatgaagctggtgagttgatacaagccgagtttgatgaaacccaattgattgaaatccatgagttgtgtgcagattttgatgctactgttacagacgagattactggtattacagttcaaaagattgttggtttatcaattatggacttatccattggtaaaatgatttcaaacgaaattggaaataatgcagttgttgttgacgatttctaa

SEQ ID NO: 6788 - DNA, 1536 bp, Candida albicans
atgattaaatttgaagattatttttccattcaaatatttttcattatattacgtgaaactttagaaacggcaattattatatctgttttattatcattcatcaatcaacgatctcataaacaagaagaggaatcacctttatctacaaataataataataataatgataataatgataataatgagaatgagaatgagaatgagaatgccgttcatccaatatctatatctcaaggtagaaaagctgatatgaatcgaaaattaaaatttcaagtttggataggagctatattaggattaatcatttgttttataattgggataatttttgttttaattttttattttgttggacaagattattggtcatatactgaaagagtatgggaaggattattttcaattttatcgagtataataatcactattatggggattggattattaagaattaataaagtgatgaaattaaaatggtggataaaattaggtgatgcctataactataatggacaacaagacgagagggaggatgatgaagagatttctgctttgactgataatgatattttatttgatgggaataacaatggtgaggaagaagatattatgaattatgggggaacgagatcaagttctgaatcaaatgaaataatcacccataacaataataatgactctaattttagttttagttctagttctagttctaattctaattctaattttaattctaattctaatccgggaattttgaataatgataatgaggaaaatatacctttaacggcatcttctaatttttttactccattcaaaaataaacatcaatcaactgcaaaaaattcgaaacagcttcaccgccagtcatttagtaagaaatattttttggcaatattaccattagtcaccacattaagagaaggattggaagcagtggtattcattggtggtagtgctatgagttcatcacctcattctattccattatcggtaatttgtgggatttctatgggttcaataattggttattttttatatcaaggaggtaataaattatcattacaatattttttgattttttcaacatgttttctttatattgtcagtgctggattaatgagtcgaggtatttggtttttggaattagaacaatatgttagacaatgtaatggattagatgtgagtgaaactggtagtggacctggttcttatgatattgtcaaaagtgtttggcatgttaattgttgtaatggattaactgatggttggtggatggtttttaatgctatttttggttggacaaattctgcaacttatggtagtgttttcagttatatgatttattggaccatggttattatttggttgaaaattaaattatatgaagaacgtcatggtatattaccattggttccattaaaatggcaattgaaaagaattcaaaaaagaattagattatatgaattaagaaaaaatcatgaacaagaacatcaagggcagcaacaagaagaagggcaacaagaagcaagttga

SEQ ID NO: 6789 - DNA, 3432 bp, Candida albicans
atgaatagtgatatcgatatccataacaacaattctaccaactttttcaatttgaatatcaaaaaaatcattggtacttcagctaaaaatcctcatcaattctttatacaagatgatttaatagcttatactgccagtggaggagttgttgtttgtaccattgatattgaaactaatgaagtaatagctcaacgattcttttgtgccaatattagttataccaaccacagtacccacaacagcaacaataacaataacaacaatggtttgaagaaaagacgatcaataataggaagtggtacttcttcagctaatgcatatttaaatatgattaaaagttatgattattcagaaaaagaattgaaacgagatttatatggttatccgattaattcagaaccaatggaaatttttggtacttcaattgaaaattttgatgataattatactagcaacaacaatgatgttaatggtagtactaataatggcaccagtggtaatatatcaccatcgaaattaaaagataaagttagatcaatcaattgtattactatatcatcagataaaaaattattggccattggagaaattggttatcaaccaagaatattaattttttcattagcagcaaattccagtgataatcctatttggtcaatttatgaacattcatttggaataaattcattgattttttcaccaaatctgaaaattttatgttctttaggattagttaatgatggttttataaatctttggaaaattggtggcagtaataatactaatactaataataatagtgtgaatttaattgctagtaatcgatgttcaaatattgttcataaaatagtttggcatgaaaatttaataatcactttaggtttaagattcattaaattatggaaatttgatgaaaatgattccaactgtactggcggtatttctaagaaaccattggttttgaaggggaaaaatgcaattttgggtagtttattaaatggaaatttcattgatgcaagtatattaaatgaagatgaattattagtgattactgatacaaatcaattattagctcttaaattaaacgtggagaatcctaaacttgtcattttgaaaccccctgaatatgaatttaattcaattgtagtggatttccattatgaacaagtttggcttagtacagggaataattatactattaaatcaatatcctttaatgaattggtaccttataacagcactggtggtagttccaataatgtgattatcccattgagttcgaaaaaactgatcacggcattcacagctaaagataataacaatacgatttcaagaccaattattcaaatttatgatttttcgaaaactcatcttgcatttttaactgatcaagaagaaattaaattcatgaagaaagataatagtgatagggatgggatcaatgaaaaggttttggcaacttctttattgaagaattttgctgggataaaatatactcatctgaaagaatttttagcattttcccatcaagggataatcaaaaaatttattgattcaagtgaattacaagatataatcaaatttaatgtgattgatatggatattgtcccagtttctaatagtgtaactgctattgaaaaaaatgatcacaatacattatttattggtgataaatatggtacattaacaatattggaattattagacaacaacaacaacaataataataataatgattataaaattttatatcaagtgaaagctcattcttcgacaattaatgaaattatttatttcacattttcaaatcatcaaatttgttgtagtatatctcgagatcgaatgattcaaatttttatttgtccaatcaatgaaaccaattgggatttattacaaacaataccgattcataatgggaatttattacaaattattcatttacaagataaaatttatgtttgttctctggatagaaccatatcaatacataaattagtctttgaagagaaagaaaaagaacaagaagaacaagaacatagtgtacgattatatcaagagaaaatcatcacgttaaaatcaacaccattatgtatgaaaatatttgataatgatttagtggtatcaactaatgataaatctattttagtatttgatattgttaataattttgaattgaaacgaacattaagattaattaatgataaaattaatgaaagtcttttagtggaatcatttattaaatatcgtaatttaataattgtttggtctaatgataaatcattacgtgcttttcattatcaaaatggtaaagaagttggtgtagcatgggggcatctggaatcagtattggaattatatttatttaatgatcatgaaataatttcaattgggaatgatgcatgtttattttattgggaagtaattgaaaatttgaaatcatcgtcatcgtcatcttcaagttcaagttcttctggttcatctgctggatcagttatttctcaggacaataatggtaaggaaattcctgaaaaacaaatttcagctccattatataccaaagtgacaagaaaaatcttaccaacagccccaattaaaccaatagagaaagaaggacaaatcactcctacaaagattaatccaacaacaacaacaaccaatagtcctatacctaaacttacagcagcaactttgaaaagattagaggccaaacaaaatggtgctgggcataccatttctccgtctcgttcaattagtcccattagatctaactcatttccaaattcaaactcaaattcgaattcaaactcatactcagcatcaacgtattctgctccagttaaattatcagttcgaactctgaatttttcgaaattacaatcaccatcaaagactcctgtgattaatactactttcccaaaacgatcaacttcaccaacaagagctgataccaataaagctaaaccatctcatccacctcatcaaccaccaccaactataactccttatgtatcaaattcatcaccaacaccaacatctcgtccaattgtgaagaaaatcgaaagaaataaaaatttattagataatacgttggggaaactagatgatgttgccaatgtcataactaaatgtaatgataatgaaaaacaagttataaaacaaaaattacaactgattctttcattagttgataaatctaagtctaagcctaaacctactattactagtagtagtagtattattgaggaagaaaagcaagatcaagaattattagaaaaatatagtgataaattaatgaagatgatagaaaaaaaacttagtatgacactgttaaatcagaataatgcatccacttcatcattatcatcatcctcatcgtcgtcgtcttgttcctcgccatcatcacctacaccagaagcattaactaaagaataa

SEQ ID NO: 6790 - DNA, 1125 bp, Candida albicans
atgttatctcgtgcatcaattcgtgcttacagctctataccaaactcagtcaaaattgcagccaaagaatctgccactgatttgactaaattgtcagttatcatcaacaatgctgggtccaaaactggtaaactgggtgtatctcatttattatccaaattcacttttttaaacaatggtgccaaatctgctttaagatttactagagaatctgaattattaggtggaactttcgaatccaaagttactagagatgctttgattttaaacactacatttttgaaacaagatttaccatattacgttgaagctttgggtaatgttgtttcaaacactcaatttgctccacatgaattcaatgaaattgttttgccaactgctaatgctgaaactaaattggctaatgctaacccagctttcaaaggtgttgaaaaattgcatgaaatcacttttagaagaggtttaggtaatccattattttataatgaatctactccaattaaattggaagaagttgctcaattttctaaagaacaattttctggtgaaaatatttctattgttgctgaaggtgctaatgaagaagatttgactaaatttgtttcagaatctgctttctgttacttaccatcatcttcttctaatggtgctaaagctcttccaaccaacactttcactggtcaagaagctagagttccatcttctggtgcatcttctgctttgattggtattccagtcaaaccagctgatttcggtaaatacgaagtcttgtccgctgctattggtacttcaactttaccatctacttccactccattagcacaaattccaggtgctacttctcacttgtacaaataccaagatgctggtttatttgttatttcagtttctggtgaagcttctcaagttgctcaaggtattaaacaagccaaatctgttgctgaatcagtttcttcttctgctttatctgaagctgtcaaagctgctgaattatctgttgcattacaatcaactgtcgactccccattaaacgtcaaagttgtcgctgaagaagccccaatttctaaattcaactatgttgctgttggtgatcttgatgtgttaccatatgctgatgaattgtaa

SEQ ID NO: 6791 - DNA, 1107 bp, Candida albicans
atgacattcgttccaagaaaaacatttcctaactataacatacctttgaataacttcaagggtcatcaccaaaaagcactttcaaaatttgggcatcttgcacctcagttagatatgatattggaagtaagggattcccgtgccccaatttctactaccaatgtcttattcgataaagtattaccaagcaagaagaaacttattctctatagcaaaaaagatttgtcaatattgaaacccaggttactagaaaagtggcacaagctgaagaacgagcaatacatgtttgtggattgtcgaagtaagcgtgacggtaagaagatcattaacgaaatcaagaaattatacgatagtatggagacaccacctccattgggattgagaaccatgataattgggatgcctaacgtagggaagtcgtcattggtgaatacattgcgatatgtagggttaagcgatggagaaaatgcagtttctacaaaaataaggaaagttgctagaactggtggtcaaccgggcgtgacaagaagtactagtgaaattattcgtctttcacgtgatcctgagattatggtatacgatactccaggggtgtttttaccgactacaaaaaatgcagaaacaatgcttagtcttgcattggttgggtgcattaacgaatcattcattgatcctgttattttagcagattatttgttgtacgtcttgaatctacaagatccaacaggaaagttgtacacagattatatcgatcacccaactaacaatgtgtatgagctcttggaaagcatcgaccaaaaaagaaatgttttgcaaatagataaacgttttgatgaatgtggattggcaaaccattggattagcaaatggaagcaaggtaaatcactgaagtatcgtgggttatttgatgttgcagccattcacgaaatcaacgcaaaggactttggtaacttaactaatgcagaaagagagagaattggtttatcaaacgtacagcaaagacttcaagaaagattcggcgatgatggtacatctacttctaaacacagaaaaagaactgccaaagacagagagtttgacatgaaaaatagactatttaaactttag

SEQ ID NO: 6792 - DNA, 891 bp, Candida albicans
atgacagatcacctaattgctaaagtacaagaacatgtacctaacattccattgaaaataatatcacaaggtgcagaagcactagtttttgaaacatcagttcacccgtactacaactacaattcgagtgaaaaacaccatgagtcaccttctttgcacaatcatacaacatttataataaaatatcgtcccacgaaaccctatcgtcaccctaaaatagatttgcaaattaataaatcacgaactattggcgaagttaagtttatgtataaactctcaaaattaaacattgcctgtcctaatatcattctgacagattttaataacggtatcatatggatggaatgtcttggatcaaaattgcccaatggcacaataagttcatttaagaattggttatggtatttagaaagtcaagagaaagaggatcccagtataaacctccatgacgatgaccaagtcgaattggtttgtcaaaaagttggacaattgataggtcgattacatttaaacgatatgattcatggcgatttaacttcatcaaacataattttaacagaggtggatactaagaaaaatgaagatacagatgccaataatagttcagtttattttgaaccggcgttgattgattttggtttatcttcattttcaggattagcagaagataaggctgttgatctatatgttttggagagagcaattctaagtacccattcaaactatgccgataaacttaatggctggctattagaaggataccaacaaatccatgattctattgaattcaataaaaccaaacaacaattaggtaaactgaaattaaaagatacgattaaaagactagaagatgtccgtttaagaggaagaaaaagaagtatgttgggttga

SEQ ID NO: 6793 - DNA, 1737 bp, Candida albicans
atgaagttggattatattttagcttcccttgtcattgccagtataactgaagctgctccaattaaaagagggttgcttgatgatttatttggaaccagtagttctaatactgctgctgcagctccggctgctgcccctgctccggctgctgcccctgctgttgcccctgctgcccaacaagctgccaatgttaatactgctccggctgtttctccggctgccacaacaactgctgctgctgcttcaagtaaaggattttgggcaggattgtttgatggaggtctgactaatactgcctcaactgcggctgctccagctgctccagctcaagcaccagtatctgtagcttctgctgctgctgctcctgctgttgctgttgctgttgctccagctgcttccactccaaaatctaccagttcttcatcatcatttggaggatttttcagcaatttgtacaatgacttttttggatcatcatcttcatcttcatctgctaatgccaattcacaaccacaagcaccagcccaagcccaagctccagtacaagttacaaaacctacagccgctgccccagttgtcgtaactagtgaacaggtatacacgtctgtcgttacttctgctactgctgctcctgcagccgctgcaactgcaagttctgattctgatgattattcagctgaaggtttatttggattcttgtttggtggtggtagtgatggtggtaaagcatcagctgctgcttctgcttccgggtctgtttctttaaacccaattgatggttcgggtttaggctctggttcaggatcaggtaattctgctggtaattctggttcttcatcgggtaccactttaggtatcggttaccaaggaggatcaccaggtaaaaatactgcttctataaatactgccactgctactgctgtcaacgggggtagtgctgctggtgccactgcagctgctggttctttgggtataacttattctccttatactaaatcagatggatgtaaaagtgcatctcaaattgcccaagatattgctaaattatccaattatgaagtcattagattatacagtactgattgttccggaattgaaaatgtgttatcagccatgggttctaatcaaaaattgtttttaggtgtttggaacattgacagtcctcaaggggaattacaagatattgttagtgctatcaagcagagttctagcggttggaacgttgttcacactattgctattgggaatgaaagagttaatgctggtgctgccagtgtggctcaagtgcaacaagcagttgacatatctaagaaatacttgaaatctcaaggatacaatggtccaattgtcacggttgatactttagtggcctatgttggaaacccacaattgtgtgaaatgtctgattaccttgcggtcaattctcatccatattgggatggaggtgttcaaccagagaattctggacaatggttgttgcaacaaattgcacatttgcaaagtgtatgtgggtcttcaaaagatgtgttaatcactgaaacaggttggccaacacaaggtgactcttacggtcaatgtgttccttccgtgcaaaaccaagttgctgctgtgaaatccattgtcaaatccctttctgacaaggttattatgtttaccatgtttaatgattattggaaagatccaggtgcatataatgttgaacaacattggggattatacggtgatccatcatcttag

SEQ ID NO: 6794 - DNA, 1485 bp, Candida albicans
atgcccataattaaaactataactcgatcaattagagcaatacttgcgaccctttatcttgtattaataattctaactattccattagcatttgatgttggaggagttaattgtggattagcatattctttaacaactttagtgacatattttatattgacaacaattagaattttagttcgtaaaacaaaatatttccaatggatttcaataatttattattgtcaacattttttcatccctagtttattaacttattttttaagttattatagtcatgaaaacatcaagaaattagatcttattagtagtagtggaagtggtagtagtactagtactagtactagtagcaaatttaatccggtgatgatttggcgattagtattgattaattcaactccaatattcacggttttagaagggttttgttcattattattaattcaagccatgggtcaaaccatgagttggttaacgatatataaatctgattcttggttaataatatcccttataggaagtggatcagtgataacggcatcattttattttttatatcgaatttatgttttaccatttacaattgatatgtttagtgcttcgttgttgggatcaattttaactacaactatggggttaggattatttggcataataagtggtaaaggttcaatgattgaatcatcattattatttgcttatattgttaaatgtatttatgaaactttccccatattatctgaagctgccaccaaagcattagctaatttattcaccttaactactcaaaatttgaaaaaagaaattccaaaaatacctccatcaattttaaatccaatttctgaagtcattccatttataacttcaactttaccttcatcatttaaaggagtttggaaatttttaatcatggctataaaaactttaactttaccattgttgttaaatttagcttatagaataggagtattttatgccgcaactaaaatcatccccagtttatatcaatcagcttcttatcctttaataacaccaccaaaaactcctcaaccaggttcacgtcaagtttcaactacttccttatcaaccttcacatcatcgacaacatcaaccgtattggatcaacattccaaattgaggacgaaaaattcgtttcgtcttaaacctccacatcatcaaccaccatcagtgattatacggctaatttatgcttattctccatgtttaataattgccgtttatactcatttaatgttatcttataatggagaattaggtaccgaattaaaactttggcccctttggaatagtagtaatggtggtggtggtggtgatgatgatattcaattgattgtccatccatggcaattttggaattggattaatatgggaacaacattaatactttatgctgctgaattactgagtaatgataattcatcaggtggtggtaatagtttgactagtcattggaaagtagaataa

SEQ ID NO: 6795 - DNA, 1962 bp, Candida albicans
atgctggaagtagacacagatgatacacaggaattattagccaccaatgctgcttctggctcctctactacaactggtgcacctagattcgaggcattgtcgtcattatcacaatcacaccaagaaaaatcatctacgaaatacaaaaaaatttcagaatttgttaaaattaatgtgctcggacatcctaataattttgaggaatatgtactacgcaatgaggcaagtgactgttccttgatagcaaaatactgtaaaacaactacaattgatttatcaactcaaccaacattatcaatagactccatatctttgaacaccattcacatcccacatcctttaatcaatttcatgaaaaatgaagccaaccagcaattatctcccgatgatcaagttgatgtcagtaatgagttacaagaatcacctattgttgtttttttgcatggattaggaggacaaatgtcacaatttgaaccgttgatgggtttattatcccaatgtctggaaattttgtctttagatttacctgggtttggaaattcaaaattgcaatttgaagaaggctttaaatttatatccgaaatttctgattctgataaatcaaaaatatcttcaagtattcaaaaaatgaattgggacgacttttctaccgacaatattgttagaatagtgtatgaattcattagccagaacgtgcccctgagcaagaagattgtgttgatcggccactcaatgggaactcatatttcgatcaaacttgctaaaaaattgcctcaatcaaaagtcgaaggattaattttgttatcacccccagcattgacagacgacattaacacgaacgagcaaaacacgaaaaacactcataatctgctaagcttgtttaccgtgtttacatatttcccctgggtattcaattcttttagaacttggaatagattggagggattagatagtgcaagtgttgttagacaattatcgaaaactaataattctatttataataagctaagacaatttagatggaatttggatgttaactctgatattgtattaaaatatgctagcgggtttcaaagggcaacaaactcagatttgatatctgcaattagtcggtttaatgataatcctgaagacaaacaagtttatgaaaaaaccgttttcatctgtgggaataatgaccaaatgactccagtttcgacaatatataaatgtgatgagtttttaacttccaattttggtagaaaagtatcagcagccattgaagttaagggtgttgggcattcattattattactgaaacccgagtttatcagtggaataatcttgaatcatatagagctgaagttccctgaacgattgcatttatctcctgcttgggtattaaaaattaaagcaaaagtatctggcgataaatgggggttgaaaaacgaacagaaatggctgaacatacaatccgtgtcgtataatattacaagaaaccgaggcaaagatattgcaccattgttaggaatgaagacattaagagaaagcgatccaattcattcaccatctattttagaaaagcaattttatggggacaattcatcaaatcaaataaaggggaacttgattgctataattgacatttccgccgacatccctccttacagccccaaatcctttgaaaaaataaagtattacaaatgtgctaccgtatcaaaagtagttccagatcaaagtgcgattcgaagatttatacaactagtcaatgatattttacatgaaaatacagtagcaaatccattgatagctgttcattgccattatgggttcaatagaactggatttttaatttgttgttatttaattgaggtattggggtggtcagttgaagaagcagtagaaggattcaaaatagcaaaacaacctggtatcaaacatcctcatttcattgatgcattgtatgtcagatatgaaaaatga

SEQ ID NO: 6796 - DNA, 1710 bp, Candida albicans
atggacacctccacaatagtagcaataggggtagatataggaacaggttcagttagagtgtatcacaatgaaactctcacctcgttaccaattaccactgaaaatgatatatacatcacccaatcatcatttgaaatatattcaaaactaatacagttattaagtagaccccaattggattggaattttgattcaatatgtataactgcaacttgttcaatggtcgtattatccaagataataatagacgaagaaacatatctaacaccagttagtttgaacaaatctcatcccaatagtgatgttttattatggatggataattctgccactttgcaatgtaatcaattgaatgaatatttaaaagttgcttaccagaatatattgaatcttgtgggaggtcaatttgttcctgaattaggattgcctaaattaaaaatgatcaatgacaactttgctgagggtgataacaatgataactttagcaaatccgatttggtatgctttgaattatatgattggataagctatttattaaaagtgggcgggtttcaaaatatcaatgcaagtgctaatggcaatggcgatgacaaattgatagttccttatatcccttcgaaaccatttgattttggagatgccatagatggatctattaaagggtggccacatcaatttttacaagatttgggtataactgttgaaattggaagaagtgaaagtaatattgggaatagactattgccaattggcacccctattggtaaagttaatgacacagatataatcataggtcacggttgtatcgattgttacagtggatttatgaatatgtatcggctgtcaccatcagagaaaagctctacgttatcaacaatgttgatgattgctggaacctctacatgtttcatatactccactatgacacctaccagaaccacagatgagaattcagcgccacctaattatattccaacagtttggggaccagtagagattggaaaatcaggactttatttatatgaatttggccaaccagcttcgggtaaattattcgaggatttcttaacaattggatttgaccaattagaacaagagactcaaaatttagagttgaaacataataaatcaattcacgagttgattaaaggttatttttattacggtgatgtttatgggaatagaaatccctacggtgaccccaaaatgtcacaaatgatcatagacaacaacaatgacattttacctagtgttatttctccaaacaatcaaaacaaaaaatcaggaaacgtattatcacaagtaatcaagtacattctaatacttgaatttcttgtgtttcaaacaaaacaattgttggaaccattgtcgaatgtctctcaaatcattataaatgggtcgcaaagtaagaataccaggtttttgaaattattatctacagttacaggattaccaattataattgctaatcacgacgttgctcgaggtgctcagttgatggcattgattggtaaactatgctcatttggttggcactacgatgatgcgtttgatcaagcaatacaaaataataataacgactatcttggtaatgaaaatagtattaatattagagaagattattaccaactattaatgacaaagtatgagatattcaaagacatggcaagtgctcaacaaagatatcgtaaattaatgggtgatgtttaa

SEQ ID NO: 6797 - DNA, 1875 bp, Candida albicans
atgcttaaaaccagtatcaggacacttaaaagaatgacaaactcgaaattaatagaacttccaaagtcatcttcatttactcaacggataaagccagataaaagagttccatcagtggaggttgctttggaaaacgaaggcaacattaccaataccccaagaaatataactcatggtggattttcatgggtgttacccactccgagagatgactatgagtttatgattgctaacccattaacaatgaaagacctaggattgagtttagatgaaattgaagatccagtttttcaactgattgtaagtggagaattctaccaagataaagttacttttgtcaaagaaaacttccctatgccttacgcccaagcttatgcaggttggcagtttggacaatttgccggacagctaggtgacggaagagtggtcaatttgtttgaagttcctaaagctgtaccagatggcgagaatcgcgacaaatacgaaatccaattaaaaggtgcggggaaaacacctttctctagatttgcggatggtaaggccgtgttgcggtcatctatcagagaatacattatatcagaacatttacatgcaattggagtaccaactacgagagcccttgcattgacgtatttgcctagtactttggctcaacgacatggagctgagagatgtgccatagttgcacggtttgctgagagttgggtcagaatgggtacctttgatttatacagatggagaggtgatcgtgaagggattagagatttgtctgattatgtgattaatgagttgtttactattaatggagtaaagtttcagaattttgaaagaattgttaagactggccctaactttttcaaattaaatgataagttactaggcgaattgactgattacgataaaatgtattatgaaacagtagtaagaaatgcagagaccactgcaatttgtcagtgctatgggtttttaaatggggttttgaatactgacaatacatcaatcttaggtttgactatagattttgggccattttccataatggataaatataatccaaactatacaccaaactcagaagaccacgaaggtagatatggatatagaaatgttcctactgcaatttggtggaatttgactagattgggagaggatttggcagagttggttggagctggtaatgagttgttaaatgacccactgtttcaacaaggtattaaagaagagtgggaagattcaattatcaagcgcgccacaaaaattatagaaattggtggagaaatataccagcatgcttttactaaaaaatacgttgaaacatttttcaatcgattgggtttatcacatgaattgatagatgctcaaaacccagaaatacaacgtaccgatgttattgttccgatgttggatgtgttgtacaagattcaaaccgattttaatttgtttttcttgaaattgcaggatttagatcttgactctggtgattatgctttgattgcagaaaaagagttcttgccaaactatgatttcaacacacacagacagcacaaagatgatttgataaagcaaattagtgaatggttgatactataccacgaattaaggaacaaaaccaagaaatataaatcaactcctgatccagcaaaatacaaccctaaatttttaccaagaaattggattttagatcaagtgattcagcaagcagaaagctcacgtggggctgagacaacatatcttgaaaaattgcagaaaatgagttccaacccatatgacgaaactaaatggggagatgaattgaaagatttagagcaatcttggttacttcagggtaacaaaggggatgagtttgccatgttacagtgtggctgttcaagctaa

SEQ ID NO: 6798 - DNA, 1584 bp, Candida albicans
atgcagaggagattagtacagactgcttcgtatttgattagacgaaacaacgtggcatgtagattcagtcgttataatggtttgcccgttgcatcttattctacaaaaacagtaccttttacggcagatacttattcccaaaaagtccaacgtgatgcaaaattcaagcaacttgaatctcaagacatcgaatactttaaaagtgtattacctgagaattccattattactgatgaagacgacttattgtttttcaacgaagactggatgagaaagtatagaggtcaatcacaattggttttgaaaccgaaaaccaccgaacaagtcgcttctatcttaaagtattgtaatgataacaagctagctgttgtaccacagggtgggaatactgggttggtaggtggatctaatccaatttttgatgaaatcatcatttccttgtcggccatgaataaaatcagatcgtttgatcctgtcagcggtatattgaaagtcgacgctggtgttattttggaaacagctgatcagtatttggctgagcagggctacattttcccgctcgacttgggagctaaagggtcgtgtcatgttggtggcaatgttgcatgtaatgctggtggtttgcgtttgttacgatacggttctttgcatggttctgttttaggtttggaagctgtcttgcccgacggtacagtttataactctatgcattcattgcgtaaagataatactggttatgatttgaagcagttgtttattggatctgaaggtactttgggtattataactggtgtttcgattctatgtccatcaagaccacaagcgcaaaatgtggcatttttagctgtatcgagttatgaggccgttcaaaaggtttttgtccaggctagaaaggagttgcaagaaattttatcggcttttgaattcatggacaacacctcacaaaagttgactgctaagcatttaggtttggagcaccctattgaaagcggtgacttcccattctatgtgttaattgaaacctctggctccaacaaagagcacgacgacgaaaaattggaaacattcttggggaatgcaatggaagaaggtttagtcgacgatgggattattgcacaagatgaggctcaaatacaatcattatggtcatggagagaatccatccctgaagcaaccactattggaggcggtgtttacaagtatgacgtttctattccattggcagatctttacgggttagttgaggacatcaataccaggttaaatgatgctggaatcgccagcttggacgatgaatcgaaacttgtgcttgctgcattgggttatggtcacattggagatgggaatttacacttgaacgtttctgtgagaaagtattctcctgaaattgaaactatcttggagccatttgtctatgaatggatcgcaaaaaaaaatggatccatttcggctgaacatgggttgggattccaaaagaaaaactacattgggtattccaagaatgagattgaggtcaaattaatcaaagaaatcaaacaacattacgatccaaatggaatcatgaacccatataaatacgtgtaa

SEQ ID NO: 6799 - DNA, 810 bp, Candida albicans
atgatgatagcaacaagaagacaaagtttacaattaacgaaaagatacatttcaaatcatgccaccaaaaacaagagatttatacagaccattccaatatctaccaatactgggtccaattcattcttatcaaaattacatcaatctgaaagtaatgacgcaccaacatccaaatgggcaagacatacattaagtttccctaaaaccgaaacatcaaacactactccacaaccgccagttagaaaatcaagaacatcacgttttgctaataaatcacaattagctaacgaaaccaaaccattcaactcttccataactccaacaccacaatcaaatataattgaaataacatcagaccctgaaattcaaaaagcatccaataaaataactacatcaaccgcatcagtgccgaccgacagtaacaaatctcaatccacagctgctccatcagtgacgcctaaaaagaaaagagtattaagaccaagaaaagctttgattacattaacatctagcgcggtacaacatctccaaggattattagatcaacctgatccaaaattgattcgtataggagtgagaaacagaggatgttcaggattgacttataatcttgaatacgttgataaaccaggtaaatttgatgaattggtggaacaagatggagtcaaagtattaatagattcaaaagcattattttcaattgttggttcggaaatggattggttggatgataaattaagttcgagatttatatttaaaaatccaaattcaaaaggaacttgtggatgtggtgaatcattcatggtataa

SEQ ID NO: 6800 - DNA, 4092 bp, Candida albicans
atgtctagtgaagaaaagattgaagaaacacagcaacaacaacaggaatcagttcctgttaaggaactcttgttgaaagttcaattaccatcattttttaatgttggtgatgattatttgactattccatcaagttatgaagaaaatattgctgatttaaaacaagcattaaatataattgttttatgtagaaatttaactaattattcaatattaattaaaggaattgatattattgaaaattttggggaattaattacttttgaacaaattatttctcattttgaattagataaacaagaagaacaagaagaacaaggacaagaaagagaaatttcggaattaaaaattgttattaaagaaaaatcatataatttggccagtatttatgaacaaattagtagatttagagaagttattggtttacattatattgacagactttcaaatgatattggttcttgtggtggtgtttcgaaatttaatggtatacaattagatgatattaaacctaaagaagcaaagaaagaagaatcaactgaaaaagaacaacaagaaaaagaagaattatctattctgaaagaagaagtatcgaaaatttctgattttgctaaacaattcatttctgattcatttgatgggaatgatttcactaaacttactaaatttgatgatattaatggtaaagttaaaattcctatcaaatcattaactatttctcaatggtcaccagttccacctttccagcaagcaaaaggtgatttattatatttatctttacaaactttagaacatgaaacattcaatattacttgtcatttttcaggttttttcgttaataaatcatcaaccattaatttcaacccaacgattaaaattaatgaaaaaggtaaatttaataaatcatatttattatatgatttagtatgtcaattatcaccacttttcagtaaaaccattgctgaaaatgaaatcaatttatctgattcaaccaaatacccagaaacttatttattaccaggaaattctttccctgcttatccatggttagtcaatgaaaaagatcttcaaaacgtccctgatttatctagatctcaattatcatctttaattaatggtgttgatggagccgattatattaaagattggaataatgatattcaatcaattaaagaattaccaacaactaccgttcaagaacgtataattagagaaaaattaattcaaaaatcattatttgaatttaataaaactgctactgaaaccgctataaatatcattaaggggaatattcctcctttaaatcctgatgaaagttcagataaatttatttatttaagaaatgggattttttattcaagtggtacttcaacagttgatggatttgaaaatactggtggtgaagaagcttcaagatatgttgcatctaaagatttaaccggaataaaattgattaatcgtcatgatattagaggtatttctagtttggttacttgtattgtcgattatatgggtaaaagagttgtttgtcaagctccagttccaggtattttagatactccagtaatcacatcaccaacaaccgatgctgaaggtaaaaatgaagctgaagaaccagaatcagaaccagtagaaaaagttgtttatgggttatcaagtgatggctcaaggattcttgaagataaatcatttgaagaaccattaaaacaaattggtgattttttccatttaaaacctcataaagttcaattatcatcatcatcttctggtgatgatgttaaaacagaatcaaatttagttgtttcaaaagatactaaagggttaaaaggaaccgatggaagaaaatatgtcattgatttatatcgtaccacacctcgtgatattgaatttattgaacaacatttcaaattagatgatgaccaccaagaaacttcttatcctcatggtgaagcattgattagacatgaagcagtgaatgaatggtggagacgtaaagttgccgtattatttaaaaaagaaactgaacaattggaaaaagaaggtaaattattggataaaaaccaagaccaagaccaagaaaataaaccacaaattgctattcctactgatcaagttgttttcaatcctgatgcattttcttctgataatgaaaatgaaattgaacaagatcgtgaagaagttagagaaatttctaaatttattaaagaaaaattaattgaagaatttttggatgaaattaaagatcaagttattccttttgatggtcaacaattgactgatgttttacatagaagtggtattaatatgagatatttgggttatgttgctgaacggttggttgttaaaaaggaaaaacatttagttgatcttgaagaacttattaaagaaaatgaagcaaaagcagaaaagaaacgtgaagaagaaaaagaaaaagaagaaaaggaagccactgaatctgaagataagaaggaaaagaaggaagataaggaggatgccgaaaaagaagaagctgaagctgaagaagaagttccaactaaagctacttatcaattaactttggcaaactattctactcttcatagaattatcattcaagaaatgatttcaagatctgttaaacatattttaagaaatttaaccaaatcacttccaagttatttgatttccactgcaattgctcatttccataattgtttatttggaggtgcaattaatccaactccaaaagttgattttattgatgaaatttataaaaatttttgctcaaaatcagatttagaatcattcattaaattaactcatgatgacgttataaaattagtttctaaagaagttttctcaagatttagatataaattatcctcaaattggattaatactattcaattaccacaattgtttagagaaattgcatttaaatatggtattcaatggaaatctcaaaattatccattcaccaaagaggaatttgaacttcaaaataaccaaaacaaggaaactccaactcaaattcaaataattgaaactaaatcttcaaagaaatcgaaaaagaaaactcaaactcaagtcatcactgaaaaatctattcaacgttcatcaattttcattgctgatgatattattggattcataccaattattaaagattcaagttataaaagtactattgttgaagaaatttatagtaatgctcgttctcatttagttcaaggcaacaaggaaatgggtatggctttatttaatgaattacttgcaattaatgaatccatttatggtaaagttaatcccgaaactgccaaattttataatttagtggctcaagtttatcaagaattaggttatgatattgaagcagctttaattggtcgtaaagcagtaatattatgtgaaagatcttgtggatttgattcttatgataccatcacggcatatatgaattcagcttattatgaatcttcaaatgaacaatatttgaattcattaaaattatataaggaagctatgaatacttggtcattggtttatgggaaagatcatcctactttgattaatacattgactaatttatcagaatcattacttaaaattaaagcttatgatagtgcccttgaattattacaagaagcattagaaattacaaaaaaattaaatggggaaatttctgaaattactggattcatttattatagaattgctaatattgtggttactttgaataaatttaaagaatcaaaagaacttttcgataaagcttatgatatttttatgaaattattaggtcctgatgattcaatgactaaacaagttgctaaatatgtttctagtgttggattatatgttgaatatttaaaaagacaacaacaacaacaacaacaagaaactcaaaagaaatctaaaactaaaactaaagcagcacctgtcaacaatattgctactaccagtacttcgaccaccaaaaatggtaaaaaatcaaagaaaaacaatactccacctcaatcaaatccagaaattgctaatcaatccattgatgagattttaagatttattgaaggtaaaccactgggttctaaaaaatccaacaaaaagaagtaa

SEQ ID NO: 6801 - DNA, 2421 bp, Candida albicans
atgatagtgcattacataatattactgttgtggtcactactagtattagccagtaccaacaatgacgagcactacacccaagccgttattggattggaacagcttgcaagaaatttcacaagacccaatgtatacaatattgacaatatcgaggggaacttgtacataccccagtttgatcaattgacaaatgactataaatcaaaacaggagaagccacagccaccactagaattaactcgacgcattatcccacttttgaaaaagtcagcatcagaatcccgtaatgtcaatgcactagtaactttgggagacctatacttgtttggaaattactcattgactccagactattacatggcaaaagagtattatcaggaagcagtaagtttggctcccaatggtcatgcatatttcatgttaggttacatatattccacgggtttgtttggaacgtttccagtggaccaagaacgaggagttttatactatcaatttgcagtggaaaatggtgacaggaatgcccaaatggtcatggcctacaaaaactttaaaggtttgggagtgccgaaaaattgtgagttggcattggagtattatacggatttggtagaacaaggtaaagattggatgtcaaggaatgatgccgatggccaggtggactacaatatcagaatatctgatttcaatggtgggttgtatggagagaaaatgagtgaaaccacttctaccattgaaattagatcaaaatatttcaaagaccttcgaaacagctttgaagaatacaagttgactgccaatgagcatgaatatgccactttgttctataatgcattggaaagctataaaggcgattattttgtacccaaaaacttgaccaaggctttccttactttccaagaatgcgttgatttgggagaagaaatctatggtgcttctgattataagaatatcgatggcatagacaaaatgtttttgagttcatgtcaatccaaattaggaagaatgtatttgaaaggtatgggtgtttctaataacaccaagaaagccaagcaaattttggatcggtcattaaaagtacaaggtacccccgaagcgttgaatcttttgggtttcattgaagaccaagggttattgggtgaacctaatgtcacaaaggcagttgactactatgtagctgctattaagaaaaaatcttctgaagctaatagaaacttggccaagttgttaatgagaatgaatggaggtgatccacatacgagtgagcatcacaaggaaatctacacatacatgaaggatgcggtgtaccaccgagacacagaggctttatattatatggggagctttttacaatctggtttatccaaaattgccgactcaaaaaatgatatttcctgccctaacatagtcatgtactaccgtgttttccttgaaaggttatcttccttttacgcgccacatttgaagtttgcttttgaagagttgatcgctgggaactaccaaaatgctcttattggatatctgatagcggccgagcatgggtttgaagaagcccaaatatcagctgcatacttgttatatcaattacaaccactttattccaaacaaccaccaaaaacttttgttcctgaaagagttgaaatggcagtggattatcttgaaagagcgtcaaaacagtcaaatgtagacgctactattttacttggtgatttatattcaggtcaagcaggagcttctcatattacaccagactttgatcgggcattcaattattatcgaacagcggcggaaagagaatcatcacatggtgcctataaacttgccgaaatgtatgagtatggaataggaccagcaaataactcggtggactactttatggcgaaacgttattatgactttagtctaaaatacaatgaaatgctcaatcatgcgaaactggaatcaccatctcaattcgtatctggcaaaacacatattgactgggctctattgagattgcgcttgaaatatttatttaatagactggcttccaaacagtcaggaaactccgatggcgggtggttaagtgcatttaaaaaagtgggtaacagagtacccaacgaagtccctcaagactccaatagcatttcaagagcgaatgcacatcatgagggtggcacgtataatgatgatttgattgaagagtacgatattggggattacttggtaattgctatgacgtttatatttttctttgtgttttttgtacaaaacatcttgagacagtttagaagaatgagaaacggtcaacggagagatgaagcaaataacaacaacaataacggtgacgataatgatgacaatcaagggcaaaatggctggaatggcaatcaattccatttcagaagaggtaattttgaatttcatttctttgctatatag

SEQ ID NO: 6802 - DNA, 669 bp, Candida albicans
atgactcaaaaatccattaaagtttgtgttttctgtggatcttcatttggtaacaaacctgtatacgctgaggaagccagtaaattcggtaaggcattagctgataagaaatgggggctagtttatggtggtgggtccaccggattaatgggagccgtggctagtggatgtgccactaatggtggatacgttcatggaatcatccctgaagcattaatcagtagagaaagaactgttgatgaagaagcattcaatgctaaattgaaatcatcaattgataatcatgatggctcaactccaattcctgattctaaacaatatggcaaaacaacactagttaaagatatgcatactcgtaaaagattaatggctcaagaagccgatgcatttgtggcattaccaggtgggattggactgattgatgaattggcagaaataactacttggtgtcaattaaatatccatggtaagccaattgtggtttataatgtcgatggttattatgataatttttttaaaatgattcaaggttttgttgattgtggatttttaagtgaaaaaaatggtcaaattattaaagttgctaattcagtggaagaggttcttgaaatcattgaaaattatgaaatcccagaaggtagattcaatttgaaatgggaaactacttag

SEQ ID NO: 6803 - DNA, 2256 bp, Candida albicans
atgaaagttctattagccaccttctcaaatctatctgggtatactactttaagacgttcatggagtctacagtatacatttttgaggttattttccatttcaccagcgtcacgttctgctaaagaaactactacactgcaaacagttaaacataaagttcgatggttttatgcgctggacgttcccatttctaagcccgaatggtacaaatacgagaaagtcaaagagccagaatcttttataccattttcagagtatgattcaaagcaacttgaacgtgaattctcaaaaacagaacgcaatcttgtggaagtaaatgaagacaaattgtttcaagttgatttaaagaattttgagctatcaccaatatactgggatggaccaatttacgaagttcgaagaggcttatggtttaattcagatggaatgcccttgaaggcagaattaactaaagaaatcgaagaagggtttcagagattaaaaccgtacacttatgaaagcacaaatgaagaacaaataaaaacgaccaaaagtaataaagagaaaatctccacattcaacaaattgaaacaagacacgcaaacagagataaaaattgatttagataagcaaaaggatgttatcagattgagtaacggcgaattagtgttgtactttaacaaagatcaagctgtaatgtttcccggagattatgattctgaattccaaattgatgtaattcgatattttggaccaaagccagtctctttgttgggagttaatcatattcaacgtgggtattcagaagaactcaaagaatcattttttgacaaactatctaaaaaccctctaccgggaatatctgatgcatttaaagaagattttggttcaataattggaggcaaaaaggattcaaacaagaccaacgaggatgaaatgagtgatgttaatgaattggatgacataaatatgcagaagtatttggagtctgactatgatttagaaacttcaaaatcaaagtccaatcgtgaaattgaccatttagttttctgtattcatggaattggacaagttttgggaactaaatatgaatctgttaacttcacgcatagtataaatgtgttgaggaacacaatgaagggtgtttttgaacaaaatgaggaataccaaaagttggcaaattctaactcagaagagcacgataacactaacaacagaattcaggtcttacccatctcgtggagacatcgtattggtttcaatcctcaacaagaatttaatgctcaactgccctctagattgccaacattatctcagataaacgtcgaaggtattctggctttgcgagatgttgtcggtgacgtagtattggatgttctattgttttaccaacctaggtatttaaaagaaatcatgagtacagtaacttcggaattgaatcgtgtgtacaaactatatcttgaaaagaatccagattttaaagggaaggttcatatcttgggacattctttaggttcagcgattgcgtttgatattttatctaagcaaagtagttcgttggacgggccacttaaaattgataaagacttggctttcgatgttaacagtttatttcttgttgggtctccagttggtatgttcaaattgttggaagagaagaatattgtgggaagagactccaaaagttttgtaccctcacaagatgatactttcgcttcccctaaatgcgtgaatttgtacaacatcttccatccatgcgatccagttgcatatagaatcgagcctttagcttcaccatcatttggaaattataaacccgttgatattcaatttgcagtaaaggggctcaatactcaattcaaggaattgtcaaattttggagacgaaatatcagaaaagatttcatttgcaacaaaatggttgacttccagtaaaagtgatgaaactgaaaaaactattgaagaaagaacaaacaaagaaaatgctctcggtgatataattaagggggttgtaatgtccgatgagactgaccaggatcaaaaagggttgaagaaaaaggttattctggggggagctttgtccaaaatgacaagcttaaatatgactggaagaatggattatagcttgcctcttggggtattcgatgtttcattagtatcggctatcagtgcccatatctcctactttgaagatgaaaataccgctggatttattctaaaggaattattggctaacagaagtacccccgtagaagaaactactgttacatcaaagtag

SEQ ID NO: 6804 - DNA, 765 bp, Candida albicans
atgaatccagctactattatcactaactttaacaattctcaattgcaaaccccacccacttcaccagttagttttgataaatactacacctattataacattcagttagaacaatctacgttaatgcctcaaccatcgaaaataaaaaatggtgatccattcacttggtcagatatacaatttattattaaatccaatcaattagagatctttgctcgatcacgacagcaaacaataaagtatcataaattcaaacaatggttaaaagataataaattaagtataaatgattatttgttggattatgaattacattggaaagaactggaattaagagaacaacaacatgaacttgtttcggataaagaatattcaattgattatcctgaagatttaatattccataatcctaatgatatttcaatattgtataataaattcccatattattttgaacccaatgtcaaacatatttgtatttggtcaaaattgaaaatccccgttgataaaaatagtgaagttggtgatatctcggtcatgacgaagaaattaataaatagataccttgaaaagacatttgttgctaaaggtatatcatgggatcaaattgtatggtttaaaaattggttgagtttacaaagtgtaagatcaattagtcatattcatgttatattaaaagatgttgatgataagtttgtagatgaattgattagtggtggaagtggtgaagtattaactttagatgattatagaaatttagaatag

SEQ ID NO: 6805 - DNA, 1236 bp, Candida albicans
atgaatgttactattgaagaatccggtattcttagatctttaggggtcaataatttgatactattatcaattccaattgctgctatacttgtatatctctcatatcttcaaaagccaaaaccaaaggtaaactcaaacaaaaatacaaatacaaatacaaacacatctaaagatcataaaatagctgatagaccattaggatattggaaacctgattattcattcaagacacctactccaccaccatttcctaattgggattttgaaaaaactagaccaatcccatatcgtgcatttagacataaatacaatgttactatggggataagaagtatgaattgggattcatggattgaattagataatgaatggaaattttatcatgatttaaaattgaaacgattacaagaaaaagaatcagaactttccgggatgtctgatttggctcaagatgcaagttgggaattattacaagaattatgtcaatatttacctgctagatatccgacaatgtttaaatttgaaaatggaatcatgaacattatacctactggtgagaaatacgatttaaaagataaatcaaatttaaaccccattgtcactgctgctaaattagtacaagatgatcttgccattatgatagaaaaggaagatggaagttattatttggaatctggatgtatttgtctcgctggattttggagattaaaagataagtttggtatgaaattagatgatattcataaaagtggtgatgtgcctcaatatgataaacaattgaaatcaggtatgaataaatttttccgtagattaacggttaattcccccgtggtccgcaataattatttcattcaaactgataataatttggattggtcagtttccattggttcagaaaatgaagaaaaaatcggttggtataccgctgatgaatctgatgatgtcaataaattatattttagaagtgaaagacaaagtttaagaagattacctattagtggagccattgttttcactattagaacttattttcttcccgttacacaattatgtgaagaaccttatatcccaagaagattattgaatggtatccagagttggagtgaagatgttggtgaatacaagggtttccatatttttaaagatgcattattgccttatttggagaagaaagctttggaacaagaagcaaatggattggatcctactaaggaaccacaggtatatccattttaa

SEQ ID NO: 6806 - DNA, 3837 bp, Candida albicans
atgaaatcgaggaattcaccttctgtggatctgccgagatcacgaagagtagtgagtatggcgtccacgtcgactatacagatttcacacttgggtccggaaccggctagtaaagaggaattatacaaatatgtattgaaagttattcttttggaatatagtaatgaagctcggtttagaacaccaatactagaatcaatcaaacaaacaacacgtcctagtagcaatagatcaagtatggtatttgaccaaaagatcccacagtatgctttgaaaaacttgaaaactcaattacaattgatcatgacaaataaaaaacaagttgacgaaaaatttcgaagatcattattaagaatatacggtgaattattagatcccaatctggagaatgaggttcggaaaattgattttttgatacctaaatttgctgcatttgcaaatcaagaattaaaaaaagtgtcacaaatgaatgatgacgagataactgacactgtttttgaacaaactagacaatttgttgattttcttatagaaattgtgacggcaaagaaagattacgatccagcattgatatcacaattgaaagccagaaaagattctttccaaacatcaaatgccaaactacaacctgaatccaatcaaaatgtcaagtatccaactaaatcctatagaataagtgacatgaataaatcatttgttgatttacttaaaaagattttcgatgttgacgatacgaaattacaacaagatgtattcaaatataaagacatagcattagctaaaccattacatcatgatgtccaagaattagctaaaatacaggtgaacctagataatttctcatctgacactgcattgcaacaatggaaagaaagacaagaacacattaagtctcaagttattaatagatacaaaatcccgtctgacttgacacttttacctataccgccaattcctagtgatgaagattattatgttcttcccaagaatggagaactgagaatatatttccagactcttgtgaaatgcataatgaattctcggaatcaaatggaattttctgaccccaatgaaccatttttcgaaaaaaatgaattggacttgattaatatttgtgcaagagcttggcacatagactaccccactagagcagtagccttatactcagcagcacaatctgcagatgcattggttgattttcccttagatactgcactgaagaaatcaactcctgtaaacattatagccagtgaaaaattgtttcatttatgtaaacagatggtagaagatgggaacttggattgggatgaaaaaaccatatggtcaattgaagatcaaaatgaatgggtgaatgacttgtctgaatcttatagtcaagtatttaatgcattgaaagaaaaccttcaattgatattcaatgaaactgtgaaacctaaattcggtccttatttgcaattccttggtgattacattgaatcagatgcattattcccattgatggaagagacaaatttacctaaaaaatgggaaaaaaggcttacaaagtcattaatgaaagttgctggaggcagatatggagaataccttgctagtttacctagaaatggttcagtcaatgtgattcacataattaatgtttgtgacagtttaatagccgatatcaagaagctacagaaacgttacaagaatccattattaggatttttaaatgtggcgagaactgttgcttcaatcactacgggaatgtttgctagtgatgctgaagcaactcttaactacattaaaacaatactacaaaacaatgatgaaagaataccttatgccgatgccttggaggtttatcaattgcttaacgaaattagagatattcataatcaagtaacgccagctggctcggtgtttaaatttgatttagagaaattcttttacccttatttggaagcttgggtcaatgaaagtgatgagaaagtacatggtattgttaatgaggcactcaaaaaagataactatgaacccattgatttagatgaagatgataaaagaagcagtcatactatattggatatatttgccattattaagcaatatgtaatgacaattaaaaaacagaattggaatgatgaaaatcagatcaacaatgtttatactgttttattgaaaagtatttccaatggagcattgttctattctgaccaagtttcaaaaaaaataatacaagaattacaacctccggccccagaaccaacagaagaagaaattcctgaatcgaaaaagaattggttgcatgaagttaaaaatgtggtttcaaatattcaaaattttaaaagacctgaacctgaagtggtttacaatttcgaagcaactacttgtgtggcattgaataacttatcagcaatgatgaatcaattaacaaaacttgaagattggattgatgtggaaacactttctgcaacttcttcatcaccaaaacaatatttgagtcatgttttctccattagaattgttcgcggtgaaaatcttcgtgcttcgaaagatgccatgtgggggaaaattaatccttatgtcgccgcagttgatttgaatggtaaaaggttacttacaaggacaagaacaatcgatcataaccctgatcctgaatgggatgaagaatttgaaattaccatcccaccagaacagtcatcacttgatatttcagttgttgtttgggatgatagatttggtcaacatcaattatgtggtaaggcattccttgaattaaaccccagaagatttagtaccagtggtatccctgaagaaatcactttagacctagatttccaagggaaagttgtacttgaagttgccgttgaaagtgaaattttggatgccaaatttgtcatggggagagcttttagagctttaatgagagctcaagaaagatcaattaaattgatagttgagaaattttcaggtttcattcagagttgcttttcacgcgccaatttgaaatcagtttgtgctaaaggtcaaccatcaagagaagaatttgaacaatcaatacaaaatttatgtgattatttgaatatgaatttaagtattctcaaagggttcttgatgaatgaaatctttatgaaaactatggtggcaacttggaaaaatgttgttagtgctgctgatgaattaatgttacctaaattatcaaaagcgaaaatcaatactgaatctggtggtacatcatggcaatctgtttcatcaaaactcgccacagtttcattatcttcaattgggattttaggaattgatggaccattatcaattaatgaaattgaaactgttttaggttggcttaatttcttgtgtacatttttccatcatgaaggtaatggaccacctatggaagatttaaaaactgatcaatatcaatcattacttttagttccggctttatatgatcaaaccgatgaatatttgattgaagaagtagaaagattatctactgcttatgtacaaatgttgaacaatagaaataatgccgatttggcatttcatactgaaaataatgggaattcaattaaaaatgggaaaagcatgaatagaactggaagtcttttaagaaataataccatcaatgctaatgctactgcaaaagccagaaagcaagctgctaaagaaataaaagaagcaaaatcagatccgattgccagtaaaacatctaaagaagatataattttaagaatattaattgcaagaggtaaaagaaattatgtttgtcaaagattaaatcaaagagcaaaattggcttatagtatggccacggaaagaatggctagagcagcagcagaaagaagattcaattga

SEQ ID NO: 6807 - DNA, 864 bp, Candida albicans
atgaagatactaacacgtcaatatcatacaatacgaccaaactatcgaaagctacaacatattcatttcccggggatttcctcatttcaacatggtttgaacatccaacaattattagtcgatgccaaccttgattataaatcattagaattcaaatatcgtagaattcaacgacaacgtcaacaaatttccaccaataccaatgattcatcacttttggctttgaaaaataagattgaaaatttacaaccattaccaacaattcttacatttgaatttgataatgtttatgccggaggattacgactgaaatctgaagtttcgccaaatgatcttgaagggttcaaacgtataggaggacaatatttccaattagaaagaggaggacaagttacatggcatgggaagggacaattagttgcatacttaattttggatttgaagagttttgtaaaattatcaaccaaatgttacattaataatgtcttgttgaaaagtattcaaaatctcttgaaaaaaacatatcatcttgatagtgttgttggtgtggaaaatcctggagtttggattaaagataacaagtctaagctgctgtcagaatcattgaaaattagtagtgttggagttagaattcgtcatggaatcaccgaatatggaattgctttgaatataaatcctgacttgaaatatttgaatacttttgaaatgtgtggattgaaaaacaaacgtgcaacttcgattcataaacaacttagtcaccttccggtcccatcagttgaacatgttggaaaattgtttgttgatgaagtggcactagctttagaaatgaattccgtggagcatatcaatgctaattctttgtaa

SEQ ID NO: 6808 - DNA, 2091 bp, Candida albicans
  misc_feature (1209)..(1209): n=g, a, t or c
atgtcaacaggttcatctccatttgttgatcataaatcaaataatagtaccatcagcatcaacaataatagtagcatactaaatgaaagctcaatttccaaggcatatgtttctaaattagaattccaattggataccatcaagactgaaaatcgtattcttcaacaagaaaaggatcaaataacatcagattatcgaaaaatcatagatgaaaagaatcaagaacttgaaaatttgaaattaaattttaaatatgtttatgatgaaaaaaatcaattagaatcgaaattaactaatcaagaacaagtttctaccaataatataaatcaattatccgatgaaattcaaacttataaacgagagaatttaaaattaactaaagattataattcattacttgataaattcaataaactcaatcggaaaaaccaacaaattatgcatgatttgaataaagaaattgaagtaaatgataaattacaccaagaattgaaaattaaagagaaaacaaatcaagaattacaaaaagctagtgatacagcaatcaatgaattagaacaatattctaaaatattagataagaaaaatggatctgataatctattgtataagaatttaaccactaaaagtaacaatttacaaaatatcaatcatcaattacaaaacaagatagatcaattattacaaaataaaacttctaatgaattattgaaacaacaaaaccaatcattattgcataaattacagaatttggaaaatattgaatccaaatatttacaattggaaattgagaagcttcaattagaaactaaatataatgatttgtttaaggcattggatacagctattgcctcatcaaatgaatataaagataacgagaacaccgatgacaccattcataccagtaaagtaaaaagttttattgaatattgtaataatcttcaagctaaaaatcttactttacaagagaaatatgactctaaaataatacaggtgaaagaattaactaaagaattagaagatcacgctagagaaattgaaacagattttcttccaacgattactgatttagaatctaaattaaaagtatatgctgaccaaaataccaaattggaacgacaaaaatcattacgtgacaaggaaattacatttttaagaaatctgttgaaacaaatggaacaaattcatgctaatcaacaacataaacancaagagcaagaaaaagaagaaaacactgaaaataaatcaattctgcaatatatgaccaatttggaaaaattagttgatgaatacaaaaccaagattgatgaattagaaaagaaaaatttggaatataataaatcatcaattatacccaatgaaaaaaccccttctaataaacgtcaaagattggaaagtaattatacatttaaaacccaagcaattgaattggaaaaagaaaacattgaaatatcatcaaaacttaaacaagctgaatcaacaatcgaacaattgaagtttaaaatatctgaattagataaagttgaaaccagaaaggaacaatatcgtatattacaattgaaaaacaatttaatttctcaagatcaatttataaaacaaacaacattaattgctcttcggaaagaaaatgaagaattgattaacaaatatattaaaaatttacctatagaagaacaaataccaaaaggtgttttccaacgacaagaagatgataaacaacgattacaagcacaaattgatcatttaactaaacgatcaactcgattaagagaagtattcactaagaaaagtaaagatattatcacagtgatagcgaaatattttggatttataattgaatttttacctaatccaataaatcctaccgatctattttcaagaattaaattaagatcaagatacattcctagtgaagaagattgttatttaattattgatgttgaaaatcgtggattaaaagctcatggaaatttccaatttaaacaaatttgtgaagaattagctcaatattgggtcaatgaaaataatcaattcccttgtttattaagtgccgttaatttaaaactttacgagatatacgcctctaaataa

SEQ ID NO: 6809 - DNA, 972 bp, Candida albicans
atgacagaacaaactctggaagccacggtggttaataattcacctgctcccacgattcctaaaattaaacgagaaaaaccaactccggaagaaattgaagaacgaagaaaattaaagcaactcgaagtagttccagaagggttttcaagaaaacaatggaaacgagaattgaaaaaacaaagatggcaagatacaaaacaagaataccttgaagttcaacgagaaaagaaacgacttgcacgtcaaagaaaacgggaaagattgaaggatcttgatgaaaatgatgaattacgtaaagctcaacccatcccatctcgacaaatatcaactaataatgtatcagttattattgattgcgatttcgatgaattgatgcatgaaaaggagattgtttctctttcaaaccaaatcaaagcgtgttattcagccatgagacattgtacatataaactcccaatacaaattacatcgttcaacaaacgactcaagcagaggtttgaagcacaattacatgattaccatctttggcaaggcaacatatcttttactgatcgatctttgaccgaatatgttactggtgcccctaattctgaatcaaaagataatgacggtaacagtaacagtaacaccactaattcaacagacacgatcaacactgaaaatttggtatatctcaccgctgatactgatgaagaaattaccaaattggaaccaaatcatacatatattattggtgggatagttgataaaaatcgtcataaacaactttgttataataaagccaaagaattaggtataaaagtggcaagattaccaattggtaaatatatagagatgaatggtagacatgttttagtgactagtcatgtttatgaattgctttgtaaatggtttgaaaatgatggtgactgggaaacagctttcaataaagtgttgccaccaagaaagatcaaactgaaaagtccttcataa

SEQ ID NO: 6810 - DNA, 1188 bp, Candida albicans
atgacaccgccaatcaagtcaccttcttcttccctggttgattatggaaagctatctgaacaacttatgatagcatatacaaaagacgtactacaacgtaatttgcaaaagtttcatggggagcaacatcgccaacaattcaaacaacttttgaaccagccagtaattaaatctatacattcattgtctggtattatcgtcagatatcgtcataacaatagtgaattagataaagctctagacaccattgatttaccaaaaatatttgaacgacttgaaattagagaaaaaaccaacaaagataaaaatctcgattatgatgatttattagttcttgaattattgaattattttaaaaatgattttttcaaatgggtaaatagccctgattgtccatcttgtggatctaacgaggatgttcaaggattaggagcaatcaacccctcatcatcaaaaactatttcacaatcccaggccataatcgatcaagtatctgttattgaagtccatgaatgtaagaaatgcaagcaaaaaattgaattccccagaataaacaacccagttacattattaaccacccgtcgaggaagatgtggagaatgggttaattgttttatgttgatattacaagcattaattggaggtggtgatgatgacagtgatcggataagatatgtgtggaatcaagaagatcatgtttggtgtgaatactattcactaagctcaaaacgttggatacatttggatccttgtgaaggtgtttatgatgaaccgttgttgtactgcaataattgggggaaaagaatgagttatgtcattgggtttaattataattatatgattgatttgagtgataaatatattgtaccggaaaaacaaattcctaaaaattcaattgtaaatgtccaaaatgtgaattttgtcatatcatatctgaatggtatcaatcaattgaagcattttaagagaattgagcaacagcaacaacaacaagaagttgatgtaaatgaacagagaaatttggctttcctcaagctttatcataatttcctagttccatataacaaggaaattaaccaattgaaaccagaattaacaaaaactacaccatccacggatttaccactgggtaggcaatcgggatcaactgaatggactaaaagtcgtggtgaaaatggtgaatcctaa

SEQ ID NO: 6811 - DNA, 1398 bp, Candida albicans
atgacatcaacaagtgtaaataccgagtttgaaccatgttcgataacgataaatggaattgccatggagactttatcaactcctcaagagctgattctgatcgatagtgacccacaatctgacaatgataatgatgtccaagaagtgaaatatcctgaaggtggattacgagcttatagtgtagtttttggttcatttattggattaatggcaacttttggtacattgaattcagttggtgccatacaagcatatattgctactcatcaattatccgatgtgaaaacgtctactatatcatggatattttcaatttatacagcgatttcatttgccaattgtatggtagttggtccattatttgatgttaagggtgctatgttacctatggtcgttggtactgtaatgatatcaggtgggtttatggcggtagccaattgcgacaccgtgccccagtttatcttggcattggctatatgtgtaggattaggtaattcgctaaacataactccattgattggtgttttgagtcactggtttaacttgaagcgtggtagagctattggaatggctactattggtgggtccgttggtggtattattgttcctttaatgttgagatcattatataccaacgttgggtttgtgtgggcaattagaatcttggggtttttctgcttagcttgtaatggtattgccatattattgtgtcgatctagaatatgtcaagaatctgatactgtaactcctaagaatctgttgtggacgaatttggtacaaatcaaagatcaatttgaatttagtgctcttttggatcctaaatattccttttgtattgttggtacttttttcactgagatttccttattgtcaatgttgacgtatttggctacatatgcaatagctcaaggtatgtcggaatctcaatcgtatgtattgttgactgttttcaatactactggtgtgttgggaagattggtccctggcattttatctgacaaatttggccatttcaatattatgattgctatgctcatagggtttactttatccatgttgatactttggcttccatttgggtctaacattggtgctctttatgcatttgccgctatttctggatttttcagctcatcgatattgagtttaactccagtgtgtttaggaagtatcacaccagtacagaaatttggtcaaagatatggactattgtatttttttgttagtttgggtaacttgtttggtattccggtgagtgctgctattattggtaatggttctaaacatctgtatgatatgtttgcagtttactgttgtgtatttggcgttgtgggcacttgttgctggtttatcagtaggttctacatagttggactaaaattgaatgtaagagtataa

SEQ ID NO: 6812 - DNA, 1368 bp, Candida albicans
atgattgaagccggcttcgtattattatttcttggtgtatctttcctattattatcttataaacaattgaatgcaattttctatagagtattcagggcaagtaccaaaaaagagccagttatcgatgttgaaaagaaagtagcttcttctgcttctgcttcaggttccgtgtatggatcaaatgaaccattaccggatccaactccattaatgatcacccctgaagaagtttcaaattatgatgatagaccatggagaccatttagatggccatatcatcaaaccatggctattttcaaattagatatcaatcattggttggatatggataaatattacatgcattacatcaaagaaaaggaaagaattagacacaagtatggtaaacaaaactttgatatgttacctgaaggttatgatggttgttttgaattaatggagacggtgacaaatcatttaattgccagatatcctttattatttacagttttaaaagatggcaattatgaaaaaggtaaaactggtgatggtaaaatcattcgtaatgaaatcacgaaagaaatattagatatgactttaccattgaaagaatcaccattagtttatgtttctaaattggctaaagaagacttttacgttgtgaaaaaaaacccaactgatagattacattatcttgttggtgctgctgttcccttccctggtggatcttttggtattgatcaaaaaattggtcatcatatcgatactatacatgctgatgtaccatattataaagaaaaattgaaaaaatcaatggagagatggtttgatagaatgaaacctaatgatccagtagaaagagcaagttggtatattacttgggatgtcaaattaaaggtgaataatatttatcaacgtccagaatttaaaccaaatttagaagcagaaatgaaatcaactgatcctaaagaatttaatgttcgtgttgaaagacaaactttaagaagattgcctaaatcaaatgttattattttcaccaatcatccagtgttttattctattgaagaaatgaaggatgaaccaatgattccttcacttttgaagaaaatcttgtatgaaggccctgaagatattttgaaatataagaatttcccattgattagagatcatcttgctgaatatcttgacaaactagttgctagacaatatgaacttggaattattaatgacgaaacccccttgaaaactcaacctacttatccatttgcttattggagtaaaactaattttgattacgttaacggttggagtaatccaagtccttcttatgacaagaaaaatatgaagactgatacattgaaaaatgtgaaactagctgataacgaatag

SEQ ID NO: 6813 - DNA, 2133 bp, Candida albicans
atgactggacgtggaaatctgggaaattcatcaagaggaagaggtggttcaagaggtagaggcgccagcaaaggtggttcaaggggaggaagaggtggggcaaagaatggttcaagttctggtgggagaccaaacggggatacatctaacggcaatggtaaaggtaaaggtaagggtaaggggaaagttagtaaaggtaaaaaatcaaaagaaaaaggtcctaatgcaaatcttattcctcttggtacaccaagaacaagaaaaccaaatgatgacgaagggcagaatggacctaaccaaaaccaattaaatgacctagaaggacgtatttatgatgctaatgaagaagcatatgtgccccctagattgaggcaaaatccaccaaatacagcatacagtagtgcaaacaactttggaacactaccaatgaccaacaataataatttaaaccaagacacggttggtaacaatcaaaacaacactgttaataacaacagtgaatctactaacaattttcaagcaggaatggccccagctgctgctgctgctgccgccgcttcccctagtgctatgggagcaccagtgacagcagcaccagtggcagaaccaggaccaacgcaggttgatgcaccaattattatgaatcctgaccctaattggccagcaccattgactaaattttatattgattcaatggctagaattggtaatttgaaaaaagccaaacaacttactggaaaacaacagttggccaatataattgatatggcagtgagacgaaatgtagtcgatagtaatgattgggcaaatcaacgagtccccatttgtagtggaggagggaagttggaattggaaattttccgtattaaaaagaaaccaaagaaatcaaattctactgaagatgatactaataaaaaatcaaaagaaaaaccactgaataccaataataattctttttatattgacgtgaatggagatgccccttatgatcctaccaaaaagcctaccacaagtaaaatactcaacaacagcagcagcagtagtaacaacaacaacaacaataagaaaactaagggcgataataaaaaattcaaggaaacagggaataattttcaaaagaatgaaaataagaaacgtcaattacaggaagaatatgattctgaagcacgtaagagagctcgatccgaaaggtttgctcaaattagtgaatttaaaccaatatctacctattatgaagatcaacgacgcaaggattctggtgcagtagtggggacaagtgaacaattggaaaagagttactttcgtttgacttctgcaccgaatccagctcaagttcgatcactcaaagttttacatgacagtttgaaatatgttgttcgcaaatatgaagagagtcacaactattcatatattattgatcaattaaaatcaattagacaagatttaacggtgcaacatataaaagatgaattcactgttcatgtttatgagaaaaatgctcgtatatcaatagaaaataatgatttaggtgaattcaatcaatgtcaagcacaattaaaatcgttatatcatcgtcttcgaataaacaaagaaaagtataaacatagatttatactatatgaggttgaaatgatgacctattcattcatatatatgattgtgacaaagaatcaaagtgaaattaataaattcagattacaatatttgaaatacaaacattttaaaaagcatgaatttgaaaaaccatatttcaaattaatgagtgcattatttaaatcttatttatgtactttacaaggagattttgaagtgttttttaaagaacttgaacaatttgcccacattaaagaaactaaaatagcatttaaatttataaatgatcatttattaggtaaagttagattggaatcactttatcaaattgcctatagttatcgtcgtttccttgtggttacagcgtcagaaaaattaagatttcctgatcctcaatcatgtcttatttatttgggagagcttggattagaaaaatgtttgatgaaaggaaatcatgaacttgatattccaaagacacaagtagcattgaaagaattgatagccaaaaaccacagggtagacatcaagggccaaatataa

SEQ ID NO: 6814 - DNA, 2226 bp, Candida albicans
atgggcttccatgcacctttaaatggttcaagcaaaaactcaaaatcttcagcatttgcatcttttgattctgcatctgtcatgcaaatagtaaacaaagcaaaagataagatagtgcccgatgcacagttccatcagaccatcacagatcaaggaatacggcattaccaagaaaaactatctccactacttcaaaactcgtatcatggagcaaacgtaaacactaataagcaagattcttcccccatgaaatcaccagtgacattgcagcatgccttgaatgtgcgtttggaaagtatacttagtttgaatgttcgaccgggggagccattttttgtcttatggtttttaatttcaagttattttccattgattgccgcatgtctaggtcccttggcaaatatgatatcgatcgttgctttagtcgagcattggaaagtggacattattaccaggaaaaatgtccctgacataccaaaagtagttgtaatgaatgcagtttcattagcattgggtttgattggcaatatttcgttgttaatgaacttttctcgatctgtcaaatatttggtcagtcaatcggtttctataattgcatggctttgcgccagtgctttgctcgctgctgcactttttgtgacaaacagagagtttggtggtgaaaatccaaaatatgttccatcagaagggttttattttgcggcatttacttccggtaattattttgtatgtatgctaatcttggtaatcaatttcatgggatatagtttgaaaaaatatccgccaacattcaatctagaccaaagacagagaacattaatgttattcacgattttgttttccacttggacagtaataggagcattcaccatgggatctttgatagatgatataagttatggttcagcattgtattattgtattgtttcttttttgactattgggttgggtgatattttgcccgaaacctctggtgccaaagtcgctgttttagtgttctctttgggaggtgtattgataatggggttgattgtcgcaacccttcgcctggttatactatcttctgcagccccagccatattctggaacgatgttgaaaaaaccagaatagctctattagcacaattggacaaagaaaacagacatttaaccctggaagaaagctttcacgaaatgagggtgctaagacgcaaagtaaaatccagacacaagaaggtatcattagcattgactattgcagtattcatgatattttggcttattggcgcgctaatatttcaaaaaattgaaaaatggtcatatttcaacgccatgtatttctgtttcttgtgtttgatcacgattgtctatggtgattatgcacccaagaccagtcttggacgcgttttttttgtttcgtgggcagtgggtgctgtccctttaatgactatcttggtttccaatgttggtgatacattatatgaaatttccaacgacataagtgcttggttctccacctggatgttttccacaaaagaagagtacagggatttaaaatggaagaaaaagaaattgcaggaggaccaagaagatcagcttacagtaaactctgaggcggtacgtagtagcgaacttgatgaagatttggatcttgcaaaaatggaacaagaagctagtcttgaagcacgtgacaatagttccaacggtgaaattggggctgctagtatagataacccaaatgaagatgttaaagttaaggataatgatacttgtattacaaactcgagtaactccaatatgcggaaagaccaagagaataactcttattctgaaagatcggtttgtaaatcagaaaagcagaattttgacatcgagaggatacggcaaaagatcgcttccaagaaacaagtacatgaaatgctaatagattatttggaaaaaatgaaacctttgattggggacagtattgaatcacctaacagaaaatatagttataaacaatggaaaggagcatatgatgggttctggttgagtgaatcatcgcctttgagattgcctttaaaagagcctaattatttaatcttgaaaatctactttgagattgaaatgatgttgcggggtttggttgacatggagatagaagatttgaaaacgttgactatacaggatgtgtctaatgaactttcttcaagttcttccactgatataaagtttgcaagaacaataaagtttgatgatgataaatga

SEQ ID NO: 6815 - DNA, 906 bp, Candida albicans
atgacctacgtactaacagcaatatcacacaatgatagtaaatttgaaactgagacattagattctataaaagagtttatctcaaataacttcaccctcgtttcatccaaagagttgtcaccacgtgcaattgattatgttattctgattaatgattttgagtctagcaaagaaaatgtgaaagaattttctatatccaagtcttttgatttagtcatccagctagaatcatcaagaaaaacgaaaaaattgtttattttcgatatggattctacgttgatttaccaagaagtaatcgaattgattgcaagttatgccgacattgaagacaaggtcgcggaaattaccactcgtgcgatgaatggagaattagattttaatcaatcattagctgaaagagtattgctattaaagggaattgatgcatcatcaatctgggacgagttgaaattgaagatacaagtaacaaatggagtgcctgaattgtgcaaagcattgaaaaaattaaatataataatgggagtttgttcaggagggttcattccgttggctgaatttttaaaggagaaattgggcttagactatgcttttgccaacaccttgggaattgacgattccaatcgtttaaacggtacaaccgttggccctatagtgaatggagaaaaaaaagctgagttattgttagacatagccaagaaacacaaaattgatccactggatgccgttgcagttggagatggtgctaatgatttgaaaatgatgtttgtagctggatttggtattgcttggaatgctaaacctaaagtacagaaacaagctccagcctgcttgaacacaaagagcttatcagacattttgtacattatgggctacaatgataaagaaataaaagagttgatagattag

SEQ ID NO: 6816 - DNA, 1365 bp, Candida albicans
atggtagtaaaaaaaaatcggttctgtcccgcccccgccccccgcccccacttctatttttttttactcacatcttccattcaaggtaaaaatctatttcataacatttccatcactacatatcaaatttgtccacgtccacgtccacgtccacgtccacttacttacttaatgtcttgtgattcaccaataatagtttcattaaatgatttgaaaacagatgaaggataccctggattaaaagatgaaattttagaaaaagcttttggacctaattcattaggtataataattattaaagatttaccaattcaattcgttgaattaagaaaaaaagttttaattagtgcatctaaattagctaatttaccaactgatcaattgaaatcattagaatgtgaaaaaaattattggttaacgggttggtcatgtggtaaagagaaattacgacaaactaataataataataataataataactactcaatacctgatgataaaaaaggatcattttatattaattgtagtttttataaagatgataaacttgagtcacctccacaagaattagttgataaatttccaaatcatttaacttatacaatgaagaatatttggccgccagaagatgaaaattctggtttaataggatttaaacaaaatttgaaaaatttatgtaatttaataatttcaatatcagaatcagtggctattaattgtgataaatatattaaatcacattatccaaatgattatccttcaaatgattatttaacaaaaattgttcagaattcaacttgtacaaaagcaagattattacattatttccccaactacaactacaactacaactacaacaacaaggaggaggagaaggaggaggaggaggataacaacaacctcacagatctcgaggctgaagccttgtctgatgataattggtgtggtgaacatttagatcattcttgtttgacaggattaacatcagctttatatattgatgaatcaaaaggattaaacccacaccatgctgctgctgctgctgctgttgttcttgacaattcttctcctgatctagatcctgattcaggattatatattaaaaatcgtcaaaatgataaaattattaaaattaatattcctcatgattgtttagctttccaatcaggttcaactttacaacaagtatcaaaaaataaatttaaagctgtacctcattttgttaaaagtggtaacaataataaaggtaaatctattgctagaaatactttggcagttttcattcaaccaaatttagatgaaatggttaatgaaatggaaaattttgctcaatattctgatcgaattttaaaatctaatcattga

SEQ ID NO: 6817 - DNA, 642 bp, Candida albicans
atggtattgaaaacattcaaagttgatgggatatctccaataaaggccgagactttgacaccagagagttttctgaaatatggaggtgtaatcagtgcagatcaccaacttgaaaaagtacaaagttcagaagcaaactacgggaccgctataaaaattcacaaggttgctcccatagttaacaattattcaaactgccctagtggcaaggaagcgacggcaaattggaacatttttagatgcaaagctccaaagcatttgatcaatcatggaagtttaaatagtgtttacacatcaaaagtattagagagacatccgtttagtacccaaacgtttctaccattaggtcaagatttgcataaagtttcttatttagtcatagtggccaaaacagatgagagcacggaagagaaattgcctgatccaaccctgattagagcgtttgtttgtaaaggcaaccaatcggttacatacggaataggcacttggcacgcaccaatggtggttatcgatgagaaagtcccacatatagattttgcagtattcattcacgaaaatggtgtggctgacgaagatgttcaagaatgttactttgaaccagggtatagcattgtgtacaatcagattgaagcaaaattgtaa

SEQ ID NO: 6818 - DNA, 1647 bp, Candida albicans
atgattccaaggctatatcggagtttttcaatatcgactactttgcgtaatgaactactagacacggctaagatgttacaatcgagttccctgaacactttaaaccagcccaaaaatttcaaaatccacaccactaaaccaacatcgccagaatcttacgaacgaaccgtttatccaaccaactacaataaaccacaagatgaaaccttggaaaattctgatattccaatgatcaaaataaccgagctatctcgtgatttaactacgggtctaaccactgccactacatccattgcagattatttctttggtaatactcatcattcacatcatgtattctacctgaacctaactgttcttaaagctaaacgtgctgcaaaagttgagaacaaaaaatttattgatttaaaattgattaaattgaccagtgggaatggtggtaatggatgtgtttcatttttcaaggataatttcaaaccaatgggaccaccggacggaggtgatggaggcaatggtggtagtatttatttgaatgttgttgataaaaatatcactagtttacatggattacaaaagagatatgtagctaaaggtggacagccaggtaaaggatcacaattggatgggaaaagtggagatgatataattattgatatcccgttggggacaatagttcgatggataccagatcctcaagattttaaaaaattcgttagtcaaagagaaggtgacgcattaaatgatgttttcatggaatttgatattgatgatcgtgattttattcagttgaatcgtggaggataccgtcctggcgaaggatggatatttaaagagcatgatgaagaatattttagagacaaggattttttccaagatttgaatgaaaaagttactggttatgatgaggaattactatttgaagaaagttataatgataggttccccattgtcggcttagattgtaatcaagttacgcagaagcctctattattgttacgtggtggtaagggaggacttggtaatatgcattttttgactaaagaaatcaaaggaccaaggttttgtaaaatggggagaccaggaattactgctaactttttgttggaattgaagctaattgctgatttggggttggtgggattacctaatgccggcaaatcttctttgttgagagcaatttcaaaagctcgaccaagggttggtcattgggaatttactactttgcaacctactgtggggacaatctttacaaggattgataaggacccattcactgtggctgatattccaggtattataaaaggtgcatcccagaataaaggaatgggtttggatttcttgcgacacattgagcgttcaggaggattggtgtttgttgtttcgttggagtcggcaaatccagtcgatgatttgaaaatcttattagaagaagtgggtcctcgtcgtatgaaagataaaaatgtattggtggttgctacaaaagctgacttaagctctgaaggtgctaatttcaaggtgctccgtgattacattgaacataatcatagcgaatggaagattgtacctgtttgtgctccaaagggagagaatgttgagaggtgtatcaagttgatgagtgaaatagctcagacgaagaagaaaccttaa

SEQ ID NO: 6819 - DNA, 1872 bp, Candida albicans
atgtttagaaattatttgaatcttcctgaaatcttaactcaagtgtacttgaacaaatatgctatcttgctaatactaatccttatcaaattgatactattggaaacttccatcttagataatcttaacctggtattattggacaattcaatttgtgacaatggcgaaattcagcccgtgttgaacactgttcattatatgattgtcgatagtttacaaacattagaggccgcgggtatagtatcaataattttaacactcaaagttattaaacaattagcgttgtttttcatcgaattgttttttgggacgtatatttgtttactaaatgcagctttaaaggggtcaacagaggtagctcttgatgcaagcgaaggtgttattcgggctgttaatgctactgtggtatcggcaacaaatgacattgagagcgctctaaagggtctttccctgattattaatgatttggtgactggatttaatgccataaagaatatgttcactggatccaagtcagacccaactcagtatcaaaataaaatcaatattactttaggagatttaaagagtaaaatcatgatccctagtgaagttttaaccaaacttgataatttcaaaaattctagtttgtatgggttatcacaattaggtaatggtactcaaaccatagtgtctaccccttttgaattggccattaagaaattaaacaccatgaaactgagttataactttaccacaggtgcaccaagtcccatcaatttccgtgaagagtgtttgaaagatatgagtaaattaaaagatgtacaaaccgacttagcaaagttagttgaaaaaattagcaaatggctttttattggtttagtgcttgctatggtgggctccatcttgtatgtgagttatatccaatggagacattggagacgaatggacaaatttatcaatgaaacgggtatagacaaagaggtacaatttcgcaaccaatataatatttacaacaactttttgatatatacaatagtgaaacgcatgggaatagatcttaatgaaagagcaatttggatgttgagcttcatgtttagtaagatttccaggaatgtgttcttttttggaataatgggagttgtttcagtagtggcacaatatattctactaaattcagttcaatcatctatgaataatcatatcaagtcgtttgatattacaagcaacagtacctccatgtcagcatctacaatttatcttcgtgatatgaacacttacattgatgatacacaagacaagctaaatcaagagttattcagtggtataaaagaaatatcggtgtcgttaaactcgacaattgtagagttcttggataagcttaatgaaacactatctgatatatttgggagtacaccactagcaggaccaataaacacggttgtctactgtacaattggaagaaaactagaaaaggttgaaaagggtttaacctggatgaatgataacttaaatatcaacataccttctattagcagagatattgaagatggtttatctcacatgacatttttacaaccgcaatcagttttagcaagagcaaataaaattatagatttataccgaaaatctatattgttagagttatacataagtctaggacttcttggtgtttggttatttcaaatttttgttgggagtgctacacttactattcggtattggaatagtaccagacagggaaacaattcttacgccattagtagcccacatgaattgtcagaacaggagaaacaagtatatggctatcctttgtcacatcctttgattgacggcaaagacttaactacatcgtcaagcttctatccgactacagaggagaaactgaaataa

SEQ ID NO: 6820 - DNA, 828 bp, Candida albicans
atgtttaatttgataagattgggtttcccacggacctcaataatcagatactattcaagtactgcagtgaatcaagctaaagtgtattcgcgtacttacaaaagggctggaccagtaacgaaatcctcaacaagcacgtcaagatccacttctacagatgcatcacctgcatcttcttcacctccaaaagagagttttagtgacattgagccaagctcggaagttccagtaaaatccactacttcttatatcttacatgatgccccattggaagcttcaaacaaaaataatggtgaaaccatcaattggtcggattcattccacgggttaggtgctcaaccattttccaaagaaattgctgaaattttgttagctcctgtggcagaagaggatattgaaattaagcccgatgggttattatatttacctgaaatcaaatatcgacgtgttttgaatcgcgcctttggacctggtggttggggtttggccccaagaacagagtcacttgtcacatctggacaaataagtcgtgagtatgggttgatttgtcatggcagattggtcagtattgctcgtggtgaacaagattattttggtggcgaagagaaattgactactgcattggaaggttgtaagagtaatgccttgatgagatgctgtaaagatttgggaattgcaagtgagttatgggacccttcgtttattagacgttggaaaaagaaatattgcgaagaaatctttgttgaacatgtcaacactaagaagaaaaagaagatatggaaattgaaaagcatcaagactatagattatccatataagatgacataa

SEQ ID NO: 6821 - DNA, 1440 bp, Candida albicans
atgatgttgtttctcattcatttgatggctttatgttgtatgtttgttgctgaggttgcatgtgaacaattcaattccacttcaaattcaagttcagcgcaatcaagtttgattgattttcaatacaagggtgttagtatcgggggttggttagtcctagaaccttatattactccatcgttattcaatgcaacccttctgtctggcgaaacgtggaccgatcttccagttgatgaataccacttttgtgaaaaactaggtgccaaagaagccgaaaaaagattgacagaccattgggaatcaatgtataatgaaacagatttcaagcaaataaaagaagctggattaaacatggtaagaatccctattggatactggtcgtttgaaaaattggagggcgatccgtatgtgtcaggagcacaagactatcttgataaggcaattgagtggtcacatgcaaatgacttgaaagtcatgattgatttgcatggtgccccaaatacacaaaatggatttgacaattctggtttgagaaatcttgggtatcctggatggcaaaataaaaccgaatatgtcaaccatacgtataaggtgttgcaacagatgttccagaaatatggtactgggaaatatgcatctgattacaagaataccattattggaattgaggtattgaatgaaccactcaacccaaatatggacaaacttaaagaattctacattgagtcctacaacgatgggagagagattcaagttatcaataacacaatttttttccaagaagcatttcaacccattggctactgggatagttttttggagaaaggtgaaatcaaagttaccgaaacatcaaatgggacaaaccacacaactaccaaaaaagcagatttcaaaaatattatcattgatcatcatcattatgaagtttttacagaatcccaagtggcactgaatgtttccactcatttagaaaatatcaagaattatgcatcagctattggtaaagaaaaggcaaaggctatagttggtgaatggtcagcagcattaaccgattgtgccccttggttgaatggaattggattgggttcaagatatgaaggtactgctccttatactaatgatcgggtaggaagttgtgccgagttcaacaagagtccagataaatggtctaaaaaacaaaagaaagactatagaagatttgttgaaatgcaactttacgaatactctactaactcacaaggatggatattttggtgctggaaaacagaaggagccactgagtgggactttagagcattggtaaaaaatggcataatgccccaacctttggacaactacaaatatgtcaaaaatgggacagatacgagcagtgcttcagccattgcgtcaaataagatgacattattgttagcttttttattagtcattttggtgatttag

SEQ ID NO: 6822 - DNA, 1512 bp, Candida albicans
atgtcttatcaaattacagaaaagaaagacttgacttatgttatcacggaaaatagtatcccccaagcacaactagaaaaaaatttcagtttactaagtacatgtgcatttcaattcactttgatatgttcagcacttgcaataggtacatttctaagtaccgtgataggagtaggaggtagtccagtactaatatttggattcattgttgccatcacctttgatctcattatttgttattccttagccgaattagcgtctgcttatccacattcatcggctcaaattcattggacatattgtttagcatcggagaaatacaaacgtagtcttagttttttaactggtattttatcatgtgcgggttggatatttgcttgttttagttctacttatgtggcatcaatgtttattttggcattggcacaaatttatcaccaagactatgtcccaaaaagtttccattattatcttgtttatttggcagtgtttttatcgggttatttggtcaatgtgtttttagtcaaattattaccgttaatcaccaatatttcagttgcggtaataaattttggaacattctttattattattacacttttagtcaaatcaccaaaacaatctgctgagtttgtgtttaaaaatatcatcaatgaaacgggctggtcctccaatggagtggtatttttcttggggatgttgcctagcttagcctgtgtcacattatttgatggagcagtacatttgacagatgaaattgcccaaccagaacgaaatataccgttagtgatggttatatcaaatacactttctggcgttatggcatttttcgctgctatagtctacatgttttgtgtggtgaatgtcaacaacttatcaaatccagtaggtggagaaccaattgtgcaattaatgtatgattcttttcaatcggaggcattaaccacaattggagtcgtttgtttaatattgacttttgttggctcgtcttatatgtattataccagtacttcaagattgatttggtcatttgcaaactcaaatggacttccctttagcaagtacataggtgaggtttcttcaaacttgaaaagtccagtttatgcattgtctttcttgacggttctttgcataatcattggaacattaattatgggatcagatggtgcattgaatgctgtcttgggtacatcaatggtatgtattaacttatcatatttgatacccattgcatgtttattggtgaaaagtaaattttccaccacccatagattcaatgaacgtccatatttttgtttgggaaaatttggattgccaatgaacattgcctctgtcctttgggtgtgctttattatggtatggttgaatttccccttgagttaccctgtgacatctgataacatgaactatgcttgtgtggtattaggaataacctgtattattggaataatattgtggtttgttcatggaagaagccgctatgatcataatattgatcttaaacacttttaa

SEQ ID NO: 6823 - DNA, 1365 bp, Candida albicans
atgtcaagttttgctaatttatttggaaagtctacaaaagtggatgaaaatatagagcagttattcaaaaacacaagagatgggccggtttcgaaggatgagcttgtgaagaaacaaagaactgtgataaaaattccaaaggtcactgctcctaaacagcaaaccaatgaaaatgagtctacttcgaaccaatctgctgatgaatcagacgaagaagaagaatataatgatgaaagtaacgagggtgatgacagcgacgatgccgaacaaactgaatctacatctaaaaatgatgatgaaaatgaaaacttggaagcacaatattttgacaaattgttaagtgaacaaaatgaagagcaagatgaatcaaaggaatcctctgatgcaaaatcttcaaaggctgcagaagaacgcaccaagacaaaagttgccactactgttgatttaaaagaaaaggaattggaaaaagctgatagaactgtatttgttggaaatgttccagcagacgttatcacatcgaaaattattgccaaaaacttcaaaaatttgtttaaacattatgggaaaattgattctatcagatatagatccatttcgtttgatgaacatttgcctagaaaagttgcatttgcaaaaaagaatttacataaatcaagagattcggtaaatgcctatattgtatacaaagagaaacctgcatcaattgctgctaaagaattaaatgccactgtgtttgaagaccatcatctccgagttgatcatgtttcacatccagcacctaaagacaacaaaagaactatttttgttggtaacttggattttgaagaaaaagaagaaactttgtggaaatatttcaatagtaaacttgatcaggatgttgagtctgtaagaattattcgtgattcaaagactaatttgggtaaaggttttgcattggtacaattcaaagacactttatctgtcaacaaagcattattattaaacgacaagccattggaaactggaacccagaaaaaaggtcgtaaattgagaatttcaagagccaaatctaatgctaaaccttccttaatgtcacctaatcattttgataatcaaaagaagaagtttgcagctggtaaatctcaacagaaattaaatgacaatcaaaaaacaaaaattggaagagctcaatcaacattaggtaaagccgatagatctactgtgggaaaagctaaaagaattatcttggaaggtcaaagagccactaaaggagaggccataaagggaataaaaggatcaaagaaaggtaaaaaagtaaagaaaccaagaattagagaaagatcaacaaagtttaaggaagaaagaaaaacaatgaataaagtatag

SEQ ID NO: 6824 - DNA, 1407 bp, Candida albicans
atgaagtttacccatttatttttcatcggtttattgactaaggtttatacagaaactgtgacagttttatcaaccagaagctacagattagcaaccacggagctgacccctactgatggtactgtttacttaacgttaacgagacaacaaagtctgtcaacttccttgaatgcttctacaattaccacaccaccactgaacctgtctgctagtgttcaaacaacagctgttactgactgtcactttcataattcggtccaatattgtgttgatggttacggaaatgaaggttcaatcttgccagttccaaccaatacaaacaaccttcctacaagctatgatggatgccattcccacgatggtgatactttctgtatggatggagataaagaagttcagtttgtgaaattagaagatgaagatgatgaagagtcgagctcatcttcaggaaaaaagtgtcatttccatgctggtgttgagcattgtgtcgatgacaataaccatgacgctgtgacttgtgaaagagtgaaaagagattacgatattcctttgagaattgggttgctttttgttattcttgttacttctggtatcgggtcttttggtccaattgttttgaaacaatttgtcaacttatcacaggaaaactatattattgttatcatcaaacagtttggtactggtataatcatatcaacggcatttgtccatttaatgactcatgcgcaattaatgtggagcaattcttgtttgaaaatcaaatatgaaggtactggtgcttcaataaccatggctgggatttttattgcttttataattgagtacattgctcttagaatagtcaatgcccgtgatactgaaaaagttgataaaaaggaaattgaggaaacatctagtaatgagcaatcattacatggaatctctgttaacgacaagatttcagtaatgattttagaagcaggtattattttccactccattcttattggtattactttagttgtcacagatgatgtttactttattaccttgtttattgttattgttttccatcagtttttcgaaggtttggctttgtcttcgagaattatatctattaccaatgcaagtttgtcaactaaattagtgatggcactcatgtttgcattaatcacccctattggaatggcaattggtatcggtgttttgaacaaattcaacggtaatgacccctctactttaattgcattgggaactttagattctttttcagcaggtgtgctcctttggactggtttaattgaaatgtggagtcacgattggttacacggccacttgagaaacagttcttttgtaaaaactacagttgccttagtaagtttgattttgggaatgttgctcatgagcttattgggtaattgggcgtaa

SEQ ID NO: 6825 - DNA, 759 bp, Candida albicans
atgggaaacatagttcaattaacaccagagcatatttcgtttcttaacgagcacttgaaaactctttcggcatacaatattatcaaatgggcatactttactttccccaatttgtatcagacaacagcttttggattaacagggttggtgactgtcgacatcatatctaaattatcccaggaattggaaaaggatcacttgattgatttgatctttcttgacacattgtaccatttcccacaaactcatgaattggttcaaaaggtcgaacaaaaatatcgcccaaaattacatgtctacaaaccaaaggatgtgagcacggaacaagaatttgctgcaaaatatggtgaccagttgtgggaatcaaatgacgcatattacgatttcttggtaaaggtggaaccgagccaacgtgcttacaaagagttgggagtttcggctgtgctaactggaagaagaaagtctcaaggtggtgcccgtagtgaattgacagttttagaatacgaggaaacaagtggaattatcaagattaacccattatggaattgggatttcaaacaggtaaaggcgtatattgatgataataaggttccatacaatgaactattagatttaggttacaagtctattggtgattggcattctactgtacctgtagctgacggtgaagatgaaagaagtggacgatggaaaggtaaggcaaagactgaatgtggaatccatgtaactacaaagtacacggaatatatgaaggaatag

SEQ ID NO: 6826 - DNA, 1923 bp, Candida albicans
atgagaccaatagactccatagtttccaagttcagagtgcaaaagcatacatcaaaccttgctgataatccggctgttctaaaacacccagaggatatgccaaaattaacaagttgtctaaggtgtaggaaattaaagaaaaaatgtgacaagagtaccccacattgtttgaattgtgaaaatgcaaatgaagagtgtacctatgtgaaacggaaaccaaggcaaagtaagaacggtaagacaacgaccctggaatcttctctagatcctccttcaccaatggtgaatgaaacttttacaggtttttcgtatcttaaccaatcccaacctaatgatttgtttagacatataccatcagctaccaccaacacaagcacaactacatctaccgtagcagcagcagtaccaccaactacaaatacaagcgaatctgtatcatcatctcgatctcacacaccaccgatattaaattcaatcgatgctagagctcccaatttccattcgtacccgaaacaaatttctaaagtgctaattagtgctgtgggtattaagaccaattcaaatgtgagtatcattccaccaatagtagataaagatttgttaacatcaataatcggtctgtttatgcaacacaattatcgaatttgtccagtgatacacaagaaagaatttttggagaattttcaaaaattatttaaagaagatggaatcgtagatttagattctcatcatgatccctatgaattgtacatggttttggcagttggaagtactggtttagaacgtacaggaattattagcagagacaaaaaattatctgaatactttgtatcgatggccctatcgcatgttcataataatttatctaccaatagtctaactaatgtgagaaatttgacattgcttgcactatactcattttttaacccagcagaatatacatcttgggaaatcatgggtaagttgacaagactagctattcatttaggaatgaatcacaagattctggatcaagatgcaagaaacttgtcttccaaagaaattgaaatgagatcaagattattctggtcagtctataatatagatcgtttgagttctgtttcacttggaagaccagtggcacttcaagatgatgatataaatgtccccttcccacaagttttagaagaagatgagacagaggatattgctgtaaaccggttagtgatcaatttgcgtagattggaaggtaaaatcttgagaagagtccattctgtcaacatttacaagaattttattaacaaagataaactgcaagaagaagtttgtcaggaaatattatcagatttacgtaaagagattgaagattggtattaccaggtcaaatctgttgataatgccaacacatccgtcagacagtcagtttctttccatttactggttccttggtatactgcaagatataaccacttgttaatccttttgtatcgtccttcttatttaaatccaagaccatcacaagaccttcttgatattcttggtaagtcatgtttagagacattgtcatatacttataaattgttcaaggccaaactcttaccgttaaattggaccactttgtatcgttttttgatggtatgcaccacaatcctttattgtttgtgtaaatgggccatagatctcatggagtcgaaaacagaaatttgttactgtattgaaattttccaagcatttggaagtgactggatagttgcaaagaaatgtgctgaggtgtttagaaaaattgaaaacaaattgctagaaattactttatcagacggtcatgttagcgacatggacaatttgtccaaagaactattaggtgcaagctcatcatatcatgagatattgaatgttcattcagttgatctttgtatcgatactgatttcatgtacaatttttga

SEQ ID NO: 6827 - DNA, 984 bp, Candida albicans
atgtcaattaaatttgttaagtcatctaaagattttgaaggttatttgaaaaacaacactcatctcgtattgaatttcactgcctcttggtgtggtccttgtcaagcaatcaaacctgtaattgatcaagcttacggacaatttcaaaatgttgaaattgtgagaattgatttagatagtcaacgtgagttagcatcgaaatacaacattacatctgttcctacatttgtgtttctcgaaacagggaaagaagttgaccgtatccagggtgccaatcctcaagcattgattacgaagttgcaagagtttaacactaaagcaaacggacaaaagagaagaggcaatggtacggctagtgaagatttgattactcaaaatagtagtctaaaagatataaaaccattgattcctaaaaactttgaaatattgaatgccactatagattatagtggatacgaagttttaaactgtttaccattgtacaaagactcgaaaacaaagcatgttgtaagcttggataatacagataaatccgcagttatatcagattcagattctcaattgcttttttatattcccttcttgaacatttccaaaatttattcgattttggtaaaagtgaaatctactaaaacgtacaaagaagttgacgaaagtgcattggatgtcgacagtgacgacttggatgaaattcaaccacctaatttaattaaagtgtggtgcaacactcaatccatcttatcttttgatgaagctagtgctgatacaagtgctccacatattgaaaaagtatccactaacgatgaagagcaatggttggatattaaattcaaatttgttaggttccagaatgttcaaaatttgactattttcgttgatggtgaagacgaagattatcacacagttattgagaaaatagtcattgtcggtgtcaatggcgaaagtaaagagcaaggaaagataaatcaaatagatgatgaatag

SEQ ID NO: 6828 - DNA, 1353 bp, Candida albicans
atgagttttatgcccagcggatctaatccggaaacagcatcattcacatgtaatacatgtggtgttaagtttatcaatgcagaattgcaaagacaacatatgaaaacagaatggcaccgatacaatttaaagagaagagttgcgggtttaccatcaataacagcaggagtgtttgccgaaaagatactcacactgaagcatttagcgaaaaatgaaaacgaggatgagtacgggttttatgtggctacgaggaagaagaagacgaacggagaacgtcaactcactaagaagtttctaaaatcccagaagaacagaggtagaacagaggaggttaaacttacaatagacggcggcagggaagcaagtcctgcggcatctctcacctcggatttttcggagttttcgttaggcgactcagatttccatgaggttgaatctatagttacaggttctgagataaactataccgaggagtctgatttcaccgatttggaaggtgagctattatcagaagaagaagaagatgatgaggaagacgcagaagaagaagcaaacgatagtgatgggtcgtcagaggctgtggagtcgattccaattactcattgtttttattgtggtttgaacaaccgtgaaatagaaaacaatataaaacacatgttcaataagcacgggttgtacattcccgaaagatcctatctagttgatccaagtggtctcttagagtacttgagtgaagttatttcattagactacgaatgtttggtatgtgggtttgaaggtaaaaatttggaaagtgttagacaacatattgcatccaagggccattgtagaataccatatgaaaccaaggaagagaagctagccatatcacaattttacgatttttcagtggaagatgaaccaaaaacgcaagccaaagaaagcacgaaaaaacatgtcgagtttagcgacgaggcaccatcgactatagttgtcgagtacgaaaaccaacctggcgataatgaaaggggaactggagataatggaataaacgacaattatgagttagtctacatagaccaatccggagttgaacttactacaccagcaggttacagaattggccaccggtcaatgcaaaggtactatagacagaatttgcggtcgccaagagagccaacagtagcacaaactacacaggcattggtcgatacaagacttgcacctggattgtcaccgtactatgccacaaaacaagaaaaggaaacaaggaggattgaaaacaagaccagaaacaatgtggaaagaaagaggaataagacaagaagagccaattaccaaaaacactaccgtgacgaaattttgggtacatga

SEQ ID NO: 6829 - DNA, 678 bp, Candida albicans
atggctgacaaatttccagaaatagacacacctgctgcaggtggtgatgatgattacgaaggtgatttcttgtcccgtgaaaaagaattggtgggtgacgaattcaccacagatcaagataaacaggtgtttcaagatgacgaagatgaagaaataaacgaattcaaagaacaatttcctgaagtcgacactaaagcgcaaccatcaggtatctcagtaactaaaggtgccgataaatatgatgatgatgatgatgagtttgaaggattcgaatcctccaacggtgcagccaaagaactaaatttatcagaatctcaagctattaaagaatggaaacaacgtcgtgatttagaaattgaagaaagagagaaattaaactccaaaaaaaaggaggaaatcattgaaaaagctaaatcaactattgatgatttttatgaaaattacaattccaaaagagataaccaccaaaaagaaattttactggaacaagaaaaattcattagcaaaagagatgattttttgaaaagaggtaccttatgggatagagtaaatgagttagtcactgaagtgggtgaattgcctggtgatgagagcagagataaaactagattcaaagaattattgacgaaattgaaaggcaaagaaaacgttcctggagcaggaggatatcaagaataa

SEQ ID NO: 6830 - DNA, 2562 bp, Candida albicans
atgatacaatcagaggatcataatcaacagccaatgccttcaagtaccgaatttagcatgaaggattcatgtttgtttactcaaccagaaacgaatatggaaactggaggaaatgctttcaatatgtcagaatcattattattcaaggatgtgatacatgactacgaaactaacgaattttctaaagcaaatcagactaatttacatgatctaatagcacctcaagaggatttggaacctaatcaagaaagcttaaaacaagattcacaagaacttgttgttgttgattttgatgacatggaccaagatttttcaccagcatctaaaccatcaaagacagtaaaactattttcaggtaaacaaattaagttagctccaagatctaccgagagagtaaatatcgatgagaagcaactttcaggaatatttctagatatggattctttaacgaacaaggccaacttgagaaattcatttaaagaaaatagaaagaaattatcagaccccccatcattgtcatccattaagcatgactctacttcgtctcaaatctggactgaaaaatataaaccaaatagttttatccaattatgctctgcaggtaatgatagacagtatagattgattttgcaatggttgaagaaatggtcacccgtggtgtttggtgacgatattttaaacacggaaaattcagatctcttgggaagaccttataagaaaatattgttaatccatggacctactggtattgggaaaaccactatttcacacattttggcaaagcatatgggctacaccgttcaagagttgaatgcagcaaatagtatggataccctaccacaggcttctggcggtgggtctactgcttacaccaatgcagcttctgcattaaaactcaaaatcgtcaatgccttgacatcaaattctattcactcacaaggtaagccgtcttgtttaataatagacgaaattgactccttggcaaatatcaatgacgttgtcaaagtgttgaatgatttggtccaagcagatcaccgcgccctcaacaaaaaactaaaaagactgtcgactgaggaaatcgaagccaagaagaaatcgaaaaagaaagacatcttcttaaatcgtcccattatttgtattgccaatgacatttattcccaacaatcaaatagatttggacccaatcctatggagaaattgagaccaatctcagaaattatccaatttagaaaaccaactacttctaaaacatcatccggtgcaaaaacgggagggaatgccatcaaatcagtcaaagattatttgatgcaaattaacaaacaagaaaatatgggacttgatcatcaagaaattggtgatattgtggaaatttgtgaaggtgacatcagagcatgcatcaatcatatgcaatttaatagtagaattgttgacactattgaaagaagaatttcgaaggatactcatttaattgatcgacagctttcttggtttgcaatgactgatcaacttttcaaaagagaccctcagttgtctaaggaagagaatcttgctcgcttgtttgatgggtttatgaatggggaaggtagggcattggcaagtaattctggaacatttgacagagtcctcaaaggcatatttgacaaatatttagacactgttcacattcaagacgactcgttaattaaaccttgtgaactcagtgattggataagttaccaatcgcggttcaccagaattaatgagactaatgaatactctccattagttttgttaaaggcctcatctttatttagcgatatccgagtccagccaggaaaccaaacattgattcctaatgccaagaacttagactttgaacacagtcaattattgaaaagtaataaaaatataattcgactgatagaaaatagattgctggtacaaatgagagtagcccttggtatgaacgctgagaatgctgcaagtttagttttaccatgcttggccaaaatattatctcctcatatgtcagctaaagtaaagtctgatttgaatgttacagaaaagaaatgtttagaaaggattgctggattggtgaaagaactcgacttgtccttggaatacctgaaagatttggaaactggcttatcgtcactcaagttgaatccagatttggatctgttgacaatttatgataactacttgacaactattcctgcagcatctgttgtgaagcaaactcagcttcgtcgtcaatcgttgttcccattgattacagcagaattggatagaattgatgtttccaaaaaatctgtcaaacgttcattagaagagaacactaaagaatcaaataacggagataaggctgctaaaagatcgaaaacccttgccactacaagccttaacttctttaaagggagatatgaagaagttaattccaaaactcatactgctaatactgatgaaggatcatctgatggagacaaggagtttaaaacttcaagaatatgggtaaaatacaatgaagggttctcaaatgctgtaagaaagaatatcggttggaatgatctctggatcgtttaa

SEQ ID NO: 6831 - DNA, 801 bp, Candida albicans
atggtaaaatcaattgcagtatttggtggaaacgggtttcttggacgtaaaatatgtgaggtgggagttcgaagaggctatgatgtgacatctttttccagacatggtgaaccacctgaagcagtagtacaccaaccatgggttgccaaagtaaattgggaacaggccgatattttccagccattgacatatcaagataagttgaaaaattatagtaccattgttcattcaataggtatattgtttgaaaaccaatcatataaaaaggccatgaattcaaactttaattttttgagtgatatccaaaacttggcaaacaatataatgggaagcaacccaatgcaaaaagataacgtgaagagtacatacgctgcaattcagcgtgattcagcagtcgtattggctgacaactatattaaatccaaggctgaacctccacgcaactttgtttatgtgtctgctgacaaagttcccccattagttcctgaagaatatatcactacgaaaagggaggctgaatttgaattaagctgtaaaaaggggttacggagtatatttttgagaccgggagcaatgtatgatgaaactcacgagggtggactaacaacaagagatgttttattacggggtttgagatttggtgttgggttaaaagaatgtattgttgggaaacatatagcaggagacctcgttaggccagtggtctcaactgaacaagttgcagagtctttatatgatgcattagacgataaagagtttgaaggtgtggtcacggttgaacaaatacagagtaaaaaataa

SEQ ID NO: 6832 - DNA, 1626 bp, Candida albicans
atggaggaaaaagcaagagctgatcatatttcaattactaattctaatgaattaaactatgatgattatagcaactcctataaaaatcaaccagaattagacgatgaattatttaatgaaaaaccagacctttcattatcttcaatctctagatattttgccactagattaaccacattattagatttaccattatatcatacccataaaaaatggtatgaagtgatcaatcctataccaggattaaaatcaatgagtaaatctgattggaatttttattgtttagggttttttgcttgggcattagatgctatggattttttttgtgtttcggtggctgcaccagagattgccaatacattaaatattagtgttactgatgttacttggggtgttacattagtgttgatgttaagatctgttggagcagttatatttggtattgcatcagattattttggtcgtaaatggacgtatatttctattgttactttatttgttgttgttgaagttggtactgggtttgttcaaacttatcaacaatttttaggggtaagagcaatatttggaatattgatgggggcaatgtaccccattgccatggttacagcattagaaggtcaaccaattgccgcaagatcagtgttgctgggattgtttttaccagggtattgttttggatatattatggctatggtttggtatcgagcatttgctggcacttataaagaaggtgaaggttggagatctttaatttggttttctggtgggttatcattgattttaattgtttggagattgtttactcctgaatctccagattatattaaaatgaaaattaaaaaggaaaaattcaatcaacaacaaagacttaaagaacaagaacaaaatggtggtgtcgccgtcaaggagaaaaaattttggcaaaaaatcgataaatcaattcttgttactttcaaaaccgaatggttgattttctcatatttggtattactttatgctggttggaatttcactacccatggatctcaagatttgtatgtaactatgattacaaaacaataccatgtggggcttgataagaaaactgttatcattgttgtatccaatattggtggtattattggtggtattatcatgggtcaagcatcagagttattgggtcgtcgattaaccgttgtgattagtattgtttgcgccggtgcattcttatatccatcatttttcaacccagacagaaactggcctgcttatatctttttaaatgcatttgtatttggatcatttagtgttggtccagcatatcttttagaattggttaattctactcatagaactttattgtccggtgttgcttatcaattgggtaatttagtgagttcagctagtgccaccattgaagcaaaaatcggggaaagattcccacttaaagaccaaccaggaatgtttgattatggtaaagtcatgtgtattttttgtggggcaattttcgcttatatgatctttattattttcttaggaccagaaaggttccatagagatttgcaaattcatgacacagacgaaatcgaagagttacaacaagatagctctagtaataacgagagtgttaaagaaagagtttaa

SEQ ID NO: 6833 - DNA, 1434 bp, Candida albicans
atggcaatttcgcccaaaataaaagcccttgttgatctagcaactgttattgcaatattgctcaacttttttgtttacttttatccagatattgtcaatcctactgagaaatgcaactggtacaatgctcctgaacaaaaatcaaaatacacattcttgaataacaatttgccgactgattgggtgaataaattggttttgaacttccccagcctcaaggaacaggaggaagttgtaagcaatgatattcatatgttactatttggggaccctcaaattaatggaaactggcccctgacgaaatatatcaagaggttggataattatggcaatgactattatttaggacacatatacaacacaatgaaaagaagattgaacccctcacatgtcactgtaatgggagacttgttttcgagtcaatggattttagattcagagttttacaaccgtacctaccggtatgtcgagagattgttccctcaaccattggaatacaagcaaaatgcgcttgaagtgcatgcaagacacgagaactataactggcaacagtggttagaagatgaaaaggcaatggatcctattcacagattccagtctcgtgtatataacgatgtttatgattgggtttatagaaacaggtcaaccccaaactatgatcaacccttatttatcaatttaactggtaaccacgatattggatatagtggtgatgcaacttggcaacatatggctagattccatttattgtttggccaaaacaactatgttataaattacaaaaagggctccccagatgaatggagaatagtggttttggattcactaacattagaagggccagctttgcaagaggaatttgtgaactacacttggtcatttttagagaatttgcgtgatagagaaaatccaaactttaaagggtctaccatcttgttgacgcatgtacccatgtataagaaagctggattatgtagagatggccctgaacacaagtactatataaacaatgagaaagagccctacaaaaatggtaaattgagatcgcacaatcatttagcctatgaaacaactcaaaaagtaatggatattgtgttccccaacaaaggcaagagtggaattatattaacaggtcatgatcatgaagggtgtgatgattggtacaattatatcaatggcgaatggatagcttcgaaggagaaacagtctgctgaacgtgaatctgtcagggaagtagttgtgcgtgccatgatgggagaatttgatggtcaaacgggaattttaactggtcattttgatgatgctcgtgatacttgggatttccatttcagttactgctcgtttgttattcaacactggtggtgggcaagcaaagttgctttacttgtagttatcttcttacaatcctttgtgaaactctttggtggaatataa

SEQ ID NO: 6834 - DNA, 1140 bp, Candida albicans
atggtgaagttacttctatccatatggatctcgatttactttatggcgggctcatcatttgcaagtagttcttatttagtgtcacttcattcccaagagactatcgatacattcatggcctacgacgcgacatacccgcaggatcttcaagttggcgaactaatcaattcaaaatttaagataggcaatttctcgggattttctggaagtttctccaaggatatcatcaaaaggttagaaaggtgccctttagtagatgaaattgttcctgatattacagttaaagcttatgatgccgtgtttcaagatctggctcctagacacttggcaagaataagcagaagaaaacgaatgaaaccaataaaaaagtattcctatatttacgaatctgacttcattggtaaaaaagtgagtgcttatgtaattgattcaggaattgcaattggtcatccagaatttcaaggtagagccagaactggtaaagatttcactgatgaagggccaggtgataacaatggtcatggaacacatgttgctggtttgattggttctcatacatatggtgttgctaagggtgtgcagattattgacgtcaaagcattaaattcaaagggaacaggctcgttaagtactatccttgttgcaattgaatttgccgtgaatcataggttgcgttcaggacgaatgggtgttgccaatttgtcattaggtgcgtataaaaacaaactactaaacaaagccattgatcaagctactcaaactggacttgtgtttgtagttgctgccggaaataacaacattaatgcatgtttaaccagtccatcgagctctccttatgcaataactgttggtgctatagacgactacaatgactcaattgccagcttttcaaattggggcgagtgtgttgatttgtttgcaagtggtgcttacgtaaagagtgtaaatattagaagtgattttagaccactggtattactggggacatcaatggcggctcctattgtcacaggcttggtggcaaatttgttaaatgaaggagttgatccagagcttataaaggggcaattgatagaaatgtcaacgaaacaccgaatctcgaaatcatcgctattcttgaaaaaaagaactccgaactga

SEQ ID NO: 6835 - DNA, 1683 bp, Candida albicans
atggtgtctaatactttgccggaacatgaatccaataccagtctacatgatatggagaaaaagcaattggctgatcagttaggtgatattcattacaagattctccccattaaaaaacttttaatttgtttattttcattatctttagcattatttttatcttttgttgatcagactagtgtaacaatagcattagccactataggcaaagatttgaatgcagaaacaacaatcaattgggctcccacggcatcattattggcaaattgtatatgtcaagtattatttggaagattatctgatattttcggcaggaaagtcatgttaataacttgtttaatttgtttatcattaggagaattaatttgcagctttgctaaaagtggagttgaattctttgtctttagagcattaactggattaagttgtggtggtatccaaagtctttgtatggtgatactaagtgatgttgtcactttgaaacaaagaggtaaataccaagggatattgggtgctagtgtagggttaggaaattccattgggccatttatgatggcagcatttattgaacataacacatggagaaatttctatcgtatgatgtgtcccataaatattcttgcatttgttattattgcaattttcattgatacaaagcaacaaaccaagcaattgaatcaattgttaagtaaatcagaacaatttaaaaaattggattatttggggatgttaattggttgctctggtttgactttattgttggtatctattagtagtggtggatcaacttataattggaatagtgcccctgttatttctatgtttgtcattgggggtatccttttgattacatttttatttgttgaatggaaagttcctgaattgcccatgataccacttaacctattttctagattttcgttggggttgattttgggttcaaactttttctttggaatggcatactatggatttacattttatattgcctattattatcaaatcgttcttggattagattctattcattcagcgattttgatgttgcccttagtgattcctcaatcagttgtttcggcgatagcaggacaaataataagttatactggacattacatctacgttattatatttggatattcactttggactttatcgtgtggattgacgttattatttgattcaaacactaattatggtgttattaccgtggtgttactattaatgggaactggagtagcatgtactttccaaccaacaatggtggctgcacaaagccaagcaaaaaaatcagaaagagcagttgtaataagttgtcgaaatgtcattagatctttgggtggtgctgttggtttagcggtggcttcattaattattaccaatagtttgttgaaggaaattaccaaacaagaaaaccgccaagacatatcttcaacttcgtcggtgccaacagggtatttaatgtatttgaaaactcatgtttattccaaagtcgatacaactcaattgacggccgatcaagtattgattgtcaggcaaatgtacatgcaagccattcgtaatttcttttatttgacaatacccttgttggcattgtgtttgattagcagcttatttgtcaaagataaaggactccagtgtatagatgaagaacctgaaaaagaggaaaaggagttgcaataa

SEQ ID NO: 6836 - DNA, 1479 bp, Candida albicans
atgtcatcttttgaattagaagaattgtgtcttgcaatgcttgatgagttgccagaattgagttatgattatttgggtaacaccattgtacaaaaattgtttactttggttgaatcatcattggttaagttgatgatggtcaaagaagttgctccttatttaactcaattgggaatccataaaaatgggacatgggcaatacaaaaaattatcaatttatgtcattcagactaccaacagatgtatctcattggtgctagtcttaagccttatgcagttaaattgtttaatgatcaatttggtaattatgtgattcaaggttgtatcaaatttggatctccattcaatgactttgtgtttgaagccatgttggataatttcttggaaattagtgtagggagatttggtgctcgttgcattcgtactatattggaaagttgtcatgattcaagtagtacttctccggtgacaaatgaacaagttttattggtggcaggtttgattatagaattcgccaatgagttagctgtcaattccaatggatcgttattaattacttggtatttggacacttttaaagattgtgattcgaaaattgaattattaatgtcaaaatttttaccaaatataagggctctttgtgtgcataaattggccaacttgacggtattaaaaattttgaataatagaattgatgataaatcaagagtggcaacaatggatgctattttcaacaataaagaaactttggaatatattttacaagagagtgataatagtaatactactgctggtccactttttatctataaaattttgagcaatcctactttagccgatttggttaaccaacatatccccaccatacgtaaaattttaatggaattgaatattgttaatttccaaaattataagaaattaatggatgaggttggtatttcaagtacaagaattggtagaaatggcagtactaaaagaaatggtgctactaatggcagtagtagaagaggagggaatatgagaggaaacaagcaagatggatatgttacacaggtgccaccaccgccaccacaacagcaacagcaacagcaacagcagcaatattttgtccaaggaatttctaatccaccagcttctttacaacaaggtcaacactccccaataaaacctcagcttcaacaacagcagcagcaacagcagcgtctgggatctccaccattccaaaatagatatattccaatgccacaagctcccctgcaatataataatgttacaccacaaatgtatatgaaacagatgtatgctcaacaacaagcacaaattcaacaacaattttatttacaacaacaacaacagcagcagcaacaacaacaacaacagatgctgccacaagagtttgcagttatgcaacaattggaacaattatcattaagttcagctgcattaggatataattccaatcctggaactccaacttaa

SEQ ID NO: 6837 - DNA, 1398 bp, Candida albicans
atgaaagttactaacgttatatcatttgctacagtggcttctacagcagtcagtttggtgattccagacatcacttcattctttagtagttttaatcaaattttaattccacaccatcaacaagcgctattaatcaatcaagatgcgcatttgccctctgatgacaaccaaccagatactaaaaccggtattctttctaatccattaaataaaataattccaaatcattacattgttgttttaaaagatgatttatcacaagctcaatttttacaacatcaaaattgggttcaaaatgaacatgtttctatttctagttgcaaactgaatgttaacaaaaaacctttagaattttttcaaattgataattttgttagaggttataccgggtttttcactgatgatttgattaataaaattttggaattgcctgaagtggcttttgttgaaagagattctattttccatactgttgagtttgatatccaaaaagatgctacctggggtatctcacgtgtcagtcatcgtgaaaatattgatgatgggaaatatttgtttgataatgatggtggtaaaggtgttactgcatatgtcattgatactggtattaaagttggtcatcctgattttgaagatagagcccaatggggtgcttcaatagctttccccaatattaagcaagattacaatggtcatggtactcattgtgctggtacaattggttctaaaacatatggtattgctaaaaatgtcaaccttgttgctgttggtgtgatgaatatgttgggtgctggatccacttctgatattattaaaggacttgaatttgttgtaaaactgcatcaagacgatgtcagagctaaaaagaaaggttttaaaggttctacagtcaatatgtcgattggtggaggtatttctgatgcattagatttggcagttaatgctggtactaaagccggattacatatttctgttgctgctggtaatgataatgctgatgcttgtcaatattcaccagcaagagccactggtccaattactattggagcatcaaatattcgtgatgaaaaagctagcttttccaattggggtagttgtgttgatttatttgcacctggtgaagatattgaatctacatttatttggtccgacaccactgttatgtcagggacttcgatggcttctccacatattgctgggttgttatcgtattatttgtcgttacaaccagatgttacttcggaattctacactcaagccattgaaccagctgatttgaaaaataagttgatcaaatatggtactaaaggtgtcttgactggattagattccgttagtccaaatattttggcattcaatggtgctggtggtaacttgaccgatttctggagtttatag

SEQ ID NO: 6838 - DNA, 1338 bp, Candida albicans
atgcttgtcgataactatatcaaggcaagttctataaaatttaatatttcaatagcaccatgtgtggaaatagcgagatatttgaaatcaaatcaacaacaacaagtacgactacaaccacatgaagatccaaaacaactactaagtcatcaacaacaacaacaaccagacactcaatatcattatcaaaatcatcaccacaacaagcagtatcgacaacgacaacgacgacaaacacaggaacataaacaacaacaaggtacaccaagaatacgtcgaccatcatcatcgttatcaccattatattcacctaaaaccaaaaaatcaacccctaataaaaccaccaaaactctactacataaatcatcaacatctccgacctcgccaccaccaccaaaaaagaaaaaatcaaagaatagaattattgttcctaatgaatttataaattgtgatcttgatattataataacattaatcaatcgaatgttaatttcattaatcaaattaaatgataataatattaataacaacaataataccacaaacattaataatccaacaccaccaactcgtttccatagtaaaacaccaccagcaatttcgattttttcctatattaatcgtcttacaaaattcaataatttaaaatctagtggattaatcaccatgatatactatatcgacatactttcttatatgtatcctcatttccaattaaattcatggacaattcatcgatttttattagttgccaccatgatatcacaaaaagcaatggaagattatttttataccaatgatcattatgcaaaagttggtggggtatctttagaagaattgaattgtttagaattggattttttgaaaagaatcgattggagaactataccgataaataatccaaatgttcaacaattgtattataataaattagtagaaatgacaggaaagatatctaatatggttgataataataatagcggtgatagcgacaacactgatactagatataaacatactaagtttattatggaaaatgaagatcctacagatgatgaagaagaggaagagggagatctggaagacctggaagaagatctagaggatgacgacgacgaggatgacgacgacgaggatgatgagttttatgatagtgatgaagatattaatagtgaagataatggtgatattgaaattgatgattatgaaatggaagaagaaaataattccaatgtacctgatttaccaaatataccaatgtataaatatgataataatgggtttagtatggatggaagttcttcacctcatttaaaaagaaggtatagtaaagattaa

SEQ ID NO: 6839 - DNA, 1131 bp, Candida albicans
atgataaggacattaattacaaccacaattataccaattattgcttacataataaacaataccccaagttatatatgggctataattgattttataatggatatttgttttttttgggtcaaacaattatatcaaatttataatcggaaagaccctctcaaggaatatgttaaacaattgaaaattgcacctaattataatgattggaaagaagttgcttatgaagttgataaattgaccaatatggatctttggcgacaaaatttcatatctaaacattatgattatgtattaattgatgaaagattgaaattattacgtgaagcaagattaaatcaaaattctcaagtcatgatgtcattattacgaagtggattaataagaaattttgctggagtggctcaaaaaagattatatttgaaatcttatatggggacgaaatttaaaattgaagaatatattaatgaagtattaaattgtttggattatttaaatgaagcattaaataatgataataatgatgaatatatcatgaatagtaaacaattaaaattggattttttccatgatgcaagacaatcatttggttgtagtgcattattattacaaggtggatcattatttggattatgtcatttaggggttgttaaagcattatattttaaaggtttaatgccaagaatcattggtggaagtgctgttggggcagccgtggcatctttagtatgtacattaactgatgaagaattaatccctattttagttaatattggtgatttaatgaaaaatatcgatttattaaatcatgaaattgatgaaagatatggtaatgttattgaaaatgttgttaaaaaaggttattctcaagaaattttattatttctaaagtttgttcgtgataccattggtgatttaacttttgaagaagcttatatgaaaacggaaaaaattttaaatatagtggttcatccaactaatcaatgtgttccttcattacttaattatataacggctcctaatgtaattatatggacagctatttatgcatctattggtactggagtattatcggatgatgtggcattatatgttaaagattttaataatgaaatttgttttacaaactcctga

SEQ ID NO: 6840 - DNA, 4215 bp, Candida albicans
atgactgacttttggttgaattatttggataatcctacattatctgtgttaccccatgattttttaaaacctgctaataataaatccgtggaaggtacttacacattcaaaattgataatggtagtactgatttcaaatttggcttggctgtatttgctgcattggtttacagattaaccggtgatgaagatatagtaattgccactgacgaatcggccaacactccagaatttattgtcaggttaaacttgacaccagaattaactttccaagagctcgtcagtaaaataaccaaagagtacgaaaacaacatttctcaaataaactacaaagcattatctgaggtttcacatagaattaaagaggctaaagggttagatgaaaaccctggattgttcagattgtcctatcaacatgctcactctaatcaacaattgaataccacagtcgagggatctattcgtgatttagcgatctacaccgatggaacaaaattcaccatttactacaatgccttattatattcacacgaaagaattgtgatatttggagaacaatttgcacagtatttaacaactgtatcgaacgataccaatactgttataactaaagtgaatttgattaccgactcccaaaaaaagaatttgcctgatccgacaatagatttagattggtcaggttacagaggtgccattcaagatatctttatggataatgcaaataaacatcctgatagaacatgtgttgttgaaaccgaatcattcttggattcaaactcaaaaactcgtagctttacctaccagcaaattaatcaagcttctaatgttgttggtaactacttgaaagaaacaggaatcaaaaaaggtgatattgttatgatctacgcttaccgtggggtagatttaatgattgctgttatgggtgttttaaaagccggagcaacattttccgtcattgaccctgcttaccctccagcaagacagaatatttatctttctgtggcaaaaccaaaagggttaattgggttagaaaaagccggtactttggatcaattagttgttgattatattggtagcgaattagatgttatttctacgatcccacaattgaaagttcaagatgatggtacattagtaggtggtaaacttgaaggtgcagataacgattgccttaacgattatcaaaaattcaaagatcaaccaaccggggtgattgttggtcctgattctaatccaactttatcattcacttctggatcagaaggtattccaaaaggggtattgggtcgtcattattcattagcctattatttcccatggatggctaaaagatttggattatccgaaaaagacaaattcaccatgttgtcgggtattgcccatgaccctattcaaagagacatgtttactccgttgtttttgggagctcaattattagtgccaactgctgatgacattggtactcctgggaaattggctgactggatggccaagtatggagcaacagtgacacacttaacaccagctatgggtcaattgttgagtgcccaagccaccactgcaattccaagcttacatcatgccttctttgttggtgacattttaacaaaaagagattgtttaagattacaaagtttagctgaaaatgtgtttattgttaacatgtatggtactactgaaacacagagatcagtgtcatactttgaaattaaaagtcgtaaagcagatcctacatacttaaagaacttaaaagatgtgatgcctgcagggaccggtatgcacaacgttcaattgttagtcgttaatagaaatgaccgctcgcaaacctgtggtgttggggaagttggtgaaatctatgttagggcagctggtttagccgaaggataccgtggattgcctgatttaaatgctgctaagtttattaccaattggtatgtcaacccagacaaatggatcgaacaagatgaagctaacaaaaattccagtgaaacctggagagaacatggctggttaaagccaagagacagaatgtatagatctggtgatttgggtcgttatttacctgatggtaatgttgaatgttgtggtagagcagatgaccaagtcaagattagaggtttcagaattgaattgggtgaaattgatactcatttgtctcaacatcctcttgtcagagaaaatgtcaccttggtgagaagagacaaaaatgaggaaccaacattgatttcttacattgttccaaaagattctccagaattgaaaacattcaaagctgatgttgatgattccatagaagaagccaatgatccaattgtcaagggattagtcgcttacagagaattgattaaagacatcaaaggatacttgaaaaagaagttggcatcctacgctattccaacaatcattgtaccattagtgaaattacctttgaatcctaatggtaaagtggacaaaccgaaattaccatttccagatactgctcagttagcagcagtcgccaaattaagtgtttctagtcacgatgcccaagctgctgaagaagaaaacttgaccaaattggaagagcaaattagagatttgtggttagatgtgttaccaaaccgtccagcaacaatttccaaagatgattcattctttgatttaggaggtcactctattttgggtaccagaatgatttttgagttaagaaagaaattaaatgtggaaatcccattgggtgtcattttcaaaaatccaacagttgaacaatttgccaaagaagtcgaaaaggtgatcaaaggaggccaagatttccaattggctgatgaaggtaaaactattcaagaagagaataaagatgtcgctgattctcaaagcgaaaacctaaactatgctgaagatgcaaaagaattatcaaaatcagcacttttggaatcatattcatctttgaaacagcttccatctggatcaattaacgtttttgttactggtgctacagggttcttgggttcttttattgttcgtgacttgttgactgcacgtaacaaaaacttggatatcaaagtgtatgctcatgtaagagcatcttccaaggaagctgggttacaaagattacgtcaaaccgggatcacttatggtatttgggatgaaaattgggccgaaaagattgaaattgtgttaggtgatttatcaaaagaaaaatttggattggataattctcaatggttagatttgactaataacattgatgtgattattcacaatggtgcctttgtgcactgggtatatccatactctcagttacgtgatgctaatgttattggtactatcaatgttttgaacatggcaggtgaaggtaaagctaagttcttttcatttgtttcttcaacatccgctttagatactgattactttgttaatttatcggatgaattattagcccaaggtaaaaatggtatttccgaagctgacgatttacaaggatcggctaaagggctaggaaacggatatggacaatccaaatgggctgctgagtacattataagacgtgctggtgaacgtggattaaaaggatgtatcaccagacctggttatgttactgggttttccaaaactggtgcttccaatactgatgatttcttattgagaatgttgaaaggatctgctgaattggggttatatcctgatatcactaataatgtcaatatggtccctgttgatcatgttgccagagttgttactgctactgcattaaacccaccaagtagtgaagaattaactgttgctcatgtgaccggtcatcctagaattcaattcaacgactttttgggatgtttgaaagcatatggatatgagataaacccagtagactatccagtatggaccagtgcattggagaaatttgttactgaagaaagtaaagaatctgccttattcccacttttacattttgtgttggataatttgccacaagacacaaaggctcccgagttagacgactctaatgcagccaaatcattaaaacaagattccaaatatacgggagaagattttagtgctggtaaaggtgtggatttggatcaaactggtgtttacattagttatttgatcaagattggattcttacctaaaccaactggtacaggcgagaagaaattgcctgaagttgagattagtgatgaaagcttgaaattgattagtggaggtgctggtgcacgtggatcagctgccaaataa

SEQ ID NO: 6841 - DNA, 2889 bp, Candida albicans
atgagatcttctggctatttaaattccaacaatggatcatcgtcatctttggaatcgactaatgtaaacaaatcaaccgataaaaatcagttgtatctcaaagttgtttgcaattgtgctacagatttagtaccacaagatactacaggaactggcagtgagtccaaaaaagcttattcttccagcaaatcaataaatccagttttggttgtccaattaaacaataccatcaaatcaacctccaagaaattaaataccaatcaacccagttggaatgacgagctttatatgccattaaagaaccaagacgattcatctttactaatattctctgtgtgggataagcatacaagatacaaaaactatttaggtgaattgagattaaacgtaaaggatattttcgtcgataatggtaattttgtcgacaagacagaattgaaatggtaccacttgaattccaacaccaaatatcattcatttgtcacgggttcaattttagctggttttgaattggtaatcaagaataagaagaagcgattccacagctcctataacgataaattccagcaattatctatagattcagatgttgagtctgcatttaaaaaatggttatccagtttgactaaaccaacaatttattctgtgaataacaaaataaatcccaatgatcaaggtttttatgatgatgaattggtcaatgaattcgagctagaatctgttttgacagagagatccaagaaaagccatttgaatgttccaggaggaaatggtctattgtcggttcctggtgatgattgccatgatgccggttccttttcagatgcatcgtttctttcagatggtggatatgcaagtgatgcgtctgctaacttgtttgaccaaaaagagacatcgtcagatctgaagaaatcaagaataaagtctaaaatgagacttcgtagatcaaaacaagaatatgaaaatttcgagttggcaagtcgccaggtacttggtgttgtatttattgaaattgtctcgtgtgaagatttaccaccttacaaaaattttactcgtacatcttttgatatggatccctttgtggttgttagttttggtaagaaaacttttagaactggctggaaaagacatactttgaatccggtttttaacgaaagattagcttttgaattgcttcctcatgaaagtaatttcagtattcagtttttagtacttgataaagatcatttctcgtttcatgataatgtggctcatatttctttgccgttgagaacattaactgagtatgcaacagcaaaaccaactgaaggtgacagttctgatgtcaataccagcgatagtactagttttagtcaaacaggaaatggttttacaactgaggatacagaattcccagaaaatgattcggtacaaattattgaaaacgagactccaagcaacaaacaaagtcgtaaaagatacttatctcggaaaaaggttgttggaacacaattagatttgaagaaatttaaagccatgtctttaagtttacagttgcatgatcaaaaatatattggtaaatatgcacccaagttaaaaattagagttaggtttgaaacttatacagaattgcgtaagaaattttggagagttttattagaagaaagtaattcgaccccagaaaatcgcgacagttgcgattacattgaattaatttctttattagatacattgggatgtgttaatagtgatgaattggtggaattattttattccaatttggggaaactgtcttggggaggtgatttattaacttttgatgaaatcattgatcaaatggaaacctacgtcaatcaaaatgttgagagtggtaaagttaaaatatttgaatttgaaaagtgtccaatttgtaatgaaaaaagagtttctaagaagcaagatctagacataattactcattttgctatatgtgctagtaaggattggagtgtggttggtaaattacttctgtcgtcgtatgttacacctactcaggctacgaaaaaatggtttaccaaggcattgattaagttgacgtatgggaaatacaaactaggtgggaattcagccaatattttggttcaggatagaatgacaggaattatagtagaagaaaaaatgagtgtttatgtgagattgggtataagattattgtataagggtttagataaagctagatctaaaagagtgagaattttattgaaaaatatgtcaatcaaacagggtaaaaaatttgatgcaccacaactgaaatcagatatagcttcatttattaagtttcataaacttgaccttgacgaatgtgaaatagatgacccatcgcaatttgctacgtttaatgactttttctatcgaaaactaaaaccgggtgctagagaaatagaggatgaaaaaaattccaaaattgttactagtccggcagattgtcggtcggtggtttttgaatcaattgataaggcaacacagttgtggataaaaggtgcagggtttactatacccaaattgattcataatgatcatctgatgcgtgtatcttcctatacattgggtattttccgattagccccacaagattatcatcggttccattcaccagtcgatggagttattgaaagtattaaacatattgatggtgagtattataccgttaacccaatggcgattcgatcggaattggatgtatttggggagaatgtcaggaccattgttacaatcaaaacaaaagattttggaaatatatactttattgctgttggtgctatgatggttggatcgattgttcttacacaaagatacaggatacgagatttcgaaaggcgaagaattgggttacttcaaatttggagggtctactgttttattattaattga

SEQ ID NO: 6842 - DNA, 1569 bp, Candida albicans
  misc_feature (462)..(462): n=g, a, t or c
atgcagtcacaacttgtgcaaccaacaatcgaaacattgaagaagactattgatgccaatagttctttgaaagaaagtccaaatgtatatccagtatataaatatgtgccatataatgatataactattcatcaagcatatttgaaattagccaacttgaatgattcaaatagaacagaatcatttctttttgaatcctcggttaaaggtgacactgttgatagatattcatttattgggatacaacctaccaaaatcatcaagacaggtgacaatcctaagcaatttgctgatgaattttgtaatgtggatcccataactgttttggaaaaggaattgtctaagtataaacaagcaccattgcctggtttgcctaaattcaatggaggtgccactggatatatatcttatgattgtatcaagtattttgaaccaaaaactaaacgaccaatgaaagatgtnctgggattaccagaagcggttttaatgttttgtgatttggttgtggcttttgaccatgtttaccaaagattccaaatcatttacaacatcaaaatagacgacaatagagacaaaataaatgaagatatagaaagtttatataaacaggccacggaaaacattgaaaaagttgaaaaagttttattaaggaacacatctagtgaagaaattgctccaaaacaagggccaattaagttgggacagaatttcacctctaacattggtcaagaaggttacgaaaaacatgtcaccactttgaaagaacatattttaaaaggagacattattcaggcagtgccttcacaaagaattgctcgtccaacatcattacatccatttaatatatatagacacttgagaacagtcaatccatcaccttacttgttttacattgatttattagatttccaaatcattggtgcctcaccagaattattggttcaatctgacactaaagggagaattgttactcatcctattgctggtacaatgcctcgtggtaaaaccaacgaagaagacgaagaaaatgctgagattttgagagcaagtttgaaagatagagctgaacatattatgcttgttgatttggcaagaaatgatgtcaatagagtgtgtcaacccaccacaaacaaagttgacaaattattgactattcagagattttctcatgtcatgcatttggtgtctgaagtcagtgggactctacgtgaagatcaaacaagatttgatgcatttagatctatattcccagcagggactgttagtggtgctcctaaagttaaggctatggaattgattgcagaattggaaaaggaaaaaagaggtgtttatgctggtgctgttggccattggggatacgatgggaaaactatggacacttgtatcgcattgcgtaccatggtgtataaagatggtgttgcctatttacaagctggaggtggtattgtctttgatagtgatgaatatgatgaatacattgaaacaatgaataaaatgaaagctaataacaacaccattgtcgaagcagaaaagatttgggctaacaaagttggccaattagaggggtaa

SEQ ID NO: 6843 - DNA, 1734 bp, Candida albicans
atgagattcaaaatcaggggacctttaattcagcttagatataaatctacaaagccgttctatataactacacctatatgttatgtcaatgcagcaccacatataggccacttgtattccatgttgatagcagatacaagaaacaaatgggagaaattaaatccactgaaagagtcatttatgttgactggtacagatgaacatggtttgaaaatccaactgacggcggaaaagcttgggttggaacctaaggtattggttgataaagtatcccaaaacttttccaaattggcagaacaatttgatgttaattatgacagattcataagaaccacagataatgatcatattgagctagttcgttacttttggaacttgatgatggaaaaagggtttatttacactgatactcacagtggatggtattccatcagcgatgaaacatttttcccagaaacacaaatagaagaagtggtgaagaatggaaaagcagtgaaaatatccagtgaaactaaaaatgaggttgtataccagaaggaaactaattattttttcaagttgtcgatgttccaagaacaattgattcaatttttaaaacagaatcctgaattcattaaaccaaaacatagatatcaatttattttgaaagaactagaggacactaagttacctgatttgtcaatctcaagaccatcttcccgattgaaatggagtattgaggtacctaacgacagcactcaaaagatttacgtttggttcgatgcgttgttaaactatttgacggccacaaaatttccccacggttttgaggttcaagattcaaaatttgtcactcctgaaaatagtatatggccagccactcatgtgataggaaaagacattatccgtttccattgcatctattggccaatatttttaatggcagctggtattgaattgccaaaacaagtgatagtgcactctcattggttgtgtgatgggttcaaaatgagcaaaagcttgggaaatgtggttgatccaatggaaattagtgagtattatggtgtcgacccagtgcggtttttccttgttgaaaactcaaacatcgatgacgattgtaaatttagtgaagagttattacaaagatctagagatgctgttttgggaaaatattgtaacttaatttcacgaattggcgggaaaaactttagcattgaagaagccgtgaaaagttcagcaagtggtgaatttaataacatacgtgaaataattgaaacctacacaattaataaggattctgttgagggccttttatcttcttcaagcaaattgacaacagatttaaatgatttatataatcagatggatcattatttcacaaattttgactacattagagctattcaatgctggtggtctgttattaatcaagccaaccaaatcttccagagtgcagagccatggacatacgttaagttaatcaactctcctgagacccccgctgaattaaaggaaaagtacagaatccttaataactattttgtttacttatgtgctgagaccacgagaatatcatcaattctcatacagccagttatgcctcagttgtcaaagaaaattcttgatagattaaatgtttctggacgtacatcagagtttactacatttggtgcagatttacaatatggctctggtgccaattccaagtcacataaagtccctctagaaaaaattgctccaagagatattaaatga

SEQ ID NO: 6844 - DNA, 1410 bp, Candida albicans
atgtatgaatctaatgatgaagaatcagatcaaataaaacaagatcgattaagaaatcgacaaattgaatatgaattatttcggacaatactaccttcagatatatatatttaccccccatctcaagattatgagaatgaactcaataataatgaccacgtaaataaagaatatttaataactggtagactaatagatgtgaaattagacgatggaaattttattcatgaattttatcttgaaaataataatgaatctacatttggtaatcaacaacaacaacaacatatagtaattattcatggatatatggcagctatgggatattttattaaaaatgttgaagatgtaataaagattcctggggtaagattacatttaattgatttaccaggatttgggaattctagtcgacctaaattccctaaagaattcatattggaacctaattcattatcagccaaaattaatcaaattttacaaattgaaaattggtttattgataaaattgaaaattggagaattaaaagtaatattaatcaatttaaattgattggtcattcaatgggtgcatatttatcttgttgttatttaatgaaatataatttgagtacttctggaaatgaaaatgaaaaattggtatcggatgtgattttagttagtccaatggggacagaatctaatgaatttagtttaattaatgataaacgatttcaattcaatttacataataaaattgatccatttcaagaattacattttgagaatgaaaacgaaaatgaaaatgaaaacgaaaatgaaaaccaattagttcctaatgatgatgatgatgatgatgatataattataaatgaagaaatcacgaaaatttggtctaaattgggtaaacccaaatttcctaaaaattggttattaaaaaaactttggtcaagtaataaatcaccatttgaatttttacaaaattttggaccattttattcgaaaattttatcatattggtcatttcaaagatttaaaaatttcgaaaataatcaaaatacaattgatttaatattaaaattacataattattcttattcaatttttaatcaatttcaaggatcaggagaaattgctatatcacaattaattaccccggaaatattagctaaattacctcttgccgatcgaggattaattgattttttagtagaaaataatattaataatatgtggatttatggtgataatgattggatgaataaaaatggaggtgaatatatttatcaacaaattaaaactaaaaatgaaaaaattactcaatttaaagtggttgaaaaagccggtcatcatatatatttagataatcctcaaacttttaatcaaatagttattgatttcctaaaacttaaccagttagatttcttataa

SEQ ID NO: 6845 - DNA, 1026 bp, Candida albicans
atgctgaagggagatttagaagaattagatattcaaaagcttatagttgaaaaaaggcttgaacaatcaaatggttcaggttttgccaccatgaagcgtaacaaaagagcacttggaacatgtttatttgtatcgttaggtgggatcttatatggttacaatcaaggtatgtttggacaagtttcaagtatgcattcttttggtgaaactgttggtattggtaaaatccaagataatccaacattacaaggtttattgacatcaattttggaattaggtgcttgggttggagtattaatgaatggttacgtggccgatgcattgggtcgacgtgcttctgttgtcatcggatgtattttattcaatattggtgttattattcaagcagttgctcgtgatgccgattatggttatattttgggtggacgttttgttattggtcttggagttggggtactttccatggttgtaccattatataattctgaaatttcgcgagctgaaataagaggagctaacactgccatctatcaactttccattacttttggtattatgatttcctattggatcacttatggaactaatttcattggtggaacaggtgacaatcaaagccaagcctcttggttagttccaatgtgtattcaagcggcgccagcaataatattggcagtgtttatctattctttcccagaatcacctagatggttgatcaatgttggtcaagaagataaagcattagaagttcttgcttggttacgagaaactgaacaagaaaatgttggtttgcaaattgaatttttggaaatgaaagcacaaaaaatatttgagcaaacacttgaaaccgaagcttatccacatttacaagatggaacaaaaatgtcaaaattcaaaatcaatttgaaccaatacaaatcaatggttacacatttaccaacatttaaacgagtctcagtggcttgtttgactatggtatttcaacaatggacaggagcgtatgtatcaaatactttttttttttga

SEQ ID NO: 6846 - DNA, 1074 bp, Candida albicans
atgagcgttacttcatttaaaataaaggttccagcatcatctgctaatataggaccaggattcgacgttttaggtataggcttacaactttatttaaccattactgtcactattgatcctagtattgatacttcatcagatcctcaccatgccttattaagttatgaaggtgatgggaaagttccatttgaatctaatgaaaatttaattactcaaacggcattatatgtaatgagatgtaatggtattaaagatttcccccgaggaactcatattcatgttaataatccaattccattaggtcgaggattaggatcactggcaagtgctattgttgctggagtatatttaggtaatgaaattggcaatttgaaattagataaatatcgattattagattattgtcttatgattgaaagacatccagataatattgctgcagctatgcttggaggattcattggatcttatcttaatgaattatcttcagaagattcacaattaataactgtcccattagactacattttgccaaaagttaaaaatggtgaattgattacgccgcaaaataaaatcgtttcacaacaaccaccaaataatattggtcaatatgttgaatataaatggaataaaaagattaaatgtcttaccataatccctaattttgaattatcaactgatctttctcgttcagtattaccaaaaaattatcaattaccagatattgtttataatttacaaagaattgccattttaactactgcattaactcaagatcctccaaatcataaagttatttaccaatcaatgaaagataaattacatcaaccttatagatttgggttaattccgggattaaatacagtgttacagaaaataactcccgaaagttatccaggattatgtgggatttgtttatctggtgctggacccacaattttgtgtcttgctactgatggttttgaaaaaattgctaatgatgtgattgaaatatttaaacaagaaggtattgaatgtgattctaaattattagatttagcttatgatggtgcaactgttgaatatggaagttag

SEQ ID NO: 6847 - DNA, 1425 bp, Candida albicans
atgccactcttcctacaattaattccctccgccccttccttttcatatactatctcccttccttcttccttctccttttattttttcaattattacaatcttatgtcatttaaaggattcaaaaagggtgtccttagggccccacagacaatgcgtcagaaattcaacatgggagaaatcacccaagatgctgtttatctcgatgctgaaagaagattcaaagaaatcgaaatggaaacaaaaaagttgagtgaagaatccaagaaatatttcaatgctgtcaatgggatgttagatgaacaaattgattttgccaaagccgtggctgagatttataaaccaatcagtggtagattatcggaccccagtgctacggtaccagaagataacccacaaggtattgaagcatcggaactgtaccaagcagtggttaaagatctcaaagataccttaaaacccgatttggaattgattgaaaaaagaattgttgaaccagcacaagaattattgaagattatacaagctataaggaaaatgtcagtgaaaagagaccataaacaattggatttggatcgtcataagagaaatttttctaaatatgaactgaagaaagaaagaactgttaaagatgaagaaaaaatgttcagtgctcaagcagaagtagaaattgctcaacaagagtacgattattataatgatttgttaaagaatgaattgccagttttgtttcaaatgcaaagtgattttatcaaaccattgtttgtttcattctattacatgcagttgaatattttctacacattatacactagaatggaagagttgaaaattccatattttgatttgtctactgatattgtcgaagcttatactgccaagaaggggaacattgaggaacaaaccgattctattggaatcactcatttcaaagtcgggcatgccaaatccaaattggaagccactaaaagaagacatgctgctatgaatagtccacctcctaccggtgccagctctattgcatctacaggtactggtggtgaattacctgcatactccccaggaggttacaaccaaccatatggtgatagcaagtatcaaccaccatcttctccagcaacataccaatctccagtagtagcagccactgctcaatctccagctacttatcaatcgccagtggctactggacaacctccatcatatttaccacaaactccagccagtgctccaccaccacaagttggtagtggccttccaacatgcacggctttatacgattatactgcacaagcccagggtgacttgactttccctgcaggagctgttattgaaattatacaaagaaccgaagatgccaacggatggtggactggtaaatacaatggtcaaaccggtgtgttccctggtaattatgtgcaattatag

SEQ ID NO: 6848 - DNA, 1713 bp, Candida albicans
atgtccatgtccacacctatgcccacgcccactcccctcgacaccaaaaaaatgccaccaaaggagaaaaagaataaggatgacagaccttataaatgtacattttgtgataaggctttccatagattagaacatcaaactagacatattagaacccacacgggagaaaagcctcatgcttgtacatttccaggttgtgttaaacgattcagtagatccgatgaattaactagacatttaagaattcataccaatccaagttcaaggaaacggaaaaataagaatcaaaatatgatgattaatcccaatgctactacagctacaactacaggacctgcgggtatggccattccaaccagtaatttacctcctggttcttatgctatacctaatacagctattccattttctatagatcgtaatggaaatcatgtatatcatcaaccttatccagtatattttgtgccccatgctaatggttatatgcaaccaatggtacaaactcaaggagttacagttgttcctaatactgatcagcaacagcaacaatattaccaacaacaacaacaacaataccaatttcaagaacgtccacaacatcaacaacagcaacaaacaaatattggaaccaataatcatttgcaacaaaatggatcggcagtattttcattaccttcatcaccaactatggcatcggctcaaacaccaaattcaggtacaagttcatcatctgaaagtattaaattagctccattgtcaataccaaacaacatatctcgttcacaacaacaacaacaacagcagcaacaacaacaaattcctaaatcggaatcttcaactagcctatattccgatggtaataaattattcagtagaccaaattcaacattacattcattgggttcatctccagaaaacaataatgccctgggtccattaagtggagttccaactccatcattttctaatttgaatgattatttccaacaaaaaagtaacagcaataattctcgattatttaatgctagttcatcatcattgagttcattaagtggaaaaataagatcttcttcatcgactaatttagctggtttacaaagattaactccattaactagtactacaaacaatacaaacaacacaacaacatctaatactaataataataatatgacaagaccaagtataataccaaaacaaccatcttctacatcattaaatttagaattttataatggcaacaatcaacaacaacagaattatcatacccataagaaatctcgaccaaattcaccatcacaaaccccaattcatttatcaagttcacgtaaaagcgctaataatctgtttataatatcacctaatgaaaccccattacaaactccattacaatcaccacaattaaaaccatatcaagatcaaccaccaactaatgtcaatatcaatgttagtgcaccatcagatacatttattggaactgctgttactgaaaaattaaataatattagtagtattgctggtaatggaacacaattaccaccaattagatcagtattaagttttacttcattggttgattatcctgatcctaaacaaaaaaatgttgctccaccagtagtagatactactaatgttgctagaggtgaaactaatggaagtaatggtaataattcaaatgctaaaccaatgagtttaaccaatttattaagttaa

SEQ ID NO: 6849 - DNA, 1635 bp, Candida albicans
atgagaaaagaattgaaatgcattatttgggcccatgttggtctaattgtttatctattatatttatcatttgatttactttcattattaaatgatgatattttcagtgatgcattattagacgttgaaattaatcctaaccctagcacttcattaaataaaccagccattattcctaagattatccatcaaacttataaaactactgatattccagaaatttggaaaccaggtcaacaagcttgtatcaatcttcatcaagacgattatcaatatttcttatggactgatgaactggctcgtgaattcatcaataaggaattcaactggtttattgatacttgggataattataaatatcctattcaacgagcagacgctatacgttattttgccttgtattattacggtgggatctatattgatttagatgacggttgtaaacgtaaattagatccattactcacggtaccagcttttgttcgtaaaactgcccccacagggatctccaatgatgttatgggtagtgttcctaatcatcctttctttttgaaagtaattcaagatttagaaaaatatcaacgtaattggttggtgccgtacatcaccattatgatgtcaacaggtccattatttttatcgatcatgtggaaacaatataaacgttggggtgttcctgaagctgggaaagtgcggattttattaccccaaaactataaaggaactacatcttcatattttgccatagttagaggctcatcttggcatatgggtgatgctaattttattaaaagtttgggtgatcatttggtattggcagtaattggtggatttttacttggtttattgattttatttgtggaatatttgttttattcttgggtgatttcaagtcaatgcaaaagattaacgagtaaacttcttagttttacttgggccatattaatgggggttttaagatttttccatttagataaacttctatctaagtgtgatttttggagtcgttcgacaaagtatgaagaaatgcttttaccaaaagatagcaatgatttgaaaaatatcaacaacaataacaccagcaataacaacactaatggtggtgacagtaacaataatgacaagagtgactataataacaacgataataacaacaataacattaacaaccacactggtaaaactagattatcatcaattttcaatattttgggtggtaaaacaaaggttaaaagaagaaatcgtaaagattcaaacttgcctattgaaattgacgttttgagtaaacttctagatgataccgtgataatagacgcatcaactactgaaaccccaactaaccctgtttctccaactccatcaccaatttctccaaccattaattcaaggacttctaataatgaacttttaattccaaccaataataataataataataataataatactaatgataatactaataatgttaataatattaataatagaaccacttgcgatgatcaatcaactttacttccttattcgactcggttgtcatcatcttcctcgtcgtcatcatcatctccttcatcttctacttcttcattgcctagtcatgaaactataatgaaattaaataatgatattgtttaa

SEQ ID NO: 6850 - DNA, 4656 bp, Candida albicans
atgtctattgaaaaggtgccaattttgggtaaggaaactatccatgttggttatggtattgccgaccatattgtcagggaagtgatagccaacttggcttcttcaacttatgttatagtgactgacacaaacatggcaagaactccccaatattccaaattgactgatgatttcaaaactaatttgtctgaaaaacgtcctgaatccagattattgacttattgtgtatcaccgggtgaaaacaacaaaaacagagctaccaaagctgcagtggaagattttcttttacaacaaggttgtaccagagacaccgtcatattggctgttggtgggggtgttattggtgacatgattgggtttgttgccgccacatttatgagaggtgtcagagttgttcaagttccaactacattgttagccatggtagattcatctgttggtgggaaaaccgccattgatactccattaggtaagaatttcattggtgctttccatcaacccgaatacgttttctgtgatgtatcctttttagagactttacctgctagacaatttattaatggtatggctgaagttgtgaaaactgcggccatttggaatgaagaagaattcaccagattagaaaacttttccaagaagtttctttctgtcgttacctccaaaaaaccagatttacagtcaattaaggctgaattagtgaaaaccgttttggaatctgttagagtgaaagctggtgttgtgtcatctgatgaaaaggaagctggtcttagaaatttacttaattttggccatactattggtcatgcaattgaagcggttttaactccagaagcattacatggagaatgtgtttccattggtatgattaaggaagctgagttgtctagatatttgggtatactaccacctgttgcagttgccagattgtcgaaatgtctcgttgcatacggtttacctgtgtctattgacgataaagaattcttgaaaaaagtgggaccaaaacgtcattatgttgaaatcgatattttgttgaaaaaaatggccattgacaagaaaaatgatggtagtaagattagatgtgtcttgttagagaaaattggtaaatgttaccaattgaaagcacatcaagtatccaaacaagatttaagttttgtgttgactgatgaagtgttggttcacccattcaccaatccacctaaagaaaacataattgttccacctggttccaaatctatctccaatagagcattgattttagctgctttgggtaatggtactgttcgtgtgaaaaatttgttacattcagacgatactaagcatatgttagatgctgttgcttctttaaagggagctgaaatatccactgaagataatggtgaaaccattgtagttaaaggaaatggtggcaacttggtcacatctggcgaagaattgtacttgggtaatgctggtactgcttccagatttttgactactgtagcttcattagtgggcaaatcacaagctagtgatgatgttattttaactggtaacgcaagaatgcaagaaagacctattggaccattagtggatgccttgggatctaatggttctgagattgagtatttgaataagcagggttcattgccattgaaaatcagtgctggcaatggattgaaaggtggaagaatagaattggctgcaacaatctcttcgcagtatgtttcttcaattttaatgtgtgcaccatatgctaaggagccagttactttggctttagtcggaggtaaaccaatttctcaattatacatagatatgacatgtgcaatgatgaaatcatttggtattgaagttaccaaatcaactactgaggaatacacctatcatattccaaaggggacatacaagaatccatctgaatatgtcattgaatcagatgcgtcatctgcaacttatccattagcatttgctgctatgactggaacatcctgtactattccgaacataggttcttcctcattacaaggagatgccaaatttgctgttgatgtgttgaaaccaatggggtgtaaagttgaacaaaccacaacttcaacaactgtaactggtccgccgagaggtcacttgaaaccattacctcatgttgatatggagccaatgactgatgcatttttgactgcttctgttgttgctgctgttgctaaaggcggttcttctacttctataactggtattgctaaccaaagagttaaagaatgtaatagaattgaagctatggttactgaattggcaaaatttggtgtgccagcaaatgaattacccgatggaattgaaatacatggtattgatattgaagatttgaaaacaccagaaatttctaaaagaggtgtttcctcctatgatgatcatagagtgggtatgtcattttcattattggcaggtttgtgtaaagaacccgttttgattttggaaagatcaaccactggtaagacttggccaggttggtgggatatcttacattccaaatttaagattgagcttgatggttatgaaccaccattcaatactgataaacatgtggataaatctagtgataaaagtatcattgtcattggtatgagaggcactggaaaatctactttatctgaatggttggcttcctttttggggttcaagatgttagatatggacaaatatcttgaagagaaattgggcactggtatcaaatcattgattaaagctaaaggttgggaatatttccgtcaagaagaagcaattgttgctaaagaatgtttcaccaagttttccaaggggtatgtactttccactggtggaggaattgttgaaggtgaagatgccagacagcaattgaaatcttatgctgataatggagggattgttttgcacttgcatcgtgatttagatgaaactgtcactttcttggctgctgatacaaccagacctgcttatagcagtgaagttcaagaagtatggttaagaagagaaaaatggtaccatgaatgttctaactaccacttctattccagtcactgtagtactgaggatgaattcaaccatttgagaagatcctttgtaaactacattaaacttatcactggtgctgaaagacctgttgtgccagttggtagatcagctgctgttgtcttgacatcaccggatttgaatgaagttgttagagatttggaatctattacaattggtgctgatgcagttgaattaagagttgatttatttaaggatacttctgctgaatttgttgctgcccaaattgctgtaataagaaagcatgccgatttaccaattatttacactgtgagaactatgtcgcaaggtggtaaattcccagatgaaaatgttgacgaattaaagagtttgttgttacttggtatcagattaggtgttgcatacgttgatcttcaattgactgctccgaatgaactcattgaagagattagcagtaagaagggtttcactagagtcattggtacttatcaagatataaatggtgaattgaaatggaacaatgttgaatggaaaaacaaatataatcaaggtgtttccatgaatgctgatattgtgagactagtcggtaaggcaaactcaattcaagataatttagatttggaaaactttaaaaagcagaatactttaaaaccattgattgctttcaatttaggttctcaaggtaagttgtcacaagtattaaatggaacattcacccctatttcccacaaattacttccaaatgatgaagagttcttaacaatcggcgaattaaatcaaacttattttgatattggaggtttcactgctaaaaaattttgggtcattggttcacccattgaacattcaagatcaccaaacttgcacaatgcagggtataaagcattgaatttgccttaccaatttggcagatttgaagctacagatgttgatgttgtttatgataacttgatcaataaaccagactttggtggtttagccatcactatgccattgaaattggatatcatgaagtttgccactaaactatctgatgcagcagagaccattggagccgtcaacacattgattccaattgaaggcggatattttggtgataacactgattgggtgggtattagtaattctttcataagagcaggtgttccacctaagctgagctcgaatgggttagttgttggtgcaggcggcacttctagagctgccatttatgccttacatcaaatgggatgtgcaaagatttacttggtgaatcgtactgctgctaaattggaggaacttgtcaagtcattccctaaagactataatcttgagattgtcgaaaccgaacaacaagccgataaagcaagtaaagtcctgttggcagtgtcttgtattcctgctgataaaccattagatggagaagtgttgaagaaaattgagcgaattttatctaatggaagtgaacaatctgctggtttcaagccaaccttattggaagctagttacaaaccaagagtgacaccaattatgaagcttgctgaagaacaatataaatggaaagttatcccaggtgttgagatgttggtaaatcaaggtgatagacagtttaaacttcatactggttttactgcaccatatgagattattcatcgtgctgttgttgaggaataa

SEQ ID NO: 6851 - DNA, 1647 bp, Candida albicans
atgtcttcattttctcctgatattaaaaaaactattgaggttgaagttgatgcatcttctttccatagtgattctgttgatttcactaaagatgatatacaagatgctgaatctattttccataatgaaaaacaattatctgaaggattaaataccagattaattggtatgattagtttagttggtgtttttggaaccggattatttttaagttcgggtggtacattagctacagctggtcctgtggggatgatacttgcctttgttcttgtgggtattgttgttgctgctaatcaaattagtacgttagaagttgcttgtttaatgccggttactggatccaatattagacatgttgaacattttgttgataaaagttttggatttgctttaggatatgtgaatgtttattcagctattatccctagtgaattagctgctactagtgttgtggtttcatattggacagatattaaccctgcggtattcatcacaatttttggagtagtgattattgctgttaattcatataaagtgaaatggtatggagaagttgaattttttttcgggtttttaaaagttcttttgattttaggattggtcatagtgggtttggtgattgatttgggtggtgctcctaatcatgatcgtcttgggttccgttattggaaagatccaggtccatttgctgaacggtttgtgacagggtctaccggtaaatttttggcattttggaaatgtgtttcatcagtggtttatagttttggtggagttaacctggtaccacttcttgctggtgaaactaaaaatccacgtagttccatttatcgtgccctgaaaagaatattggttcgagtattgattctttattttttggccgttttcattctttcattgattgttccttataatgataaatcaattgcttcacccacagggaatgctgccgggtctgcttgggttattgccgtgcaaagatcgggaattaaagtattacctcatattattaatgctgtggtgttaacttcggcattatcagcagccaatttaggtcttattcatgccagtcgttcattatttggattggcatctaatggacaagcaccaaaaatattcttaaaaactaataaacatggtcttccttgggttggagttgtatttgctgcattatttttgccattgtcttatttgtcagttagttcaggtacatcccaagttttcagttggttccaaagtataacttcatctaatcttttagtcaattggagtgttttcgcccttgatcacatagcattacatcgtgctcttgaagctcaaggttatagtagagaaaatttgccttataaaattcctggtggacaatatgctggtcctgtatcattatttttttcattattatttttatttacaggtggatttgctgtatttattaaaggtcaatggaaatttgccaatttctttagttcctatttcgttatcccattatttttcgggttatacatatttagcaaactttttttcaagaccaaatatgtcaaaccaacagaagttaaattgaaaccactattctatgatgttattgatcgtccagaacctccaataaagaaattaaaaggttgggaaaagatcagtttattatggggatag

SEQ ID NO: 6852 - DNA, 1506 bp, Candida albicans
atgtcaaactccgtttcagaagctgaatcaagaggccacaaatctcttgaaattgaagaatatcaaattgaagaatatcaaattgataatcacactaacgatgaatcatcagaaattttagatcctcatcaattaaataaagtttatcgtaaattagatttaagaatcattccagcattatggtgtctttattttttaacatcatttggttccaattgttatggattaacattaactatgaatagagctgaaggtcattcattagctcaacaattacatttaacttcaaaagatacttcaacagcactggcgttatattatgttggttatattatatttgatgtcccaatgaatttaatcatgactaaagtaagtcctcaaacttggttagcaagaattgtcatcactgtaggattagtttatacttgttatcatgttttacataatgctggtggggttattgctgttagatttattagtggtgttgttggtgctggtacttggccgggattaagttattatgtcagtttatggtatcctaatgatagactgacaagaagaattgggtattattttacggcagcacaaatttctgctgctgtggctgggttggtcagtgctggtttccaaaaaatggatggagttcatggatatacaggttggcaatggatgtatttagtttatggtgtcattactatgactgttggtattgccttattgtggtggttacccgatagaccattcattggggttaaatcagaaagtaatcgattagtggaattttatagaaaattcactacaccacctcatccattaaatgaacaagaaaaagaattacatcgtaaagatttagaacatagatataaattattgaaatggacttggaaagatgtggttaatattattactgatttaagaatttggcctttaattattatgtattttggagttgttggaactggatttggtttagcagtttttggatctacgattattgccactaataatccaaatttaacttcaattcaagtatcattattatatgctccaatttggttatttgatttaggtggtattttaataatcactccatttgctgatcgattcaaaaaattccgtgctttaatattcagtggtgcttgtgttattattattgttggtatgatagtcacaacttttgctcatggttcatggaataaatatggtggattattaattgctggatttggattgggtcctacagttcctatttgtatgtcatggtcagctgaaattttccaaaaacgttatggtgatgttggtaatgctgttagtgctgctttggttagcggtttaggaaatttgggttctgttacttctacttatgcattatattctggttggccagaagataaagctagattatatcgaaactcaaacatgatgttggtacttatgttgggggtcagtataattgcttctggtgtttgtcaattgatcaaagataaagttagacaaccaaaataa

SEQ ID NO: 6853 - DNA, 657 bp, Candida albicans
atggcatcttataaatcatcatttttacaattggctcttgattctcaagcattaaaatttggtaaattcactcttaaatcaggacgtgaatcaccatattttttcaatttgggattgttcaacactggtaaactcttatctaatttagccacttcttatgctgaagcaatcattgcatcgggattaaaatttgatattttatttggtcctgcttataaggggatccccttggcagctataactgtggctaaattagctgaattagacccaataaattatggtgatattggttattcatttaacagaaaagaaaagaaagatcatggggaaggtggatcaattgttggatgtagtttgaaagataaaaaaatcttgatcattgatgatgtgatcactgctggaactgctatcaatgaagcatttgaaatcattggtaacgaaaaaggtcaagttgttggttgtatcattgctttggatagacaagaaactactgctactgatccaaccaaatctgctacacaagctgtttctgaaagataccaaattccagttttatcaattgttaatttgggtgaagttataagtatcttgaacggtaaaattaatgatgaagatttaaaatccattgaacaatatagaagtaaatatggtgcttaa

SEQ ID NO: 6854 - DNA, 627 bp, Candida albicans
atgttttcaccaatttcattatgtcgatcaactttaagaaccccatctgtcatatctaccataaattcacgtagtctatccggaataaccaagtttgatacgagaaaatttgttcaaacattacaagataaaggtggattttctgaaaagcaagcagaagtagctgtcaatgttgttaatgctgctataaatgatggaatatattccatcactaataatcttgttaaaaaggaatcattatcatcaatagcttatcaacaaaaagtcaattttgctaaattaaaaggtgaattacaaaccatggataaatcagaattcactagtttaaaaaaagaacaagaaaaactacgtactgatttaacaaatttgaaaaatcgattaaaagaagaaattaccaagaatcaagctagtgttagattagatttgaatttagaaaaaggaagaattagagaagaaagttcccaacatgaattaagaatagaagatacttatagtagaatagatgaagaagtttctaatatgaaaatgcaaattaaaactgtgaaaactcaagttttacaatggttaatgggggtaagtactggtactttggctttattattaacatttgtcagattttacttttaa

SEQ ID NO: 6855 - DNA, 2265 bp, Candida albicans
atgaaggttaatttgaaactaataatagggtccattttgataagccaagcacaagcaatttggccatttgactcgtccggctcttcaagttctctggattcatctccatcggaaacaggctcatctggtggaacatttccttttgacttgtttggttcaggctcgtctttgactcagtcatcctctgcccaggcatcatcaactaagagtacatccgattcagcaagttctacagattcctcattgttctctagtagcaattcaggcagttcatggtaccaaacgtttttagacggggattcgggagatcaaaagacagactatgctccatttaatttgacatgtccttcaaaaaaaacatttatacgaacagcatccgagctatctcagcaagaaaaagactatattcacaagcgtcaggaaacaacaaataaaaacttgatagactttttgagtaaacgtgcaaacctttcagattttgatgctaaatcatttatcaatgataatgcgccaaatcataatatcaccattgggttgtcattcagtggtggagggtacagagctatgttagctggtgcaggtcaaatattgggtttagatggacgatacgaagatgctaataagcacgggttaggtggattattagatagttcaacgtatgtggttgggttgtctggtggtaactggttagttggactgttggcattgaacgattggctttcagttggagatatagtgaatgggaaatcaaccatttggcagttacaagactcaatacttaatccaagtggtatgagaattgacaagactattgcttactattacggattggcccaagcagttcaggccaaagaggatgcagggtttcaaacctcagtaacagatacttggggtagagccttatcttatcaattctttgaagaggacgacagtggaactggtggagccaacatcacctggtcaagtattcgtaacctttccagttttcaggaccatctgatgccatatccaattgtggttgccaatggaagaacacctggaacatacattattaatgaaaattctacaatattcgagatcagtccttacgaattggggtcatgggacccttcattaaaatcgtttagtgatattcagtatcttggatcttccgtaaacaacggaaatccaaacaacactgatatttgtgtaaataattttgataatgctgggtttatcatgggcacatcatcatctttattcaatcagattttgcttcaactcgacaattattcaatcaattcaataattaaaatgattttggaaaaggtattaacagatgtaagtgacgaggaatacgatattgctgtgtatgagccaaatccattttttggtgcagactctgcaggaatcaaatccataactactaacgatacactttatttgtgtgacgggggcgaagatttacaaaacgttcccttttatccattaatccaaaatgagcgtggtgttgatgtaatattcgcatttgataattctgctgatactaattcaagttggcccaacggtacttcgatacaggaaacttacaaacgacaattttctaaacaagggaaaggaaccccattcccatttgcacctgactataaaacatttttagataagaatatgggagacaaacctgtattttttgggtgcaattcttcagacttggaagatttggtagcttggcatgaaaacgataaaataaatgttaccgatgttccattagttgtgtacacatcgaacactcgcatgagttacaattcaaacttttccactttcaagttatcttattctgaccaagagaaatttggtgctatcaggaatgggtttgaaacggtaacaagaaataatttaacggacgacgaaaattggtcaacgtgtgttggctgtgcaataattagaagacaacaagaacggttaggtgaggagcagtccgatgaatgtaaaaaatgtttccaagaatattgttggactggtggattcaaagacgctgcctctgtctctagtgttagtggaatttcaggacttgcagctaaaacccacacaagtggcggtacatcttccacgacccaacaaaccagtaccactaccggatcatcttcaaatggaggttcttcgtctactggatcctcttcgtcctcgaaaaagaaaaatggtggagacttggttaatggtggtgtaccttcttcaattttccttgtttttaatagtttgctaggattaattatagcgtatttgtag

SEQ ID NO: 6856 - DNA, 1704 bp, Candida albicans
atgtccgaaattactttagggagattcttctttgaaagattacatcaattgaaagttgacaccgttttcggtttaccaggggatttcaacttggctttattagataaaatttatgaagttgaaggtatgagatgggctggtaatgccaatgaattgaatgccggttacgctgccgacggttacgccagagtcaatccaaatggtttatctgctttagtcagtactttcggtgtcggtgaattgagtttgactaatgccattgctggttcttattctgaacacgttggtgtcattaacttggttggtgttccatcatcttctgctcaagctaaacaattgttgttgcaccacactttaggtaatggtgatttcactgttttccacagaatgttcaagaacatttctcaaaccagtgcctttattgctgatattaactctgctccagctgaaattgacagatgtatcagagatgcttatgtttaccaacgtccagtttacattggtttaccatccaacttggtcgatatgaaagttccaaaatcattattagacaaaaagattgacttatcattacatccaaacgacccagaatctcaaactgaagttattgaaaccgttgaaaaattgatttctgaagcttctaacccagttatcttggttgatgcttgtgccatcagacacaactgtaaaccagaagttgccaaattgattgaagaaactcaattcccagtcttcactactccaatgggtaaatcaagtgtcgatgaatccaacccaagattcggtggtgtttacgttggtagtttgtccaaaccagaagttaaggaatctgttgaaagtgctgacttgatcttatctattggtgctttattatctgatttcaacactggttcattctcatacggttacaaaactagaaacattgttgaattccattctgattacaccaagattagacaagctactttcccaggtgttcaaatgaaagaagctttgcaaaaattattgacaaccgtcaagaaatcaatcaatccaaactacactccagttccagttccagaaaccaaattaatcaacaccccagctgccccatcaactccattgactcaagaatacttgtggactaaagtttcatcttggttcagagaaggtgatatcatcatcactgaaaccggtacttctgcattcggtatcgttcaatcacgtttcccaaagaactctattggtatttctcaagtcttgtggggttccattggttacactgttggtgctacttgtggtgctgccatggctgctcaagaattagacccaaagagaagagtcatcttattcgttggtgacggttccttacaattaaccgttcaagaaatctccaccatgtgtaaatgggaatgtaacaacacctatcttttcgttttgaacaatgatggttacaccattgaaagattgattcacggtgaaaaagctcaatacaatgacattcaaccatggaacaacttgcaattattgccattattcaatgctaaagattacgaaactaagagaatttctactgttggtgaattgaatgatttgtttgccgacaaagcttttgctgttccagataagattagaatggttgaagtcatgcttccaactatggatgctccagctaacttggttgctcaagctaaattatctgaaaagaccaatgctgaacaataa

SEQ ID NO: 6857 - DNA, 2574 bp, Candida albicans
atgatcagacaagtgaataaaaaggctatttcaaacggtcttttcaaaagattatcgctcagtagtagtgcttttgctaatattacagccaataaaaaatcgtccactcatcaactcaaccaaaagactcaattaacaaatgttcgtttctattcaacaaaatccactgttattcagttattgaacaacattggttccaaacgtgaagttgaacaatacttgaaatatttcacttcggtatctcaacaacaatttgctgtgatcaaagttggtggtgcaattatcacccaacaattgaacgaattagcatcatgcttggcatttttatatcatgttggtttgtaccctattgttttacatggtactggtccacaaatcaatgaattgttggaaaacgaaggtgttgaaccagaatatattgatggtatcagaatcaccaaccccaaaacaatggaagtagtacgtaagtgtttcttagagcaaaacttgcgtttggtgaccgctttggaaaaaattggtgtccacgctcgtccaataactgctggtgtatttgaagctgaatatttggataaggacaagtatcaattagttggtaaaatcactagtgtcaacaaatccccaattgaagccgccatcaatagtggatacttgccaattttgacatctttggccgaaacctctctgggtcaattattaaatgtcaatgccgacgttgctgccggggaattagctcgtgaatttgaacctttgaaaattgtttacttgaatgaaaaaggtggtattataaacggaaacactggtgagaaagtttctgctatcaatttggatgaagaatatgaagatttattaaaggaaagttgggttaaatatggtactaaattgaagatcaaggaaattcacgatttattacaacatttgccaagatcttcttcagttgccattattgatgtcaacgatttacaaaaggaattgttcactgattctggtgctggtactttaatcagaagaggttacagattaataaacagaaactccttgcgtgattttggtaacccagacttgttaagaaacgcattattaagagacccagaaatcaaaactggtaaagtgtctgttgcttcatacttgaagtttttggattctgttcaattcaagagttatggagacgaacctttggaagtattggctattgtggtagaacaaaatgacaaaattcctaaattagacaagtttttgtcatccaagacaggttggttaaacaatgttaccgataatattttcaatgctatcaagaaagattacagtcaattatgttgggttgttaatgaaaacgatgccaacttaccttggtatttctccaaatcagatggttcatttgccaagaatggccaaatcttgttttggtacggtttaaacattgacgaagctagtaaattgattaaagaatttgattcttcatctattggatcatcgttgtcatcttctaaagaatctggcgtattcacatctgctcaacaaaagcgtggtttccaccactctacagtccgtagaaacaccaatcctaatcctccattatctgaaggtaagcaaaccgagagaaaaaaagttgctttgattggtgctagaggttacactggacaaaacttgattaaattgattgacaaccatccatacttggatatttcatatgtgtcgtcacgtgaattggaaggtcaaaaattacaaggttacaacaaggataacattgtttactccaacttgcaaattgaagacatcaagagattagaagaaaacaatgaggttgatgtttgggttatggctttacctaatggtgtttgtaaaccatttgttgacactattgatttagttcagaacccaaattctaaaattgtcgatttatctgctgattatcgttttgacacaactggtgaatggacttatggattaccagaactaaatgatcgtaagaccatagctcaagctaagaaaatttccaacccaggttgctatgccactgctgctcaagtcgccattgccccgttaaaagaatatatttctggaactccaagcatttttggtgtttctggctattcaggtgctggaaccaaaccatctccgaagaacgacgtcaatttattgtcaaataatttaattccttactcgttaactgatcatgtacacgaaaaagaaattagtagtcaattaggtttacaagttgcatttaccccacacgttgctcaatggtttcaaggtattactcatactatcaacattccaattaaaaaaggatctttgacttctcgtgaaattagaaacatttaccaagatagatatcaaggtgaaaagctaatcaccattagtggagaagcaccacttgttaaagacattagtggcaaacacggtgtcgttgttggtggctttgctgtcaactctaatgaagaccgtgttgttattgttgcgactattgacaatttgttgaaaggtgcagctacccaatgtctacaaaatataaatttgagtcaagaatttggtgaatacgatggtattccaaccgaatccttgatcagaggctaa

SEQ ID NO: 6858 - DNA, 3789 bp, Candida albicans
atgagaagattcaaccgtaacatcagagatgatttgactagagtaaaagctgacaatcgtttggtaaacgaattggaaactatggaatggatgaactcttttttggacaaattttgggttatttatatgccggctttgtctgaaactgttatgtttcaagctaacgaaatattgaaggatcaggcaccaggttttggtattgatgctttatcgttggacgagttcaccttggggtccaaagctccaagagttgattctattaagtcatacagtaagactggccaggatttgattgaaatggattgggctttttcatttgctcccaatgatactgatgatatgaccaaaaacgaaatcaaaagaaaaattgacccaaaggttgctcttggtgtgactgttggtaaagcctttgtttcgaaaactttgcctattttagtggaagatatgtcgttcactggtagaatgaaagtaagaatgagactttccgcaaacttcccacatgtcaagatggtttctgtccagtttttagaagccccagaaattgattatgccttaaaaccagtcggtggtgacaccttcggtattgatatcatgtcgtttattcctggtttgtccaagtttgtgaacactatcattcacgctactttgagaccaatgttttacgcacccaactggtttgacgttgacgtagaagagattatggctgcacaatccaatgattccattggtgttgtcgaagttaccgttaaacgctgcagaaaattgaaaactggtaatccgacaaaaccaaagagtcttaacccatacgttcaaatcaaagttaccaacaatgggaaaatcgatgaaagaacaaaaactaagaaattggtcaatgacccagtatttatggagacaaaaaccattttagttaacctgttggaagggaatttcttgaattttaacgtatacaatcttattgaagataaaatggacgaccagttgattgggaattgtgaatttggtttgggtgaattgttgcaagaagaaaccattcaaggcatcacaaagaatatcatggaaggtgggaaagttgttggtaagatcgaattggatatcaagtatttcccaactatacaaccaacgattttggaagacggttcaaaagaagtcattacagataatgaagttggtatcatgaaattaactttacacgaagctagggatttggatatttccaagtcagttattggtttattgaacccatatgccgaaatttacgtcaacaacgaaaaggctaaaacttgtcgtagattaagacaaactaacgagcctggctggaatgagtcgtttgaaagtttgattaaacaacaatctgaaacatctattcaagtgttggtgagagattctgtcaattctgatattgttgccaatttggaggttaatttacaagatgttatttttgaatcacaaagaggacagcattggtttacttgtccaccaatttctaagaatggccctgctccaaaaattagacttactacaagctggaaaccattggccatcgatgaggccacaagcgaaaaagttgttcgtaatgctccaattggtggtatgagattacatttgagaggggctaaaggtctcaagaatttggaatctgttggatatgttgacccatacgttagggtaatgttgaatggtaagttaagagccaagaccgttacatttgcagaaactgtcaatcctcaatggaacagtgtttattttttaccagttgccaatgaacatcaacattacttgcttcaaattatggatgctgaacctgaaggaaaagatagatcattaggtactgctgcaattaatgttgccgacattttgagaaaaaatgaagaaggatattatttgggatatgacggatccgatgaaatcatcgaacagcccgtattatttaatactaaggaagctggttctattttctactctgtctcattctttcctgctattccaacttactctttgtctcaattgcacaacttcgaaacctaccaaaaagagttgaaggaacaagaagaaagagaaaaggaaagatatgctagagacgaaaagatgttcaaggaaaatcccgatgaattcgaatggattgaaattgaaaacgagcagatgaaagtaccaccaaaagttgaattgaagttacaagatgctatcaagtacagggctggtaatatgattgttcatttgaaaggtggccaatttgaaaagccagatgtttatgttcatactttgtttgatgaacacgcatacccttcgggtatatcacctatatctgaaggtaaaaaattgaccacagcctctgtgggtgagacatttattcgtgatttaccaaattctaatttgattttcagggttgccaaagtcgctgaagttactaaatctagtgaagttattgttgaaaaaatgtacaacacacttgacatttatgaaaaatcttttgaaaaaccaatcaagttgaatcttggcaaccgtaacaccattgaagtccaattggaatttattccttctactgtcaaattggcaccattggatactattttggatgttggtaaaattaaattggagattattggtggtgagaatttgaggtcggtcgattcaaatggtaagtcagatccattgtgtactgtgaatcttgatggtgttgaaatttacaagaccgacaagaagagaaagaccttagatcctatttggaatgaatcggttgaattcccaatgatatccagatccagacaagttttattggttgaagtatatgattgggattatactcatgatgacgagttattgggtgtcgcaaatatagatttgtctaatattcctgccttaaccacaacgcctttctcggttgatttagatactcagggtaaagtcaatttgagagcaacattcttcccagagtacataagaccacctttggatgcgaaatcagcaattccaattgatcttggtgcagtttctgatgttggtatgaaagctgtcggaggagcagccagcttggctactggtgcagttggaggtggtattggggctgcaagtgaccagttgaataaaggtgctgggttccttaagagtttcaaaagcaaaagaggcagaaatagtaaagataagaacaataatgatgactcgtcttcgttagcaccaagtgctataagtcaatctaaaagctcagtgtcagacgacggtggacataatttgaaaccagatattcctgaagaggaaaaggaattgagagaagaacaaggtgaagaaattgagagtatacaagctgctccaaatattcgtgaacaagatttacctaaaccacagcaaccatttgttcctcacggtaatgtaagaggccatcagagaaatgttagtaatgctactgatgtgtcaagttttgcagctagtattcacggtgccgatgcacttccaggtagattgaccattgtggaagcacgcaatttcaaagctggagacaatttagaagtgaaggcttccttgaaaacctcaactaaagataaactgttattcaagacaagaggtaccaaatttgacaatgtttctgattcgtacaaatggggagaaagtgttccttttaaaagctcaccttcgggaaatatcattttacagttgagagagcatcatacttttggtaagagcgttgttttaggagaggcaactttaaatttggaaaactatgttaacgttagtgaaaacatcacattgccagtcggatcaggagagttggtagtgaatgtgaagtatttcacttga

SEQ ID NO: 6859 - DNA, 1113 bp, Candida albicans
atgaatagtgattccatttcccaagtatttgaatatttgaacaaaagggatgaatgtcccacagataatgattataatgggaatattggaacaagaatttcctccatttttgtcatcatggtaactagtgctatcggaacattacttccattattgtcatcaaagtattcattcatccgattaccacccatggtatactttatttgtaaatattttggatctggggtaattgttgctacagcattcatacatttactagaaccagcagcggattccctcggcaatgaatgtcttactgggccaataacagaatacccatgggcatttggtatttgtttaatgactttgttctttttatttttctttgaattactcgcctaccagggtatcgataggaaaattgccaaagaatcacagcttgataatcaggggccacacacacattcacattttggagatgcatccatgtacgtaaaaaaagatgacgaagaagaagacctcgaaaatcaaaatgaaaaacaagctgatgccaatccatatccatctcattttgctcacgcacaggagcaccaagatccagacgtgatggggacaactgttaacgatcaatccaaggaacagtattacggccagttactcggggtctttgttttggaatttggagttatgtttcattcagtattcataggtcttgctttggcggtttctggtgacgagttcaaaagtttgtacattgttttggtgttccatcaaatgtttgaagggttaggtttaggtactaggattgcaactaccaattgggccagacacagatatactccatggattttagcaatttgttatactttgtgtacaccaattgctattgccgttggtttaggcgtcagaaaatcctatccaccaggttccagaagagctttaattaccaatggggtgtttgattctatatctgctggtattttgctttacactggtattgttgaattgatggcacacgaattcttatactctggcgaatttaagggccctggagggttcaagaatatgttattagcatactttgtcatgtgttggggagccggtcttatggctttgttaggtaagtgggcttaa

SEQ ID NO: 6860 - DNA, 2238 bp, Candida albicans
atgaattttatcaagaagtttattgggacgactactaccgatgaggttgcgctgattccgtcaggaaagctttatctcacacgttcaaaacaatccccaaagggggcaattgagtgtctctacaatgatgcgtttgcgtcaatcaaaaagacgaccagcccatactactatcaattgtgtatcaccaaagtttaccaagagggcgaagctgatttcaatagatttgatgattcagaagaggagtatgatggggaggagctggcacctacaaacgataccagacgccaatctaaagacgagtggattttccccattgccgatgaattgaagattcatgtttgtgagaaggaagatgggtcgagagctattgcatggaaggatgtgaatggcgatttgggcgataagtttgagtttgttattgatgaggaggtgaggggtagtgaagttgaagcatttgggatgaccatctacaagtgtttatttgaaaacaagtaccaaacaagctatgcaaaggtgaatgaccccaatcaattgaaggagtttatctataatcccaagggcgagttgttgacgtttgatgaactaaaggatttgaatgatttagaggagtatgagacagatgagtatgaggattgtgagacctcgccaattgacgcgccaaaaggagaaaccaagtatgctagcactgacgttgacttgcatttgtacgataccaggacaggaacatttattttacaccttgccaagccagattttgagttgaagttgatagatttgggcaattgggaatatacactttacatccatggcgagactacacggatcaacactacgttgagcaagaatatgaaccccacctttaattaccaacacttgtcgtttattttcaatgactatacggttgacgaaggcgggatcaatgcgtgttcgtggttggtcaagtttcctgattataatgacatgtcaaagtttcaaacggtgtttcttgggttgatgtatgagacgttgaatagacggaaatggggagaaacagaggagcacgattattttgttgatgcattttctcgggttagtattggtgatgccaaggatttggagagtgaggaagaagaagaaagtgaagaggaaaacgaaggcgatggtcctgtgaaatgggaaactgagaaaaacgaaaagaatagcagtttgactgtcgggtacgccaaggataggtcgtatgttgttcgtggcgacaagattggggttttcagtgaagatgatgcaggtcaactcaacttccagacggcaattatcaatgttgcagacttgaagggtaagcattttagtcccgagaaaatgcttcttcaccagcaggaccagtatatgattatttcgaacccgcagtttgacgataaggccttgtacaagatggatcttacacggggaaagattgttgaggagtgggaggtgtccaaagatgtgccagtcaagtcgtatgcgccaacatcaaagtttgcccaattgactgatgaacagacgttgacgggtatttcgtcgaatgggttgtttactattgacccgaggttgagtggcacaaagttggtgaatgacaaaacgtacaaggcatacaaaaccaccaacaaccagtttcagacattggcaactaccgacaagggctatattgcgttggggtccggcaagggtgatatcaggcttttcgatagattaggtgctaatgcgaagacggcgttgccgtcgttgggggatccgattattgggattgatgtgtcgaaggatggtaggtggttacttgccacatgcaagacgtacttgttgttaattgataacaagatcagtgatggtcaaaagaatgctggcaagttggggtttacgaattatttcgacaaggacaagaagcccacgccaagacgacttgcgttaaagcccgagcacgaagcgtatatggtgagagagaatggagggaaacagttgctgtttacgcctgcgtatttcaatactggccgtgactctaaagaaactacaatcgtcacctcgttgggcaagtatgttgttacgtggtcgatgggcaaagtgttgttggacaaggagaacccgtatttggtgaagaggtacacgcaaaacgttattgctgataatttcaagtttgggtcgaacaacgaagtgattatggcgttacaggatgatgtttctatggtaagtagacgtagtttagctaacccaaagaatgtatttaagtaa

SEQ ID NO: 6861 - DNA, 921 bp, Candida albicans
atgattcaaaatactgttagaggatctattcttagatcagcaaaatttactgcaccaagatcattgctttcgatttcaagatcattgacaaccgaaaacacatcgagcaaacctacaccacctccaaaaaatgatgaaaccacccattttggtttcaaaacggttaacaaagatgacaaggaaaagcttgttggaggagtattctcatcagtggcatcaaattacgatgttatgaatgatgtcatgtcaatgggtgttcacagattatggaagcaccactttattcaaagattagatgctggtatgagaccaggatcaactcaacctttagagttcttagatgtggcaggtggcaccggggatattgcctttggattattagatcatgctgaaaagaaatacggtgataccatgagcaagatgaccatcgcagatattaatccagatatgttgaaagagggagaagtaaggtttgctaaaaccaaatgggccaatactgaccgtgtcaactttttagttcaaaatggtgaaactatggatcagatccccgataattcaaaagatgtatacactattgcctttggtattagaaatttcacagatatacaagccggattaaatactgcttaccgtgttttgaagccaggtggtatttttgcatgcttagaattctcacaagtggaaaaccctcttttggactatgcttaccaagcttattcattttctttgttgcctttaatgggtcaattaattgctaatgatagagattcgtatcaatatttggttgaaagtatcagaaaattccctaaacaagaagaattcaaaggcatgattgaaaaagcagggttttatgtccctgaaccaggttacgaaaacttgacctttggtgttgccagtattcatattggtgttaaaatttaa

SEQ ID NO: 6862 - DNA, 1770 bp, Candida albicans
atgagttttgtcaaatcttgcagagggtgtcttaggacatttgctacatccacaatcaagcatgagaaaaagttaaacaagtactcgtctattgtcacaggcgacccatctcagggtgcttcccaagcaatgctttatgccactggtttcagtgatgaagatttcgatcgtgcacaaatcggtgtcggttctgtttggtggtcaggtaacccatgtaacatgcacttgatggagttgaacaacaggtgttccgaatcagtcaacaaggccggcttaaaagccatgcaattcaactccattggtgtgtcggacggtatcaccaacggtactgaaggtatgaagtactctttacagctgagagaaattatcgccgactcctttgaaaccatgaccatggcccaactatatgacggtaacattgccattccttcatgtgataaaaatatgcccggggtattgatggctatgggaagacacaacagacctgccattatggtctatggtggtactatcttgcctggatctccaacttgcggaacccaaaaccctgctgtagccgacaaaatcgatatcattagtgctttccaatcctacggacaatacttgtcaaaacaaatcaacaacgaagaaagaatagatattgtcaaacatgcctgtccagggcccggtgcatgtggtggtatgtacactgccaacactatggcctctgcctctgaagtcttggggttgaccttaccattttcgtcctcgtccccggcagtctccaaagaaaaagccgaagagtgtgccaacgtcgggttcgccttaaagaatttgttagagttggacttgaaaccaagagatattgtcaccaaaaaatcatttgaaaacgctattgcttatatcattgccactggtggttctactaatgccgttttacatcttattgccattgcctcttcatttgacattactattactgttgacgatttccaaagaatctccgacaacactcccttgttggccgatttcaaaccatcgggtaaatacgttatggccgacttgcaaaatgtcggcggtacacctgctgttatgaaatacttgatcaaagaaggcattatcgacggtacccaattgagtgtcaccggtaaaaccatcaacgaaaacttggctaaacttgctgatttgcctgagggccaagacattgttagaccagtatcaaacccattgaagccaagtggccacttacaaatcttgaaaggtactttggctccagggtctgctgtcgctaaaatcaccggtaaagaaggtacttatttcaaaggtaaagctagagtattcaacgacgaaggtgcatttattgttgccttggaaaatggcgagatcaaaaaaggcgaaaaaacagtttgtgtgatcagatacgaaggtccaaaaggtggtccaggtatgccagaaatgttgaaaccttcgtctgcattaatgggttacgggttaggtaaagacgttgctttgttgactgatggtagattttcgggtggttcccacgggttccttattggccacattgttcctgaagccgctgaaggtggtccaattgctttggttgaagatggcgatattattgtcatcgacgcagacaataacaaaatcgatttgttggttgagccagacgtcttgaccgaaagaagaaaacactggacgcctccagaaccaagatacaaaagaggtactttggccaaatacgccaagttggtcagcgatgcatctaagggatgtgttacagatttataa

SEQ ID NO: 6863 - DNA, 1350 bp, Candida albicans
atgccaagaatcaaaaatcaagtagaaaaggaggaacagttaatagaagaaccaaaacacgagagagataatgagtataaagatgaacaaggggtagagccacaggaagaggagcaggatgatgataatgatgatgatgatgaacaactcgccgaagaagattctgaaatcggcccagcacgcaaaagaggtagaaaacggaaaatcacaactgttgttgaagatgaagataacaataccacaaaaattagaaagaaagttaaaagtgaagatgatgaaggtcaagcagcaaatgaaaatgaagaagaagatgacgacgacgacgaagaagaagaagaagctgatgaagaagatgacgatgacggagaaactgagggggacgggaagaaaaaaagaggtagaaagaagaaacccaaagtacaactttatggggatgatgtatttgatgatgagggaaaccccttaataatagaaaatgatgaagttgtcattccacaagaagatccaaaggggaaagaaaagattgatgaattgggttatcttcaaggggacagaaaatttcgaatgaaaacatttaaattgttaggcaaaggtgatagattatacatgatatctactgagcctgccagattggttggattccgtgattcgtatttgttatttaaaactcaccgtaccttgtttaaaaaagtagccgataatgatgagaaaatggatcttatccaacgagggatcatcccaaactcatataaaggaagagctgtcaatttagtaacagcaagatccatatttagagaatttggttcgagaatgattgagaatggcaaaaaggtgattgatgatttctgggaacaacgggcaattgacaatggtgatatacctggtgaattggcagatcctgatcaattgtacaagactaaattgtccaatgttttaggtgattctggcatagtcagtactggtcatgcgactccgttaactgcgactccaattgtcaattatcaaggagatcctacttggatgtatcaaattgccaaacaaacatctgaatacaataagaaattatatgaactcagaactaataatatgtataaaggctataaagatacttacacgaatttgactttatatccacaatcaacacaaccaacccagataaagtatctgaaatttaacaacaataatgggaaattggtgtacgacattgtcatgacaaataaaaatataaggaagccaattactggattggcaaaagtgccgcaagctatattgaatgagatagatgatccagagataaaacaagcaataatcgatcaacaagaatatgaaattagtgctagagaaatataa

SEQ ID NO: 6864 - DNA, 1557 bp, Candida albicans
atgagtgattatccaccacccaattacccacctccaaaccatcctcaataccagcaacaacaggatgagacttatcatgttcgcccagatatggagcgccagcaagattttggttactatgaaaaaccaaccccatcacaaaacttcgatgacagtttcaaagttgaaaaaccgaagttcaacgattggccatttgccatatttttttggttggtagtagctggattcattgccgtggcaggtatcacattgaacgctttaaggtcgacctacggtttccaaggggggtccatttatggctcaggaaacacttttacattgaacaccaacacaatcatattgtttgcttttattatagtcatggcattcatcctctctgccgctataatcgtgtttgccagattagcccctaaggcatttattgtgaccggtgttattttgaatgtcgttttgggtattgggaccgccatcttttactttgtggaaaaatactattcggccgcaattgtgtttcttatctttgcattgtttggtgcctggtgctattggtcgtcccgccacagaatcccattaagtgctaccatattaaccattgttattgatgtcatgaaaatgtacccttcaactttaattgcttcctttattggtctcatttttagtgctgcctttagtgctttgttcagtattgtaattgttgcaacatatgtcaagtatgaccctaacagcaacaacgaagcttgttctgtgggcgggggcagttgttccaaaggtaagttaattggggtattggtgtttgttttctttgctgggtactacatttcagaagtaattagaaacgtcatccatgtggttattgcaggaatttatggtacttggtactacttggcaaattcagatcaaggtgctccaaaacatcctgcattatcctcattgaaacgtgcattgacctattgttttggatcaatcactttcggttcattaattgtgtcattgattcagttattgagacaattcatttcgattcttaggtccaactttgctgctgacgggaacggctggggtgtttgcggtatgattattttggatttctttgtcgggtttattgattggttggttcgttatttaaacaagtacgcttattgctacgtcgcattatacgggaaaagctatatcaagtctgccaaggatacgtttgatttgattcgtttcaaaggtatggacgcattgatcaatgatatgttcatcaacactgccttgaacttgtattcattgtttgtggcatatttggttgcgttattggcatacttgtacttgaaattcaccaagccagagtacaattctggtggtgctttttatgctccggttattgcctttgcatttttaattgctggccaaatcaaccgtatctccttaacagtaattgaaagtggtaccgcgactttctttgttgccttggcgaaagacccagaaatcttccaaatgacaaatagaaatagattcgatgatatctttagaaattaccctcaagtattggaaaagattactagtgaccattag

SEQ ID NO: 6865 - DNA, 1563 bp, Candida albicans
atgactactgacagatcatcgaaacgacatgtattaatgattgataattatgattcatttacttggaatttatatcaatatttacatcaatctcctaaatgtggtaaagttgatgtttatagaaatgataaaatcaccatttctcaaatagaaaatgaaattaaacccgatataatttttatttctccaggtccaggacatccattaactgattctggtatatctagagatataatcaaatatttcctgggtaaaatccctatttttggtgtttgtatgggacaagaatgtatatttgatgtatttggtggtgatgtatcatatgctggagaaattgttcatgggaaaacaactactattaagcatgatggtaaaggtatgtttgaaaacgtaccacaatcagtagctgtcacgagatatcattcattagctggtagttctaaatcattacctgatgtattagaagttactgccgttaccgaaactcaaccagaagtgattatgggggttagacataaaaaatatactattgaaggggttcaattccatcctgaatctattttaactgaaagtggacaattaatgattgataatttattaggagtttatggtggtacttgggaagaaaatgatgccattaagactggtaaatcaattaaaattaataataaaaacggaggagaaaatatattacaaaaaatctataaacaaagagaaatagattatgaatcaattgaaaaattaccaggtaaatcatttgaaaatttacaaattgaattagatttagatcttgctccaccattaataaatttttatgatcgtcttaaatatactcgatctaacttgaaggaaacaattatattatcagaatttaaacgtgcaagtccttcaaaaggggatattaatataaatgcccatcccgctaatcaagcattgacatattctactaatggttgctccactatttctgttttgactgaacctcattggtttaaaggttctttagatgatttaactttaatacgtaaagtgattgataagcctactacaaaggattataaacgtccagcggttttaagaaaagaatttattttcaataaatatcaaattttagaaagtagattggccggtgcagatacagttttattaattgttaaaatgttaaatgatgaaacattgttacatgaattatatcaatattctttgaaattagggatgattccattagtagaagtcaataatagtgatgaattatctgaagctttgaaattaactcataaggggacaactgaggatccattaattattggagttaataatcgtaacttgactacttttgatgttgatttaaataccacaagtaatttagtgaaacaagctaaaactagtgatagaaaaggtgatgtattggttcttgcattatcaggaataagttcagttgatgatgtgaagaaatacaagtatgaagataatgttgatggatttttaattggagaaagtttaatgagagctgaagaaaaaggtgaagcaggtaaatttttgcatgatttatgtacttgttaa

SEQ ID NO: 6866 - DNA, 3534 bp, Candida albicans
atgaatatgcaaccatcagtttcagtaaactcaccgctatctaccatgtctaatggttcaatactgctggacattatgcctccaatacctaaacaaccaatacccaaaaaatcccaacaaattagaactgacaaacccagacctcatgtttgtaccatttgtaccagggcttttgctcgtttggaacatttaaaacgtcatgaacgagctcacaccaacgaaaaaccctatcaatgtgctgcctgtggtcgatgttttgctcgtcgagatttagtattgagacatcaacaaaaattacatacagatttaccccacgtcatacgaagaggatcttcaaaagatggtgaaataaatgaacatatcaatgtgttacacaataatactaatgccaatgctccattacctgacgggacttgcccagctgcagccttggacaatgaaaaaccagtgtttagaacctcactttttgaaaataatcctactgccggtctgcctcatggtccaacaagctctatcattattgatgatgacgctaattccatgtccaactcaccaagacctagcataacacttcatagtagtcaccaccgtgatagtgtatcttttggaccttcaaatactcctccaacaacagcaagtacagtgcttggcatgccggcacagccaacgcccacaacaacaacggcagcaacagcaaatcaaatagaggcaaaacaaggatcaagaagcaatagtcgagtaaaactgcaacaccaacaacagcagcaaccaactccggattctccacaattgaaaaaattcaaaccttcagcttctccaatgggaaatactagtggcatcccttcacatttgagcaataattatagacacgcatcttattctgctgcatcaggaccgtgctactctagtttcaaggaggctgatttttttggtatttctggtcaagttgaatttgccactcctcaatttgggccccagaatgaagattttggcaaattgttagaatcaaatggcttattagattgggattctatcgaccatttagacttgaacgatgaaggaaagttagccatgaaacagaaatccatcaagaatttacatgatttcttcaccgataacctaaaagtttcgtcaatgaatcattcacaatcttctgacgtacgtttgcacaatgatatgaaccacaaaacaatcacacaatcagtgccacaacaaccacaacaacagccaccaataaagcattcactggcatcagatattacacccactttgattccaggatcacagcaggaacaacaacaacagcaacagcaacaacacctgcctccaaactcgcatctgaattctgtctcttcgaaagcaagtatcaatcctcaacatttgaaccaaaccaaaaaagcagaggaacccaatcagaatgattggttcagagatcttgttttcccgccatttgatttgaatataccgttcagcgctcacgctagttctgaagatttgaaaggtttctttggtcctacaagtttattggccgatacaaacgataattaccgtaaacagttgaatcatcaacaacaacaacaacaacagcaacaacaaatgaatggtaattacaatcataagccaaacgttactgcgaaaagtaatgggaatgaaattccactggcattgcgtactcatattaatagtgttgctgatttttcagtagagtaccctactagttttttcttggaagatgctacactcataactgaggaactccgaaataagattcttgcaatgagtaatatcgaggacaaagatttgccttcattatcggatttaaaacgttatttccaattgtatgaatatggttttaacaagtactttccttttattcacttaccttcgttgaagaactccaaaaaccataatcttgaaacagtccccttgttgttagcaattgctgctattggtgcattgtatgcttatcatgataatgatccattgatcttgtttaacttatccaaattccacattcaaaatttctttgaaaaagaaatcacattaaataatttgcatttcaaaaaagtcccaataatggctcatcaatgtcttgtgttgcatattttcatatcacttttcctcaatgaacctaatatggtggatatcacatcgagacaaatcaaatcaatgattggattgatcaagtccactaattttaatgaaccattggaaaagttgattatcccacctcaaccggcaattcctggttcagctggagataaatcattgattcaaaagaatttcgattactttattatggctcaatcaagaatacgtacattgcatgtcttttatttcttgcaagcttttagatctgcttttggtggagtccccattcttttcagcttcaatatgctaaaaagtggatcattttgtaccaatgagaaattatggtggtgtgaaggatctagcaaatggtataatttagtgggacaaacttatcctagtaaatggtcattaattgatgtgagtaatggtgccggcatagatgtgttagtgtcttttttaaatgacccaaccaatgtcaacacaccaatttcttataacaatttacttgtattgttatttaccatccacgaaagaataatcaaagctgttgataatgtacagccattcactcatttacggtggttggaaaagaaaagacctttacaagcattaattatgaattgggaagtcttattccatcaaaaccatggtagttcaaaaataattactagcaccagaggtagtcttagtgccaaacatgaattgaaattgattctccctatgcttgcattggtgaaaatgaaattggaagtaagattaaattttgctgtatcatcggttcttcaaagaaattgggttgccatgaatagtgatttggaccgattagtttatcgagaacgcaagtacaatgttttgactacttcattacctcattgccgtgatattcttgagttgtggatgcataatatggaaacaatcaactatgatgttcgagaaactgctagacgcacaccagcatttttctgttgcactttatttatcagtgtgatattaatagcaacctatttgagtcatattgaaaaaaattgtcttgaaagagagatcactaaccaagagttggaatgttggtttgattgtcaagaattgttttctaaattggaaacagttttaagtgtgagtatcagatcttcttatctggaagatttgaccaaagactttaggaacaaattcagtgacgagacaaaagttgtgaagaaattacgagaattgatttttcaacgagaaagttgtgatgatgctttatcggaaggaattgatgtggaaaataatcaatccaagttggtacaaataaatcaagaaatcaaaaaaggtcttactgaaagcaaaatctcaatgaaatcaatttatttgggaattaggatattagctgatgtacctgtttggccattagccatggtatttgccgaagctttaaagagtagagcaaaatacattgaaaaatga

SEQ ID NO: 6867 - DNA, 1266 bp, Candida albicans
atgaatggaactgaagataaaccagtcatcaaatccttcttggataccgatttatacaaattgtttatgcatgcagcggtcaacaaacagtttcctgatgtcccagtgaaatacaggtataccaatagaactcctcaattgaagttaaatagccaagccatatcgtggttgaaaaagcaaatcgagtatttgggtgatttaagattttctgcagaagagattttgtatttgcatagagtattgccgcaattgccatcagactatttagaatatttggcggacttcaaattagtcccatcgtcccagatcaaatatttggataatgatgaaggggacttcgaattggaaattgtcggtaagtggaatgacactatactttatgagattccgttattggcattagtgtctgaagcttattttaagtttgttgacaccgactggaattacgaaggtcagtacgctttagcacaaaaaaaggccaagcagttaattagcaatgaatgtaatttcagtgaatttggaactagaagaagaagatcatacgagtcacaagaaattgttatcaaggcaatcaaagacgtgcaaatagacactcaatcaaagtacattgctggtacgtcgaacgtttattttgccatgaaatatgatttgccacctataggcactgttgcacatgaatggtatatgggaattgcatcaatcacacaagattatgtgcatgcaaataaattggctatggattattggattgatacatttggagcaaaatatgcagggttggccttgacagatacttttggaacagacaactacttgacaatgtttgttgctccctatgtaaatgaatactctggagttaggcaagattcgggggatcctgaattgtatgctgagaaaattgcccgtcattatgaaaaaatgggtatagcgaaaaataccaagatcatttgtttcagtgactccttgaacgttgaaaaatgtttgaaatataaaaatacagcagataaattgggattaatcagtacttttggaattggtacgtttttcacaaatgatttcaataagttgtcaaatggcgaaaagtctcagccaatgaacattgtcattaaaattaaggaggcaaacggtaaaccagccattaagattagtgataatattggaaagaatatgggtgatcaggctactgttgatagagtcaaacaagaattaggatatacagaaagaacatggtctgaaggagacgaaactcatagatggtctaagtag

SEQ ID NO: 6868 - DNA, 1014 bp, Candida albicans
atgttgattggtatatctggtaccttaagctcaggaaagactgaagtcgctagatacttgactttccaagggttcaagctaatttcatttaaacaggaaggccatgaatcagatgccaccacgccagaggaggatgaagtgtctcaccaaattacggatttgacagtcgatgcagactacaaaatggaagtttttaaacatttcgatgatttgagtgctttagataattatgtcacggttaattggcaagataattttgtgatttcccatatacaagatatgaatatgttgaaagcattgcagaaaagaccatttttccttcatatatctatcgatgccccggtctatttgagatatcaaagatcaaaactgaaaaataatttcacgttggaacagtttgtggataaaaacgatcaattgttattcaatgttgctaatccattgattgagattaataaccaggcacaggtgaaaattataaatacatcgacttcgatcaaagacttgtttatcaagttgtcggaacttaatcttttaaacggttctcgattgagacctacttgggactcgtactttatgcgattagcagatttggcagcgttaagatcaaactgtatgaagcgtagagtcggatgtgttattgttcgcgagaaccgagtggttgctactgggtataatggaactcctcgtcatttaaccaactgtaatgaaggaggttgttcccgatgcaataaaggccaaggaagtggggcactgttggccacatgtctttgcttgcatgctgaagaaaatgcgttgttagaagccggcagagatagaattcgcggtgagagtgtattatattgcaacacatgtccgtgcttgacatgctcgataaaaattgtccaaagtgggattagagaagttgtttatgcccagagttattccatggacttacaaagccataaagtgatgagcgaggctaatattatattaagacaattccaccctccaaaagatggaatatttatatag

SEQ ID NO: 6869 - DNA, 1761 bp, Candida albicans
atgtcacgagcattatcatcgactagagtgttggttaatgacacacttttaccagccaccatcattttttcggtagagtcaggcacgattttagagattgttgatagggttttaccgcccaatgatccgattttggcacgctataatgtttttcctatagactatagaaatgttacgccagcagtgattatgcctgggctagttgatgcacatgtccacttgaacgagcccggtagaactgaatgggaagggtttgaaactgggaccaaagctgctgcatcgggaggtgtcactactgtgattgatatgccgttgaatgccattcctcctaccactactgttgccaactttaacttgaaaattaatgccgccaagggccagacgtgggttgatgtggggttttggggcgggttgatccctgataatttgtacgatttgaaaccgttgattcgaatgggtgtgcgtgggtttaaagcatttttgatcgagtctggggtcgatgagtttcctgctattacgccagcccatattttggcggccatgaaggaggttaaagacgaaaagacgatgttgatgttccatgctgaaatgcagccgcgggaaaaagaggagtttagcgactcggcagatacgttaacggccgagattgacgactttgatttgggaatgtcggccagctttattgatagggcacccacaccagtagtcaggttattgagcaacgacccaggggaccaccatcacgaacatgagaattgtcggttaccacacaaccatgctgggtctatcaacccgtcggtcttgtcagataaacaagccaaggcgttggcacacacgccgatcttggcaggggccgagcctacttttggtaagaatgccaggaaagtcaacacgcaccatctgcgctcatatagctacaccgaagaagacaccaaagtcaacaccccgttattgttggcgcaacaggagaacgccgagttggccaatatcgaccccactgcgtatgcaacgtttttggcatcgagacccgataattttgaaaccactgctattgctgagattataaactgctcgacactattgccaacggtgccactccatattgtgcacttggcgacccacgaagctgtgccattgttgcgtgctgccaaagccaaggggttgccggtaactgctgaaacttgtttccattacttgtcgttgtgtgctgaaagaattgggagctgttcgacgcatttcaagtgttgtccaccgattagaactgacgataatcgtaaattgttgtggaaagcacttcgaaacgatgtgataaccactgttgtttctgaccattctccgtgtacgccagatttgaaaggtatggaaaagggcgatttctttgaagcctggggtgggatttcgtctgttgggtttggattgccgatattgtacactgaaggccttaaattggacccgcccatcagcttggcggaaattaacaaatggtgttcatggaatactgctaagcaagtagggttgagtcattgtaagggcaccattagggtggggtacgatgctgatttgttgattttcgatactgacgccaagtatgtagtggaaaacaaggagacgtatttcaaaaacaagttgacggcgtatgatgggatggagtttagggggcgggtattggagacgttggttagaggtaatacggtatttgctatgggaagagggttttcgggacccaaaggtaaattaattttagagccgagatttgagtag

SEQ ID NO: 6870 - DNA, 2598 bp, Candida albicans
atgatagacaatataatcaataatttgcaaatcatactacagcaaaatgatgataattttacatcccctcacgacgatgtgatatatcgaccacattctgctcgtgtagcacgatatcaagtaataattgcatctacattgggactcactgccctattactattttctatcttacgattaaaatatcccaaaatatatgtggcaaactttaatcatttgaatttcagtctacattcgacctcaagaaggaatttacctgaattgccttcaaattcattatttggttggattcctacagtttacaaaattactgagcaagaaattttggaacatgctggattagatgcagttgtgtttttggaattttttaaaatgtgcattcgaataataagcatatgtttagtatttgccattattatcatatctcctatcagatacaagtttacagggagagtagatgaagattatcccgacgatgatagtgacaacgatgacgatgatggaagtaataataatggtaccacaataattaagcatatagtgtcagctggaattctggtggcaagtaaaaataacgatggagaacagtatcaacaatttctttggttatacactattttcacctatgtatttacatttgttactgtttactttctattcaaacaaaccaataggattatttctatgcgtcagaagtatcttggatcgcaaaattcagtcaccgatagaacggtaaaaatatctgggataccaggatcattacgagatgaagtggcactcgcacggcacattgaccgtttgaatattggtgaagtggattctgtgttgattgtcaaggagtggcaaaatctaaacaaactattcaaaagaaggagaagaatagttcgaaaattagaggaaagttgggttgaatattttgaaaaaaatgggataaccaataagagcgatttgatatcgttgcatccccaagttggcgaactgtatcgtttttccaataggtatactgatgatgcagaagaatcaccagactggggatctcaaaattcgaactctgcacaagcttcaataatagatcaagactcagaatctgttgaaggagattcttctgacactttgaatcgcttgttgaatgatgaactgagaacaagaccaagtcttcggaaaggttggttcggattgtttggacctaaagtggattcaataaactactacaccgataaattggaggtcatagataaagagattaccagggccagaactagagaatatcccgccacttcgactgcatttctcactatgaaaaccgtggctgaagcacaaatgttggcacaggcagtcttggatccaaaagtcaatcatcttatcaccaacttggcccctgctcctcatgatatccgatgggataatttgtcattaactagacaagacagaaatacaaagatccttgctgtcacgatatttattggtataatgagtttgttgttggtttatccagtcagatttatggctagttttttaaacactaaaagcatttctaaaatatggccatcattggggaaagctattgaatcgcataaatgggccgaaactttgattactggattattgccaacttatttatttacaattttaaatattgtgattccgtttttttatgtatggatttctgaaaagcaaggttatttatctcatagtgatgaagagttgtcatcggtatccaagaactttttctatatatttgtgaacttatttttggttttcacaacttttggtaccgcctcttttgttgatacgaccaaaattgcatttgatttagcaagatcactcagagatttgtcaatgttctatgttgacttaataattctacaaggattgggtatattcccattcaaattattattggtggggaacttacttcgctttttagtgaattcattatttaggtgcaagaccccaagagattacttgaatttgtacaaaccgccagttttcaattttggtctacaattaccacaaccaatattgatatttattattacgttggtatactcggtaatgtcttcgaagatattaactgcagggttactatattttattattggttattttgtgagcaaataccaattgctttatgcttgtgttcatcctccacactcaacgggcaaagtttggccaataattttccgaagaatcatattagggttatttctttttcaaatcacaatggttggcacattagcattacaagatgcaatcacatgtgctactttcttggcaccattgccgtttttgacactttacttttggtggagtttccataaacaatatattcccttgtcaacattcattgccttgagagcaattgaaagcaatgaaaatatcaaccctactgatttggagcaaatcattgaaaacaacaataataaaactcttgacgaaagaagggaattgaacactaaatacgaataccccaatctagttaatgatttagacgggccaatgattgcattggatggtgaagatgtattgatagttaatcgagatggtacaactgtacggaaaccacctcaatatttcagttcagaatgggactattaa

SEQ ID NO: 6871 - DNA, 1038 bp, Candida albicans
atgtctggagaaacagtttttgtcactggtgcaactggatatattgctcaacatattattaaacaattattatctaaaggttattctgtaattggatcggttcgatcccaatctaaaggtgaacaattgaaagaattaattactgctcatcatcaagatactactggtgatgctaaatttgattatgttatagtcgaaagtcttattgaaccaggagcatttgattcgattttacaaaatcataaagaagttggagttttcattcatagtgcttcaccaatcccatttgctactgatagtgttgaaaaagatattttacaaccagctatagatgggacaaaaaatgttttaacatcaattaaaaaatatggtaatgagaatattaaaaagttggttataacttcatcaattgctgctgttgaaccattgggtacgggacaaactgaacctaaaacaattctggaaaaagattggaatccaattacttttgaacaaggtcttgctaatccagcagttgcttattatgcttctaaaacattagcagaaagagaagtttggaaatttgtcgatgaaaataaaaaccaattaaattttgatgttgccgtgattaatcctctgtttgtatttggacctcaagcatttggaattaaagataaatcagcagcattaagatcaacgggagaaatcattaattccgtattgaaattgaaatcaaatgatccaattccatcgttagtagcatcatttattgatgttcgtgatgttgctagagcacatattattgcctttgaggatgatgatgctattggtcaacgattaattttagataatgaaatattcactaaagaattgattgctcatttaattaaaaagaatttcccttctttggatatcccagaaggtgatattgttaaaagtgaagaagaaattgcaaattatccttggagagtagatagtaccaaaactgaaaaaattttgggattcaaatatatttcattggataaaagtgttgttgatactgttaatcaattgatttga

SEQ ID NO: 6872 - DNA, 1341 bp, Candida albicans
atgtcatttagaaaaagaggtgaaataataggtggaagtcccgcaccaaatagaggccccattggctcaattccagctagagctccaggtatcgcaggacgtgcaccaccattgggaagaacaccaccagcagtaacaggtaaaggtatcactacaacaacaacttcatcattccaattaaaatccaaacctaaatcaattgaaaaagataatgctacccaaatcatgcaaaacccgggtgtaagaccatcattagtgacttcacaaccaacaacatctactggaagttctgatttagataaaatcctattgcaccaaggattaccgcttgggaattcattattaattgaagaatcaggtactacggatttttcttctgttttgttaagggcatttgcatcacaggggattttgcacaatagaatttcaaatgatattaatgctcatgtcattgttttgggtatgaaccaacaatgggcaaatgatttacctggtgtttacaaaggttcttcaaaagaacagaaaaaggcgaaaattatagaaaatgaatctaaagtgagtgtttccaatttgtccaatgctccatcaacaactaatagaacaactactgatccaaatttaaaaattgcatggagatacggtttgaataagaaaccagaaagtaaagatgaaaatgaaagttctaatagttatgaacattataataatcaatttgatttgacacaaaaattggtgccgggaccaaatccacaagatatatcatttcttccattgaatgctgagtttaataatatggtgaatcaaatctctagtataataaagaatcaattgagatcaaatcccacaaaagtgattagattgataattcccagcattctaaacccatctttatatcatccatcatgttcttcatctacatttattgtcccatttatacattcactacgttctttagtacgtcgattttctaataatctagtgttggtttgttctatatcattagatttatatccaaaagactcgagtttattattatttattcaatcattgtttgatgccattattcatcttcaaccattcaatcaagaaatgactcaattactagaaaaagcttataaaaatgaaccaacaaagattcaacaaggtttagtgaatattattaaaatacctattttatctgaaaaaggtctaatgatggtacatgatggagaatatgcttttaaaaatggaagaaagaaatttgaaattgaagaatggagtatcccggtggaagatgattcaaaagatgatactcatcaaacacaagaaggaggtactacaaccaagaatattgatttttaa

SEQ ID NO: 6873 - DNA, 1269 bp, Candida albicans
atgtttagagatagaactaatttatttttatcatatcgtcgaacaattcctcgtgattcattccccactaggcgaacccgattcagtgatttaaataatgaagaagaaaacgaaggactaatactatcgtcaacaataggaaatcaatctaataggaaaagtaagaataaatcaaatctaaaacaaggagttaatgactttgacaacgacgattatgaagataatattgaattaaaaccaatgattcctaatatatttgatattgccaaagaattggattcatatttaaatataattaataaagatattgaagaattaaattccatgtataaaaaattaataattataaataaattaaataaattaaaattagaaaaacaaattgaagaaataaattatcaaatattaattaaatttgaaaaatgttatgtattaattaaaaaatttgaatatttactgaataatcatcaacgattaaaattgaattataatcaacaagatttagaaattttaattaattttaaaaaaaattatgctgtgaaaattcaagataaatcattgattttccggaatttacaaaataattatatgaaatttttgaaaaatgatgaagaagaaaaagaagaagaagaagaagatatattgaatatgaatgatgaacaagctacattattgaatgaaggaaatgattcaaaatcgacaacaccaagaacaacaacaacaacaacaacaacaacaacaacaaattttaccaatcaacaacagcaacaacaacaacaacaagtacaagtccaactccaactccaacatcaacaaggtaataataatattcaatatttacaacaacgagaaagagaaatttcaaaattagctcatggaataattgaaattctgacaatttttaaagaaatggaatcaatggtgatagaacaaggtacaatattagatcgaattgattataatctagtcaataccgtacaagatttaaaacaagctgataaagaattaattaaagctcatcattatcaaaaaagatcaacaaaatgtaaaattatattttttttaagtctttgtgtgtttgctttattaatgatatttatattacgtccaacaaaaacaacatccccttcaaataattccaattccaattccaattctaatagtggtaaccctggtaatcctgaaaataacaacgatcaagaaccaacaagaccaaatattgataaacctgctaatgaagttaatcctcctccagttaacaaggcataa

SEQ ID NO: 6874 - DNA, 1554 bp, Candida albicans
atgcctacctcacctacagaatcaatacccaactcttctactaaagaacaaccaattctaccgaagatgttacctacggcgaaatcaccgcacacaacaccagcacaactgccacagaattccgaccaccatcaccaccaccagcaaacaccaccacagcctacagatggccaacagtgctctaattgtggaactaccaaaactccgttatggagaagagccccagacggcacactaatatgcaatgcgtgtggcttatattatcgatcaaataacactcatcgtcctgtaaatcttaaacggccaccaaacacaatagctgttgtcaaagaggaagaaggttcatgtaaaggtgatggaagatgtaatggtactggaggatcggctgcctgtaagggatgtcctgcttataataatcgtatagtggcgaaaaaagcgttggaaaaatcaccgaaaaacgattcatcaagagctcctatagataaaagtttgaaaagaagtacgagtactgacgctactactgaagatgaaagctctctagcgattgcatgttttaattgtggaacaacaataaccccattatggagaagagatgacgcgggaaatacgatttgtaatgcctgtggtctattttataggttgcacggatctcatcgtccaatcaaaatgaaacgacccactattaaacgaagaaaaagaaatgtttcggacaaaaaatcaaaagatgaggttcagatgcatctgtctgatcaaagtcccattgttgcttcagacccgatatctccgactccacataataatgagaccaataataatgttacaaatattacgacaacaacgaaaactccgacaagatcacctcattattatcaaccaccaccacaatatccgtatcaacatcgtccaataaattcgactacttcatcagccattaatcgacttcctccaatatcataccagtcaccatatcaaacagcaccgctctctcattcaccaatgcaatcatcgtcatcatattctccaggagcatcatcggtaattccttcatcatactatccgccatatagtggatctggaagaatacctaatggacccggacctgttcctggtccgcctccacctccaccaccgacgcaatcacaaccacatcatcaacaaatcacaacttctcctacttcacagtcgtacggctccttgcgtgctccaatacatataacaaagaggggttatacaccagaaaacataagattaccttctattcaattgacatcttcaacttcatctaacagtgaaacaaaattaccacctataaccaatcactcagagaaatgttgctcgaattgtgctggaccgaaatcattagcaccaatggctattgattttactgccagttatagatttaataatattgattcacaaactaaattgactaaagaagatcaaaatgatagtgagggtgtgtcacgtgacaacgacacaagagatgaaaacaagccaatcaagcaagaagaacatcggagtgcactttctattgggaagttgttaaatggatag

SEQ ID NO: 6875 - DNA, 1287 bp, Candida albicans
atggtgttatttgaagttaaaggatgggatttgaaaaataataataaaatcaaagtaggtggattacctgaaaaaaagaataaaaacaagaataagaataagaacaaaagagaaccgaaacaaattgataatggttcaaatataacaaataatgaaaccaatgcaaaaccatcgaaatctgataaagataattcaaatccaaaaaaggataaaaagagaaaacatgaaaatgaagaacaacagccagccgaagatcaacataaactgtctaacaaacaatcaaagaagcaaaagaaaaccaatcggacggactcaaatgaaataaagaatcaatctagtgaccaatcattaacaaattcatttatatcatcaaataaaaaattgactccattacaacaaaaaatgatggccaaattatctggatcaagattccgttggataaatgaacaattatatactataagttcagaagaagcattaaaattagttaaagatactccatcattatttgatgaatatcatcaaggttttaatcaacaagttgcttcatggccagaaaatcctgttgatgtatttgttgatcaaattaaaactagaggtaaaaatagacccgttaatgcacctggaggattacctggtttacaaaataaacaagttgttattgctgatatgggatgtggagaagcacaattgagccttgatgttactaattttgttaataattataataaaccccagaaaaagaataagaaatattttaaagggttggatattaaagttcatagttttgatttaaaaaaacaaaatgatagaattacagttgctgatattaaaaatgttccattacctgatgaatcatgttctatagttatattttgtttatcattaatgggtactaatttcttagattttattaaagaagcatggagaattttaataccaagaggggaaatatggatagcagaaattaaatcacgatttagtgaaagtagtgaaatcagaaatcaaaatgaagaattaattggtgaagaatttgttaattctttaaaagcatttggattatttcataaactgaccgataattctaataaaatgtttactagatttgaattttttaaaccaccaccagatattttacgtgaacgtcaattgaaattggagaaaaagaaaaagaaatttattgaagatgatgatgatagaactgatattgaaaaattggaaagtaaaagatcggaaaaagctgaaggagaatggttattaaaaccttgtatatataaaaggaggtaa

SEQ ID NO: 6876 - DNA, 2067 bp, Candida albicans
atgtactaccgtgctcgtcactcattgccttatcaaaaaagaatggagaacttgacttggaggatgatgtatattaacaacaaatcgattttcactaatactaacaatgcacctaaagagatttttgaacaaagtttggatcctgaaattgatgattttgattatgtggcacatataaaaaagattggtcaatttaatcagcaaaaaacacaacaacaacaagatcatttgcaatcaaatttagacaatcacaatagtatatttgctgataacactggtttttctaacaacaatgacagaggtagttcaggtggtggtatgacttccataagtagtttactgaagaaaagaccagctccattttcgccaatgattcaaccagaaaagacgacaatcatccccactgccactaatacaatgtcccaattatcacaacaattaaatgaattcaataaatttaaccaccccagtcaaacatccaattttaatgacgttaatcatcatatggaaatttcaacgtcccatatagcccctacttcttcggcttttgagttttccttagatccattggcatttgaaggtccaaatcaaaatttccaacctgaaccgcaccatgatttcaacaccaactcttttgattctatgacatcatcatatgagagacccttgtttgacgattttcttcctcgtgatcatcataatattcaaagctcaagtgtgcctacttcagcatcgtcattttcaacaattgtgccgaaaaatacccaattctcaacgtcagcatcaataacatcgccaacgtcaacattttccaatcaaggcaataatagcagtaatttccaccgattgaattctactgtcagtataacggcaaccccgggtaatttattacgtcaagaatcaatggtcagcttaccagattatgccaaccatttacgatcaatgtcgcaaactccaactatgaatagtagtaatgcaccattctcgcatagttttaatgatggtggtagctattttatgaataattttactggaatcacattacctagtcaaccgtcaccacaacctattcattttgataataaaccaaaagatgatcattttaatacttcgttatctgtgtcacaacagcaaccttctgccaaaaaactgaaacgaaaatcgaccattacaaaatcgaaaaagaaagctgcaagtcctgaaaccacaataaccagtactggaagcactattacgacgaaatcaacgaactcaaattcaactggtaagggaacagcgaccggaccagcagcactgaatactggtgtttcttgtacaaattgtggaacaaaaactactccattatggagacgaaatccccaaggtcaaccattgtgtaatgcatgtggtttatttttgaaattgcatggggtggtgcgtccattgagtttgaaaacagatgtgatcaagaaacgtcaacgtggtaacaataatggtagtggaaatagcagtggtacaacaaacaatagtaataattacaataataaatcaattagtaaaaagaatgagattgatgatggtgatgatttaaaccctacttcgataactaataatacgggtttgacaaacaataataatagtaaatctccggccaaatcaaaaaagaaatcaaattttgacaacaacagtaacagtgctcttaacaacttggataaatctaaattgaaaatcaatactaatgagatcacaaacatttctgagaccacatcgaatagctcatcaccagtgattaacttgaatcacgggggaagatcttctggagtgtttggtaataccccagattatttaaatggaataacttcacccgcagtgtcccttgttaaatctgagattgataatcctcatcaattaaataatagcaatagtaatggaatgttgatgacgatgcatcagtcactgcatcaactgtcgctactgacaacgtttgatcatgaggtagaatcaaataatgagggttccaattctagtggagtcaatacatcaactgctaataatcaagattgggattggttaaacatgaattattag

SEQ ID NO: 6877 - DNA, 2586 bp, Candida albicans
atgctgtcaatcactgttgaacaatatgattatcaaacattgacaaaatcatatatggatatctttaattctcaaaaatttgctcaatttcttaacaccacacaaacaggatttgcccattcatcatcaggaattgaatttagtgttcttatgaaaactttattcacatcattatgcttttgcacaattcaattgacattgttttgtttactcagaccagttttcaattatttatatcaacctcggtgcttttgcgttcccataaatgaaagaatggagactttaccaagagaattttttaaatggatagttccaacgttgaaatgcagcattaacacctatttatcgttggggttggatgcatatttctttattagattcattagtgtattactgttatttttcctatttattggaaccctcaatatggtcatactcataccaataaattataccggtagcagcacagaatatacagcatttggattggacaaacttagtctatcaaatattgctaccaccaatgtgtcaagactaaatgctcattttttaatgggactaataacaatagggtttttccattggttgattgtttatgaattccaaagttatgtgattataagacagtcgtacttgttgtcacagccacacaaagattccgtcatggcgaaaacattactaatttcaaatgttccaccatatttgcaaaaccatgaagtgttgaaaaccattttccaagtagtgcctggtggcattaaagatatttgggatataaatgagtttgaaataattgatcaccaggtggaaatagctcaagatgctttacattatttggaaaaatcgcaagtattgggactcaaaaaatattaccataaaaaggcgcaatggtgtggatcttcagtgggggactcagtagaagaaatcaaggaatttattgaaactcatgaaatatatttttaccctccactatatctgggaccaattaggattccacaaattgagcgaacaattcgcattacactaccaggatggttaagaatattttgttttcaaaaaccaatccccatgtacgagtggtctctccaaaccctttctgaatgcaaccaaaaaatagacgaagaaaaattaaaacttgctgaaggtcaactagccaaacacagtaaaatatttattgagttcacttctcaagaaggctcctatattgcccaccaatgtcttttatctcaatcacaaggtttccttgacaaaacaactatcgaaataaatcccaatgatatcatatggagaaatgtttgtcgaaatgatggtatagcttgcaagtttgaaaaatatttggttacaattgcctttatcagcatcataattctctatgtcattccagtgtcattgattggcttggtatcacaaataccattgttaactcagttattaccctttttagaatggatataccagttcccagaagaggcaagagaaacaatagctggtttcttaccttcgatattgctcggcgtcttgactgagattgtcatgatcattttcagatttctaacatactttaaaggaagaacaactggctgtgaggttgaaatcgatttacagaaatggtactttgcatttttgtttgtgcaacagtttttagttgtcaccattctgtcaagtgtcacggtgatattgaaacaaataatagatcaaccaacttcaatcccagtattacttgctaccaatctacccaaatcagcaacttttttctttcagtatatatctctccgggcatttgcattttgtggcaacaactttttaagaattagtccattaattcaatctttgatagtttgcaaattcattgacataacaccacgacaaaagtttaatcgtatcacaaatttgcctaaaataaaatggggtacgacatttgcagtgtattcaatctatgcatgtattggtatttcgtactcaataatttctccattgatatcaatattcatcattttctttctcaacttatcaatcttgtattacaagtatgcactcaaatatgtatacagtcatatcaatgaatcagaaacaactggcagactataccccacagcgttgcttcatctctatactggtgtctattgtctcgaatgttgtttaattggtgtttttttccttctgaaaaatgataaaggtggctaccccatgagagtacaaggttggatcatgacaggaatattgatcttgacaatttttgccaataccatcatttacaatcgttatatcccccatttttccaatttgccaattctttcagataaaacatttaaagatggagcaaaaccaatatcagaaagcagtagccccaacactgacgatacatgttacctgaaccacaaattgttatatctccatccagcattcaaatatgaaagtcccaaaatatggttaccaaaagatccacacgggtatactgatttgctgctacaaaaaatgctggacaggtctcaattcgaaggtgaaaacgatggtgcacaagttcaacttggtaaattttttagttctctaaaactaatgatatccgaggcaccaccggattataaatga

SEQ ID NO: 6878 - DNA, 1401 bp, Candida albicans
atgaacaaggaaatatcagaagaaccgtcaattgaacctcaagttcaaggcaacgagtccattgaagagactcgactggaacataattattcaacaaggtcgaaagaaaggaaacgggaagaagaactccaaaagaaatcccaattaaaacaaaaacaacataatgtagtaatacatcctagattgaaaccagtcccctttaaaaatctggatttgaatcctgcttcattgcctgaaccaaatgcagcaacaacgataaatgaaattgaattttttcaaactgaagatttaccattaaataaacgcggtttcaaatataaacattgtcgaccaaacccagagttcccctctaatttgtattcaacaactgatgttccaccatatcatgtatgtgcaagtttatttgatagatcctcaggtattttattcagtaatgacttgaaatcaataacaacagcacagggatggagatcatcaagaacaaatgtttgcatacgtgaagggtcatattactttgaatttaagatattgaattcgaatgagaaaagtcatgttaggataggagttggaagaaaagaagctagtttggaagcaccagtggggtttgatggttatagttatgggttgagagatgttgatggacagtttatgacaattagtcgaagacaaaagttgtgcattgagaatgggtttaaaacaggggatgtaattgggtttttgatacagttaccgtctttggaagaacatcgaagggcactagaagaatttgttgctgaaaaatcacagttgaaaccagaacaaaaattgaaaaagaggaaaaagaagaaaattgaaaatgatattaaagataatgtaaagttcattgagcatggcaatattttacgagaccaaattcctatcaaatataagaatgcgttatattatgaacaatatgaatacacaacaaccaaaacaatggagcatttactcaatccagtcacagttttcggggagaaggcaatcatagaaatggatgacaagaggaaaaatataccggtaattccaaattccaagatacgtttgtttaagaatggagtggaacaagagccaataaccgatctatattcatttttaccaacaaacattgaagatcacgaggatattaatttgggtcccaatactaaacaacaacaaaatcccaattaccgaaatactgacgatggaacactagggtattatccaatgctttcggctttccaatttggtgtagtaaatttaaatgctggacccaattttgagttcccaccactggaccctgtcaagccattgagtgatcgatacaatgaacaagtggtagaacaatattactgggatcttgttgatgaagtggaagctgaatatttagatagttttgatttataa

SEQ ID NO: 6879 - DNA, 1818 bp, Candida albicans
atgaaaccaattgccttactactagtccttttcacaagtttatcactcgctgatatgaatatggattcccattcagatatgatgctgggtagtcaccacaatgaggatgttgattcattggaaagtatgccaacttctactgagaacacagataatatcaattcaaccgaatcattagtgccaattcctcatgtaatgaagcatatgcatggagttcctattttgcagactaaattgttgccccaagaaagattattctgggagaactacaatactactacgtatttcactgtcgaaagtgctcatcgtcctgcattatatttgcatattgctgttggattgttttctgtgtttgtattttatccaataagtttaatattcaataatttaaatatgggtaaaagctacatgaccatgttgttaatacattcaagttgtattgttttttcattgttgaattattcgattttcattaattcaattcctgatctatatccaggtaatgcctataatagcatggtaattattttatttgtcaccacgattttgcaattgatttttgcctttatcaaaaacattgaaccaggagaatcggatggcaataagtatttccaattgaataatcaacatatgagagctaattcttctgatgaagaatcattacaatcaatgataagccctccatcgactgatgatgttattccttcagaaaaaccatcatctttcaagatgtcaaacttttatgataaagttatgaagtttagaacttgggttgctcaaacaaaattccacaagatttccaaaatagggtttaatttactcaattggggtcactttttctattttttgattttgattccaactggcgttgcaacattctgttgctatggtaaaggtaatactgttttcaacttgttagcacatttcattaaaggtggggtatttttcgcatatggattattatcattatcaagatattgtggtggattcactaataaaggttgggcatggaatcataaatttattgatagaaccaaaaagcaaagcttttggttttcgttacaaaacaaaggattatggacaatggaaatgattgaaagttcgttgattttattttatggctcaactaatatttttttggaacatttagccaatgctggaggtgaatggtcaccaaaagatttgcaacacgcttcaattgcatttattttcattggttgtggattatgtggtgttatcaccgaaataaaattacaagattggcgttatgaacaagcaatggctgatatggagaaatatcaataccaaggtgaagagcaaaatcaacaagaacttcaaagcaacacgaacaacaacaacaacactattattaaagctagtcccggttttagtcctaaccccttcccaattgtgactatatactggaccggtatattaatgtccaagcatcaacaagcatctagtttatctactgaagttcatgttcaatggggtaatatgtttgttttaggatgtgcctttagatttatcacctatttgatgttaatgttgaatgcaaaagtaccaaaagatttactgagaccaagtagaccatttactgaattagttgtcagctttagtttgttatgtggtgggttgatttttatggaactgactgaccctgtgattttgtcatttgaatattatgggttgacaagtatgtttactttgaacatcagtttaggttttactactttatttatgggatggcaaatgttattatttgctttcaaagattggttgaagagtaagtataataagcaacaagatatggtataa

SEQ ID NO: 6880 - DNA, 2280 bp, Candida albicans
atggattacccttcaggatcagatccatttacatcaagacaacatttattacatcatacattttcaccattaatatcaattgaagcaactcataatgttgatttaatattccaatcaataataaacaataatgataatatatcaacattacaaatcttcaaaccatatgggaataatgcgaaatattcaatcaatactaataatcaacaatttaaaattattaataatcaattgataacaaagaattatcctagtttccccattagatttgaaccatcattacctgatttggtatcggttttgaatgcacaactgagaaaccccaaaaattccaacaacttaggtggtagtaataatactagtaataataataataatggattattattgaataaattaaattcaaattcttcacctagtttatcgaattcaataacagaagagtttaaaactcgactggaaggagtaccgttgaatcaattatttagtattagttcattagaagtttatttaagacatatggcaaacccagataatagtattaacaatagtggtggaggtggttcattgtatttgaattttttcgataaattaataacatcaaatcaaatatcaccatttgaaacatttaatcatcccataagtcaaattttcattattgattatgaaacggattcaattgatatattaagaaaattaattgttgaatttagaaattataatttcccgaaatttttccaaattgatgatttattaattcatgtatttataatttatgattgtgataaatttgctactggagatattattaatttccaaaatgaaattaaaaataaattgaatgtaaatactactgttttccccatgtcatataataataataaagaaaagtccctgggtggaggaatggaaacaaatactatatcattagttgaaaatagtactattgaagaagaattacaaagaatttcttggaatgatataaacaattcatttgaaatacctaaagttgttgattacactatacggacaaaattatacgaatttattaataaatttttaatacctcatatgcaatcaaaagttagatattgggatgatcaaatcttacaacctaaaaaatctataacggggagatttttccaagtttctaaaaaattttttaatagtaataataatagtgatactagtttattaacaaatactgctaaatccttcaaaaatggcgttactcatgggaattcaaattcaaattcaaattcaaccttcaattataatgaaaattattattataaatcactgctggaacaaatactaaggaaattggctgattggtcattaatgttaaaagatttcaaatatgcttattccacttatgaattaattaaaaaagattatagtaatgatagagcatgggtttatgttgcatcaactcaagaaatgtgtattgtttctttattattagttcaaactcaacaacaacaactgccactacaactacaactgcaactgcaattacatcagcaaaatattaaatcattaattcctgataaaaatactttaagaaaaattaaacatgatattattgaaccttatatggataatttatgttatacttttaaatcaagattaaatttgaaaacatttagtttcaaaaccatgattattgttattgaattgttactttgtatgagtcaaatgtttaatatttcttattggtggtatgatactattgaaaagtatcttattaaattaaataatgaattcgatcagcatttatccaatattaataatagcaataacgataataatagtaacgcatttctgattataaaagccttgttatatgaacgattaggttataattcaggtcattcagtttttttactgttggagaattatcatttattccgaaagaattttgaacgaaatagacaagtacaaccacaaccacaaaaacaagaacgagaagaagaacaagaagaagaggaggaggaaggaatgtacgttaatgaacttaaattgagtacacctacaaatcgtggcataattggtacaacaagatttcgaaaatcagcattatggtatttattatctatgaaacaatggcatttactgaataataaatcacaaattgaaagattatttaataatattcaattagtgtatcctgatactaattccaacaccaataaacaaaatggagaagaatatgtttggtataatcgaaatgatgggattttaggaatactagaaaaatatatagataccgacaaatag

SEQ ID NO: 6881 - DNA, 1200 bp, Candida albicans
atgctttctattttgtctatcgctgctctccttattgctactgttcaggctgcggacttttcttcgtcatgtccaattgattcacctatttcttgttccagtaatggtgatacttcaaacagttgttgttatgagaaccccggcggtattattttgttcacccagttttgggactataatccagcatcgggtccagctgactcattcaccattcactctatttggaatgactattgttctggtggttacccacaattttgtgatacctctttggaaatcgacagtactggtagtactattgagtcgattgttgttgaccagtttggagatcaaactttgtatgacaatatgaataaatactggaccgatatcaacggaaacaacaaaaaattttgggctcacgaatttaacaaacacggaacatgtttgaacactttgaacccatcttgttactccaattacaagcaaaatgaaaatgtctatgactactatagtcttgtttatcaattattccaaaaattaccaacctatcaatggttagttagtgctggaattaaaccttccacaactgctacttataccttgtcccaaatccaaagtgctttgaagagtaaatttggtgctgaagtttacattgcttgtgactccaataatgcgatcaatgaagtttggtatttctacaacatcaagggttccatcttgcaacaaaattatcttccaatagacactgtttcaaagaccaactgtccaagctctggtattaagttccctccaaaaggcaattctggtgctaatactttaactacaaaaacaactggaactactacttctggttctggatctacttcagttccagctacatcttatatcaacttgactggaaaatcaggttgtctcatctcaaatggtaaatactatacttctggaacttgtgcaacctatcattttaacactggttcttccggtaatacccaaatcacttcgtctaaaggtaattgtggaattgattctagtaaccagtttacttgtagctcttcaactagtgcaactgatttccaagtatcgggtggtagtatcggatacaatggtaactttgattggtgcttgggtgctgtcactggatctggatcaactgcccagacaagtgttaaattgtctgatggttcatgtagttctttcaaattaacactttcatcttag

SEQ ID NO: 6882 - DNA, 1560 bp, Candida albicans
atgtcgtctctagattatccagaagattttgaaaacaataacccatttgcagaacctgtcatttctgatcaagtcaatggcgtacattcacaaacggaaaacaatgaaacacaactcccagaaggagagcccacggccccgcaaagtggtgaaccatcaccagaccctaactctgaaagcatattaactgaagacgaactaagaaagcttattccagaaagattcacaaccaaatacagtttaagcatccagctagtggaaattgaaaaaaataaaccagggaacccaatacttaaaatgaatgttaaagtaaaaggcttaccacgctatagacagtcgatttataaagatgttcgtagaacttttaatgaggtggtgaaatttaacagatatttaattgtttcaaatttagaagtgtttgtacctgttatccccagtgccataacatcgtatccaacaggtggcgaagatgagagaaagaaactttttgtcgaatggcaagaatggttggatagaattactagcaatcccattttaattagagatgaagaatttgtttactttgtcgaaaacgattttggatactctgttatcaataccaataggaaaacatctgttgcaagtgggatcatgagaaagacactaaaacagtttgctgtgccatacgacccttacgaagagttggctaattttaggccaattattaaagaagcgtatttaacttttcaaaaattacacaaacttctcgatagaaactcgaaaactgaaaagcaactttcaattcatatctatgatatggcgaataaattgaatcagttgtctgaatttgaaaccactcatccaggaatgaaaaatatgtgggagaaattgggtaaaatcacacaaaagcaatctgattttacgttggtggactcgattaacgaaatggcaacattgggagatggaactcaaatattaatagacgatttttatgaaattaaagaagctttaaccaatagacacttgatcatgagggaattgatccaagcagaaactcaaaccaatgcaaaacatgttcaggcaaataaaataaaaaacaaatcttccttggatcctataaaagttgacgaggcattgagatcattggaatatgcttcgaaagtacaagaatcacttcatttacaagttaaaagaatatctggagaaatgatgtttgaaagaaaagaagtcatagatttcacggagaaaaaaatacaacgcttgatgaaaggttatactttgcacaaagtagaacaccataggaaaattcttaagcattttgaaaatataaggttggatgtacgaagtgtcgatgataagggtggattatctagactcaatcgtgacaacttgactaatttgaagcataacttgacacaatcacaatcttcacaaggagattcatggtcttcaagaactttcaggtcgttggaaaaggaagaagaagaaaatgaaaacaaaaagtcggatgtaaatgggtttgaatcggcaactgttgatgctagaaatgcggcaagtctcttaggcgtggctacattctaa

SEQ ID NO: 6883 - DNA, 1389 bp, Candida albicans
atgtcgaaagtggaagctagtctggggactaataagaatcctgtctccacagccacaagcacagttggagagagtgccacagctacaacagaaacatcaacagaattgagggccaatttcgctgaggtgacagatccaaaactaaatgcaaaaccgcaatcttctccgttattatcatcgacgccgcctctggtttccaaggcattggtgaactcgtatccttacttgattattatcaataaactcctttcaataacaacatggactaatgacgattactgggtcaacgtggttattatcagcttgtatgcgttggttgttttatactttgagaatttagtcatttggctgggtcatttaattcttgtggcaatattgatttcgtatgcgttgttgaacaataagatcattaaagaggcaaacttgcatcctacgttggatgatgttgtccaggcattgacgtcgacgtgtgttaaggcagatatcttgttgctgccaattacgtcgttatcgttgacggcatacgacattaagagattgatattcactacattgtttttgactccagtttatcttgtggttacgtttttgttgatcaagccaaggacaatattactattgactggtgtgtacttgctaacctaccattcgtcgtattcaattgtcaccagaagaattctttggaagttaaagattgtcaggctaattttcttttatttgacagggttggatttgtcggagaccaagaaccattcgctttttgctgccgcatttgcaaaggtcagcagcagtggcacatcttcaaagtcaaacaaacctgttcgattcacatacgtcatatacgagaaccaaagaaagtggttgggtattggctggacaagcaatttattgtcctatgaaagaactccatggactgatgagtttttgaatgagagtagttcgattgactcgtttaaattacccaatgctgccgatgatgctacgaatggcgattccaatatgcagggcgctacttggagatgggttgataagacttggagattagatttaaccaacgatggtgcaattactttatcgagctctaagagatcaaaaacaactgctaacccaaccaacgatgaagggtttatatattatgataatacatggaaaaaaccttctacagaagacacattttccaaatacaccaggagaagaagatggatacgaactgcagaattgatatttgataataaacaggaagaagcattggagtcatcagaaaatgttaaagcaactggggtaagtgttcaggacgctacaaccaccaagaaagtaaaaagcttacgatttgccgaagatgaaagcaatgttgaagaatcagctgatactgataagaaaaatgattaa

SEQ ID NO: 6884 - DNA, 1245 bp, Candida albicans
atgaataaccaaactgatttgtttagtaatgttggtgaatccactgtgaataatagcagtagaagaaggaaaaggggagccaataaaaatgaactacaattaacttacgaatcagattcaagtgatgaccaagaaggaaattctgataatgaaaataacattagcaagttacaacaacaacaacaactggaggaggatatattgggagataataaagaaaatgacatgtttgatagtgataaagaagacgatatgtttaccaatgacaatgaagaagaagatgacgatatgtttgccagtgataatgaagaatcagatccgcagaagaacaaccttgatgatgaggaagaagaagaagaagaggaggagataaaggaaacagatgaatcagttaacaattattataacaacattgaagatttaaattttgattcattccaaaataaaaaaaaggaaccgaaatttgaagcatttaatttgaaagaagaaaccaacatggggaaatttgataatgaaggaaattatatacccaatgaacaaaaagattcctcggatgctgatgatgatgatttatggcttgaagattataataataaatcagaaataaataaagctaaacaagctcaacttctacgggaaagacaacaaagagaaaaatcaaaatcaaaatcaatggagaaagatcataatgttgaaccattagaagttttattatctgatttgatattgttattagaacctgttgaatcaccaatggaagcattagcaagattgaatcctaaaaacttgagaaaaaagaaaaagaaaggtgatgatgatgataacaataaaaatggtatagcaaaccatgaagaattaattaataaaatcactaatgtttgttcgattttaattaatgataaacaaattgatgatatatatgaactaactagagaagaattgacgaggaaatttcaaacaataactggacaaagttttaatgttgaacgaggtcttaaacgatcaagagaagaaagtgatgacgaagatgatgaaaattctcaaattaataatattgattatggtgaaaaaatatgggaattcagatggattggagatgaaaatgaagataaagttataaatggaccttattcaagttatgaaatgaatcattggaaagaaacttattttgaaaataaagtagaggtacgaaaaattggtgaaacaaaattccaaaatattgaatatattaatgaatttacataa

SEQ ID NO: 6885 - DNA, 675 bp, Candida albicans
atgtcatcatccacattttcacaaacaaggtcacaggcattaagtttggaaaagcaaacagaacaattattatcaaaattttcccaatttcaacaacaacagcaacaaaatcaatcacaatctttagatataacaccagaagaaaccattataagacaacaaatagaagagattttccagaaaagaaatgccgtaattctgaaattaaatcgtattagtgaagtagaaccaaatttatcaacatcaaaattacaacaattgactcgtcataaagaaaaattaaatgatgataatttatcatttacgaaaattattaataatattgaagatgaaagaaataaaaacaatttattattcaatgttcatcgagatataaatcatcataaacaacaaagaaacattgatggtaatgcatatattttagaagaaagtgaacgagtgaataatgttaattccatagctgatagattattacaaggtgcatttgctacaagagatgaattattaaatcaacgtcaatatttaaataatgctcaactgcaagtattaagtactatgcaaaatattcctggattaaatgtgttgattagtaagattaatactcgaagaaaaagagatacattgatattggcttcagttatagctatttgtatattatttttattctttgtgtaa

SEQ ID NO: 6886 - DNA, 1266 bp, Candida albicans
atgagtaatcccattgttccttttgggaaacaatttagggctaaatatttcactaatatggatgatgaagtgtttcctgtaaatcatggatcttatgggttgacacctactccagtacttgaaaagtatttggacttgatagtcaaaaatgcatcatacaccgacaagtttatgaagtatggtattaaagacagttatgttgaatcattgaaggcagtgggtagagtactcaattgtgattaccacaatcttgcctttgtcgataatgctacttctggtgttaatacaatattgcgtagttaccccttgaagaagggcgacaagttggttattcaaagtacagtttatggagcttgtggaaatacggtaaagtttttgcatgatagatatggtgttgaatttattgttgtggatttgaactacccaataactgatgaagaaatattatctaaatttgaacgagtgtttgttgaagaaaagccaaagctttgcatgtttgataccatatcatccatgccgggagttgttttcccttatgaaaaaatgacaaagctttgtaaaaaatatctggttttgtcattaattgatggtgcccatggaattggttgtattccccaggatttaggaaatttaaaaccagatttctacgttacaaacttacataaatggttctatattccatttggttgtgccgttttgtatatcgaccctaagcatcacaatgttgttcatactttaccaattagtcatctgtatcttgaagatcacgtcaaattatctgatggagatcagaaaaacaggttaattgatcgatttttcctctatgggaccaaaaattttgcatcaattcaggtgattcccgaagctattaagtttagatctgaagtttgtgacggcgaaacaaagatttatgattattgtcacggtttggccaaacaggttggtgagttggtctcaagaaaatggggtacttcatatttagatcaaaaaggttcaactttgattagtacaatggttacagttgaggttccaacacaagattatcccgagattgtgaaaaactggtctgttattgatcatcatgtttataataaaatgtttgatcgtaaggcttacaccccttgtatcgcccacaatgggaaattgtttgctagattttcatgtcaagtttacaatgaattgagcgactacgactatgcaagtgatgttgtgttagagactttaaaagaagttgcctccgaacaatacaaaaaacataagttatag

SEQ ID NO: 6887 - DNA, 1362 bp, Candida albicans
atgagtgaaatcttgaattatttatcttcgtggactccaacttccacacctacatccactacattatcgtcaatagctacatcccatgtttcaaaactttcccaaactgttgcctcagtgatttctcaagccaccactgaaacagattggtataatttacggtcattgtcacaagcatatcgtggtgctcaagcttcattaacaatcatttcggcagaaaaagtgttagctaccgctactgatagtcaagtacagtcaagagccacacaagcgatttttgaagctactttaaatcttaaagatttatctatggaacaaaacatttatggttatgaattaaatcgtgcagcaaatatcatatatttagttgtttatgcaataatttttggttatacccttttaatgtgcattaaatcaaaatactggtggtataatgtgacatttgtctgtggatatggtttagagtttgttgggttcttaggacgagtgttgtcatttaatgatacttccaatatgagtcattatataatgcagtctgttgctttaaccatcgcacctgcattcatcatggcaggtgtatactttttatttgggcaattggtggttattcacgggagacaatattcagttttgaagccaatgtggtattcttattttttcatcactgccgacgtggtttcattattgatccaagctgctggtggaggtattgcttctgtggcgtcaagtaaccataaagatagttcagtcgggactaacattatgattgctggtattgctgctcaagttgtggcgatgacaatattcttggtgttttggtttgagtttcttaatcgcttatactttaagaattctcgttctgatttgattgtcgattgtccctatggtcgacgttcgataagcaattattttaaattattgttgaatgtcaaatcggtaagaggtcatcgtcatactcatttggaaaaatactataatgagaaatttgctagtattcgacaaataccattattcgattatatggtgcttgccatgaccattgctgtcattgttgtttatattcgttgtgtctatagagtggcagaattggctgaaggatggggtggatatttgttcacgcatgaaccatatctcatgattttggatgcagcaatgattgctattgccggtctaattttcattccattccatccagtttgggtatttggtaaaaacaatattgtcaagttggcaaccatcaagaagaatcttgatgaaaatgaaaaaaatcaggacgttgaatataatgatgatgttgaatcacaagaacgcagttctagcgtggttgcaaatgacatacattgtttaaatagtaagttatga

SEQ ID NO: 6888 - DNA, 1095 bp, Candida albicans
atgaacttttttaggaagaaaacagaagaggatagagatagttcctcatcaagtcttccccgagatgacacagcttctgtttcatcaaaagcaacaagcacaagcacaaacactacttcaaaagtggaactcgtcaaatgttatattccctttgaacaaccggtgaaccctattaaagcacctgattttgaactcgataaagaacaaattgaaaaatatgaaaagttggtagcatattttgaagattatatttcgaaggagatacctgtaaatgaccagcataatgctaccacgcatccactcattgaagatgagttggcttggttgacgaaagaatgctttctcagatatttaagagccacaaaatggaaggtggatgctgctatcaagagaatcgaggacactatcatttggagaaggacattcggggtcgctaacataccaaaccatacagatcccaagaaattaattacagcagatttggtatctgatgaaaacgaaactgggaaacagttgattgtgggatatgataatgacaacagaccatgtctttatttgcgtaatggttatcaaaacactgctcctagtctcaaacaggtccagcatttggttttcatgcttgaaagggttatacactttatgccgcctggccaagatagtttggccctattgatcgattttaaagcggctccagctgaacttaatttgtcgtctaaatttccatcattgtctacgtcaaaacaatgcttgcacattttacaaagtcattatccagaacgattaggaagaggcttgtttacaaacattccttggatcggctatactttcctcaaagttgttggtcctttcattgatccacacacgagactgaaaaccatttatgatcaaccatttgaaaattttgttcccaaagaacaattggacaaagaattcaacggtatattagattttgaatacattcatgatacatattggccaaaaatgaatgagattgccgacagaaaaagagccaactacatggagaatttcagaagattgggatcaaagattgggttgagtgaatacgaccttagattagaacaagctgcattataa

SEQ ID NO: 6889 - DNA, 870 bp, Candida albicans
atgctgctgctgttgttgttattatcacgtacaatcaaacacaattccataccaattaaaaaacctttatttacatttacaccaacatccacatccacatccagatctatttctatttctacttcttctacttgtaatatcatccgttattatcattctcaagatcatataaatattaatactattgataataataataaaattgatgatcaaatattaactacagcaattaaatatattcctgaatatgggtttcaatctcaatgtattactaaagccattaaagaattgaaatatcctgattcaatgaattctcttttcacatttaaaaaaagtgaatctaatcaatcattggaattgcaattaatgattcattggttaaaattacaacggtataatttagaaaaatatattgaaaaaaatccaaccccaggtagtagtagtagtagtagtaccctgtatgaggatagattaattgaattaattaatgttcgattatcttataataaaccgattttaaatcaattaaaaactacgggaatcagtcaattaatcttaccttataatttaactcaaggattaaatgaattatatttattaagtgatgatttagctttttatctgggagatgaatctaatgattttagttggtatagtaaacgattaagtattgcttcaatttatgttagctcagaattatttatgttgaatgataatacaaaagattttgaattgactcaacggtttataaaacaaagagtttatgatttgaaaaaattaagtgatggttataataatattgaacaatggttgggatttaatggtattagttttattaatttaattaaatctcaattaaccagaggttaa

SEQ ID NO: 6890 - DNA, 1869 bp, Candida albicans
atgagacgagcagtatcaaaaatactacccacccccaaactatttaacgactccgcccatttccattcaaatttcaggcttgagtacaactcagttgatgatttttacgtacagttagataacccacataaggtctggttaccaggagaagaaatctcaggacaagttgtattaatttcgaaaaagaatttggcaaatatagtcataacgttgtcgttggtggggtttattaaaataaatgcatcgtcacatctgaagttgaggcctttgaagcatacgttatttgattatactattaaaatctatggtaaagatgaagaagaacaaacagactcagcagagtttagtaatggacttttgaaaggcgaacatgtgtttccgtttattgtaaagttgcccaataaaagagtatatacgtcgattgattttgggaaaggttccatcaactacattttgaaagcagctataggaaactcgtcgtcctatgtgatacctgcctcgcccgacaatgccagtactagcagtttaacgaaaaagaaaatactacagaatcctagtcacacatcagaaaaagtcataagtctagtaaatccaatagatgtttcgttattgcctcgaccgaaaccaaagagattgattctcaaagatccacgaactagctcaaacaaaaagttgtctcgcacgcaaacgtcaacgtcaaccatcaacaccatgtcttctaacgaacacgaccattcgttgcccgaaggtgccacacctgaagattccgaccacaaatcattaaagtcgatacctgtgcccacgatcaaagccatattggaagtgccgcagcgtggatacttgcgaggcgagctgatcccgatcaagctttctatcaaccatttacgaaagatccaggatttcaatggtattataataacgtttgtcagagtttgtcgattagacaatggcccagatggagttgttgagtcgtttagaaaagatctacaacagttgatacttcccttgtatgttgatcctgttactttccaatccgaaatcaattcgtcgctacgagtgcctgctgatgccttcccgacaattttggggtgtccgttagtttcattccagtactttgttgaagtactaataaacctttctggcaaatcaattgcgcttgattctgatgttgatgcacgcgctaaagccaacccgcaagcaaccaaatcatcactggacaagtttaagtttaactttgattccacccaaaccgagagatctacctatatcaataccgatagttataaacgactgaagaaatttctacaattgacaacagagatctacattggaacccatcgtctgtcaacgcaagaagagcaagcaccacaagcagaggaagtggcatcccgcaggtcgtcgtccatggcatcgaattccaattcatcaccggcagtattttctacatcctcaccacattcaccagtggagcaccagtacgcaggtgcgatcaactcaatacccgaatcagttgcagttagtaattttacaccaccttacgaaaatgttgtgccgctgtatgtgccaccagaattcgtgtctcatctacagaaccagtctgagttgtcagaaaaggaaagaatgagacaacatgaaagtagtcttttgccgtcagcaccacctgatgatgaacaaccaagtccagtcaacatgacttcgaatcaacaaccattctcgttttttacataccagaacaccaacacgtccccgccagtcccattggatgacgatttgtaccaggaaccagttgattcagcgccaaattacttgaacgtcaacaatgaccgtttgatagttccccaggataataactcgaattcagagacgtaa

SEQ ID NO: 6891 - DNA, 1740 bp, Candida albicans
atgcaaaaggttttccaaagatgggtatctagaatacccccagttaagctccaatataagaatatgcttagagacccttccaaaaaatactctccaccaaaacagatcaacttgcccaatagaacttggcccaccaaagtaatcactaaagctccccgctggctttccactgatttaagagacggtaaccagtccttgccagatccaatgtcggttccagaaaaaaaagaatacttccataaattaattgatattgggtttaaagaaatcgaagtttcgttcccctctgcttcgcaaactgattttgatttcacccgatacgccgttgaaaatgcgccagatgatgtaactattcaagtcttgacccaatctcgtgaaccattgatcagaagaacagtggaatcggtaaaaggggccaagcgtgctaccattcatacatatttggcaacctctgatgtattccgtgaagttgttttcggtatgagcaaacaagacgctatagacaaggccattgaaactacaaaattagtgagatcattaactaaagatgaccctaacatgcaagacactgaatggaatttggagttttctccagagtgtttctcagatacgccagttgaatttgccgttgagatttgtgaagccgttaaaaaagcttgggaaccaacagtggaaaacccaatgatcttcaatttgcctgccacagttgaagttgctggtcctaatgtttatgctgatcagattgaatacttttgtcaaaacataactgaacgtgaaaagattattgtctccacccatactcataatgaccgtggctgtggtgtcgctgctaccgaattgggtatgttggctggtgccgatagagtggaaggttgtgtgtttggaaacggtgaaagaaccggtaatgttgacttggtcacggtggcattgaacttgtacacccaaggtattgcgccaaatttggacttttccgatatcgagagcattattgaggttagtgaacgttgtaataaaatcccggtgcccgcaagatcaccttacggtggctcacttgtggtgtgtgccttcagtggatctcatcaagacgccattaaaaagggttttgctaaacaaaagggagacaaatgggctatcccatacttgccattagatccaaaagatattggcagaacttacgaagccgtgattagagtcaactcccaatcaggtaaaggtggtgctgcctgggtcatccttagatctttgggattggacttgccaagacacttacaagttgccttttcaggattggtgcaaaacactgctgacctgttgggtagagaattgaaggttgatgaaattgtcaacttgttcaacgaacaatacttggtgagtgcccctttaagcattcaggattttgaaatcaccaagaataaaaacgatgaaagagaaattgttgctcaattaaatgatggcatcaccattaaaggtcaaggtaatggtcctatctctgcttttattgatgcaatttctaacaagttcggtgttttgtttgaagttgtaaactatcaagaacattctttgggaggtggttctagtagtaaggcagcaacttatatcgaattatcatatgttaatgccaatggtgaaaaagttactagatggggttgtggtatcaatcacgatgtgtcacaagcctcaatcgaagccattcttagtgttgtaaactctttgattaaaaagaatgaattaactgtatag

SEQ ID NO: 6892 - DNA, 1479 bp, Candida albicans
atgtctaatatgaattatcaattcccaccttcgtcgcctttgctcgaagattattcttataattcttcaaaagaccctttcacgtcagttgcgtcagctaaatccaaggttgctgaagaagcggcagaagctcgagtatctcgtgataactatccaactccaaatccatcttcctcgttattccgttcatcttctccagcaagagaagcttacggtgataatgatgttttcagaccagaacctaaacaaacagcaaatatcaacaaagatttcaatgttttgaatccagataaatcggttatgcgtatcccattggtcaacacacacacacatttctccattggcagatcgtcacgcagttgtgaatttgctcttactgcttcagaccctcgtatttccagagttcatttgaagttaagttccagttctcagcaaattattttaacgtgtcttgggtcaaatggtgtaggtgtcattattcctaaaccttgctttgtttatgaaaccaattccccagataatttcataataatggaaaatactactggcaaacctttggatgcacatttgcataactataaattgaacaaaacaatcaagttagatggtaatcatactgaattttttgttcgtaaaggtgaaactattactatgcctaaatttgaaaatatcttgttgcaaatctcaaaagatataatcttgttgaatccaaatgatattgatgaagatttgactgacgaagagaccccaactttgcttattgagaatgataacactaacactaataacactactccaatgaacaaaactgttagtttgacgcttccaaaaaccccattaaagccaaaaccaaaatcaattatcaaagttgctgaaaacaataatgaagaaccagacgaaacaccaagcaaggagcaacgctctgttgaaaatagaacttttctcttgtttgaagataagaatattccactgcgttccacgtctacttcacccaagccaccagcagtactagctgacaaaacaaatattaaaagaaaggcaacttccgaagaaccacaaatcaaaaagaagaaaaagcaaatcaagagacaacaaactcctgaacttgacaactcagtattggcgttaccaaatttggcagaaattcaaaatatattgattaatcatttggcattctcaagattgagttctacgccggcatcattcttgaatactattagtgtgtcgacatctaaattatctttagctcaaatcagagccattttacatgatttgaaatgtattggagtgattcatcgtcaagggaaagatgccgctggtcaaccattacaggaagaatattactatatgcctgaaaatgatgaagacagagaaagaactactttggtttctaatatcaaaggtcatggtggattaagatcctgtagaaaaactcataagcaatactattggaaaaaaccagcaccaatcaagaagtaa

SEQ ID NO: 6893 - DNA, 1080 bp, Candida albicans
atgtcaaagtcagttaatgttgcaattattggatccggtgttgttggttcatcatatcttagtcaattgaataacttgaaaagtaacatagctttcaatgtaatttatttggctaaaacttctgaagaagcattatacagtaaagactactcaccagttgatttgtcaacttatgaaacagctccaactcaacctacattgagcttagatgatttggttaaattcataaaaggtgcaaagaaaccaactgtgttagtcgataatacttcgagtcctgctattgcaaattattaccctactttcattaaggaaggtatctccattgctaccccaaacaaaaaggctttctcatctgacttaaaggaatggaaagaaattttacaaacagctgaattgccaggtgctggtttagtttaccatgagtgtactgttggtgctgcattgccaattatctccccattgaaagatttgatcgctactggtgataaagttgataaaattgaaggtattttttctggtactttgtcctatattttcaatgaattttctaaaactgaaaaatcagacgttaaattttctgatgttgttaaaaaggctaaagaattgggttacactgaacctgatccaagagatgatttgaatggtttggatgttgccagaaaagtcactattttggccagaatttccggtttagaggttgaaggtccaacttctttcccagttgaatctttaattccaaaagaattagaatgtgtcgagagtgttgctgaatttatggaaaaattaccaaattacgatgctgatattcaaaaagtcaaagatgaagcttttgctgaaaacaaggttttgagatttgttggtaaagttgatcttaacaccaacaaagtatcagttgaaataggtaaatatggttttgatcatccattcgcttctttgaaaggtagtgacaatgttgtttctatcaaaaccggaagatatccaaatccattgattgttcaaggtgctggtgctggtgctgaaatcactgcacatggtgttttggcagacactatcaaaattgctgaaagaattgccaattga

SEQ ID NO: 6894 - DNA, 1122 bp, Candida albicans
atgtcattccaagaaattcctatcattgatttgcaagaggctttcgatccagccaccaggtcaaagtttttggaagaggtgcgggatgccataatcaatgtggggtttttgttattaaagaattatgaatctttaggacccacagaggaagacttacagtcaattaagcagcaagctattgagttttttgcgttaccagcaaaagaaaaacttcaatgtgaaatgctcaatagtccccattttttaggttacaccagattagccaatgaaataactgcatcacacactgattggagagaacaaatagatcttgccacagaattaccagcaccaaaagaaggtgagccattgtacaaaaatattgaaggacctaacttatggccaaatcctgaagtcattcctaaatttagacctaccattgaaagatttatagaaaagatgactgcattgagcaatgtctttaaagacttggttgctgaatctattggagttgatcccaaagcgttgaatagatatttcaaagaaaaccaacaatgtaaaatgaaattaattgcttatccagacgtttcagagttagatggaacaaaatctgccgctttagacgatacaccggaaactaaccaaggtgttgaacctcacagagactccgatttgataacctatatctaccaagctaccgagcaccagaactcgttgcaggttcaaaatttccaaggccattggataacagttcctaatattccaggtcacctagttgttaacaatggtcaaactttgcaagctattactggtggtgtggccaaggctacaatccatcgtgttttagtacccgaaaaaggaacagggacaagaatctcaattccgtttttccaaactattgatttggacagctcaaagggtgttgtagataatttgccccaagaggtgattgatttgaaaaatgaacgagacaaaaaaataaaagactggggggttgatactggattccaatttgagccggatgtgagcaaagaaccaattggccatgccgtttttagaaacagaatcaaatctcatcaagacgttgcaaaaaaatggtatccagatgttttgaaatctgttttacaagaatatacgcattag

SEQ ID NO: 6895 - DNA, 1731 bp, Candida albicans
atgagtaggaagtcttctattgatatgcctaaagaggcatctagccccgagtgctacacaacatcgacatccagtaatgaaataagtgaaaaaccaggcatgtggcgaaacttcaaagattcattcaaacctcctgtgcccatcgatgatattgagaatggatcgatatcttcaactcaattaaaaggtggacagaatgttccattacaacaaagtttgaaaaaaagacaactacagatgattgcattaggtggatgtgtgggatcagggttattagtggcgtccggagctgctttgcgtaacggtccagcaagtttgttaattgcttggttcatcgtttctacatttttgtattgtacgatgcaatgtttagccgaattatcgagtactttccctgtgtcgggatcctttgcagtctattctataaagtttattgatccaagttggggtactgccatgggttataattatgcattattttgggttgttgtcatgccattggagttggttgcaagttcaatgactataaagttctggccatcaaatataaatacatctgtttgggtggcagtcttctatgttttgattattggtacaaatttgtttggaggaacaagagcttttggtgagacagagtttgttgcatctgttataaagttgttaggaattgttggtttcaacattttggcaattgttttgatttgtggtggtggtgaccaaggctatattggaggtaaaaactggcatcctccattcaccactggtgtcaaaggtgtgatatccgttttattgacagcaacgtattctttagctggtacagagttggtggggttgacatctgctgaagccgctggtgatgctcgaaaagttttaccaaaggcaatcaaacaagtattgtggagaattttgattttttacttgttgactttgacattagttgggtttttagttccggcctcagacccacaattaattggtggtggtagcggggcatctgcttctccatttgttattgcaattagagaaggtggaatcaaagggttgccttctgtatttaatgttgtcgtcttggtagctttattggctattgctaactctgcggtttacggattttcaagaaccattttggctttggctgaacaaggtgttgcccctagtatatttaaatacgttgacagacagggaagaccacttgctggtatagccacttctgccattgttgggttgttgtcttttgtttctgcctccaaacagcaagaacaagttttcgactggttagtcgctttgtctggtttgtctaccttcttcacctggggaagtattaatgctgcacatattagattcagaattgcaatgaaagttcaaggaagatcattagatgaattgccatacaaggcaaacacaggtgtattgggagcttactacggtttaatcatgaacgttgctgtattggcattacaattttggctcgcagtgtggccaattggaggtaaaccagatgccacatacttttttaaacaatatttggctgctgtcttggtgcttgccgtttacgtaattcacaaagttgctaccagaaactggaaatttatggtcgattacaaggatatggatcttgactccggaagaagtgatatagatattgatatacttaaacaagagctcgaagaagaaagagaagcttataagagacagccatggtattacaagttttatcaattctggtgttaa

SEQ ID NO: 6896 - DNA, 957 bp, Candida albicans
atgcacacacatcattcacacagtggtgactatgtatctcatgcagtggacactttaaatgatatggtagaactctactataaaaagggatttcaaataatatgtttaactgaacatatgccacgattagacaacaaatatttgtatcctgaagaaattgacaaatcctacactatagacaatttgaatggtgactttacaagatacttaaatcatgcccgtgatttacaattgaaatatgccactaaagataagagtagtagtgggaatatgaaaataattattgggtttgaagttgaaggaataaacatagatcatataaattattcacaagagttattgaataaagtgcagatgagtgttggatcagttcattttgttaatgaaatccccattgatttcaataaggaattatggcttaaggcaagagaatccactaaaagtaagacaactcgtgaattgtataatgattattttgaattacaatataaagttataacacaattgaaacctaccgttgtgggacattttgatttgattcgattattacaaccagaagatgatatcgatccaactactggtaaactaactaaagatgtcaatttagaaattgattggcctgatatttggcaattggttattagaaatatcaaatttgttaaactgtatggtgggttgtttgaacttaattcttctgccttgaggaaaggttgggatacaccatatccaaaacgagatattgccaatgctatcattgaatatggtgattccaggttttgtttatccgatgatgcccattcattatcacaagtaggtatattttattcaaaagcttgggaatatgttgaatcattgggtatggaaaatatctatcatttggatctagatgataatggagaagtggtaataagttctaaaaaaatacaagagctcaacaattctctattttggaaatag

SEQ ID NO: 6897 - DNA, 1116 bp, Candida albicans
atggcatctatctgtgcagcaccacattgtggtaaagaaaccgaatcagctttaaaatgtcctgtatgtttgaaagaaggcgtttctagtgtattttgcaatcagatctgtttccgttccagttgggcaatccataaaggtattcacaaggcagaagacggttctgaagattacaacccattcccaaattttgaattcactggcgagttgagacctcattatcccttgacaccaagaagagccgtccctaaacatattaaattacctgactatgcccaagatggtaaacccatcagtgaaatcaaaaacgatagaatcgggaaaatccctgtattgacgccgaaagaaattgaaaaaatcagaaaagttactaaaatagccagagaagtgttggacattactgccagtaacgttaaaccaggtatcaccaccgacgaattggatgcaattttgcataaagaatgtgttaaaagaaatgcttatccatcgcctttgaactactacaatttccctaaatcgttgtgtacatctatcaatgaagttatttgtcatggtataccagataaaaccaagttacaggacggcgatattataaacttggatgttactatatattatcttgggtttcatgctgatcttaatgaaacttattacgttggtgacaaggcaaaatgcaatccagaactagtcaatttggttgagaccaccagagagtgtcttgatttagctattaaacatgtaaagccagggattgcatttagagaattgggtaatatcattgaaaagcatgcaagtgaaaacaactgttcggttgtgcgtacatattgtggccatggttgcggggcattattccactgtcaacccaacattcctcattatgctaaaaataaagccattggaattgctaaaccaggtcaagtatttactatagaaccaatgcttaatgttggaacatacaaggatttgtcatggccagacaaatggacagctgtcactcaagatggtaaatgctctgcccagttcgaacatatgttgttagtaaccgaagacgggtgtgaagtattaagtgccagaacggaaacatctccaggtggacctggacccagaataaaataa

SEQ ID NO: 6898 - DNA, 1755 bp, Candida albicans
atgtatcgctacaacaaagttctagatgcaacactcattgcattagtctcctttcatttagttatatccccattcaccaaagtggaagagtcgttcaatatccaagcaattcatgatatcttgaaatttggtattttcccacttgagacaattgacaattatgaccacaaacaatttcctggtgtcgttccaagaacatttcttggaagtcttgttgtggctggattagcaaaaccaatattattgttaagttctgcatttgggtttgaaattgagggttacgagttgcaaaaattggtacgtgccgttttgggactcgttaatgtacttatgttgattcgcttgagagatagcataaataagataacctttagcgacaagaaaagtaaaagaaaaggtttgattggtttctggtatacgactcttttattgtcccaattccatttgctttactattcgtcgcgtactttgcccaactttattgccttaccattggtcaatttttctcttagcaaaatcattcaaggcgatttatcgggtcttacatggttagcatttacaggtattgtttttcgattagaagtaggattgtttggattaatcatcgcaattgtgtcgtcgttgggttttggccaatctaacatttttggtaacattatttacttggccatgggtactttactaggtggatttaccagtttttgtattgactcctatttttggggcagacctttgattcctgaaatagactcctttatttttaatattgttcaaggaaaatctaccgaatggggaacagagccatgggatacatatttcaaaaagtacttgtttcaattattcaggccaccagttatattgatgttggctattccaggattaattaatgatccagccaatgatggtaccaaatttggagataagaaatctgtcccccaccctgcaaggtattcattgcgtattttgttcatctcctctattttgtttattgctgcaatgtctttccaacctcacaaagaatggagattcattgtttatactattccaattttcacattacaagctgcaaatggagtaacaaacatttgtcaaaaatgggggttaagcgttctcaacaaggtattgatttttattattggggcaaatgttattattagttctttattgtcgttgcacatgggctatatttctagtttcaattacccaggcggtgacgctttacaattcacaaacaattatattttggaaaactacaaaaatgaaaccgtgtctgttcacatggatgttccagcgtgtatgactggaattactagatttggagaattggatggtaaatttgctagttatgataagagcgaacaagattttgatatcactaactacgatattataattactcacaacgaagtcccaaactgggagttattacattcatcaagagtgtttgatggaatttctctcagaatgtttatacaaatctttatggctcaaagaaaagacagactgaccatctttaacattacaaaattaatattaagtgaatttgctcaaggagaatttggaacagttcatgatatgttgaggtcaaccatcacaacggtcgagtatttaaacgtttacaaaaatgtgaataaaaacccacatatggtacaaggtgtgccagaaacaaagattatcgaccaagagattgatcctgaggaaattcgacaagatgtaaacgagcagatagacaagtttgaaagtgctgtattataa

SEQ ID NO: 6899 - DNA, 1653 bp, Candida albicans
atgccttacactcctattgacattcaaaaagaagaagctgacttccaaaaagaagttgctgaaatcaaaaaatggtggtctgaaccaagatggagaaagaccaagagaatctattctgctgaagacattgctaagaagagaggaaccttgaaaatcaaccatccatcatctcaacaagccgacaaattgttcaagttgttggaaaaacacgatgctgacaagactgtttctttcacctttggtgctttagacccaatccacgttgctcaaatggccaagtacttggactccatttacgtttccggatggcaatgttcttctactgcttccacttctaacgaaccatctccagatttggctgattatcctatggataccgtcccaaacaaggttgaacacttgtggtttgctcaattgttccacgacagaaaacaaagagaagaaagattgactttgtctaaagaagaaagagccaagaccccatacattgacttcttgagaccaatcattgctgatgctgacactggtcatggtggtattactgctattatcaaattaaccaagatgttcattgaaagaggtgctgctggtatccatattgaagatcaagctccaggtaccaagaaatgtggtcatatggctggtaaagtgttagtcccagtccaagaacacattaacagattggttgccatcagagcctctgctgatatttttggatccaacttgttggccgttgccagaacagactctgaagctgccaccttgatcacctccaccattgatcacagagaccactactttatcattggtgccactaacccagaagccggagatttagctgctttgatggctgaagctgaatctaaaggcatctacggtaacgaattagctgccattgagtctgaatggaccaagaaagctggcttgaaattgttccacgaagctgttattgatgaaatcaagaatggtaactactctaacaaagatgctttgatcaagaaattcactgacaaggttaacccattgtctcacacttctcacaaagaagctaagaaattggccaaggaattgactggtaaagatatttacttcaactgggatgttgccagagccagagaaggttactacagataccaaggtggtactcaatgtgccgtcatgagaggtagagcttttgctccttacgctgatttgatttggatggaatccgctttgccagattatgcccaagctaaagaatttgccgacggtgttaaagctgctgtcccagatcaatggttagcttacaatttgtctccatctttcaactggaacaaggccatgccagctgacgaacaagaaacttacatcaagagattgggtaaattaggttacgtgtggcaattcatcaccttggctggtttgcacaccacagcattggctgttgatgacttctctaaccaatactctcaaattggtatgaaagcttacggtcaaactgtccaacaaccagaaatcgaaaaaggtgtggaagttgtcaaacatcaaaaatggtctggtgctacctatattgatggtttgttgaagatggtcagtggtggtgttacctccactgctgctatgggtcaaggtgtcactgaagatcaattcaaagaatccaaagccaaggcttaa

SEQ ID NO: 6900 - DNA, 2841 bp, Candida albicans
atgccatctaatccaagttttaattggctgaagctacaaaatgtatattataacatcagaacatgttacgatgaaatggattggtccattgacaacttatattccaactacttagtatcactatcacctaatacaactttgatagctattgcttcaaaaagtgcaccacatccaaatctaattgaaatatattccaacagtggccacaaactatggtcagtagtttataatagtacccacaatgattatatccagagctttcattttacaagcgacgaagacttgataattgttttgaataacggcagatacagacattattacgatttgataggtagtttcaatgagtataactttgtcgaggatttagtcactatggataacataagccaaagacataacactggtgataaaattgacgcaaaccctgacaatactcgaataattaccaatttagaaaacaaccaaacagaagaaataattaagataattgaggttaagacgtggaatcaatttttagttgtacggctcgaaagcaagattatagtgagtgatttggactcttttacaaattatgctatttctttagcaagctattctgcctcagactttgaatgtttcagcattcaagcgaagacgggcactaaaaaagcggttactattcaattggggtatcgcaaaagtatactttccattgacgtcgattttgatttagctagctatgaaatattagaccaagaattgactgatggaccatttagctccattgcgatatcacctagtggtcaacttatttcattattcaaccaacaattaaagaaaatatttgtcataagcaacaaatttgaccaaatattattggattatgacacttcaaatgaaagtagcgacccatatcaagtggaatggtgtggcaatgacgcaatagtcttatcctttaaagatgaaataaaattaattggacctggccaacaatcaatttcatttttttatgatatagaagatgatgacgaatttgatttagataatttaatggttagaaaagacaataagaacacagactataaaaaatttgatgacttgcttttcacaattcctattttacaaactagcattgatgggttaaaaatcgtcactactaataaagtccagtttttaagcagagtgcctgaaactagcgttgaaatgtaccaagttggatcaactgcacctagcagtattttggctgactgcattgacaaattttctgcaaatgcctctaaagctgatagcaatatatctttattgagagcagacaatacgttattaaaggccatggaagattgtcttcaagtggctttagacgagttttcgccagattggcagagaagagctttaaaggcggtatcatttggaaaggtatactatgatgattatttcgattctgacaaattcgtatcagtagtagatatcattaaagttttgaatctaattcgctcaccagaattaggattatttttgacttatcagcagattgagaaaattggtgggtgggaagaagtgatcaaaatgcttttgcgaaggaaccatcatgatttaagtttagatatcattgataaattgaatttggggaacgccaaacctttagtatatattcattggtgttgttataaaattagaaaggagttggacatgtcggatatagatttgttcaaattagtaagtgagaagcttatttcgtcgacaaaaaccagggtcaattatatttccacagagcaaatttcagaaactgcacatgaagaaggaagagaagagttgtgtaaatttttgcttgacttagagccatcagtcataaagaaaattggtaaacttctagattttgacgaaactgaacttgcattgatcaaatcttttcaaaacggaaactatgatttgtctactttgatcttgttatatttacaagacaacttgactacgtcacaatttttcaaaatattaagtcaaactgaaagtgttttgaaaaaagaaaactcaaccaaacaaactatccagaagttggacattgatgttaaatcagaatacatgcaagtcacaggagaagttgttggccatgcttgggaagaatcaatagcgaaaaatgtatcaccacgcttgcttgagacatatctcaaacacgaagatagggtaaacgaattgaatatatttaagatacagcaatttaaacgggaccctgaacttcataaggacaactactacgaactgtacaagtctgttttgactaaagctatcaacaggtcgacaaaccaacgtatttccaaagcattgcagcgcgaaattcaagttttggaattgcaaaagaagcttagtgagacctatttaacagatttttaccaggaaaagactttgatggcaatattaaagcggatgattgctatgaatcaaattaaacccgccaagaaaatagttgcaaacttccaactatcagtagagaagttttggtatcttgtattgaacacattaatggatcgacgtgaatttgaccaattgtatgagtttgcttttggttcaagtgaccagacttctggtaattcacccattgggtttgagccatttgctgaattaggtttgcagaaaaatgccccacaaagccatatttctacatatattaaaaactcaaacaagtacaaatacgaagaaaaaatatccatgtttatcaaaaatgatgattatgaatctgctgcattagaggcattcagaaataaagacattgatattttgaaaagtttactacaaaaaataccaaattctaatcaagctgacattcaagtagtaaatagttatattcaacaactaggctattaa

SEQ ID NO: 6901 - DNA, 1287 bp, Candida albicans
atgtcatttgatattaattggaatcaattaacaattgatgacacgatcaatcaatcgataaaagagtttttggatcagcaattcaaaaatatctcactcccatcatttatttccaatcttgcagtgactgattttaatttaggagaaatacctcctgaagttacgatccgacatattggtgatccatttgaagagttttatgaagatgaaaataatttaggagtaatgaatgaggctaataatgattcaaaagatgaacatttgaagaaccacggtgatgggatcaataaagatagtggatataatagtcagaatcttgatgacgaggatgaagacgatgaggatgacgacgaggatgatgaagacgaagaagaagaagatgaagatgactacgacgatcacgatttaggaaccattaatgaagggattagtttgttgaactttaatgaaaactcaaccactccttctgctaactcatttgcaggtctggctgcaccaccactaccaccacctctaaacccttcacgagattctttccattcaattcttcatccatatggtgttaatagcataataggggccacaggtgctgggtcggaaacacctacaaatatactaaatcaaaattatctatcttccagagtattaccaaaaatatctgtaaaacaaaaacaacctcatcatgatgataatgacattcaacttattgtggaaataaattataaaggtgacatgcatatcaacttgttggtgaatttattagtaaattatccatcacccaatttcatatcattgccgataaagttacatattactgacatagtgattcattcaattgccactattgcctatttaaagaaatcagtgtttttgtctttcctatgtgatgttgatgatacattccctgattttgatagtaatgtacaaactcctacatctactactggtggaaattttgttgattattactccaatgacgcaactatcaataaagaaagaattgatattgttaaaaagattaaaattgaaagtgaaattggtgaagttgagaataatatactaagaaatgtggggaaagttgagaaatttttagttgaacaattgaggaatattttacgtgatgagattgcttggccaagttggatctgtattgacatgaatgatgatgatgatgaggaggaggaggaggaagaactggaagacaatgatggtggtaacagtgatttaaatgataatgatggtaaacatggagatggaaggactgatgagacagaagctggagaataa

SEQ ID NO: 6902 - DNA, 960 bp, Candida albicans
atgttgtctagaactgttttaagaacattgaaaccgttgaatattgtttcaattacaccaagatgtcaattattaagatttaattcttccaaatcaactcccaacaacaacaacaactccaacaactccaaccctggccaacttgatattaatgatgaaatattcaagaaatattcacaacaattacaaaagaaagctcgagaattagggattccattaaatgaattaagaatcaaatttcaagataaaattgaaaaagtaaaactagaattaggtgggattgatccaactgaagaattgaaacaattttttgaacatgaaaaacaaaagaaacaacagaaccaaaacgataatgatgatggaacgattaaaattagaggaattaaagatcgtgatgcacccaaattaccatataaagtattagataattatattaatttatctaaagctaaagaattacctcgtgatgatatcattaaaatttggacagcaagatttattaataatgatcgagcattgcatgccatattaactcatttacaatttgctcaactttatactaatgcattcaaatatcctcaatttgtattaccattaccaaaacctcaacaagatggttatgaattagaatttgttcaatggcaatttgttggacccaatactattaattgtatgtttaccacattagcggaatataaattacatggagaatatgcttctcctcatacaactttaactttccatttagaattggcacaagataaagatcttgtattgatgaatggatttaataataaagaaagtgggatttctatggatgaagctcatttattggtggttatgttacaaagattttatagtggtaaaaacccacaaatgactcaattattacatgaatttaataaaggtaacgctgaatttgatattgatgctttgattaaacaagcaactagtgtgtaa

SEQ ID NO: 6903 - DNA, 1635 bp, Candida albicans
atgagactcaattctgttgcgttattatcgctagtagcaacagcacttgctgctaaggcacctttcaaaatcgactttgaagtgcgtcgtggggagtccaaagatgatttatcccctgaagatgattccaatcctcgatttgttaaaagggatggttcattggacatgactttaaccaacaaacagactttttatatggccacgttgaaaattggatctaatgaagacgaaaatagagtgttggtagataccgggtcttcagatttgtgggttatgtcccacgatttaaaatgtgttagtgccccaaattctaaacgtaacgaacgatctttcggtcatggaactggtgttaaactaaatgaaagagaattaatgcagaagagaaagaatttatatcaaccatcaagaaccatagaaaccgacgaggaaaaagaagcactggagaagattcacaacaaactatttggctttggcagtatttactccacagtttatatcactgaaggtccaggtgcatattcaacgttctccccattcgtaggaactgagggtggttctggtggtagtggtggttccaatacctgtacatcctatggttcattcaataccgaaaactcagacacatttaaaaaaaacaacactaatgattttgaaattcaatatgctgatgataccagtgccattggtatttgggggtacgatgatgttaccataagcaacgtgactgtcaaagacctttcttttgcaattgcaaacgaaacatcctctgatgttggtgttttgggtattggtttgcctggattagaggtcactacacaatacggttacacctaccagaacttgcctcttaaattgaaagcagatggaattattgcaaagtccctttattccttatatctcaatactgccgatgctaaagccggatctattttatttggtgctattgatcatgctaaatatcaaggtgacttggtgactgttaaaatgatgagaacgtattcacaaattagctacccagtgagaatacaagtcccagtatctaaaattgacgttgaaagcagcagcggcagtactaccaacattttgtcaagtaccacgggtgttgttttggataccggttcaactttatcgtatgttttcagcgacactttgcagctgttgggaaaagctttaaatggtcaatactcgaattcagttggcgcttacgtagtcaactgtaacttggccgactccagcagaacagtcgacatagaatttggtggtaacaaaaccattaaagtcccaatttctgatttggttttgcaagctagtaaatcaacatgtattttgggtgttatgcaacaatcgtcaagctcgtcgtacatgttgtttggagacaatatcttgagaagtgcttacattgtttatgatcttgacgactatgaagtaagtttagctcaagtgtcttataccaacaaggaatcgattgaagtcattggtgctagtggtatcactaacagttcgggttcaggaacaacatcttcatctggcacctctaccagtaccagcacacgtcattcagctggaagtataatttcaaatcctgtgtatgggttgttgctttcgcttttgatatcctactatgttttggtttaa

SEQ ID NO: 6904 - DNA, 2505 bp, Candida albicans
atgcctctcgataatactatccagggtagtaccatcggtggccccactgctatcagtaaggggaaaaaaagtcgaaatgggtgtttaacctgcaagaagaaacgtctcaaatgtgatgaaacaaagccaaattgtctaaattgcaccaagaagaatatcgaatgtggcggatatgccaccaaattcaaatggaaatcatttaatgaagaaaagtcacacactagcagcagtactaaatcgttaaaacgacatcttgaattggcgagtttttctgtgacggggaaatctatagaggaagttaataaagaaaatgaattgatcgctaagggaatcaatccggaaacagtgaaaaatagtactatcaatagatcaagaactaatagtatcagcacagtcaatacacagagaacaaaatcgtttgatagatctcatagcataccaataccgtccaatgagcatgcacagcttcagtctgcgtctgtttataaaagtgatttgaattctttggctgacgcggctatgaaacaaattgggaaaacccctgcatctatgtcctcaacaccaccagcattaaaagcccatcaccaacacccagcgcaatctttgcccggtgattctgccattctgcatatgatggtatcacaaccaccacaaccaccacctccgtttacccctaattttgaagcaatgttaacgactgaaaagccaactatcaaaagaaatggatttggaaattttgactctgaaatcaatttgacaccatctttgtcagcaatactaaactttgcattcaatcatgaggaagtggaagtaccatctgtggaaacactaagtccattaacattgaatcacgaagctagagtggatgcatcaatgacaaacaacaaaccaattaccgaacaagaacaaattttacatttgtttaatgagcatacttcgggtattatgtcgattaagaatggagttcatgagaatccttggagaaatttaattgcacctttggcaacgaaatatccttgtctatttaattcaattgctgcaatgacatcattccatatggcaggtagtaataatgtggtgcactctccagaagacctaagaacgaaagggtggtattatatgaaaaaatgtattttcgaactagcgaatgggttatcaaacaatgtgaaagatttaccacttgatgtagcccttgtgacatgtttgaatcttgcagtgtgcgagcaatgggatacacatacatctagtggtattgcccatttaaaaggagccaagagtatgattcagcaaatactagagttgttaaaagagcagcaacaatttatcaaacaaaagaaatttgaaaacattgactctatatcttcagttgacgaggatcaagaattgttgatgaatttgaaaaaaaaattggttttggtagatgatctcgattacgaagaaatgattcatgaaacaatcaaatgtccagaaaaatcagtggttatccctaaatcaattcagtttatattgaataattggatttactttgaggtgttggcgcaaatgacttctgattcaatgtgtgacgacaaaggtgttgatctagtagcagcaatcacctcaatgtcccagaacaaactcaataaagataaagatagaaatcccaaatcgccatcggaggctagtgatctgtctgacaaaacattccgtttttttgaaacacttaatttgttaaattataataatgaagttattgatccgttgctaggatgcagtcaatcgttatttgtgattatgggtaaagttgctaatttgatcacaaaaatcagaaaggctaaacataagagccaatcgaagaaaagaaatactctaacgacaattagtcaggcgtcggaattaaaacaagaattggttaattggaagccttcggttgtagcaagtataatggataacgagatttcaaatgaatcgtctacaacatgggatctaccactgtgtatagctactgcagaggcatataagtactcgacgttattgtatctacatcaagctgtaccggaaattccttccttttcagctcatgcgttggctgaaaaaatatttattttattagcatctattcccacttcatctaatctatcaattgtgcatattttcccacttttagttgcctcgagcgaagctgagccaggagaagaaagagaatggtgcgagaacagatggaaattgctttcacagcgtatgtggattggaaatatcgatcgtgctttagaggttgtgaaagaagtttggagacgtaaagacggattacaagagacatgtgaggatagaaagttccatcaattgggtggtttaatggtagcattgaatggtgatcccaataacaactctaatggaggtagtggtgggaacggccatagtaatggcaacctggcatctaataccgttgatgcaaacactatcgattccaagacacattggagcacggtaatgaaagaatggggatgggaggtgctactcgggtag

SEQ ID NO: 6905 - DNA, 1371 bp, Candida albicans
atggttggtttatcacgagtacttaatgctgggtttattctaagtggacaatctgttttccaggatgttgctgccccacatcaagcatcaattgaacaatataatattgtcaagtaccttggtggcagcggtccatatattcaaaattcagggtatgggatttctactgatataccagaaaaatgcactattgaacaagttcaaatgattagtagacatggtgagcgatttcctagtaaaggagatgggaaatactttaattcagtgatggaagttttcaagagatatggtgaatttcatggagatttatcttttttaaatgactatgagtatttcgttactaatccagattattatgaaaaggagactactcctaaaaactcaaaaggtccatattttggaactacaaatttattacgacatggagcttattttagaaaaagatatcaatcactatttgaccaaaaggagaagcttgttgtgtttactagtaattctggaaggtgttatcaaagtggtgtctatttcgctcgaggatttttaggagatgattactcagaagatacagttgaatttgttgttgttgatgaagacaaaaaaatgggtggtaattcattgacaccaagatacgcttgtaaaactttgaatcaagatttacacaaagatttggtgaatcagtacgataagacttatttggacgatattttatctagatggctagtagacaatcctggattagatttaagtgcagatcaggtctcgtcattatttctttggtgtgcctttgagattaacgttagggggtattctccattctgcaatctatttacaaaagatgaatttatcagaagtgggtaccgaaacgatgttggtaattactatcaaactggtccaggtaataatatgacaaaggtaattggctcacctatggtggaagcgtcgttgaaaatgcttcaagaagattcaaaaatttggttgacatttacccatgatactgatattgagatgtatttgacatctttgggattgattgttccaccaggggatttgcccgttgatcgagtaccatttcccaatccatataatgcagcagaatttttccctcaaggtgctagaacttacactgaaaaattgaaatgtggtgaaaagcaatatgttagatttattgtgaatgatgcagtttatccatatccggattgtagtggaggtcctgggtttacttgtgaattgaatgattttatcaaattagttaaaagtcgtttacatgatgttgactataagcttcaatgtgaagtggacggaccagcggaattgacattttattgggattataaagacagaaagtataatgcgccgttaatagatcagtaa

SEQ ID NO: 6906 - DNA, 1359 bp, Candida albicans
atgtcattaccagaaccatattacaacgatgataaaagctcatttgcgtatccgactgttcgcaaacgttggccaaccattattgatggagcaattgaagatgtccaacaaactattgagaatcaccaagaggaagcatcaattggtcacaaaataattcaacaattattgaacaccaaagaagattttgttaatgatgctattgttagaccattcactgatgaagaaataacaatcaatcctcatttgaaacattataatgaatcattggaaaatttaaacaaaatcaaaccagttacttggcaaactggaccatggttatatttagaatgttacttgtatcaatatatcaataattttttcattgtaaataccaatgaattttggaatcattatgatgttttccaaaatttaaaagataaaacttttaaacaatcggaattgggggttttagaattatgtaaacgttatgaaacattatccaaacaattggatcaagctaatgatgaagttttacatttattatttaaagaatttattgatatttctttatggggtaatgcaactgatttgtctttattggcaggaaatgttactttagaagatattaaatcggttcaaggagcagaagtacgtaaaaagaatgaagaaaaaatattagtcaatgatttatcgcaagcttggaaacaattacacaatgatggtaatgactccggaaccaaacgagtggatattgtattagataattctggatttgaattatttgctgatttgattttgacattgtttttattggattctaaacttgttcaagaagttcatttacattgtaaagagattccatggtttgttagtgatactatgcctaaagatttccaagatttactcaatcaattggttgaccctgaattttatccccaaatacattcagatgaacctagttctatcaaattagttcatgataagattcaacattattatgacaatcatgcccttattattaatcatgatccattttggacattggactataattattggtatattcctaaatttgactcattatattcagaacttcaacattccaatttgattatatttaaaggtgatttgaattatcgtaaattaactggtgatttacaatggcctaaaactactccttttaaaactgccatacaggaattatcaacttcaaatttaccagttttatccttgcgtacttgtaaagctgatgttgttgttggattacctgaaggagtaaatgaaaaattgattaaagaatatgaaaatatgggtaatgaaaatggtcaactttggagtagttccggtaaatgggcagttatttcattcaacaaatag

SEQ ID NO: 6907 - DNA, 1566 bp, Candida albicans
atgtctactacaaaaccaacaacgtcacatgttgagtctgataccaaaccagatgctgatcatcttgaaataagaaaatctaacttatctgaatcagatcttggagtcgaagaaataagtgatttaaaatatatcaacctcccaccgctgttgcaacacatgacacaagaagagttaagaacattagataaaaaaaccaccagaaagatcgatttaagattgatgccaatgttgatcttcatttacattttgaactatttagatagaaacaatttggctagtgccagattaggaggtttagaaaaagatattggtttggttggtaaccaataccaaatctgtatttccatcttgtttgttggttacattcttttccaagtcccatccaatatgttgttgaacaaaatgggtcgtccatcaatttacctttcagttgtcatgactatatggggtgctatttctactgccacgggtgccgttcaaagttttggtggattggtcgcagtccgtgtgttgcttggtgttgtcgaatccgcatttttccctggtgccttgatgatcttgtcaagttggtatgacaaaaaaacacttgcctccagaaactctattttatacgctgggctgttaattagttctgcattcagtggtttgattgctgctggtatattgaaaatggatggcttgggtggtgttcaaggttggagataccttttcattattgaaggtggtattactgtgctcacagtcccatttgcttactttattttaccagataacccatcaaataccaaattcttaagccaagaagaaaaagacattattatgtggaaaatgaagagagatcttggaaatgtcaatgactctgataaagaagcccaagaatctgaaatacaaggatttatgcatgcatgcaaagatatcaaggtctggcttttgtgtgctattcacctgttcttagttgctgcttgtggtgttaccaattttttcccatcagtggtgcaaacattgaatttcgatagaactaccactttatgtttgactgctcctccatatgttatagctgttgttgcaacttatctttgggctaaacacgcagatcattctggagaaagattctaccatgttactattccgttagtgttatcgttagttgcatttatcatttctgctgcttcattaaacactggtgctcgttactttagtatgtgtttgatgattccttccctttattgtgcattcgttgttattcttacctggatttccaactgttgtccaagaccaccagctaaacgtgccgctgctattgccattgtcaattgtttgagtaactccacttcaatttggaatgcttatttatacccatcaagtgatgcgccacgttatttggttgcattctgctgtaactcagctttcattgttctttctattctttttgctgttggtttgagaattagattgaccgttttgaacaagagaattgaaagaggtaccatggactggcaaaaggaattgggtaaaggtaatgatggatcaaagatttctcctgactttagattcttatactag

SEQ ID NO: 6908 - DNA, 1779 bp, Candida albicans
atggacgaagaacttcagaagcatttagaaatttcaagaaacaccaagtaccagtggattgcgtgcattttcagtttagttatatttcttgccaacggcattgttttttactggattcctagacttcttagagataaacgatttgtcaaaacaaacagattcaaaccgtattttgctttcgttgacatttggcaaaccattaataccccgttctcaattaaagtcggaaagaaaacccactacttcaaacccagtctacttgccttaggtgcatgtttcattttattaaatggcaagctatgctacattgagaccgacgatttggactacaaaccccgcatatttataattgggaaacgatgtgctagaattgctttgggtcagatgccagcaatgtttttatcagttaccaaaggtgatttcattaccgcccttacaggcttgacatacgaacgtgcggcattcttccatgcctggtttgctacattaatgttcctgatgatgacagcacatgtggggataatcgggttttattgggctcatccaaattacgacattgctcctaaatatccaaaaaacgtttatggaattatcggctatgcgtgttttgtgtttttggtatttggcaatgtggccttgattagacgttatgcgtttgagtttttgatggtaaaccaccgggtccattcattcattatgttgttgatggctttcttacacaatgacagagccaaagccatggtcatccttgctatccatttgcttgtgttggacaaagtgcttggcagaatctacggtatcgtacactctttaaaatctccaacaaaagggttgtcagaatttgagatactcgacgatgagactttgcgtgtcagtatccccgtgaaaacatcaaagactgatccaacaccttggtacagattatttctattcaaatatggaacttggttagctggcctgcatgtttacttaaatgtaagaaaagtcgatttcttccaacaccatccctttgcagttgcaagtttacctgaatctggtaaaattactttggttatcaaaaagagaaacgggtttacaaagaaattgtacgacaaggtcaaaacaatgcgcgacgaacaactcgacagcgaaacttccgaaaccgaccccaacattgttaaattaaaagctgctttccgtggtccatcactgggtaaattccaaccattaatcacatttgactcagtggcatttctcgcccaagattatggcgcatcatttgtattgccactttgcttggacttgttgcagactattgaaaaaaaggaagtggctaaaaactatttgggccgaccagctcacccttatttgaaagtgtattggtcagtaaagaggttaaacaatatctactggtatgaagatttggttagaaaattattgccattcatcaattcagggaaacttaccatgaatgtgtttgtacaagaaagtgttgaactcgaagctactaaactggtgtcaactaaaaagttggatattgtctctgtcaccagcgaccccctgtcaattacaaactcagaaataaagtttatctatgaagaaccaatggaggtatcacaagtcattcaatcacacatttccagtatgcatttcccagaggaaaaagcgttcaagtcgcttgctataatgagttgcggaaatgacaactttggaagccaagtagaaagcgagtcacaaaagtacagatgggttaaagatgcaccaaatatttatttctataacgagtcgtacgaaacatag

SEQ ID NO: 6909 - DNA, 1149 bp, Candida albicans
atgcttctgtttactctacgaagagccatgtcatttacaaccagaatattaaaagtcagacccgaaagcatacagtttgtgaatgataaacctcagatctccgacaatgaaaccttgataaacttagaaattgctgccaaagaacttacaactacacataatgccatagggttcccaacagaaacggtgtatggacttgctgggtctgcattatctgatgaatcagtcaaatctatatacaaagctaaaaacagaccggcagataaccctttgattgtacatatatcatcgatcgaacaattaaaacgcaaattgatcaattatgaaataccacaagtctaccttgatttaatttcccatttttggcctggtccgttaaccattctcttgcccataaccaaagatagtccgatatcaaaattggtaactgccaaccaagatacgtttgcggtgagaatgccaaatcacccagttgcacgagccttgattgcaatgagtgatacaccaattgctgccccttcagctaatgcatcaaccagacctagtccgacattggcagagcatgtttaccacgatctaaatggtaaaatacctttgattttggatggtggcgcatgcaatgtaggtgttgaaagtacggttattgacgggttagttgacccaccaatgctattgcgaccaggaggtgtttcattagaggacattaaacgcgtcggtggcaaactatgggaaaacattgttgtggcgaaaaagacagcaggaaaattagagccagtaaagacaccagggatgaaatatcgacattattcaccaacagcaaaagtggtactatttgtcaattgtggagatggtataaatgccattgaaaattatttgaccaacaataaagtagatgccagtaccaccaagatagcgttgttgaaatcgaaacactttggcgaggatcacccacactttattattaaaagactaggcactacagggaatgagatatctcataatttgtttaaatacttgagagaagtggatgaagaggacaaggtggaattgatatttgtcgaagggatagacgaaacaaacgaaggactagcggtcatgaatcgattaagcaaagctgctatggaagtagttaatggaggggaggcatag

SEQ ID NO: 6910 - DNA, 1107 bp, Candida albicans
atggttcactataggaatcgatacctaaattatatacgaagaaaaccattagcattattggctcctatcactttattggttgtgatctacttttatttcttttctgcccatgggttttcttcaaacaagcagaaatataactacaataaaaagagtagaggatggttttacaaaaacagagatacagtaatattaaaagatttacctaagaatcatattagtcattatgatttgaataaattgacggcatccaaagacgcattgaacaaaagagaagaagtgttgatcttaactccaatgtccaaattcttacctgaatattgggaaaatataaataaactcacctatgaccattcgttaatttcattagggtttattttcccaagaactactcaaggagatgatgctttaaaagaactcgaaaatgcattaaagaaaacgaaaagagaaaaacggttgaacttcaaaaaaatcactattttaagacaagattccaattctttacaaagtcaattagaaaaagatagacatgcattcaaagttcaaaaggaaagaagatcaatgatggcattagcaagaaactcattggttttcagtacaattttaccatctacttcttgggtcttatggttggatgcagatatcgttgaaactccagtgacattgattcaagacttgactggtcacaacaaacccgtcgtttccgctaatgtccaccaaagatttatcaaccaagatacaaaacagccagacatcagaccatacgatttcaataattgggtcgaaagtgaggaaggattgaaattggctgctagtttaccagatgacgaaattattgtcgaaggttattcagaaatggttactcatagagcattaatggctcatttttacgatcctaaaggtgatccaagtacagaaatgacattagacggtgttggtggaggtgcagttatggttaaagctgacgtacatagagatggtgccatgttcccatcgttcccattctatcatttgattgaaacggaaggatttgctaaaatggcaaaaagattaggctatgaagtatatggtttaccaaattacttagttttccattataatgagtaa

SEQ ID NO: 6911 - DNA, 1299 bp, Candida albicans
atgacggttactattcctttgactgaaaccaatcttttcaaaccaatctctattggagatgttaagctaaaccatagaattgttcatgcacccacgtcaaggaaaagatctactaaggacaactatcctactgattttatgattgactactacaaatcaagatctcagtatcctggttcttttatcatatttgagtcctgtttggtgtcagagagaagcggtcttgtacctcataaaatagggttatgggatgaaaaacattgtcttgccttgaaacaaattgttgatcaagtgcataataacaattgtgttatcagttgccaaatcatggctaacggaaggacttcaaatgccaaactcatgcaaagtaagaatttacctattttagctccatcaattacttatcctaatgaagctgctgagaaattagctactgaattgaatttcccaatcaagccgttaacagttgacgaaattcataatatccaggacgattttgttaatgctgctgttaattcattaaaaattgccgattttgattttgttgaattacatgccacatctgggtttttgattgagcaatttttgtcaccactttcaaacaaaagaaccgatgaatatggtggtgatttggtcaatagatgtagatttttgattgaaattattgacaagttcattaatcatccagatattgggcctaagaagtttggtgttagaatcagtccatggtattcccataatggaatggtgtatccggaagaagtaaatttagaggatggtattccgtatcaattttgtcagtatattttgaagcaattagaggttagaaaatctcaaggaaatgaaatcgcctatgtttcaattgtcgagccaagagtatctggaaattctgatgttgatagttttggtgataaatcgaacgacgagataatcaaaagttggagtggtaaacttattcgtgctggtggttatgctactaattttaatgttgaaaatcctactttaattaaaaccaataaacaggttactaatgaaggtggtgaaattgttcattatgctaatttaattaatgatgtcaacaatgatgatagaacattaattggattttcaagaccatttacaagcaatcctgatttggtatatcgattggaaaacaatttgaaattagaatactacgacaggccaaccttttatactcaaacaggtgaaggttatttgactttcaagaattatgatgggtctgcggtgactaagttgccagagaaagagcttatgcgagagggaatcctgttgcaataa

SEQ ID NO: 6912 - DNA, 1662 bp, Candida albicans
atggctcctcctactgctgttgaatcttcaatcaatttcggaggtcacccaactatcaaatccactcaagacccattggtccaaaagttgtctcttaataccgacactgtgatcagacacaatgctccacctccaaccttatacgaagatggtttattagaaaaaggtactactatctcatctactggtgctttaatggcttactctggtaacaaaaccggtagatctcctaaagacaagagaattgtcgacgaatccacctcatcccataacatttggtggggtccagtgaataaacaagttgacgaattaacttggaagatttctagatcaagagctttggattacttgagaactagagaaaagttgtttgttgttgacgcttatgctggttgggatccaagatacagaatcaaggtcagaattatctgtgctagagcttaccatgctttgttcatgaccaatatgttgatcagaccaactgaagaagaattaaaaaactttggtgaaccagatttcaccatctacaatgctggtcaattcccagccaacatccacactaaaggtatgacttctgccacttctgttgaaatcaactttaaagatatggaaatggttatcttgggtactgaatatgctggtgaaatgaagaaaggtatctttactgttatgttctacttgatgccaatcaaacacaaggttttgactttgcactcctcatgtaaccaaggggttgaaaaaggtgatgtcactttgttctttggtctttctggtactggtaagaccactttgtctgctgatccacaaagaaagttgattggtgatgacgaacattgttggtccgacaatggtgtgttcaacattgaaggtggttgttacgccaaatgtttggacttgtctgctgaaaaagaaccagaaattttcaactccatcaagtttggtgctattttggaaaatgttgtctacgacccaatcaccaaggttgttgactacgaagattcatcaatcactgaaaacactagatgtgcatacccaattgatttcattccatctgccaagattccatgtttggccgacacccatccaaccaatattatcttgttaacatgtgatgcttccggtgtgttgccaccagtctccaaattgactaatgctcaagttatgtatcatttcatttctggttacacctccaagatggcaggtactgaagaaggtgttactgaaccacaagctacattctccgcatgtttcggtcaaccattcttggtgttgcacccaatgaaatatgctcaacaattgtctgacaagatttccgaacacaatgccaacgcttggttgttgaacactggttgggttggttcttctgttgctcaaggtggtaagagatgtccattgaaatacaccagagctatcttggatgctatccactctggtgaattgtctaaagtcgaatacgaaaaagttccagttttcaaccttaatgttccaacttcttgtcctggtgttccaagtgaaattttgaacccaactaaagcttggacccaaggtactgattcattcaacaaggaaatcaaatctcttgctaccaagtttgctgaaaacttcaagacatacgctgatcaagctactgctgaagttaaagctgctggtccagaagcataa

SEQ ID NO: 6913 - DNA, 1851 bp, Candida albicans
atgaataaatcattagtaccatcatcatcgtctttgttgaatgtcaacagaatactagtgcggaatgttgcaactaaacaactagccccatctctttccgttttatccacacgcattttgaaaaatcactttacaaccaaatttaaacaacattctatagcatttaacaagcaaagatatttttccacattcagtcgatcatatcaagagcctttgaataaacacacacaaccaaaagatgaattgaaacaaactataacgaaagcaactttactttcgcaggcgaattcaggcttatcccgtatgttgatacatttaaagtggccattgtcacgaaatacaaatacaaccagtacctgggatatgacgtcggcatttatttcatggttggtcatgggaaatattttatggattatactagggaccacaacttttgggttgactttgatgtattctttgcactatttggatagcttagtgggtaaattcagtgacgacaaagaaacaaccgacaaattgaatcaaacaaaaagtaagacgtcaactaatgtaatgagttatttgattggaggaatcatatcatttggtataggagtagatttgaattttgaaaaggggtcatcgttaccggaattaaaagatggaaaattaagattcaagaatgtaggtatagtatcccatgatggtaataacaagcatgtgaagtttaagggaacggtggaagccatggatataacgttatcttttaacaaatggtatgaaggaaatggattgatttatgatttagagttgtatggattaaatggtaagttgtataagctgagatcgccttcaccgcccgtggccaacacaactaagaaatcgtatagattcaatgaaaacatccattaccaatatgacttggatcataatgtcgaagaaatagcaagcgggtccagttctattattgataacaattatacctttgatcatgttaaaattcacgattcgtatttggaaatctacgaggaacaatccagtactccaataaaaattaatattttcagctgcgatctaccaaaattaaggggtgataagctagtgttggatttttttaatgcaaataacgctagtggcgctattaatgatgcaatgtttactttgcataaacgtcagaatttggatccagaaaacaaaaatcaagacaagttaatacggttcaaattggatgcgattgatttgggagagatcaacaagtatgacccaaatctgaaatttaattggataataaatgggaaagcagaagttattgcagatattactttgcctgaagagcaggacgatttaaatgagtctataacagaagtattgactaaaatgtttaccaatatgtttcaaactgcagacatgtctcaaacatcagaggattcattgttgaaagatgctatatctgcgatttatcatactttcagaaagccagaagaaactgctaaaccagcagaaaattcttatgttatggtaaatgtcaaaatgaaattgtatgatttgaaagcaagtttgcctcaagttttaccaagaacaaataatggtataccatttatatctttgacagatttgagatcattgattagttttatcaacacggaaaaccaaccaattacaatcaaatccacggtgattgaaaaaataactgatttatcgaacattcaacatttgggacaaactaaaatgtttgattatattatgggtgatgcctatgaggagcttacgaatttggtgagagatgatgcaagacgaataattaatgaaaaatcatggagtaattcgattgcaacacaattgttacttttaggattaggtgcaatggtttga

SEQ ID NO: 6914 - DNA, 1680 bp, Candida albicans
atgataccaccttttattctactactatttctaataatgaactcatcatattgtgaaccttttgaatttgatttttttcaaaacttagatccatctacaaatctcaccgaaatcattaataataataataataacagcatcagcaacaatgtatttaaagttcaaaactttgattccaaatcatcatcttcttcatctagctcatcttcttcaggtgaaggattacaagaatttacaccaataagagacacaatccttcaatcagaaacaaaatattattcatttagtgttaatacaaaatcggggattggagatttttatgaacttttaatttttttaagtgggaatatttgtactcaaccactgaatttattagaaaatgatacttcattagcagtttattattcatttaattcaaccatgtttactaataatgaaattggacaaatgcaattattcaaagatggatttttccaaggattagctgatttaccattaaccgagaccaccaccaccaccaacaatgataccactaccacgacagtgccagagaaaatcttgtatattgctgttagagcaccggaaaatactaatcgtacagcacaatggacatatcaaattggggtatcacaacatgatttagttttccaatgggatgatcgatcatgggggtcaattgtcgatgttgatgataatagtgcattaatagtgacggggaatcttacgaaattatcactggggaattatctggatttaaatgccacaaattctcaattttcattatatttatattcttatgataataaagattatttccaaggaatgaataatagttggtgtgctgtacgtagtggacctgttttagttaaaccagaagagattgaaacaaaatttattgctcgtcatggtagtatacaacaacaatttatggttaacaatttaaatgctagtacaaaatatattgcttatattgttatggattttgaaggggtagaatatggtggtgctgtacttcgaccgtttgaatttgaaactatggatggaactgcttgtgaattgatttatgatttggaattttgtgatcaagtggcttatagtgttcctgccattggtaattccctgttattagcttcaagtattgctggtgctgataataaaacattaacaaaaaaattatatgatgattatgctaaatcattatatacaaattttctgaaaggtttacaacaaattgcttgtgatacggtccctgaagccatctattcaaatttgaaaagttgtcaagattgtgctcaaagttataaaaattggttatgtgccgttactatacctcgatgttctacaaaaaatttcacgggttatatccatcgaaatgaaacaaatcaaagaaatgaatttttagctgatgttattcaaccaaatcaagattattatgaagtattaccttgtgttaatgtttgtcaagcaattgtaagagattgtccagcaaattttggatttttatgtcccacgaaaaatgattcaattaaattgagttattattgggatgttcatgtatctgatcaatggccaagttgtaattatcttggaccattaaaaagtagtaaaagtggtgccataaaattgataatcaattggacaatcgttgtggtatcctttactttaatggttgtcatatag

SEQ ID NO: 6915 - DNA, 927 bp, Candida albicans
atgcatagaacttattcattaagatcttcgaaagcaccaactgcttcacaattacaatcccctccaccaccaccatccagtaccaaaaataagttttttggttctggtgggttatcttcaaccatcagaaaggcagctgctggtgccactggcccagaattgtctcgtaaattgtctcaattcatcaagatggaaaagaactttatgagagctgttgaagtcacttcccgtgaaagaaaagacgttgctaagcaattgagtgcttggggtgaagataatgaagacgatatcagtgatgtcactgacaaattgggtgttttgatttacgaaattggtgaattggaagaccaatacattgacaaatatgatcaatacagaattactttgaaatccattagagatatcgaaggttctgtccaaccaagtagagacagaaaacaaaaaatcactgatgaaattgctcatttgaaatataaagatccccaatctccaaaaatcccagttttggaacaagaattggttagagctgaagctgaatctttagttgctgaagctcaattgagtaatatcaccagagaacaattgaaagctgctttcaactatcaatttgatgctaccagagaattggctgaaaaatacgctttgattgctggttactgtaaagccttattggaattattggatgattctgctgtcactcctggtgaaactagaccagcttatgatggttatgaagcttctaaacaaatcatcattgatgctgaaaatgctttggcttcttggactttggattccgctgctgtcaaaccaactttgtctttacatcaagaatatgatgaagatgaacttgaacacgaacacggtgaaattgatgatgctgctcaagaagaattcaacaaacacgatgaaaatgttgaacaccaataa

SEQ ID NO: 6916 - DNA, 1143 bp, Candida albicans
  misc_feature (781)..(781): n=g, a, t or c
atgttattatcgaaatttcttattggtgatcttactacaagactttttgctgctattaatgttgttgcttgtgttggttggggtgcagttaataccatgtcttcagctcaattattgcatattgttaataatgggactttaccaccttgggctggttgtcttattattgttgtttgtaccgttttggtgacattttttggatatcatgttattcatgcttatgaaaaatgggcctggattccaaatttgattattttcattattataattgttagatttgccatgacaaataaattcactagtaaatcatttgaaggtggtgaaactactgctggtaatgttttaagttttggtggtacagttttcgggttcgccacgggttggactacttatctgagtgattatgttgtttatcatcctcgtaatactaattcttggaagatttttttcagtattttctttggattattaactccattaatgtttactttaatattgggtgctgcttgtgccactggtattgctggtgatccagaatggactagattatataaggaagattctgttggtgggttagtttatgccattttggttcatgattctttacatggatttggtcaattttgttgtgttgttttggctttatctactgtggctaataatgttcctaatatgtattctatggctttatcagctcaaactgtttgggctggtttcagaaaaatcccaagagttgcttggactattgctggtaatggtgccactttagccatttgtatcnccgcattttataaatttgaagccgttatggaaaattgtatgaatttaatttcctattatttatcaatgtatgaaagtataatgtgtgcatctcatttcatttggaatagtggtagatttgatggatatgattatgaaagatggaatgataaagaagcttaccctgttggttatgctggagttttcggatttgcttgtggtgttgctggggttgttttaggtatgaatcaaacttggtatagtggtgttattggtagaagaattggtgaatttggtggtgatattggatttgaactagctattggatttgcctttattgggtttaatgtggctagatattttgaaaagaaatatattcgatag

SEQ ID NO: 6917 - DNA, 2715 bp, Candida albicans
atggaggataaaaatgcagcgacccaattgaatttgcctaatgtgcaatcaattggaagtcatttatcaattcaagatcatgaaattgctttacaacaagttattgataatccactttctattggtgaagttgctactacattaactgaatcccaaaaatggtttgttttgaaaagattacattttgatgctttagtgtcattagaagaattaccacctcaagctagttttatattcgaaaagattgaacagatgaccactgaagaggctgttgaaatattagaaaaaaacattgaagagcacgagaccgatgttaatattccagaaaatgatttagttctttggaaagagttagttgaaaattcacataagttcaccaaagttcaattacaagaaaaattgggtagtaactcatcgtcatcagtggaaggtgagaagacagctgacgtcgaaaaaggtcacgaaattgttgattgggatttgcaagttcgtttagaagcagtattagttgcttattggtctccatatcctgaggttagagcagttactttcccatatgatgatccgactattccagttgagacattcagagtatatttaattggtattatatggacagcaataggtgcagtgattaatcaattcttcacagaaagacaacctgctatcacacttgctatggcagtggttcaagtttttctttatccatccggtttgctttgtgaatggtttttacctaaatggaaattcaaaatttggaaatatactattgatttaaatccaggtccctatacttataaagagcaaatgttggccacaatcttttgtggtgttaccggtgggagtacctcttatgtctccagtaacattcttatgcaaaaatctgagattttttatgacaacaaatgggttgattttggataccaagttttgttaattttgtctacaaactttcttggtgttggttttgctggtataatgagaaaatttgccgtatacccaactaaagccgtatggccatccattttaccaggattagcattgaataaaactttattaaccccggctaaaaaagaagtaattaatggatggaaaatatctggttataattttttcttcatcacatttgttgcctcatttttgtacttctggatacctgattatttattccaagctttatcaactttcaattggatgacatggattaaacctgataaccaaaatcttgctgtaattactggttcagttggtggattaggtttgaaccccattaccactttcgattggaattatttcagttctatgcttcaaccacttcaagttccatttttttaccctcttaataacattattggtatgttttttgcattcttttgcattattggggtttggtattctaattataaatggacaggatatttgccaatcaacgataatggacttttcactaacactggagaacgatattccgttgctctggtggttaacaaagatagtttattcgataatgcaaaataccaggaaataggaccaccattttattctgcagctaatttagttgtgtatggtgccttttttgctatttatccgttccattttgtttatgagattggtatgaattatgaccaaatgtgggatgcctgcacatcattttggcgggtaataaaagatttcaggaagtcgacatatgatggttttgatgatccacacagtactatgatgagagcatatcctgaagttccagaatgggcttatttgatcattgttgtcatttcattagttttggccattttgtgtgttaaattatatcctgcccagacaccagtgtggggtattttctttgcattaggtattaactttgtgttcttaattcctttaaccactatttatgccagaactggatttgcatttggattaaatgttttggttgagttaattgttggttatgctatcccaggtaacgggttagccttagcattcataaaggctttaggttacaacattgatgcacaagcacaaaatttcgttaacgatttaaaacaaggccattatgctaaactcccaccaagagctgtttatcgtgttcaattattatccatttttgtatcatctttcattcaattgggcattttaaatttccaaattaatggtatcaaagattattgcaagccggggaatactcaaaagttcacatgccctggcggtagaacattcttctcagcatcagtattatggggagttattggccccaaaaaagttttcaatggtttatatccagtattagcatggtgtttcttgattggatttttattggctttcccttgtattgccattaagaagtatgcacctaggaaatatgttaaatactttgaaccttctattgttattggtggattcttgaagtatgcaccatataatttgtcgtactatattcctggtgtttatgtgtcgtatgcatttatgtcatacattaaaagaaaatacgaagcttggtggcagaaatatacttatgttctttcaactggtttgaatgctggtattgccttttcatcaatcattattttctttgctgtgatgtatcatgaaaaagatattaactggtggggtaatactgttatgtattcaggtgttgactatgctatgacaggttggttggatgccactgttgatgcaccagatggatattttggaccaagacgtggtaatttcccttga

SEQ ID NO: 6918 - DNA, 642 bp, Candida albicans
atgttcaaccaattcaaatcaacctcagtgttcaatagcatatttgggtctttcagaagattcaagcatgaatatgctcctagatttaaagaagtggagaaggcccaaaagggaagggtgtctgttagaactggtggttcaattaaaggaaattcactagaatttggtaaaataggattgagattaaaatcccaaggtatcagaatgcatgctaatcaacttcaggcagctgataaagttttaagaagagaattgagacctactaaatccaaattgtatacaagatttgtgtgtgacttggctgtgtgtatcaaaggtaaccaaacaagaatgggtaaaggtaaaggtgctttcgatcactgggcaagtagaatgccaacaggtaaagttttgtttgaaatagatggaccaatacatgacaaggttgctagagatgctttgagaaaagctgctgataaattgcctggattatacgaaattattactccagaatccaaagttagagttagtttgactcacttgattgataaaccagaaccagtggattacgtcgaaaaacttaatgccaaacctacaaagaaatgggcaaatgtccaggcatatcacactgatccaatgtataaacaatacagtggaagataa

SEQ ID NO: 6919 - DNA, 1608 bp, Candida albicans
atgtctactagagatttacctcatagtttttccgagttgagttatggctgggtgaaaagaatacgtgctgaattcaccgttgggaaaagtaaagaacaattactcgctgaagattatcattctactactgatgaagattccgaagtagtcacatctgttaaagcaaatagtttatggccagcttttgcttctggagcaggattattttccgatggttatgttaataattccattagtacggtgcttttttgtttgaagaaaatttatcctgatgaaatcaccaaatcaaatgccattaataatattgcatcgatagcttttgttggtaccgttgttggtcaactaggttttggttatatttctgatagaattgctagaaaaggagggatgatggcagcaaatgttatgttgatttttttcacattaatgtgcgctgtaggatcttggggggttaccgtccaagggtttttcgcttgtcttactgtatggagattctttttgggggtagccattggtgcagaataccccacctcttctgtcattgcttctgaatttgctaatcaattaccaccaggtaaaagaaacagatatttcagttggtttactaatgccatgattgatctgggtttcgttgtttcagcttttgtcccatttgttttaatttggatttttactgaaaaacatttacgagcattatggagagtggccattgggttaggagttatcccacctttatcattatttttcatgcgtttgaaaatgaaaaattcatcttctttccagaaattacatatgaaaaacgttaaatacagagattatccttggtggttgattgttaaattttactggtttagattgactattgtttcattgatttggtttatttatgatttttctgcttactcatttgggaatttcaacaccattatcattggagaaatcatccctgaagcaccaatttggaaacaatggggttggtcaattgttttcaatttattttatattcctggtgctttcttaggagcaatctctgccgattatattggaccaagattaacattagctcttggtgtggggatacaaggtgtcattggtattgccatgtctgcttgtttgaatagtttgaagaaacacattgccgggtttgttgttgtatttggtattttcactacatttggggaatttggacctggtgacaacattgggttattggcttcaaagacatctgctacagccattagaggtcaatactatggtatagctgctgccatcggtaaaattggtgcattcgttggtacatgggtattcccagctattcagagtaaatatgcaaacaatgccaatccagatttacaattacaagttccattctatattagttctgcattgtgtcttttcagtgcttgtttggcaatctttttctgtcctcaagttggtcaagatgctatttacaaagaagatcatgattttgtccaatacttgagtaacaatggatttgatatcaatatgttgggagaaggtggtgatgttcgtgaagtttgtcgtgaatcagactcacttgaaaaaggaaaaagagatgatttccaagttgacaataattctctttaa

SEQ ID NO: 6920 - DNA, 1707 bp, Candida albicans
atgtttgaagtaggtgaaaaatatcctgttgaaagcagcagtagttcaaatgacatagaatctcgtggtgttcaacctataacatccctcaaagacaataaatcaataggaatgatagagaaagataatgatgatctatcatgtgaacaatatagtacttgtgatgaagtcaaaagagatttaaaagcaagacatgtttctatgattgccattggtggtacaataggtacagggttattcatatccactggttctttacttcacaccactggtccagtaatgtcattaatatcatttttatttgtcacaactttagcatattcagttacacaatcacttggggaaatgacaacatatatccccgtttctggatcatttgcccaatttataactcgttgggtttcaaaaagttgtggtgctgctaatggttggttatattggttttcatgggccataacattcgctttagaattatcagttgttggtcaagtcatacaatattggactgatgctgtaccattagctggttggatttccatttttttcgtcttattaactacatttaatttattcccggtgaaatattatggagaggttgaattttggattgcttcaactaaagtaattgctattgttgggtggctcatatatgcattttgtatggtttgtggggctggtaaaactggaccagttgggttccgttattggcggaatggatatgcatggggtgatgggatgatagttctgaataatggtaaatacgccatttctttcattaatggtcttatcaatgctgtttttactttccaaggtactgaattggttgctgttactgcgggtgaagcttctccaagagcaatccgtagtgcaattaaaaaagtcatgttcagaattttggtattctatgtcttgtgtatgcttttcattggtcttttggttccttacaacgatccaaagcttactcaagatggtggttttacaagaaactctccattccttattgctatggaaaattccggtactaaagttttaccacacattttcaatgcagtgatcgttacaacaattatttcagctggtaattccaatgtttattcgggatcacgtattctttacgggttagcccaagctggtgtagctcctaaatttttccttaaaactaacaaaggtggtgttccatattttgctgtcttgttcactgcggcatttggtgcattgggatatttagcatgttcggaagatggtaataaagctttcacttggttattgaatattattgccactgctggattgatcgcttggggattcatttctgtgagtcatgtcagattcatgaatgttcttagaaaaagaggtttaagtcgagacattttaccttataaagcttttttcatgccatatagtgcatattatgccattattattatattcattgttgtgttgattcaaggtttcacagtgttttgggacttcaatgctagtgatttcttcactgcctatatatccgtgatattatttgttgttctttggattggtttccactttttcttttacgggtttggtaaagattcttttaaatgggaaaacatattaatcccattggatgattgtgatattgattctggtgttagagatattaatgatgctgaatttgatgtacctgaacctaaaaatgtttgggaaagattctggttacttattgcttaa

SEQ ID NO: 6921 - DNA, 1728 bp, Candida albicans
atgaattcgggaattcatacaccacatgagattcatccagttgtctcccaagtccatgttgatgacatgggcattgccagtatactatccaataaaaatatcaccatcaatgtcgatcacgttattgatagtgatgaagcaatgttattagccattggttatcgtcaagaattacgtagagaattcagtttatggtctatttttgccgttagtttctcagtgttgggattacttccttccattgctgcttgctttgactatcaacaattggttgttggtatgtctcccttaccttggcttattgccatgattttcattacttcagttgcttattcaatggcagaaatcgctagtgcatttccgtgttctgcaggaactccttatgcggtatcacaattggctcctaaaaaatacgcttcatttttaacttggttcacatgttggacaaattggtcctgtcaaattactgctgctcctagtgtgagttattcttgtgcctgtatgatgttggcactccattcattcactgacccttcatttgtggccagtaatgcacaaatatttggtttaaccaccggtattcaagttttatgtgcatttatggcatgtttccccactaaatgggttgccagattcagttcggctggtaccacttgtaatatagtatttttggtggttgttttcatcatgattcttggtgggaataaaagagaccaaatcaaagaaggaatctctaaattcaattcaaattcaactgcatgggggttagataatcaagcagaatggcctactggattatcatttttaattagttttatgggagttatttgggcaatgtcaggatacgattcacctttccatcttgctgaagaatgttctaatgctgctgtggctgcccctagagccattgtattaaccagtaccgttggtggattgattggttttatgtttatgattgccattgcttacacattagttgatcttaatcaaattagtgctgatcctgaaggtcttggacaaccttttgtcacttatttaactcaaatcatggataaaaacttggtcattggtgccactgccttgacaatcatttcatcgttctttatggcccaaaattgtcttttggcgtctagtcgtgtcacatatgcttatgccagagacggattattcccattgtctggaatctggaaaaaagtgtcgccaaaaacccaaaccccaatcaatgcagttatcatgaactttattgttgaagaattgttattattattgattttcgggggtgatgtcagtatcggttcaatttttagtattggtgcacttgctggattcatttcatttactatgccaacacttttgaaaatcacttatgctcgtaaaactttccaaccaggaccatggaatttggggaaatggtctgaaccaattggttgggtatctgttgcatttgttggattgatggttccaattctttgtttccccaccgtcaaaggtgccgatttgactccaacagaaatgaattggacttgtttagtatactttggattaattttgttgacaacaatctggtttgtggtagatgcaagacgctggtacgttggtccacgtactaatatctctgaagaagatattgtgtatggtgaaaaaactgaagatgagggagatgaaatacctgatgttattgacggtcaaaaagttagtatctcaagcactgaaaagagataccagtaa

SEQ ID NO: 6922 - DNA, 2352 bp, Candida albicans
atggacaaaataagggcagtaattagtggaggtgagaaacctcccgttgacactgacaacgatcacaacacagactttgaggctgacagaaaaatgccagatttggatattgtagtttccaaatcacaagaatttgacccagtcacctcccacttggttaatgatattatggaagatgaatatgctgctgtccatgttgaagatgattctccttatccagaagttagagcagctgttccttctactgacgacccaactttacctcaaaataccattagagcctgggttattggtttgatattgactacggttggttgtggtatgaatatgttgttcagtttccatagtccctcatttgctatcaccacttttgtcacatccattttggcttggccaattgggaacttttgggcatggattgttcctgactggaagatttttggtgcttcgttaaatcctggtccattcaacgttaaagaacatactatcatcactattatggccaacgtttcttttggtactggtgccgcatatgccacagatatcttgcttgcacaaaatatgttttataaatcaaattttggttgggggtacaatttattacttatctggagtacccaatgtattgggtttgctttcggaggtgttttgagaagatttgttgttgacagtccaggggccatctggcccctgaatttggtcaccgcaacattcttgactaatatgcacattaacgaaaaccacactgctaatggctggaaaatttctcgtcttgcatttttcgtgatcgtgtttgttgcctcatttgtttggtattggttcccaggttatattttccaagctttatcgtatttttcttggatcacctggattaaaccaaacaatgtcattatcaatcaagttttcggttcttcatctggattaggtatgattcctaacaacattgccttggactggaaccaaattgcagggtatattgggtctccattgattccaccagctagtgttattgctacaatttttggatccattgtggttattttctggattgttgtgccagctattcactattccaacacttggtactcccaatacttgccaatctcatctactggatcgtttgataggttccagcaaacttataatgtgtcaaaaattatcgaccataaaactttatcattcaatgaagcggaatacaaaaagtactcccctttgtttttatccaccacctttgccatttcttatgggttatcgtttgcctccattttagccactataacacacaccatttgcttccatggacgtgaccttatcgcgtcgttgaaggccaaagaaaaaccagatgttcataatagattaatgaaagcatacaaaccagtgcctgaatggtggtacctaattgtcttcttggtctttttcggtatgtccatagccaccgtacgtgcttggcctactgaaatgccagtatgggggttagtttttgctcttatcatcgctatcatatttttattacccgttgctatcatttatgcaaaaacgaatattgctgttggtttgaacgttgtgacagagttcatcgtcggttatgtactccccgggcgtccaatagccatgatgctttttaaaacattcggatacatcactaataaccaagctgttacttttgtgcaggatatgaaacttgggcactacatgaaaatagatccgcgcactttgttttgggcgcagtttgctgctaccatatggggatcgttagttcagatcgcagttttggagtgggcctatggtgcaatcgacaatttgtgtgctgctgaccaaaaaaatcattacacatgtccaaacggtaaagttttcttcaatgcttcgatcatttggggtgtcattggaccccaacgtcaattctcacatgggcagatttattatgggttacttttctttttcatcattggtgctgtgacccctgtcatcaattggttgatcttgaaaaaatggccaaactctccagtcaagtatttgcattggccagtgttcttttctgggacagggtacattcctccagccactccatataactatacctcctactgtgctgtgggtttgttctttggatggtggattgaaaagaagtggttccactggtggtctaaatacaactattccttgtctgcgggcttggatattggtttggcatggtgctcgttgatcattttcttgtgcttgagtttaacaaacaccgacttcccatcgtggtggggaaacgatgtgatcaacaccactctcgacactcaggttgtcaccaatatcagacacatattgaaagagggagaggcatttgggccatcttcctggtaa

SEQ ID NO: 6923 - DNA, 2784 bp, Candida albicans
atggccggtagtagtattcctcaaagttccaattcttcggtctcacaattcttatccactttaatccccactttggtggtttcagtggtgtttttattagcattcattgttattcacagtaaacaaagaagagtgtatgaacctcgtgctgtagtggaatcactccctgatgatttaagaacagaaactgcccctaaaggtccattcagttggttaacttatcttttagccaaaccccgtactttttacattcaatatgctggtaccgatggatattttttccttagatttttatttgaatttttctgtgtatgtgtcttaggagcagttataacttggccaattcttttcccagttaatgccaccaacggcaataacaatacccctggttctaatgttaaaggtttcgatattttaacatttgctaatattaaagataaatggagaacttttgctcatgttttcttatcatggatattattcggtgcagtgattttccttatttatcgtgaattggtttattatgtcacttatcgtcatgctcttcaaactactccattatacgattccttgttgagttcaagaacccttttgttaacagaaatctctactgaatatttacaagatgataagctcagaggttatttcccaactgctacaaacatttggtattctagagattacaaaaagttacaaaaacaagttaaagaaagaacaaaattggctaacaaatacgaaggtactcttaataaagttttaactaaggctgttaaattgagaaataaatgtcttaaaaagagtaaaccagctcctgaaccacaagatgatattgataaatacttgaaagatggtaagaaaagaccaactcataaattgaagtttttaattggtataaaagttgacactttagattattcgccagaaaaattgggtgaattgaataaggaaatcactaaagaacaaactgaatatcaaacttatgatcaattacccgctgttttcattgaattcccaagtcaattggaaatgcaaaaggcttatcaagctattccttaccaacctgactttaaaggagttaaaaccgttattaatgctgccccagaagatattatttgggaaaacttgcaattgacttcaatgaaaagaagaattaaaagtattattgctaacactattttgactttattgattattttctggtgtatcccagtagctgttgttggtgccatttccaatattaatgtattgactgataaggttccatttttgaaattcattcttaaaatgcctgatgtcattatgggggtaattactggtttactcccagttgtggcattagcaattttgatgtcattggtgcctccattcattaaatggatgggtaaaatttctggacgtcttacaattcaacaagttgaaagttattgtcaatcatggtattttgctttccaagttgtcaatgtttttcttgctattgccttgggttcatcagctgcagctgttgccactcaaattgttcaaaatccaggtgaagcattacagaaattatcatctagtttccctaaatcggtcaatttctactattcttatttatgtcttgaaggtttaactattagttcaggagttttacttcaaattgttgccttgattttgtctcacattttgggaagaattttggatggtacaccaagagctaaatggacaagatggaatactttaggtcaacctgcttattctactctttatccaggtttccaattgttgactgttattgctctttcttattcggttattgctcccttgattttaggattcactgctattgctttcattttgttttatttcgcctacatttatactatgatttttgttttgagaccaagcactgttgatgctagaggtactaattatgtcaaatcattattccaacttttcactggtcttttcttggctcaactttggattactgccattttcgtattttcgaagaactgggcttgtgttgccttggaaggtgttattgtggttgtcaccattgctgcaagattatggatgaaatggaagttcttaccattagtcgatgctgttcctatttctgctattaaatatgctgcaggtgacccaacatattcttacccaatacatgatcaaggtttgaaagaaatcaaagttgaaggcaaaaactattgggaaggtggtaatcaattgggattgggtcctgatccaaaagatcaagtattacctgatagaattcctggaaatggcccatcttcatatgcttatgatcaacaacaacaacaatatcatcgtggatctgattcatctgctgttgatactaaagttggtcatggagaactggttgataagccaaagagtccatttactgattctaacaacaatcacgatgcagaaaaatctgctggatttaacccagttaataaggcaattgctgctccaactcaaggtgtttcatggttaacatcattcttccagccaaagaaagatacttttgatataatcaagagtgatatgcctagttcatatttcaattatattgaataccattctgattttattagacatgcttatgatgatcctgctgttactgctgaagaaccacatatttggattgctagagatccaatgggattatcagaaattgaaaaaaataaagctctcaaagaaggggttcaagtttctgatgaaaatgccacttttgatgataaaggtgctctcatctttactggtcctccaccagcttatgaagaaccaattagagtataa

SEQ ID NO: 6924 - DNA, 1635 bp, Candida albicans
atgttgttgaaatctttattcccatcaatcttggctgctacttcattcgtttcttccgtggctgccgaagatttgcctgctattgaaattgttggtaacaaattcttctactccaacaatggatcccaattttacatcaaaggtattgcttaccaacaaaataacttggactccaacgaatcatttgttgacccattagctaatcctgagcactgtaaaagagatattccatacttggaagctgtcgacaccaatgtcatcagagtttatgctttagacaccagtcaagaccatactgaatgtatgcaaatgttgcaagatgccggtatttatgtcattgccgatttgtcccaaccagatgaatccatcaacagagacgacccatcctgggatttggatctttttgaaagatacacttctgttgtcgatttgttccacaactacactaacattttaggtttctttgccggtaatgaagtcaccaacaagaaatcaaacactgacgcttctgctttcgttaaggctgctatcagagataccaaagcctacatcaaaagcaaaggttacagaagtattccagtcggttactctgccaatgatgattccgccatcagagtttcattagccgactactttgcttgtggtgatgaagacgaagctgctgactttttcggtataaacatgtacgaatggtgtggagactcttcttacaaagcttctggttatgaatctgctaccaacgattacaaaaacttgggtatcccaatctttttctccgaatacggttgtaatgaagttagaccaagaaaattcacagaagtggctactctttttggtgaccaaatgactccagtttggtctggtggtattgtttacatgtattttgaagaagaaaacaactatggtttggttagtatcaaagacaacactgtttcaactttgaaagactactcctactattcatcagaaatcaaagacatccacccaagttccgctaaggcttctgctgaatctgcctcctccatttccagaaccacttgtccaaccaacaccaacaattgggaagcatctacaaacttgccaccaaccccagacaaagaagtgtgtgaatgtatgagtgcctcattgaaatgtgttgttgacgacaaggttgattcagacgactactcagacttgttttcctacatttgtgctaagattgactgtgatggtattaatgctaacggaaccacaggtgaatatggtgcttactccccatgccacagcaaggataaattgagttttgtcatgaacttgtattacgaacaaaacaaggaaagcaaatctgcttgtgactttggtggttctgcttcattacaaagtgccaagactgctagcagctgttctgcttacttgtcctctgctggctcttcaggattaggtaccgtatctggtaccgtcagaaccgacacttctcaatcgacttctgactctggatctggatcttcttcctcctcctcctcttcttcttccagctcgtcatctggttcaagtggtagtaaatctgctgccagcattgtttctgtcaacttgttgactaagattgccactatcggtatttctatcgttgttggtttcggtttaattaccatgtaa

SEQ ID NO: 6925 - DNA, 900 bp, Candida albicans
atgaattatttattgttttgtttattttttgctttttccgttgctgcaccagttacggttaccagatttgttgatgcttcacctacaggttacgattggcgggccgactgggttaaaggttttccgattgatctgtcgtgtaatgccacacaatataatcaattatctactgggttgcaagaagctcaattattagctgaacatgccagagaccacacattgagattcggtagcaaatcgccatttttcagaaaatactttggaaatgacactgcaagtgctgaggtcgttggtcattttgaaaatgttgtcggtgctgacaaatcatccattttgtttctttgtgatgacttagatgataagtgcaaaaatgatggctgggctggctattggagaggttccaaccatagtgatcaaactattatttgtgacttatcttttgttaccagaagatacttatcccaactatgctccggtggatataccgtctcgaaatctaagacaaacattttttgggcaggtgacttgttacacagattctggcacttgaaatcgattggtcaacttgttattgaacattacgctgacacttatgaggaggttcttgaattggctcaagaaaattcaacttatgctgtaagaaactcaaactcattgatttattatgctttggatgtgtatgcatatgatgtgacaattcccggcgaagggtgcaatggagatggtactctgtacaagaaatcagattttagcagcttcgaggatagcgacagtggctctgattcaggggccagtagcacagcctcaagttctcatcaacataccgatagcaaccctagcgccacaacagatgctaacctgcattgccacacacatgcagatggtgaagtccactgttaa

SEQ ID NO: 6926 - DNA, 1110 bp, Candida albicans
atgacaacttcgtccaagaatgcattaacaccatatttgaaaaaattggtagtagagccgcctactttagagcctaaagatttgtcagaggcacttgaacttattttcagtgatattccatcagatattcaaactgcagcatttttaagctgtttgaggttgagagggctagatcaggaagctgattatatcgctgctgcagtcacaacagtattgcattttgccaaaaccattcctcctgagttggtggattctaaaggatacatagatattgttgggactggtggtgatggccaaaatacgttcaatgtttctacatcatctgccattgtggctgcgggaatgggtttaccagtatgcaaacatggtgggaaggcctccacttcgtcttcgggatccggtgatttgttaaagtcgttgggtgtggacttgtcgcatgtaaacgaagtcaccacgccggaaatcgttaaaaaatcaaagttttgtttcctatttgcaccttcctttcacccggggatgggcttggttgctcacattagatcacaattgggtgtgcctactattttcaatattttgggaccactaatcaatccaataccgcttagagctagagtcttgggggtgtacagcgaaaagttgggtgaatcttatgcacaagcagcatcgatcttggcaaagaaaaatcaaacacatgaaaagacaatggttgtgtttggagaaattgtccttgatgaaatttcaccaattggatacacaaagacatggacaattgataaaagcggtaaaatcgaacgtaatagaatatcacctaaagattttgggttaccagaacatgatttatccacagtgaaatcaggaacaccgcaacaaaatgccgaaatcttatcacatattttgaatcaagataatgatgaatttaaagtgaagcaagatggcaataaccacccattggttgactatatcttaatgaatagtgcagcagtggctgtagtatcggggatagctgataactgggtagatggtgtggcgttagccaaagaatcgattgtaagtggtgcagcaaagaaagcactcgaagattttcaaaacagttcaaaagaagttttataa

SEQ ID NO: 6927 - DNA, 858 bp, Candida albicans
atgattaaaagtttaattacaagaaacagtacgaggatacgcggtgccaatacaaatttaaccttggtaagatttgctggtcattccaaatggcagaacattagacacgacaaggccaaaaatgatgctagaaaatcaaaggaagcaacattgatctcgggaagaattgagagttgtgtacgtgtgggaggcaaagaaagtaatgctagattagaacagttgttagagaaagcaaaagcattaaatgttctgaaggcggttgtcgagaaggcaattaaaagaggatgtggtgaactaacagatactgcacaacttcaaaatgttcaatatgaatttatgggaccaggtggtgttgctattattgttaatgcccttactgataataaggcaagaacagtcctgatggtcaagaatgcaatgacttatttccaagctacattgagtccatgtctgtacatgtttgataaaatgggagaggtcatctttttgccgaaggataacgatgaaagctttgatgatgtatttgaagtcgcattagaaatcggtgctgaggatgttgaagagtttgaatttgacgacgagtttgtcccaggaaaagtacataaattttacagactattgtgtgatcccacctccattaatcaagtttcaaacgacttgagcgccaaagggtataaattgcatgaatcaactgttagattcttggccaattccgattctcaagtgccgttccctgaagaactgtcgaaagggtatttaagggcacttgacaatttggatcagataaacgatgtcactgattactacacaaatattgaagaggaacataaagagcgtatagtctcatccattaactga

SEQ ID NO: 6928 - DNA, 1401 bp, Candida albicans
atggctacaagtaaaattattgactattttagattgaaagatattgtaaatcaaagaattgtgtatgatttgcctttgaattacactgattctcaatcttcctccactattaaggtagctattaccattacttctaaatatgataagaatttgcataatgacaaagagggatttgaaaaagtgttattacctgaaaaaccaaagataattgtatatttacagggagggcctgggtttccatgtccagttcctacttctaatctggggaaaaccaaagttctattggagaaaggataccaaattgtttatctagatcaacgaggcactggtttaagtactcctttggaagtcaaaacatttaaaaatttggttttgaaagagtacgggaattttgaagtggattcgcagttgaagtttattttaaacttccgtgctgactcgattattcgtgatttggaacaaattagaaaagatttaattgggaatcatcacaaatggtcaataatgggtcaatcatatggtggattttgctgtttcacttatttgtctttgttcccagaatccattagtgaagttattattacaggaggtgttccaccagttcaattcaaagctgatgacgtatacaaggcgacatatcaaagaacaattgaaagaaatttgcactactacgacaagtaccccagagaccaaagtaaagtggttaggatttgtgaatatttgaatgcaaataaggtagttttaccaaatggtggtactttatctgttgaaagatttcagcaattaggtttaagatttggtggcacaggcggtacagatggtattcatcttattgtcagtaaatttgattatgatttggacttgtttgggtatccaacttatgatttgttaaatacaattcaacaatttttggggtttgaaacaaatgtgatttatgctttgtttcaagaagcaatctattgtaatggaaattccaagagtaattggagcgcagataggttgaggtatgccctggacaatgaaaaattgtttactttgaacaaggaacaagttttctttactggggagatggtatacaagtccatgtttaacgattatagcgaattgaagccttttaaagagctagcttatgcgttacatgacttttccgagtggtcgaccatttacgatcccaaagttttgaaaacaatcacttgggataaagtgccaattgttgcagccacttactttgatgaccaatatgtcgattttgaaataacaagaaaagtgaaacaagacataattcctcgtggtaatttaagacaatttatcactaatgagtattttcataatgggttaggccaagatcccgaaaccatattatcgtcattatttgatttactcgacagagaaatagattaa

SEQ ID NO: 6929 - DNA, 960 bp, Candida albicans
atgagtagaaagcctagacgtcataatgaaaccaagtcaaccccagacaatggtagtgatggtatagaccttttccctttcactacagaggattgtatggagccacagaaaatcattgatttatttgaagtttgttttaaacatgttttagaaagtcccgatttacaggaacatattcaagttgtcaagggtgatctatacaatcgcgattatctagcagcattcaataatgacgataacagatttgcctatgcatgcagatggtcgcctgccagagcattggcttatagttctgttctagcatcattggaacccatcaaaactctattagaaaacccagaaacagtcagaaatgtgctatgtgttggaggtggtgcctcttctgagttggttgccttgggatctgttttttgtcgattgaaagagtatcatcctaattcaccttcacaattaaatatcaaattaattgatatcgccgattggtcaaaagtggttagtaatctcacaacatacatgaaggacagttgggtttatcattctgaaaaattaaattcccaattcatttgcaatgacatcttaacttcttcccctgaatcattaaacttagaatcgttggatttgataacgttactattcacaaccaatgaattgtttgcagaaaaaagaaaggaaaccatcaagtttctacaattattgaacagtaactgtcgacaaggaagtttgctattgattgcagaaagtgctggctcttattctcatataaagataggtgataaaaacttccctgtacaatttttaattgatacaattcttgttggaaaaccgggtctgaataacggttcctgggaaattataagccaaagcgatagttcttggtatcgtataaatcagaaagaagtggattatcctatgaaattagaaaatatgagattcttctatagattatatatcaaaaaatag

SEQ ID NO: 6930 - DNA, 2826 bp, Candida albicans
atgtttaaaatattttcacgtcctaataataataataattcagacatcaatactccaccagggtctccttccaataaagtaatatttgccgattcattttggtcttggtatattgatagttatttaattaatgataaacaaactcatattaaacatacaccttataatatcaccaaatattctgataaatctcatgatgtaaccactttacaaaaatattttaccaccaataaattaactcctataccttcaacgacacaaataattgctatattaaaatcaccttttactcaaggagatttaaataaatcatattatttaatacgaatgtttcaattatctagtcaaggattatttttaactaattcccccatggataaattaaatcatccaatacaatttttgggtgcagaaaattgggataatgtcatgtgttatttggatgcattattatttgccatgtttgctaatttagaaagttttgaaccaatactatttatacctaatcattctgaatatttattaaatcaattatcagcattattaagagtttatgtcaatttattacgttcaggaaatttaatcactacggatttaacggcgaaaatttgtgaagcattgatgaaattaggattcactgaagcattaagtcataaacaacaagattcagctacattatttgaatttttgactcaaactttaaatatgccattattaacatttaaaatagatattaaacatggtggtaaatttagtaaacatgatgatgaaaaaatatctaaagaaagaatattatttgttagtattcctaatgaagaagttgaagatgaattattacctgttgaaaaaagtagtattagtcatactgaaaaagttgacaagaaatcaaccaccactaccactaccaccaccatcaccaccgccaccatcatagaaaaaccaccaacacaccaagtcaatgataatgaaataaaagaactacctcaggtagatgaagaagatgaccctaatcaagatcaagaagaagatctgatattattggaagaatgtttagaacattatttcaacaattcaataagtgttaaacgtgaattagaaagaagagcgacattatctcacatcactgaaggagttactgccactaatttaaacgacgatggattttcttcttctgctcctcctcctcctccttcttctcctcgagtaatcactacaccaatgtcaaataaatatgaatttgaaacaattgaaaatattgatgataaaactcggttacgatcaaatagtgtgaaatcagataatattaaagttggagtacgacaacgatcatctactacgttatcattttggtcagttggcaccgataataagagtaataatgataaactgagacggggtagtacatctggtaaagaagtcagtttaccagcatggatgtttcttcgattattaccattttatactgatgataatgttataaccaatgaattacaaagtgttgtgaaaacatctaaagaatttgccaccagaagaccaattttaccaatttgtttaaaaagatatcgattcaattctggggctgcttcagggactcgatcacaaaaaagaataattatcccaccatttattgatttacctcaatttgttgctgatgatattgatgataatagttgttcatttagattaattcttgaaagtgctatatgtcatcgtggggataaaattgaactgggtcatttcattgctgttgttcgtaaacatactaataaaattaatgaaactgaacaagaagcaaataattcaacttggtatctttatgatgatatgaaaaaaaattctcgagttgttgaaaaaacttttacagaaatttttaaagatgaatggccatatatgttattttatcgattagtgagtaatcatgaagttagtggtgcatcatctataaatagtgataataatactaacaacaacaacaacaacaataataataataataatattgttgttccacctcaaggttcaaaaggaaattattggttgtcacaggaggaaacatcaccacaaccattggaaaccaacaataatttatcagtgaaaacaccaaccaaaagtattccaattctgaatgtatcaccaatagatcccaaatatattgatattcgaaataaatattattggtatttcactgatgatgataaaaattattttaaagaagaatcaataaaattaaaagatggtaattctagttttacattaagtcctcaatttagaagaaatagtcaatggagtgttaattcaaatattagttttgtacaattggataaagataaagataaagataaagaaaaagaaaaagaaaagaaatcatcttccaataataataataatagtagtattcatactatcactagtaaaaattccaactttacaaaatcgaaaattgaaaaaccagataatgatgatagtattactggtgctactaatactactactattacaaaaccatcaaatttgcttaataaagaaaatgaaatcaaatcctctccacattcatcaatttggaaacgagcaattaaattgacaacatcaccaagtgttaaaattgattctactgaatcagtaggagaacttaataaacaaatatctccaattaatttagatacatcaaacaatgatactactactactactactactacttcattacctaaaacattaagaaatttagaaaataatcaaaagaaacatcgtcatccattttctcataaaaaatctaaatcaaaaagacaagatgattataaaaaagaacattgtataatgatgtaa

SEQ ID NO: 6931 - DNA, 3234 bp, Candida albicans
atgatgagtataacaagaactagtactgccactacaacaaccacaacagcatcagacatttctcaaatggaaattaaagagctggaaatagaacctagacctaaaagtacagataataattcttgttcttgttctagttctagttcttcatccttaataccatctaacaccactaaatctaatcatattcataaaccaatagctagaagaaatattcccattgaattgaaagacgataatattgatggtttaaaccccacagaaaaagaaaataatatgacaaaatgtatccccaatacaaaaattgattcttcttcttcttctactaattcaacttcaactccacttataccttctgatattcatcgtgcatgtaaaagatcttcatcttcttcaaatgatctaatatatgaaagagatagatttagagctagattgaaaagttttaatgatacacaactgcataataatcaacatgaacctccaccaggaacaacaacaaaaatggaatcgacttctaactccaccattaatggaattaatgaactgtgtgaaatatgtgatgaaataagtgttactgttaaaacagcaaaattaaatattgataaaaatccacttgataattcaacaatgttttataaactgctacccaattattatcccgataaggaagatggaatgataacaattcccgtgaaacaattaaatttggatcaagtattggaagtttttaaatggtatttcaattcaaatttaccaaatacaaaagatatgtttccttggcttcatggatttcataaatataattttgctcaacgttcattttttttacatcaacaacaacaattacaacaaaaattggataacagtagtactaatactagtaataccaatttccaagattctatgaatcataatgaattgtttactgattatcatttatctcgaccagatgatattcgatttttaatgtgtattaatgatgaaagtttaccagttaatttacataatacggtgaaattgacagaaatattgacaaaaatcgatgtttcaaaatcggaaattaaagaaatcattaaaaagatctggttaaatgataaaaatggaattgaaactgaaactgaaactgagactgagactgattcaagttttattgaattattggtgactgattgtataaaattaaatgttttaccgatatttttaaatttagatcctgaaagagggatttcattaagaaattttcaaattcaagtggcaaaattatcaagttgttccgattttataatttatggaattgatgaattgaaaattcaatcaataacaagaattctttggttagctcaaaggtatgaacgtcaacaacgagaaattgaaattaaagaatcaggtaaaggtaatcaacaacaacaaacatataatatatttgttttaaaaaatgatttaactcaatgttatgaaaaattacctccttctactacaattatgaatactatacaatcatttgctaaatatctgaaaattgatacttcagggttattttataaaccaataaatcaatatcttttaaatgattataatttaccattatatgaaaaaattgaaacggcgaaaatgtcttctgctacaaaaatttatcaaaatgtttggataggtaatttttgggattatcaaagtatgttaaattatttatctgagaataaaccagtggaaacatcaaaggaaaacttgaaagattattattgtcaaccatcaaactcaataactactagtactactactactactactaccaccaccaccaccaatagtcaattatcattacctcagccaaaagctaattggaaattatttattcgatgtcatagtgaagcttcctttcctgatttacaagatttaaatcaattattatttaaatatactatatcatcgcatgaacaatcagatgaaattcatcatttggaattcccaccactgggttcaattggaattggtgattgtaaaaaagaaaatttacaactgataattaatacttgtaaattgatttatttatactcgtcaaccacaaccaaaaatccttcatctgggttaaattcattgatttattgtactgatggatatactgaactgtcattattagtattttgttatttaatgtattcattaaatatatcattagatgaagctatattagaattacatttaacttatggtagaccattttatatttttcctagtgatgtaattattttaaaaaaattacaaccattattaagaaagtttagtcccaccaccaagagtagcaacaataacaattcaatgaatcgacaaattgattgggcaaatttagaaattctttcatcacaagaaattaatgaattattattaggttcaccaaaagaatcctcacaacaaaataccagattaggatttatttccccaaacgaggacgaggacgaggacgaggacgatgaagatgaagatgaacaagatattgataatgattcaagttcaggatcctcggattattcttttaatgaaattgattgggttaatgaagttgaaggatcaattccatcaaaaatattacctcatatatatttaggttcattaaaacatgccctgtgtttatcaattttaaataaattgggtattcaaaaaatcatatcagtgggggaatcattaccttggttaaatggatatattttccaacgtcataatgatataactataaaccaatccaccgatggtaatattgaaacttataccatcacccccaaaaagaaaaccaacttggttgcccattctcaccatattacttccgtggatacagtattaaaagttaataatttagaagatgatggaattgatgaattaagtcaaagattaccccaaattttaaaatttataaatgatcaatatgaaattaatcaaggtcaagtgaaaattttaattcattgtcgagttggtgtaagtagaagtgctaccgttgtaattgctgaaatcatgaatcgattaaaaattaatttaccaatggcttatctttatgttagagtaagacgattaaatataattattcaaccaaatttaagattcatgtatgaattatttaaatgggaagaacaaaaaaaactagccaataatgagagggataaggaagttggttatttgagagaaattgattggtttattatgtgtcgagaaataactaaattaaatactccatatttatga

SEQ ID NO: 6932 - DNA, 972 bp, Candida albicans
atgaatgacacatttctaaacctaagcgatagccattgccattttaacccggaatgtactgctagtgacacagagaaatttgcagaaagactcaacgagcaatcaaaacagatcccagacaactactttcatctaatgactactcaacatttggatcttgaatttatggatacattactaaccaggttagagaatccaagagtattagttccatattttggtgtacacccttggttttctcatttgttttatattgaaggtacccccaccaaggaggaacattacaagaatgttttgaaaccagaaccttccaatgaattattggctacattacctgatcccattagtctacacaaacacaaagatagatttctagagatcattaacaaacataaccttgaaatatatggaattggcgaaattgggttggataaactattcagagttcctaataacggctactgtggtaatttgaatttcccactgtcgacagaaaataaattatctgcttgtagagttgatattaatcatcaattggatgtttttaaatttcaactaacattagctgaacaattaaagaaacaagtgtctttgcattgtgttaaagctcatggcttattgtttgatcaagtgaaaaagttttccaatattacagtcatccttcattcgtataccggatcaattgaacaagcacaggtgtggataaaatcgttaccccagaacagactctacttttcattttcaaattggatcaacggagaaaaaatagaggctctaaaagcacttgtaacggcacttcgaccaacgcaaatattgattgaatcagatattgacgttgacagaagtttcattgagcagaggcaaacaaaacactttgaccaccttgatggcatttacaaaaagattcatgagcacatttttatagattcattacaaattcacaacaacatgctaaattctataggcatatag

SEQ ID NO: 6933-7000 - skipped (68 entries)

SEQ ID NO: 7001 - protein, 371 aa, Candida albicans
MTDTQPRKIRKVSTQEQIEDYEKLRQRIKNHFKDALKGKGSSMSLHYIDEITELYKRVQSQKVKDTRVHLEDSEVFKEASDFAALNARNIVFDDSGIALDDKEFFKCLRRFAVTDPSLLSRNDIGDNDGNNSNDEDDVDDDDSDEEEEAITDEYTFNKTNWLKLGILYHQVSKKSISVDFLNGPLKAEKRKIVRARNVDDTKGSGMAKTARQVQASDISGNQEQNTANMVKSVYQTYIEKYDGNGVNLFKFFINPRSFGQSVENLFYTSFLVKDGRLKLYVNNDGMPCIQRVSSDEIREAQLESNKIFASHHIASFNYKAWKKYTQLYNIREAFLGHRDEPEDQMPPEDIIDYNDEEPIPSSQRRDSNSSD

SEQ ID NO: 7002 - protein, 715 aa, Candida albicans
MSLKPFTGLLFCCTGLESTTRREVVEKIETLGGIHYSDLMTDVNYLIVGDRDTEKYRFCIKYRPDIIFIDADSIFTIHKHWINGEDENSDLLRIEKYRLAIFAQLNACFSRIEMSTSQIDHLVNTVKFRQRTNTSPEYFRPKNLFKLFVDNGGIAKESLSCHQNFIITADPRGTRYNKALEWNVPAIHPIWIVDSVLRGAALDWKDYILNNNPNDCYDRGCDVWPEVFDCQEKQKQKSQQQPKRLESTEPEVKRKITNNKTNADIWNSIMDHTKKQTKQLIHDKTWDDDEEEEDNDDDGDTQTKNEKNNQYKNITTIPKDGKQKPELNGKIHNLDLKLVSESKENSPNVSESQLFLGFNYYTVGFDSREFDLLSKAIENYSGEISNDPNDDSITHVVIPAKKGYQSMSVLKVLPADLKSRIANGFVKIVTEFFIERCMFYKKIILDRWGQPMKGLVPSKKSFKICTTGFTGIELLHIEKLIRSFNFEYCETLSEQRDLLILNVNLFKKSLMNSPKLFQYKCKDIINCPTGGSVSLMSSKHKVEAAKRWNIPVVSVAYLWEILELSTNKSHIIMPDITDLQWCVFAPSNYNKPKSLLEYVKNLDKASRESSFSPKSQENEALEEPTMDNSVRLPSPRRVNSKQKYGKLVGGKSPKSIKRKLLEAANSFADGQNDHSINPDVTIEEDSMSQIRYQDNESMINQERLLEKLDGSAVLV

SEQ ID NO: 7003 - protein, 807 aa, Candida albicans
MDTQAEINADLISSIIPFPNLTDLSNTTSDFDNDIQILLDWLSPYIPATSLTKYQDCGSPLLLLRVQEPSQRVKSAIRGCLKDEINQIQFIELYINTINEKVSQFFESIVTKNLKFIEYVNIIKILLHYYNSQFEYLNLSDNVYKKFQAKLSFIITCNLLNEQSSFRAKMNQFFEESLYVRATLSNPSSSITLNLIDIISTLASIGMSDLLNEIVIKLSIDKIKHFTNTYSRNVWNKPLLSTINNFIQNEIYPNFYIVISYTTSSNLTDSMNNVYLYELVRIAHDELINLRIQEIYSMVLQYPESQVGLNELHHCLSKVKFNSKQYELTLLSCAIDHSVNIQAAQRTELVNSFIDYCHKNILHAGANTIDVITTYIKTIKSFLIVDPKGVLLDKVVRPIRQYLKTREDIIIKLVHGLLDISPNNELIELARELRHPSNKYRSKHDHSKDVLEDLLDLNWQPDPIDALPDFKKGKVSDIIESLISIFDSKDIFIDEFTRLFGDSLIKLKDYNVEEIESNLNLLKSRFGKQNFATLDVMIRDIKESEYLNDLFVRNTRNTNFNTSVLSHLYWSSILENINTDANNFKVPKEIEDKFQSFKDKFAQEKYGRTLELLPSLGLVTLQLEFKKSGPRVFKVTPDKASIISLFNEKEDELSVSYIAQTLNMSEYMVSNGLAYWVKEGVLTELTKTLYIVNDDDDEEEEEGNVFPEKAESSKHGIDSATSNLTSVKSGMEDKFSEIAIIESYIVTILQNITSINFERMKTLLNLMVPKDKLDFANVSESLLEEYLDSLVENSKIAFQNGNYSLPK

SEQ ID NO: 7004 - protein, 289 aa, Candida albicans
MSFRGGGGSGGRSTQRTILPFGLDYADIISSTQETEKPQLLLPINGDITEIESIIAKQSMNFTKLMSEGPFFTGNLDSIEITKKRNHNDSENEEEEEEEGGDTENTGDRKKKKSKTNGDGSSSGSGSGSASGDGIERYSDRYKKIQKIGRTIDEHPYQPEYFPSELYSVMGITNKHDKKKFLLLSKFKSNGGLKQILSNEKLENLDEQSKLNSMKEKMLSMIDNSVNVNDDDNNNDGKTRSGDEQEIDEDDLDDEFEDEDDDDYNAEKYFDDGDDDDGGDDGGDDEAAF

SEQ ID NO: 7005 - protein, 472 aa, Candida albicans
MTDEQLESKTSKGKQNRNRNIDNDNENDNDNEDDKFQTEQVYDVEDEIQDWKFLNKSTIPKRGTKEFEPDGTNYQISALEQSQQTMFQAINNVRGHHTTKKLIGIWMIDEHDQYCFIPQIRGNYFKDLGKAINIGKFQGMKLNSLETIYLAERGSLIVYLGNQEYSDWLYNSAEVEENEDGDKNVSFDVESNLIALDLEYLYSLLTIPLANYQVYAYLKRLGYIIQEYKVQDDVMDKTLLSSSPTKDPKKLESLVQFTLWPREWGIMAYPLFHSLHFKTKHYFKYTDVFKNLKLNFKPIESDPNESNINITFNVWKPSPSFSKKTPPPPDFQLCVVDSSKNTDFLKLPQIQRLFFQLSPPPSQQQQQQQQKQNLFKKTKPSTKMESKRDIRARRYAERQAKLDKQLQLKNEYYRLRDDCFKNGGQSVIIAIVNNGIMNFISLSSGQFDSLQNVKTRLNEIYPKKIHSIIYNE

SEQ ID NO: 7006 - protein, 433 aa, Candida albicans
MPSHVTNVYNDIDDGMLLSSLSLNERSNDRRGLEIEEVYDSSFDDPMDIDDTGELSNHMDIDDTTFEIDHVASDNYANKREDDNDTNNEEERREDGLFSLLSPTLMGAKLAIKKPLLLMPPPTVSEQSDSKTESASSVDYEYDTSSFKPMKSNGLITRKTNSSTFQPSNIDSFLFHSDGISSGQSLGGYQDLHSNYQQPVTIHNHHHHYYYYNKDESVPSPPSNNNLQSLEHEQRNLQMQQYKQQLEEHQLYLQEYKRNNQILLPSPWQHNISPIERVPYLLMSYLQMLINFIASLYGVYLVYCLFRTINTDIKTKIEEQQTNLIISIESCRRSYYQNGCDDKDNLVPLLVSKCQKFEKCMKQDPYKLSNVSIMSAEIIGMIINSLIEPLSLKFYLFMLAFILIIFACNFTFGYIRAKAYYGGSMKYSLDKLD

SEQ ID NO: 7007 - protein, 788 aa, Candida albicans
  MISC_FEATURE (25)..(25): X=any amino acid
  MISC_FEATURE (38)..(38): X=any amino acid
  MISC_FEATURE (42)..(42): X=any amino acid
  MISC_FEATURE (52)..(52): X=any amino acid
  MISC_FEATURE (143)..(143): X=any amino acid
  MISC_FEATURE (146)..(146): X=any amino acid
  MISC_FEATURE (162)..(162): X=any amino acid
  MISC_FEATURE (167)..(167): X=any amino acid
  MISC_FEATURE (224)..(224): X=any amino acid
  MISC_FEATURE (239)..(239): X=any amino acid
MLKNDTVFTKDISCTAITGKDAWNXPTPQPITISLSFXTDFXKASELDNLKXSINYAVITRNVTEFMKSNEHLNFKSLGNIAQAISDIGLDQSRGGGSIVDVTIKSLKSEIRAESVEYKINRNTLGQPVPLDIFQVNKLRLLXIIXVFTFERLQKQIVDVDXQFKIXPNSNLYFHQIIADIVSYVESSNFKTVEALVSKIGQLTFQKYDGVAEVVATVTKPNAXSHVEGVGVSSTMVKXNFKDMEPVKFENTIAQTNRAFNLPVENEKTEDYTGYHTAFIAFGSNTGNQVENITNSFELLQKYGITIEATSSLYISKPMYYLDQPDFFNGVIKVNFQNISPFQLLKILKDIEYKHLERKKDFDNGPRSIDLDIILYDDLQLNTENLIIPHKSMLERTFVLQPLCEVLPPDYIHPISAESLHSHLQQLINDKPQETVQESSDLLQFIPVSRLPVKDNILKFDQINHKSPTLIMGILNMTPDSFSDGGKHFGKELDNTVKQAEKLVSEGATIIDIGGVSTRPGSVEPTEEEELERVIPLIKAIRQSSNPDLSKVLISVDTYRRNVAEQSLLVGADIINDISMGKYDEKIFDVVAKYGCPYIMNHTRGSPKTMSKLTNYESNTNDDIIEYIIDPKLGHQELDLSPEIKNLLNGISRELSLQMFKAMAKGVKKWQIILDPGIGFAKNLNQNLAVIRNASFFKKYSIQINERVDDVTIKHKYLSFNGACVLVGTSRKKFLGTLTGNEVPSDRVFGTGATVSACIEQNTDIVRVHDVKEMKDVVCISDAIYKNV

SEQ ID NO: 7008 - protein, 185 aa, Candida albicans
MGSKVRNASDIKQEQITRDEALRLYTNTLNFNVISRYDPAIKQLLCNTSHCVLYNFNDETEEWVKSDFQGTLALYVRDFKVPSTATAPSYRDLQNLFCYGLILLNRNNPECFSLGLLPNKISSQFFPNGLDDSSISEMDVELNDNLIIIRNLLGEIYGLWVFNESDRIKLFKSIEFCLNTEASLS

SEQ ID NO: 7009 - protein, 321 aa, Candida albicans
  MISC_FEATURE (200)..(200): X=any amino acid
  MISC_FEATURE (264)..(264): X=any amino acid
MGKRRVDEESDSDIDVSSPDSETELESTHHHHHHQEGATTIQETVDVDFDFFDLNPQIDFHATKNFLRQLFGDDNGEFNLSEIADLILRENSVGTSIKTEGMESDPFAILSVINLTNNLNVAVIKQLIEYILNKTKSKTEFNIILKKLLTNQNDTTRDRKFKTGLIISERFINMPVEVIPPMYKMLLQEMEKAEDAHENXEFDYFLIISRVYQLVDPVEREDEDHEKESNRKKKNKNKKKKLANNEPKPIEMDYFHLEDQILEXNTQFKGIFEYNNENKQETDSRRVFTEYGIDPKLSLILIDKDNLAKSVIEMEQQFPPP

SEQ ID NO: 7010 - protein, 1274 aa, Candida albicans
MWDKYNFITPAKVRVLLVPINDCTPSNFQRYLHLIQTNVGEVRLLDIRENNKLHYFNSVTSPQGRIFPEFITSSIDNELIFLHDFDPFRKTFIVLGVGPYGQDPSTALVELKKKYNTAIVHNVILFDTPEDKLNEQVPEVFFHNGTTSHLTALETIFCDISGNFLEKLDAYASAYANITLRSPVSITDSHVLTKTINQAQKRLSSGSTSFKVTFNNSTTTSTTTPGSTLEKSKTHLKHLGRQRKLMGSFYLLAGKYHDAFQNFIESLTSLKKSDDFLWLASALEGVAVSIVLMQFIGTAYQLPNQTMNPVLQVSKIRGSIDTATVRKTSIDSNVSSPRNSINGSNGFGFNALTSAIPDFNNLPVQELLKIITSRVVYYFSMSTNDIENMVPDIVYVESILRRIKLLIGIHFSSSMEDIVKGTITPTPNGSFPKIEIIDEIDKIFSLQITDLNIVDQCRIYSALATMYADLGLMRKNAFILRLLISAILPHLSSGELPAQSIKEVLENVFVLYDICDEPESFSEAARFHGQSNWTSLQIQLLRLALKVAENLNDQELLLKLCTLLLTRYTHCLPTDDQIKLKNKVDSALKSNGGLSIPYWDPFLVRKVKFVNSKPRGNLIPMKETLNSNNSSQPFFDPYTKKESDKAFVPTLVKDDISQLKVTLQNPFAFEVEIHEITIVSEGAQIETIKSLIRPLESITSKPSSTMPNGNIVNNKLRGHPGKKSSSTTSVVHQGVSHTTSTNSASTFVLAPRSMESVMLSFKAISTGQVKITGFDVSIGNCQTQFFHIIDEEKFDHTIKLQKVNQKSKQTTSVLDKVVTNLQSQSVLGRVMTSSLSLSIIPPQPSLTLLEISASNGCLMLLEGEKHNVTVTLANHSAQSINYLTFSFWDSNIEFLNKKLTNPNLTAAEVHELEWKLLVFKPFRILNKDVIGETINPGGVVELQCELTSRKFMNESKIILEYAHKSDTEQSFMKNLNIPLNVSVMPSIDVVGCEMLPAISISDNVPHSIGQALKCVKNVDDYCLLVLDLRNSWGERLECNLKYNEFELSEPMQAGKTQRFIIPIKRIEVDITKTIPSLRNKQFIKNYNISDEEEKHMKKLFWLRNSILENLVGSWKLGRRHGVIDLRPIRLTTKMANILSYENIQVHNTVLTDDDLQVDSIGKSYNLSTDQFYVLKTTIINHSKKPINGIVRQLPFPIHNTPTKSSSSRPQLSIDKKMLVNGTLQNKFPEIAPGDQLVLETSFVIIQNGEFEWGTVVDLFSDKIICREQLYITAN

SEQ ID NO: 7011 - protein, 219 aa, Candida albicans
MDIETAACFSIAFIATPILIVLVRLLFILPSLRLPTSVKKKKKLIQECQLSILLGSGGHTGEMMRIISKLDMGKVSRTWIYTSGDNASLAKAQDYERKSGTSSQYIPIPRARTVGQSYISSIPTTIYSFLFSAIAMLKHRPAVILLNGPGTCVPVAYILFLYKLLGLCNTKIIYIESLARVNKLSLSGLLLLPISDRFIVQWESLYQQYSRVEYYGILI

SEQ ID NO: 7012 - protein, 192 aa, Candida albicans
MSGIKISLKKKNPKLKKLIVNNSQQTDESSEQQKKLITSYSTEDKTTHKDETKPIIVLKQPCKSMLQKEIEIDEKPILPYGVTTFEKVETTKQSMIKKIESEDSDDDSSDDRKIPIDEFGAAFLRGLGWQEEEEKNKDDSKSTNTQNLSHRKHGITLGIGAKPIDEEIIQDLNSTEKGIPIIKRRKLNHINK

SEQ ID NO: 7013 - protein, 1120 aa, Candida albicans
MGKDLLTAEAVTKLLRSKDTSITEIVNTANSLLNNTLDIYLPGKEVFVLNLLCDRLNDKSNGKFGKWKFNKDVWNLLLSVWSKLNHQKVDRQRVIQRLKIIEIIILVLQQNNDNEVFSSLFEFLGIMFQESYIIADENSATQLLKCFVEHMDVLQASDSIVSWTELVRDIYTRACSKISLEGSKKFYNKFFEDCCFPLIEYLAISEGSSVSPILKELLIQGVFNADSTKYYQSSLERELKKKDIKEVSVIYLYTLTVQLFSAKHMEICEGVYSIMASKCPDLAEKLLSILASCRKTISKPFIESIYKVEVADKPFKQLNWDMVKHIFAIDSELAISKSGFLFKTYKSEFQLDDKVVPVAEVIVDGFARNRELSDFFTKVWPKAIKRDEIWESDEFIHTVSQHVKTFSGKQLIDVIESSFYADKGSQRAIFTAITKGLTSSSANLIDAVKQTLLDRSNYFNATENFWCIRYYLLCLYGTDFTIAEQNMKQNIDLYYHFSIFRLLELQVIKEYSKSDQKYFIACIEGEKEMISPIFKRWLVIFNKFFDSDLLIKLISLGYPDIEFDDVFFEQPKLTTSLIRFITENLPARMDLIASIPIVCFNKAFKKELLNGLFVLFVSNPTKETLENIQYLLGQPTYSSILETNFDNMLKLLTVSTEESKLIAYNVIEIVWKNNVRQIKNEENQKYVNDAISKLSSYLDSMSQQIISPELEAISIILTNTKEVGLFENTEKGLNKLNEKFTNYCINTLNNCNTQNFITVRWLLQALVMLPPKSLSFENVISCTKRLDPNILKDNSIQSTLFQLICKTIDFNYKSLVYVLSLFVSLSSGRNTELYTVLKSLFQKFSKHSQLYFEVFDFFTRSIDAVPVEFNLSFAQIASIFLSTVPKDADANRYNSKCFTFYVNALQSGNECVAMQILTSLKDLLTNQSWIFKQNLLEITLVIVKTGLQKLNSFANQEQIYILSTQIVSHILLYHRFKIATRHHLVLNVMSSLLKYLADGTSKLSSNTEAASAYARLLSNLCEPSERVGDKMFHLTTSASYFKKLLRKHLSVLLSNYIYFNLKYTFTRTVNDAIMPGIYSMFTVLSQNELRVVNDSLDYGGKAFYKTLYNDYKDHGKWKDQ

SEQ ID NO: 7014 - protein, 1175 aa, Candida albicans
MAKRKLEENDISTIEDDEFKSFSDRDEQIDELSNGHAKHRENNAQESDDHSASEDDDDEDDEEEGEKSVQPPNKKQKKQLSAQDVQVARETAELFKSNIFKLQIDELMKEVKVKKAHEEKIEKVLHRLHDLIKQVPPVENLTLQQAEQHFNPKKLVIPFPDPKPTKVNYRFSYLPSGDLSLVGSYGLKTAINQPHGQSIEVALTMPKELFQPKDYLNYRALYKKSFYLAYLGENLIHLSKKNNLPIKVSYQFFNDDVLNPVLKIESIQTENPEDLTFTKTKIAINLIVAFPFGVFDSKKLLPDKNCIRVQSDTETLPPTPLYNSSVLSQTSYDYYLKYLYTTKKSTEAFKDACMLGKLWLQQRGFNSSLNNGGFGHFEFAILMSALLNGGGLNGNKILLHGFSSYQLFKGTIKYLATMDLNGGYLSFSSLIGENIASKYKSDGFNVPTIFDKNTKLNILWKMTKSSYKSLQLQAQQTLELLNDVVKDRFDAILLQKSDFDPMRYDIVFKLSAPEELYDSFGPLEKIAYITFDNYFKSRLFAILTKALGERIESIVIKNEHPSNTFAIHKRKPSHTSSTFVIGLQLNPEECDKLVTKGPNNEDKDAGIKFRSFWGNKASLRRFKDGSIQHCVVWNIKDQEPVVMNIIKYALDTHLQSEISQHLASSISYFDKKLPVPLLPSATNQVITSLSSFTALRNSFENLSKVLTNLELPLSVKTVLPASSGLRYTSVLQPVPFAASNPDFWNYCVLQFETSTRWPDELSALEKTKTAFLLKISEELAETEYNSFISKDESVPFNENITLLNILTPEGYGFRIRAFTERDELLYLRAVSNADKQKALVQDVYLKFNEKYMGSVKHTRSVTQLAQHFHFYSPTVRFFKQWLDSQLLLQHFSEELVELIALKPFVDPAPYSIPHSVENGFLQILNFLASWNWKEDPLVLDLVKSSADDDIKLSDKLTIQAHRIIEQNFEKIRKTDPSGIKTQYFIGSKDDPSGILWSHNLTLPISTRLTALSRAAIQLLRKEGITETNLDLIFTPALQDYDFTIKVKANNVTTSSGILPPNTFKNLIQPLTSFPDDITTKYDLVQGYVDELNKKFGNAIIFSSKKFTGLCKNNENVIGGIFVPTNLTKKKFRVNLGINVKPLDDKGDEVIINTSSIYDEIELLGGDLIKAFDKRK

SEQ ID NO: 7015 - protein, 505 aa, Candida albicans
MPELQQPDKHSMDIPHVAAIDLPLNVHNVTRAVDMLGGEELIRASIRESHPLELRLRKDPFHHPIQASSNNSERILMKIKIPKKSLPKNNESYSIQQLLELNNQDKSTPRERIQPVAIIDKTYSFKAMADFQVSTRNNSFVQKFNKAMINHTGINEIKEYIDEHKGWQGYVNLSENYFQNNDHQLIPPPILSSIRFPFDYKYQQNPGTSTVRDIHGEVKVISNQNRQKLYTLLIDYNTPTPQEPVEEIRKNWEKLSNANLSVNSSELLLVQCIRKLQALFEIKPIWNRKQLYSILPEDMKKFLKHALPYVAYTYKSGPWRFCNIKYGLDVVHDPSYWSSQTEYFRVLGFKKGTTTDDSKMIVPPSLQGSLEVVEIPENLLFNGVSLPSVATFQIGDIMDADIISIIQDHQSSMGEDFLRNVCDPQDGWINRQTMEVIRRIMRYKLKQLVNEESIDQSKIHKIINTNYIEDKEDEEEANDMHEDRNGPDELDEDDEEEEEEETALY

SEQ ID NO: 7016 - protein, 363 aa, Candida albicans
MSSSQARKALQDVIPNYLGEFTPKLLDYINSLYQLSLRKQAILPNKSEIARFHLCAVVIVEKYKQSFELPTPDVSRIPTQPKVAAKLLDTFRELIEQISAASTPVSSPKKVKPPSQSPSTPTKSRTSKENLKSGSPLKRLRAEMLQEDQVNGNSPDGQLKDVDSPFNPKKRKESKAGTPTHKVYKYDKKHVSIADFIAFCNTFLIPGDITAKMVGTFLTHQHKFLKKSDWSLACGMVYAAYIRINNRLLAQSVGTKSEFTKQLLQYQKGGLSLGAMQSWCGIIEEWIQDEPWIQEIEKTYAYGSKTAEETRNSFERKAKIGEGWDLMEQFGAMIHGETISLSSHQEEYYKNWRKEALEKCDQL

SEQ ID NO: 7017 - protein, 492 aa, Candida albicans
MKQHPLVTAYKGIDDLQQLKKWFYEYNDTIDHRKKAISKVKGLLTRGKLPHGVEATSLLTSIVLDDLQRKDIDSCVLQLSYTMALIRFVNGLLDPYQQSNYAIPMHLLAKQLNLPTYFVELRHMGTHENLPSLDILRSTCSKALTWLYDNYWCHVEEANQDKQVSIGGPLTDAVEFRSNDLRTRIEDSQIYNNLKAFKRIRKQDLNKVYEKNDTTSDLAATYHRCVSDIVEFAKENCDLLVNVLLLKNYLIYPSSKVKDKKSKFNPLIIKLYEPLFDALGLSFKLKCFSKTIELIEATPSSFVDKKVYRKLGFTEKFEYDELFQVMEWVLYFMQDLLRNENVPSPVHNKNELVILFLDSLKSIEQKISQSLLPSFAKILQGLCDVVNDGVKSEIDPETVQKLDAWNKSLNNLHSTKKIFELPPSLDDLLGLSPSPGPIPETTSSNPMKHVLDDDDDEEEEGVRRKQHHSSDSKTYILKPHKNWRPVPFGTCI

SEQ ID NO: 7018 - protein, 269 aa, Candida albicans
MRQKRAKAYKKQMSVYVHAFKFREPYQIIVDNELITTCQSASFDINKGFTRTIQAENKPMITQCCIQALYDTKNQPAIDIAKSFERRKCNHREAIDPSQCIESIVNIKGQNKHRYIVASQDLQLRKKLRKIPGVPLIYMNRSVMVMEPISDVSNQYNMNYESKKLTGGLNDIEAGKLEKQNEGEDGDGDESEVKKKKRKGPKEPNPLSVKKKKTDNATAASTNQEQKKKPNRRKRHGKSKAEEKEDQEQEQVNEATTNEDAQEAITATE

SEQ ID NO: 7019 - protein, 278 aa, Candida albicans
MFKQSIRSLATKSPISSAAATTTTASTTSTTTTASLNFAKPPSYTLAQLREFPSLEPKTFIPLPTTFFNTEKPIRRDILWSCVTYEADKARVGSNYAILKSDSPYSNRKLRPQKGSGRARLGDANSPHMDNEIKAHAIKGPHDWSTDLPSKIYSRGIQNAFTMHYKQGNLNVVENELDFQYGYDIITQSFVSVHNLNKLNLLFITNEPRDNLMESIKKFYINEKEFNSLNKKEKPKYLQKLKGKVLTKEDVEVRDILRAHRVFIESSALQWFITKHTV

SEQ ID NO: 7020 - protein, 1179 aa, Candida albicans
MTSSSQLSASSNESIQNERLLSSSLFDQIRPVCIELSEASTSQPFNTNKVVNLMISMEDILKKHHDEYNKDGNFRIYQLSPKLADYIFYPLSNILKQPALDDTIIQHLFGIIRFLVEYSWSFNVNFVLTDQLLPLVIYLSSGDLNKEPLLITKKSIQFKIATVSVLYTITSTLNKEYFQSLTEKRLLFISNVITICLSIIVGSRVESQDTIQLVLKCLSLISNVKRYLNSSQISIILPGIVSSITKFISLNLNLNYQIIIQFLRLLSGFICASFNDKELDAQIELNEGISDISEIHVGWDDDNETLGNNSLYSDVTITENDHRSSAWLKATSKQLKLSLIIIFKSILLGSRNRHRLRSKQELYDEILGFVETILKNCFNSLFKEFASLAIDIVSILGYVTSEDNKEMADKTNKLSNTLCMIIEGETNKEEVLFELVKTKLADLIDNKLSGIVFALDEDKISSTVASMMFNFSLLLCLSRKVKLDCEDLDSLKQRCLALLTEYVADRFKFESSKPIKSSNASGLLETSSMTNQLDSIELPGYINAKSVVKQEPLKKEQDKRAYIHNLKTISRNWNTNEINNSSGNTLIGISSKFSETILQNFINYLSSLKYEASNSSTLTELENIFELADDNDMITKSTSLWVASNYYKRSTLGKVINFDLGKYLVLDDDEDMEIDDDTKEMSFLVLSRAEELLEEISENQEKYSSQTYILAYNAALQSIKVVAGSIPLDQFRTNFLMDHLLSVFQALTYNDMPEIQLQAQSTLKVVLDTYYNGSMVNLISDNSDYLIDSISLQMSVASNLTPMLPGILLIIVKIAGIQLLESNQLHDVLTDMFVILDSFHGYNKLVESFFIVFEALIDQIHHKFDSQLKVEFKESSKTNTSLYKPWGMTNKDQLLELLNESNKMVDKYEGYDSNKEYFKRKADLPFSEMDADSDDEEEDDEANIDDNGEEEEEKEEIWSSPVSKDIYMISLRIFNYGFTLVSQESYTLKTQIIKTLRLLLPLLCTNYKLLLPVLALNWQMLIALVTGSKSLSTSIESNGEYASEDIGVMTEALQLVTEILEEDKRRYEHFFSKKFQEAWEFISRHSKLVRQREVTSTTNIREQKQLVVSEKAIYTFRNYPLLKTSLVTFLITGVQNYEKMIPDIHRFEIIKLCYELQIPQSIPLSRDTIGVLEVLKNTT

SEQ ID NO: 7021 - protein, 332 aa, Candida albicans
MSTVYYKKLDKLQFQIYDLFSSLLQLSEAEDESVYKASFDDTVQEIDSLLIAFKDLLRLLRPKDKSNKFDTYELKFHSLKHKLRELQVFINDQQQDKLHEYRIKHFHLQDSPVDTINNEFARDQLFADRSTKKTKKEMEASINQQIVSQNKQITKSLQASRQLLSAGILQSELNIDNIDQQTKDLYKLNEGFIQFNDLLNRSKKIVKFIEKQDKADRQRIYLSMGFFILCCSWVVYRRILRRPLKIFLWSFFKIFNIFNWLLGGGRSKGLSASDMIVSSVIAATTEIVDYEATKTLLDTLSNAVDSNTAIDTLAMVVESLTTSSMEHIVDEL

SEQ ID NO: 7022 - protein, 327 aa, Candida albicans
MMSTNFQWPGTNKNDNTEVSVETPSSTDPHVPRYPFTAMSHATASTTMKKRKRDDFDGDKSTTITMNTTTTRKYIQSSLGSSKFKKAKTPKISGQPLPLPRLIESLDKSNLQKLVQDLITVHPELQSTLIKISPRPSIQDSIQLLQDKFDMIISHLPYKCDVESDYSYLRIKPHLQEFLSSVSDFILNYLPPLETNMTHSLQFLHETTKLVYNLPNFTNQEFQYTKSSALEQIANCWLIVLSQDEEKEGNTDVVKVIQELELLEKLHEHNEISFNKFEKVVDYCKDKLEQHELIMNNNEAGSGVTSSISDLITVDYSKYSIANTTSI

SEQ ID NO: 7023 - protein, 432 aa, Candida albicans
MSKAFSAPGKAFLAGGYLVLEPIYDAYVTALSSRMHAVITPKGTSLKESRIKISSPQFANGEWEYHISSNTEKPKEVQSRINPFLEATIFIVLAYIQPTEAFDLEIIIYSDPGYHSQEDTETKTSSNGEKTFLYHSRAITEVEKTGLGSSAGLVSVVATSLLSHFIPNVISTNKDILHNVAQIAHCYAQKKIGSGFDVATAIYGSIVYRRFQPALINDVFQVLESDPEKFPTELKKLIASNWEFKHERCTLPHGIKLLMGDVKGGSETPKLVSRVLQWKKEKPEESSVVYDQLNSANLQFMKELREMREKYDSDPETYIKELDHSVEPLTVAIKNIRKGLQALTQKSEVPIEPDVQTQLLDRCQEIPGCVGGVVPGAGGYDAIAVLVLENQVGNFKQKTLENPDYFHNVYWVDLEEQTEGVLEEKPEDYIGL

SEQ ID NO: 7024 - protein, 889 aa, Candida albicans
MKQSNGSGASGFHSFKGLNEAEVAKTTAELKAKYQSSSTPNDLYNLIDEIDAAMANIDNNLNNFTALNSGRLQQDITNIELARTTKLSSTISNSSKLTSIFSQANDLGHKLTFKIKSLDQEIGNVNKTLDYVTNIQLLKNNINQANYAIEHKNWELAAQCIHTINSKIPSELISGKYASVVIPSTELPESPTVAIANWIDKLTQVFKEKFTEAAKAKNVEQLTKFFQLFPLINQEEIGLNCYSKFICEIINETSKSLTAGLENAHDLKPAIFSNVVMQLFENISMMLSQHGPLIKKYYSATYPSALSYVISKIQREIDLQVGIIADTFYDLRRLDKHFQDIKLYSFPVLTRRLAELKDHPNQDQESRRTSFDTSDDLLPIRLIGDLIQELSSIFENWTLYCRFITVKYLQEPKHRQNGKEVVTGKSPTEDKDALLLPDLIRKSTFTRKINEKLLPSFETLYKFYFRRSIEKSITIEELPSLDAYLVLSNEPGVHPEQVPISSVVEDLTLVLNNTLRNIIQSGLPTAVKSFINESFGIVQQDLLNGFFIKNLNDNQPRYNQTLSLIDPASTINRTNSPISRSATPDVHGGSGGLSTGAGFLKGASSALGSVVSGSGAIVGSLQTTPNNTKLLSFIIYLNTVAMAQEYFTKVFQNINKDSYLQSYYPFGKDKSKISNILQQDFLDPFTSVSNKIISESLINLYNQSIKNKLLLLVNEFFTDIPTANNENNYVIYSSNNINDPTILIKFTSNWQSLMKPYLQTLHKTLWSKLLRLVVVNLTNLLEKKLFMILNKLKINELGAIKLEKDVSYLINEICRDNYYLREKFVRLTQIVLLVGMDDEEYEESNQPVTKARETEEDGGEGRDDFDDEIGGINWVLTPQERIQIRKYRI

SEQ ID NO: 7025 - protein, 564 aa, Candida albicans
MARRNRNKTVNEEEIELDEVDSFNANREKILLDEAGEYGRDDQSEEDDSEEEVMQVEEDSEDDEEDQEDEEEEEEEEEGEEEEEEEEKGWGGRQNYYGGDDLSDDEDAKQMTEEALRQQKKHLQELAMDDYLDDEMMEDWQKKADSYDNKDTSSSTQQQQQQQLIIESNSSIANLEDSDKLKLLQQSFPEFIPLLKELNSLKVKLEDLQKLEDKNKCIETKIVALSAYLGAISSYFAIFVDNLNNEESFVSMKDNPIMETILSSREIWRQANELPDDIKLDDVKVHVSDVVSSSDIDDEDNFVDAKEEQSEDEEISEEEVSQDEDEDQSDDLDIDANSERIIKHVSKKHGDDFTEADIEDIDMEDKQRRKKTLRFYTSKIDKAAAKKDQSYSGDIDVPYKERLFERQQRLLEEARKRGLQKQDDENISDNDNDNDGVNDDEGFEQGDDYYESIKQHKLNKKQSRKSAHEAAVKAAKEGKLAELQEAVGQDGKRAINYQILKNKGLTPHRKKEYRNSRVKKRKQYEKAQKKLKSVRQVYDANNRGPYEGEKTGIKKGLSKSVKLV

SEQ ID NO: 7026 - protein, 849 aa, Candida albicans
MSDQLEKDIEESIANLDYQQNQEHHETEQDKDKEHQDVEKQSSEEETKGIEHVTDSNTDDIGVTKSQDTEEVIENSPVDPQLKEQQESTTKMSLSERDLVDEIDELFTNSTKTVTENNQPSETNKRAYESVETPQELTPNDKRQKLDANTETSVPTELESVNNHNEQSQPIEPTQERQPSTTETTYSISVPVSTTNEVERASSSINEQEDLEMIAKQYQQATNLEIERAMEGHGDGGQHFSTQENGQPSGSSLISSIVPSDSELLNTNQAYAAYTSLSSQLEQHTSASAMLSSATLSALPLSIIAPVYLPPRIQLLINTLPTLDNLATQLLRTVATSPYQKIIDLASNPDTSAGATYRDLTSLFEFTKRLYSEDDPFLTVEHIAPGMWKEGEETPSIFKPKQQSIESTLRKVNLATFLAATLGTMEIGFFYLNESFLDVFCPSNNLDPSNALSNLGGYQNGLQSTDSPVGARVGKLLKPQATLYLDLKTQAYISAIEAGERSKEEILEDILPDDLHVYLMSRRNAKLLSPTETDFVWRCKQRKESLLNYTEETPLSEQYDWFTFLRDLFDYVSKNIAYLIWGKMGKTMKNRREDTPHTQELLDNTTGSTQMPNQLSSSSGQASSTPSVVDPNKMLVSEMREANIAVPKPSQRRAWSREEEKALRHALELKGPHWATILELFGQGGKISEALKNRTQVQLKDKARNWKKFFLRSGLEIPSYLRGVTGGVDDGKRKKDNVTKKTAAAPVPNMSEQLQQQQQRQQEKQEKQQQEEQQAQQSEKQLEQQQEPQQEQQQEQQQTEKQQAEQEQPDQPQEEQQQEKEQPDQQQPDQQHPDRQQQEQIQQPESSDK

SEQ ID NO: 7027 - protein, 273 aa, Candida albicans
MTDSSATGFSKHQESAIVSDSEGDAIDSELHMSANPPLLRRSSSLFSLSSKDDLPKPDSKEYLKFIDDNRHFSMIRNLHMADFITLLNGFSGFYSIISCLRYTLTGQTHYVQRAHFFILLGLFFDFFDGRVARLRNKSSLMGQELDSLADLVSFGVSPATIAFAIGFRTTVDVLFLAFWVLCGLTRLARFNISVNNIPKDKHGKSQYFEGLPIPTNLFWVGFMALLVYKDWIHDNLPFGIVFQDTSFEFHLVTIGFVLQGCAEISKSLKIPKP

SEQ ID NO: 7028 - protein, 471 aa, Candida albicans
MASSILRSKIIQKPYQLFHYYFLSEKAPGSTVSDLNFDTNIQTSLRKLKHHHWTVGEIFHYGFLVSILFFVFVVFPASFFIKLPIILAFATCFLIPLTSQFFLPALPVFTWLALYFTCAKIPQEWKPAITVKVLPAMETILYGDNLSNVLATITTGVLDILAWLPYGIIHFSFPFVLAAIIFLFGPPTALRSFGFAFGYMNLLGVLIQMAFPAAPPWYKNLHGLEPANYSMHGSPGGLGRIDKLLGVDMYTTGFSNSSIIFGAFPSLHSGCCIMEVLFLCWLFPRFKFVWVTYASWLWWSTMYLTHHYFVDLIGGAMLSLTVFEFTKYKYLPKNKEGLFCRWSYTEIEKIDIQEIDPLSYNYIPINSNDNESRLYTRVYQESQVSPPSRAETPEAFEMSNFSRSRQSSKTQVPLSNLTNNDQVPGINEEDEEEEGDEISSSTPSVFEDEPQGSTYAASSATSVDDLDSKRN

SEQ ID NO: 7029 - protein, 193 aa, Candida albicans
MLMYTILIPSLLYIALTIASSELLNSIQGTWQSQSERVITGPTFFDPQKELLEEPKLPGISYSFKNGYWESAQYIVMGNNRNHQCPQAMLIWQHGKYNLKRGKLVLIPNRNDGRQLISDPCLDNGKSEYKRFHNGETLEVDIRFDGYFGNWKLVLVDYLTGKKKQPMWLTSRNATMLPTGTITSTKRKYVKKE

SEQ ID NO: 7030 - protein, 198 aa, Candida albicans
MVNGPAELRRKLVIVGDGACGKTCLLIVFSKGTFPEVYVPTVFENYVADVEVDGRKVELALWDTAGQEDYDRLRPLSYPDSNVILICFSVDSPDSLDNVLEKWISEVLHFCQGVPIILVGCKSDLRDDPHTIEALRQQQQQPVSTSEGQQVAQRIGAADYLECSAKTGRGVREVFEAATRASLRVKEKKEKKKKCVVL

SEQ ID NO: 7031 - protein, 528 aa, Candida albicans
MAIVETVIDGINYFLSLSVTQQISILLGVPFVYNLVWQYLYSLRKDRAPLVFYWIPWFGSAASYGQQPYEFFESCRQKYGDVFSFMLLGKIMTVYLGPKGHEFVFNAKLSDVSAEEAYKHLTTPVFGKGVIYDCPNSRLMEQKKFAKFALTTDSFKRYVPKIREEILNYFVTDESFKLKEKTHGVANVMKTQPEITIFTASRSLFGDEMRRIFDRSFAQLYSDLDKGFTPINFVFPNLPLPHYWRRDAAQKKISATYMKEIKSRRERGDIDPNRDLIDSLLIHSTYKDGVKMTDQEIANLLIGILMGGQHTSASTSAWFLLHLGEKPHLQDVIYQEVVELLKEKGGDLNDLTYEDLQKLPSVNNTIKETLRMHMPLHSIFRKVTNPLRIPETNYIVPKGHYVLVSPGYAHTSERYFDNPEDFDPTRWDTAAAKANSVSFNSSDEVDYGFGKVSKGVSSPYLPFGGGRHRCIGEQFAYVQLGTILTTFVYNLRWTIDGYKVPDPDYSSMVVLPTEPAEIIWEKRETCMF

SEQ ID NO: 7032 - protein, 832 aa, Candida albicans
MKDSQSDIIELCNKLNEATKLKRNGKSIKLTNFVSNTQIKLDSWKFLEWDYGKPSVQLPIQARGLFTLNNDTIAVRGYDKFFNVEEKPFTKETNLKTSTHGPYEVTLKENGCIIFISGLSTGDIVVCSKHSTGDRIDDNESDKTTTATATATAPTRNHAKQGEFELLQQFDGDQQKVKQLAHYLYENNLTVVAELCDDEFEEHVLPYPKDKSGLYVHGLNYNTITFKTLPMDQVLQFAKEWGFKYVSYLTYDNADELFKFLHKCSETGTYNGREIEGFVIRCHRQSHTNGDTDGDCFFFKYKFEQPYLLYRQFREVTKQLLNGTPINSIKIKKNKPITKKYLQFVEKLFEQEPEIARNFENGFDIIKVRQLFLQSLNETNGMNLLSIDSELSDQLKNLALANGNEGLSTTTKYIFVPIATIGCGKTTVFNTLNNLFPQWTHIQNDNISKKAKLKICDLTLLALEDDDQSVVLFDRNNSASRERRQIFTTIDQKRDEHLDDTVDLKYIAINFIPEDLSEEELWDITYNRVIQRGDNHQSIKSQSDENLVESVMKGFIQRYQPINTSRSPDDQFDHVIHLKLSKDENSSKSSLENVRIIIDDLVQNFPDLIKEKPADELINECFQKALDYKPTFVKNMTANTIKKDPTYYGIAMHYSSILENLEIVSHNEHFQNIKSHIQTEFHVTLGHIASSKQDKAGRVKWKKLVKTLGKGDPNKPKSALKFFADVKLLQIVINTDKLACIKVEILKIYDTNDVLQSEIEPINKQLHITIGCIPPATAVESNMTLEELYDNPDEQELKPDGTYKCGDDTLHVFNFDNPDLKLFSQQLFVAYQ

SEQ ID NO: 7033 - protein, 191 aa, Candida albicans
MQTIKCVVVGDGAVGKTCLLISYTTSKFPADYVPTVFDNYAVTVMIGDEPFTLGLFDTAGQEDYDRLRPLSYPSTDVFLVCFSVISPASFENVKEKWFPEVHHHCPGVPIIIVGTQTDLRNDDVILQRLHRQKLSPITQEQGEKLAKELRAVKYVECSALTQRGLKTVFDEAIVAALEPPVIKKSKKCTIL

SEQ ID NO: 7034 - protein, 387 aa, Candida albicans
MGFSLSNFTSDPFAISTVSFGIMAWVVAIAGAASSKQENFPHFSWWGISYQIVIILIIFVLYANNNIELYKFTLVGLVSIAFIYTTNSTNNLIYNSNSAGNLCCAAGCILLSILNLIWILYFGGHPESPTNQFIDSFSLRGQGHEQLGSGSHNHNANNANNNIPIGAGNAIIGKGEMSPYNDRFAASGVNQPTSESLRLASGPQMGNGPFTTTGAIINPNLQQPLSDSIGGSAHHTPINVNNNNNNNNNTGYMTSSHLTGLENFSSPHVPGSGTGAGLGVGAGRDLTHNSNGGGGSGGGPASANNSNNTNKRNTIYTDSETGTGITFRYKAKALYSYDANPDDINEISFVKDEILEVDDIDGKWWQARRANGQVGICPSNYVKLLDT

SEQ ID NO: 7035 - protein, 520 aa, Candida albicans
MNVGSILNDDPPSSGNANGNDDNTKIIKSPTAYHKPSVHERHSITSMLNDTPSDSTPTKKPEPTISPEFRKPSISSLTSPSVAHKPPPLPPSSSSVGSSEHSSARSSPAITKRNSIANIIDAYEEPATKTEKKAELNSPKINQSTPVPKLEEHENDTNKVEKVVDSAPEPKPKKEPQPVFDDQDDDLTKIKKLKQSKKPRRYETPPIWAQRWVPPNRQKEETNVDDGNEAITRLSEKPVFDYTTTRSVDLECSITGMIPPSSITRKIAEWVYANFSNVEEKSKRNVELELKFGKIIDKRSGNRIDLNVVTECIFTDHSSVFFDMQVEEVAWKEITKFLDELEKSFQEGKKGRKFKTLESDNTDSFYQLGRKGEHPKRIRVTKDNLLSPPRLVAIQKERVADLYIHNPGSLFDLRLSMSLEIPVPQGNIESIITKNKPEMVREKKRISYTHPPTITKFDLTRVIGNKTEDKYEVELEAGVMEIFAAIDKIQKGVDNLRLEELIEVFLNNARTLNNRLNKIC

SEQ ID NO: 7036 - protein, 1097 aa, Candida albicans
MSGPVTFEKTFRRDALIDIEKKYQKVWAEEKVFEVDAPTFEECPIEDVEQVQEAHPKFFATMAYPYMNGVLHAGHAFTLSKVEFATGFQRMNGKRALFPLGFHCTGMPIKAAADKIKREVELFGSDFSKAPADDEDAEESQQPAKTETKREDVTKFSSKKSKAAAKQGRAKFQYEIMMQLGIPREEVAKFANTDYWLEFFPPLCQKDVTAFGARVDWRRSMITTDANPYYDAFVRWQINRLRDVGKIKFGERYTIYSEKDGQACLDHDRQSGEGVGPQEYVGIKIRLTDVAPQAQELFKKESLDVKENKVYLVAATLRPETMYGQTCCFVSPKIDYGVFDAGNGDYFITTERAFKNMSFQNLTPKRGYYKPLFTINGKTLIGSRIDAPYAVNKNLRVLPMETVLATKGTGVVTCVPSDSPDDFVTTRDLANKPEYYGIEKDWVQTDIVPIVHTEKYGDKCAEFLVNDLKIQSPKDSVQLANAKELAYKEGFYNGTMLIGKYKGDKVEDAKPKVKQDLIDEGLAFVYNEPESQVISRSGDDCCVSLEDQWYIDYGEEAWLGEALECLKNMETYSKETRHGFEGVLAWMKNWAVTRKFGLGTKLPWDPQYLVESLSDSTVYMAYYTIDRFLHSDYYGKKAGKFDIKPEQMTDEVFDYIFTRRDDVETDIPKEQLKEMRREFEYFYPLDVRVSGKDLIPNHLTFFIYTHVALFPKRFWPRGVRANGHLLLNNAKMSKSTGNFMTLEQIIEKFGADASRIAMADAGDTVEDANFDEANANAAILRLTTLKDWCEEEVKNQDKLRIGDYDSFFDAAFENEMNDLIEKTYQQYTLSNYKQALKSGLFDFQIARDIYRESVNTTGIGMHKDLVLKYIEYQALMLAPIAPHFAEYLYREVLGKNGSVQTSKFPRASKPVSKAILDASEYVRSLTRSIREAEGQALKKKKGKSDVDGSKPISLTVLVSNTFPEWQDNYIELVRELFEQNKLDDNNVIRQKVGKDMKRGMPYIHQIKTRLATEDADTVFNRKLTFDEIDTLKNVVEIVKNAPYSLKVEKLEILSFNNGETKGKNIISGEDNIELNFKGKIMENAVPGEPGIFIKNVE

SEQ ID NO: 7037 - protein, 322 aa, Candida albicans
MRLFVLLAYIIPFILCQLTPVLVASHKLVRGLKEEINPSNTLPHNVTSVTNMLKKLITECSSDAYLLINQPGLTYADLTTEKKDNWPFLRNYLYMSSTIVGLPRVENPIDLDFLEQYIISNCDAETINVWHDSEDEVVDYYDIRKRVIRIDLSPLSISNHDDRVKEIFEHDQLIRKILRKLPSAHYTIILTSLEPGIIHPVPRFLMEETPASFEIFDDIINDPFHNREIEKNDRFHKVEPNWNPIRDSNDRYYRNKKKDEIHLFDYELWEKNEKLITTIFVMVLSLFMMKIISFFNYLKQKIIQKKQQKSKRGIIADDKKLD

SEQ ID NO: 7038 - protein, 448 aa, Candida albicans
MREVISINVGQAGCQIGNACWELYSQEHGIRPDGYLQEGLDRPKGGEEGFSTFFSETGSGKYVPRALYVDLEPNVIDEVRTGVYKDLFHPEQLIAGKEDAANNYARGHYTVGREILDDILDRVRRMSDQCDGLQGFLFTHSLGGGTGSGLGSLLLEQLSLDYGKKSKLEFAVYPAPQVSTSVVEPYNTVLTTHTTLEHADCTFMVDNEAIYDMCRRNLDIARPNFSSLNNLIAQVVSSVTASLRFDGSLNVDLNEFQTNLVPYPRIHFPLVSYAPVFSKSRATHEANSVSEITQSCFEPGNQMVKCDPRTGKYMATCLLYRGDVVTRDVQNAVAQVKSKKTVQLVDWCPTGFKIGICYQPPTAIKGSELASASRAVCMLSNTTAIAEAWRRIDRKFDLMYSKRAFVHWYVGEGMEEGEFTEAREDLAALERDYIEVGTDSFPEEEEEY

SEQ ID NO: 7039 - protein, 494 aa, Candida albicans
MLARLLKLAIVVAAIAAITPNNPIRTSISFGCIGYVATLSVIPKVSPSFVKIGLKGKDLSKPPPVSEIPETMGLVASTTYMFLMFGLIPFIFFKYLVSFGSMSNDEVITKNYLSQYQSLADNRLFPHNKLAEYLSALLCLQSTTLLGLLDDLFDIRWRHKFFLPAVASLPLLIVYYVDFSVTSVVIPKFVTEFPGGYVLINTINFFIKYSNHLVTSITGLSFRTLQTDYVVPDSSPKLIDLGIFYYVYMSAISIFSPNSINILAGVNGLEVGQSLVLAAIFLINDFCYLFSPGISQAAHDSHMFSVVFIIPFVGVSLALLQYNWFPARVFVGDTYCYFSGMVFAIVGIIGHFSKTLLIFLLPQIINFVYSVPQLFHILPCPRHRLPRFSIEDGLMHPSFAELKKASRLNLAILETLSFFKLIKVERGSKSNQIVRFSNMTIINLTLVWVGPLREDQLCISILVVQFVIGVTMIVVRHTIGPWLFGYDNLSWGVK

SEQ ID NO: 7040 - protein, 1897 aa, Candida albicans
MSYNDNNNHYYDPNQQGGMPPHQGGEGYYQQQYDDMGQQPHQQDYYDPNAQYQQQPYDMDGYQDQANYGGQPMNAQGYNADPEAFSDFSYGGQTPGTPGYDQYGTQYTPSQMSYGGDPRSSGASTPIYGGQGQGYDPTQFNMSSNLPYPAWSADPQAPIKIEHIEDIFIDLTNKFGFQRDSMRNMFDYFMTLLDSRSSRMSPAQALLSLHADYIGGDNANYRKWYFSSQQDLDDSLGFANMTLGKIGRKARKASKKSKKARKAAEEHGQDVDALANELEGDYSLEAAEIRWKAKMNSLTPEERVRDLALYLLIWGEANQVRFTPECLCYIYKSATDYLNSPLCQQRQEPVPEGDYLNRVITPLYRFIRSQVYEIYDGRFVKREKDHNKVIGYDDVNQLFWYPEGISRIIFEDGTRLVDIPQEERFLKLGEVEWKNVFFKTYKEIRTWLHFVTNFNRIWIIHGTIYWMYTAYNSPTLYTKHYVQTINQQPLASSRWAACAIGGVLASFIQILATLFEWIFVPREWAGAQHLSRRMLFLVLIFLLNLVPPVYTFQITKLVIYSKSAYAVSIVGFFIAVATLVFFAVMPLGGLFTSYMNKRSRRYIASQTFTANYIKLKGLDMWMSYLLWFLVFLAKLVESYFFSTLSLRDPIRNLSTMTMRCVGEVWYKDIVCRNQAKIVLGLMYLVDLLLFFLDTYMWYIICNCIFSIGRSFYLGISILTPWRNIFTRLPKRIYSKILATTEMEIKYKPKVLISQIWNAIVISMYREHLLAIDHVQKLLYHQVPSEIEGKRTLRAPTFFVSQDDNNFETEFFPRNSEAERRISFFAQSLATPMPEPLPVDNMPTFTVFTPHYSEKILLSLREIIREDDQFSRVTLLEYLKQLHPVEWDCFVKDTKILAEETAAYENGDDSEKLSEDGLKSKIDDLPFYCIGFKSAAPEYTLRTRIWASLRSQTLYRTVSGFMNYARAIKLLYRVENPELVQYFGGDPEGLELALERMARRKFRFLVSMQRLSKFKDDEMENAEFLLRAYPDLQIAYLDEEPALNEDEEPRVYSALIDGHCEMLENGRRRPKFRVQLSGNPILGDGKSDNQNHAVIFHRGEYIQLIDANQDNYLEECLKIRSVLAEFEEMNVEHVNPYAPNLKSEDNNTKKDPVAFLGAREYIFSENSGVLGDVAAGKEQTFGTLFARTLAQIGGKLHYGHPDFLNATFMLTRGGVSKAQKGLHLNEDIYAGMNAMMRGGKIKHCEYYQCGKGRDLGFGSILNFTTKIGAGMGEQMLSREYFYLGTQLPLDRFLSFYYGHPGFHINNLFIQLSLQVFILVLGNLNSLAHEAIMCSYNKDVPVTDVLYPFGCYNIAPAVDWIRRYTLSIFIVFFISFIPLVVQELIERGVWKAFQRFVRHFISMSPFFEVFVAQIYSSSVFTDLTVGGARYISTGRGFATSRIPFSILYSRFADSSIYMGARLMLILLFGTVSHWQAPLLWFWASLSALMFSPFIFNPHQFAWEDFFLDYRDFIRWLSRGNTKWHRNSWIGYVRLSRSRITGFKRKLTGDVSEKAAGDASRAHRSNVLFADFLPTLIYTAGLYVAYTFINAQTGVTSYPYEINGSTDPQPVNSTLRLIICALAPVVIDMGCLGVCLAMACCAGPMLGLCCKKTGAVIAGVAHGVAVIVHIIFFIVMWVTEGFNFARLMLGIATMIYVQRLLFKFLTLCFLTREFKNDKANTAFWTGKWYNTGMGWMAFTQPSREFVAKIIEMSEFAGDFVLAHIILFCQLPLLFIPLVDRWHSMMLFWLKPSRLIRPPIYSLKQARLRKRMVRKYCVLYFAVLILFIVIIVAPAVASGQIAVDQFANIGGSGSIADGLFQPRNVSNNDTGNHRPKTYTWSYLSTRFTGSTTPYSTNPFRV

SEQ ID NO: 7041 - protein, 129 aa, Candida albicans
MSQEYINPSTLNSSNSLLIDELTESNDLVVLEEQLSPDEVILNADIINTERLIEESRSLEEQPSYVIDIFGILKKAAINLVLPFINGMMLGFGEILAHEIGFRYNWIGARVEPPRRMVQKKNESASKYL

SEQ ID NO: 7042 - protein, 246 aa, Candida albicans
MIHYCQLSSNSTSHPYLIMSRRSEIKQKQELQARFQLAMSANNQKALNWLKPLKSTASTTSTSSETPNANNPTSDDSFMDLQIIPQGASLSKLDNLQKIGDFINSKDITKMKQSTTTTTTTASNLTSNRVTKSKPMLALMNKMRDSNRKNVRQNQHHHQQQQQSTSSINGKSNKPMIPNKSQSIVKNYNNEEEDDDDDEEDDDDEEDDEDSRAIRSRTVKKGSSLLLENKLNNKNSGTKKKNVRPF

SEQ ID NO: 7043 - protein, 532 aa, Candida albicans
MKPMVTTLYNGKLPLALADPNGIFTWCPHLNLIFIAMNKMSIWCYRMNGERIYSINNKSIVKHIAFYREYFCLSGTDNLIKIYDSNNGQLVKVLPQEFDGVEFVGWNGTEYRVSVSMPMVYDLVSELDYLVVSDGKRMAITFNQLLTVDWECEMSVHQQLNRDLFNQVYVAGDKLVRVRFVVDNQKLYTEQIIKVCQLISLLEYGEQHIQKIKGLVVPFLSAMDRYMSNLESECGDLAQYLSDLVVSNIIPEFSKDFWLNQYGERGHKRMVKLAGVYESCVKDTYQHLVSTTERVISIVGELIGVSKWEQGLLATTELEALLDQAKSQLKFYYRFIWDLQTERQQVSQFLVWTKSIIDMLNDQECDIAYSTTDVLCFINGALTKSVMLKYFDIKGVPETPMTNISMDLTTIGEYHRSRVEVEVLQNISLPSVYTNLKLAQWEEVVVTYQQGNALVIANVDGVVSTVQDVYSYQHRQTDLVALTSKSLLIIDSSSCIPIALPETSFQPTKLILNQEYGVLLDSTRQHYSIFRM

SEQ ID NO: 7044 - protein, 667 aa, Candida albicans
MSYNLDVDEADVAVLNQNLIRSKELFESIGKSLHKISTKSQTASSTINPVLKQVNQLTTNKHEVENGLKLLQEVSENASKINDLENLLNNSIENSPGGIKSYLINLNQSKNLLSQIKTQSKFKQFKGILYNFENLIDRSETKVQKYYQDLINGKDSRAIIDKRDEIKLIFQYFSNPQTKSTSNSGGNEEYVTKLYVRARSKRLIEKLKPIESSTKPAVKANANIPYEKGTNGITKYTDVLSGEIEQELIILNECQLSTHLIGPIVEESISRYNGIINKYNQVYFKTPQEIVDNVILILEVLNNLIDFKVKLKQIGLNRTLEQSNFINTFEQYLETNSVIFKEFIQAIDNRFQNLGKFNEINTQEVIVELMSKLRRLSEFKLALLQLIKNYSIGQWLVSQPPMRFVNVFSSVIPNSQPQANSDGEEDEVIQEYLLSSFYSDVIDAIMINIEIGLKKNTSGGDSLPSSSSTSASTNATSGTSSLSLNKKSTQGFILIKNLFMLESIVNRSQYLYQSLGSLGEERILRLKNRFLKLFLDDWSHASYIIIRDMTTIATQSAQHQQSQQQSSNTIGTGGGTVTNLSNKEKDQVKDLFKNFNESFEEALFNYQKYNFGDAILKKYLSNEIKKLILNTYFKLYDKYGNSDFTKNKSKYVKYDKLNFEKLLNERL

SEQ ID NO: 7045 - protein, 506 aa, Candida albicans
MSKVEEHESVNNLKRKFPSLAKPRQPLKETNSNIPSPHKRAKIESPSKQQSTQQPQQQPQPQPQPQPQQEKATHKPKKSSHQSKNNDKLAGDEMHEWQQSWRRIMKSSIVYFEGDQQSLEYRKAHKLLRLVGCKVTPFYDNNVTIIISKRPYDSKTEYSPHDIFSNVSKASIKVWNYDKVFRFLKHLGINIQTGVDELAVNTHTILPPSLTNNNEKPDLYNLLKEEKIYGSTDRDPNAKRDDLHYLGKNYLYVYDLTQTVRPIAIREWSDHYPVMQLSLDGKCPFIEDPTDQNSERKRLKRLRKFEANQAHREALRLATYKMINGISMSVHGFTATSTSTDKVDEEEDSTVKEPSEDPRFRQPLNRNSSCMQSKAFEAMASGYNGASNAVQPSMDSNLNSAAAMAGGNGLGPALSQVPSKQLNNLKRRILMKKKTTNTTEKKDKEHASGYCENCRVKYTNFDEHIMTNRHRNFACDDRNFQDIDELIASLRERKSLGNVISNGDYV

SEQ ID NO: 7046 - protein, 635 aa, Candida albicans
MSANDILDVLNIQRDESNQPPKKKQKSSSTPTLPDGKQLTGMARELYNLVGPNTPPINLNSNSYTANKEKMKKFKPSPWTRMPFTPKQGIELNHWVKGSKELIEQQEFEEDGTPKPYFFEKYNVQLEIPEFVDEDTYDLYMIEIKEYESKMKEERARREKERKEREKRDLEEKKKKQQQQQQKSQQNPQNQIKDDEKNQDTRNNTDKKDSEQKSEDKPTVEAKKETDEKKDDVVLKDNTNETKPVTETTKSETETTEQNNSEKTNENETNKTNDKDGEGNLTKSKDSATEDQSNNKKENDEDTESEWTYKETKHLFELCQAFELKWPIIHDRFPNPNRTAEDLKEQFYRICIKILENQKNKNQALIDSLKAYCKPRELERKQYLENLLKRTPAEIAEEESLVIEARRFEIAAKKMLMERSNLLTLLDSPQTTQNVSQYQSSQGITNLYNNLLIYDKHQKKKQMANKSNPQQEPVPPPIPLAASSSVKRDRGFQTQLQQYLSSFLKQNHHTNPAVKQEINSIQQLLMKRLTQKEEEAYGLYFHGTEKLNPGVMLRSQQKLPGLNQRQSILKSVNILLQEMDIPTGGGTSWKPIMPTRKTMAKYDELIRSVVTLLDVKKAKDKLESEIKLIKSQRGL

SEQ ID NO: 7047 - protein, 682 aa, Candida albicans
MTQRKRSSPEDDLSNSSDSELESPQLENDDDLKTHYYITPKTNSTDSSFENVYCRVTSQPKQPQKNTTPFLSLLDGNESSENVSRRFELYNQVWANQSDKIQSILNNANDELFKDLIQFVNLENLQQLSVGYVQLTTNTANNLRILQEFYQYIQRKSDYDYKLITLNSKHFTYNIKATLREVVKQFYDTCQIVEEMHRLNYDLDAIDDWFDEERLYNSRLVLVLEDTNLINNQLLNQLLKILSSYVGKWPLKIVMGLSCETVSSWINGNLTNELRIGIEGHKFKSNDNKSLGYIILNNLFLTPELTPENPLLINSTLSTIILNRFENSNNSIDALIAEIKLCYMIYFYRSPLSILIAEENPQPQELYADGLRKLSSFKKYIELKLHQGDRSVKDLLNNDKSVIKLFNESRSNFRKFKLAVMNAINIIYQLHPNKPKQKFELYKLLINHKLLNSKYLYESVKNLSKLSDSVLGKVLIGLTDNCTEILDGISDNHLIQLIKGLGELSDLRGVSDKLQNYFDNSILTTPLEYMVFHEVFSMDGGLIQEKFTKPPLFEENYENLMINLLRPNLRATIERGLDNYETYLANPLIENSVEQPLMPPTLTHLFKLYKEAPTTINLYDFYQAFKSTLDEKELSLQLSTNEDWEKLTYAWFVQNCHELMLMGILQQKPKGDFLEKAIWKGI

SEQ ID NO: 7048 - protein, 306 aa, Candida albicans
MTDLTPLFRQCVDIVQQEYKTQPTTAKQPYYLNDTFIKETTAFFHVLTNLNQFINETKSSYLAINDDTKLAGSIDDKNKIDEEFNYKVQQMYKRLNHLETYETKRQSLLPKTSGWFSFLDESNDQDIYFETLANHRMQILRFLMETLNHVNKRFENIQQKRLARERQLNLLNFQNFEDGEELEDVFPTLDQIQQVPELSQQQIQQLETENQEFLNMKTSQLKQVEKVQQSILDIVNIQNELAFKLQDQGQQIESLMDSHADVQTEVQMGNRTLSQATKKNKRGANMLVMLCIVLGVLLVLVDYVSF

SEQ ID NO: 7049 - protein, 363 aa, Candida albicans
MTSTPQESSNLKRQLENSEDSSSPNKESKTETTTENQSSWESDFNSLPVELLQTETNGTSPAPAPATPIDTTNASSTKERDQDTSKLNDAIAAAGVDIQQEEEILLQQQLNRKSAEGMASNLKSVIRSSKSPPFLHNYHLAAFIDKVAKQNGIQQNFLMDGEMLELISAACETWLSNLATKTIILSRHRRRGIPVINKKSGSSSVPRSEISKELRSLALKQKEMEEKRVNKRVMLGLEKSTKDASKNDENGESKAGAEETLHRAANATAAMMTMNPGRKKYSWMTSSATAGGGSDFGKSSGGSSKDSGKHQSPIISVRGDNGLRFREIRSGNSIIMKDLLGAIEDEKMGTRNAVIKGYAKLKD

SEQ ID NO: 7050 - protein, 871 aa, Candida albicans
MNTFSSPPNVIREYNDSTYQSPLNSQFHQSPFLQTQSPDYVSLREEEDDNNDKNLDIMSSCIVDSVIYKSQKIAGPLLSQISNLNIQQALIIRELLFTLLGHEGHYIQYSKRYDPTSQISRIEGPDYKIAKNLDISLKVITKKLVKFGKFYSGLKSFIQVFDNNKFGKIVQKFCSEVRKFLSSYQQVLINVEHEFKFNKNFNLNMLDSLLHQEISNEMTHLYQIGIEISRITEERQKMSQAEIMGNFEPTTLANTSMNGINSEPNLYYGKFDCCKGGLLLQVIQERMVYYKGDPTSLDFLTQLFDIVSSDYIGMLNQWLLEGVINDPFDEFMIREKRVPDSFMEIFQSKSEYYWNELFLIKIDGLLNQFQNSTIQSKILNTGKYLNIFKRCTGLHNFESLKEKLTTITSLAAPDLELKIDEFYHRANKMLMKLLFDGYNFPSVVNIFQRLFLFADSFQIDNFIDSTFSELKRGKLKISVSRLQKQYDDIFKEKIENKVGVRPSVYDVLKKNQKLSVTSESLYKVVEELMEKNSDYLISDNNLRGIFHRVASLRDDSRLTISSTADSATENVKDEPTITSVDLTIPLPFPLNLVLNQQLSYQYEIMFKLLINIKFISKYNSSNWQEMNYSKIWTNSHFNSSVKKWILRCRVLHSRICSFIHELENYIVHDVIEHNFEEIKNLIHTTATNLATSELGSDINDEGDNIFNGSLIRGTFNNNSIFDSKVHKHRTTTYVEGISTVEQLIQKFLDYSSTLLNDSLLTREESLRQLRKMLDFIFHFNNYIVQVKKVLVLLNHELFNEYSKEFPTKFEKPMDQESIDKRFANLSDTFLMQYEKFGENLVTFLATIKQVGERENQGLLELSNRLELCFPE

SEQ ID NO: 7051 - protein, 431 aa, Candida albicans
MQFAPDNQIGKELQQNLIQEIQRRFNKPADDAVDIADYIIYLIVAKKSEQEIVAEVKDIADISIDVGFIGDVYSEIRKLEVKYNQPPAAVEEASQPQQEQQQQSQASVVAPQIPIGPKKQLTEEEKIALRSQRFGTTTRLSGRGGRGGITKTRTDFRNGHNNKNFLDPKKLDQIISGANNGAIKFVPLPPKGRCPDFPYCKNQNCEKAHPTKNCFNYPDCPNPPGTCNFLHPDQDQELIAKLETSKKEFEEKKKNQLMVKQGSCKYGLKCAKENCPFAHPTPANPESGKIETLEWCPQGKNCQDRNCTKSHPPPPTANSEKLLSAADLALEQCKFGSQCTNLKCPRRHATSAVPCRAGAECRRVDCTFSHPLKEPCRFGTKCTNKVCMYQHPEGRTIASHTWTKDGSGNNNSTSNRSFAVSEDQIMEQVAQ

SEQ ID NO: 7052 - protein, 281 aa, Candida albicans
MSRGKTIRPSYYDEEESSQDELSHTLSKGRSNIGSQSDDEEMSKISFGALNRAQSKLNKHNQKHKTQEDNYKSSEEEFFDSGSDSDGPPEETSSKDTKKKKNKHAPSESSSKRPVSRIRDIPGLPSRKQQTLHTDIRFDAAYGKADLAKARKDYAFLDEYRKQEIANMESLLKDKKSRLNDDEREEIKLQLQSLKSRMDTLKNRDLENNILSNYKKQQMESFKEGKVNKPYFLKRSDKRKILQKAKFDSMKPKQREKAMERKRKKRLGKEFRQLEFKPTNR

SEQ ID NO: 7053 - protein, 275 aa, Candida albicans
MKTSVFIAIFNLLVCALAYTDLTGSIKINDKKITLGEFNTQEVKQLTINSPKDIIEIDLKSKDIKGKPEQIMVSLADVKNPAISTHYVPVVKESKIKLNIKALSIPEVLKTKDKLVLTIVIADSKSKNNMIRRLVEVLPSPEFKSTSRYQAKPRIGIQPEIHHIFREDERTVNPIVPVVFIIAAFTLLLGLFGSWVGFIGIDNLFRTFKTISKVQLLHNVSFLISVLGFELNFVKYYLGQSIFTTLFYGFILSIPCVYFGVSVLRSLAKNRALGK

SEQ ID NO: 7054 - protein, 409 aa, Candida albicans
MTSSINILLLLHPTVVTDAQLVEQIKSKIYQSHNNNNNNNGGTTTTTTGTVNINLNQQIIDRVTKGIIELPYDYYDEIIYINPNNESQYREIPISLMQLIYKLLKSNGKFKGDLPLDQNLDVLMTGFIIEEEEKEKEKEENNLEGELVNVWVKPIPVDEPVVTLLKKKTTTSNTTTIKKSLPLFKKLNKDEINNSDKDINNDNITNNNNNNNNKRKLVETKLTYFSSDDENSSDGSVLENDDIDDDDELIDENDLLNFNNNNNTNGGSLLSDKLITPRKCDISLNGGKKRKKACKDCTCGLKELEELEVSNQQNLQDQILGKLAQSATLEAIKIEERLKQQQQQQQQKVKVKFTEEDLSEIDFTVQGKTGGCGSCALGDAFRCDGCPYLGLPPFKPGEVVKLDGFGEDI

SEQ ID NO: 7055 - protein, 266 aa, Candida albicans
MAGFKKNREILTGGKKYIQQKQKKHLVDEVVFDKESRHEYLTGFHKRKLQRQKKAQEFHKEQERLAKIEERKQLKQERERDLQNQLQQFKKTAQEIAAINNDIGFDQSDDNNDNDNEEWSGFQEDEEGEGEEVTDEDDEDKEKPLKGILHHTEIYKQDPSLSNITNNGAIIDDETTVVVESLDNPNAVDTEEKLQQLAKLNNVNLDKSDQILEKSIERAKNYAVICGVAKPNPIKQKKKKFRYLTKAERRENVRKEKSKSKSKGKK

SEQ ID NO: 7056 - protein, 278 aa, Candida albicans
MSSLFINEEDDMTPEPYKPSTSTIREEEEEVQVKQEFPDEKMVDPDEDDPIVESIPLLINTVPERAKQSLHVLQYAGRPKSRPNRAGNCHASIKPESQYLQVKVPLDTEKFFNVDKIQEWGEQIVEQTISGVLDGSYEVGNYAAKIINDSDGRRVVLIPVDSTVQLKPSFKYIDDLEAQSIQQRRQQESTNEKPANVQILQSAAKHSTQSGEFSHSLGDSLKSVKHFEEEEWQNLIWKRGDDDVTKSIKFGLDHHTDTNIELKTNTSYDEYIDMLINN

SEQ ID NO: 7057 - protein, 196 aa, Candida albicans
MSADENNKVRFERLRLVARKALEQSIKKSLTMEQVKTCFPTLVTSQDGVRSLELALSQMSGFWHANSLDEFDLIYKEKDIESKLDELDDIIQNAQRTKDSGKEPSNIDQLSPLEIVDSTIVSNSKNVLDSLQMIYDQLCLDNAELYTELSELTKESTRINNSIKSGIEQLNKEANSVELEKAGLQIDKLIDILEEK

SEQ ID NO: 7058 - protein, 768 aa, Candida albicans
MSDLTPIKLPSSAPFPVVISSVLCKPGDTISKHKTIFKYKYWDYQDDPTSKEDPPKKIRVERLGTFESPIEGEIDQINIKPLQEVMHSDVDLLFVKEACPHTVQYSGLCALCGKSLEEEKDYSGYNYEDRATIEMSHDNTGLKISFDEAAKIEHNTTDRLIDERKLILVVDLDQTVIHATVDPTVGEWQSDPANPNYAAVKDVKTFCLEEEAIVPPGWTGPKLAPTKCTYYVKLRPGLSEFLEKMAEKYEMHIYTMATRNYALSIAKIIDPDGKYFGDRILSRDESGSLTHKNLKRLFPVDQSMVVIIDDRGDVWQWESNLIKVVPYDFFVGIGDINSSFLPKKNGQLTGPTKKRKSIAKLEAAAELAKESDTNNDKQETESGEEEGEEDADGHSDVSNSPVERILELGGGEGNTSLLLEQSLTRNQSIEEQQQKRPLAKLQHDLEQMHEHRHDSDSKSESGSDDESDEEDNLLFDDDNELAALDKVLGNIHQGYYNLFDKDKINKPDLTEIIPSMKSKTLEGITVLFSGIIPLGINLDSADIVIWCRQFGVKVVNEVYPEVTHVVCRDVSEGAGPTFKTRVARKLYPDTIKIVNPDWLFACLSNWTKVDEKDYLISTDDTKLWTVKENEITKYQKALEDRSALANATHIDSIESFDEYDLDEANQEVDDFLAGLSDDDEEEEEEEEDEEIENPESNNDDEEIYEQSTNGHDSFIKDAYSKKRNRDEEEVQLVKKQKIENGENGENENENDLDDLEKELLDGFDDLEE

SEQ ID NO: 7059 - protein, 125 aa, Candida albicans
MSKTNTAIYQKIAEKRANLERFREFKELTDDLVLQLESIGDKLETMNGGTASVALILANWKSVVQSISLASLALMKESNDNNKEAFPEPLVRVRVGQSNEENQDDEEADEEEGVRDSEEVEESTE

SEQ ID NO: 7060 - protein, 221 aa, Candida albicans
MAGDLNLKKSWNPALVKNQQKVWEEEQQKLDELKRIKERNQEYKQEQEYLELLKLQHGDQFQIKDLNKQQKLKISKLNWMYDDVPFEGNEKVEENSSGFIESNVEFTDGKSKVENLLKGNHVVGKKRDGSGTSDRINKIIGVGMTKSSKVSYSDDPLLKIKQQQQQAQRVARKQHPSDKHSHRFRHSSKSSSDRVHKSHEHERSRKHNSSHTRHKDGSPHR

SEQ ID NO: 7061 - protein, 507 aa, Candida albicans
MLASKKKRTRRIKRQPICEQIPTSNTAFFFTLDIPIMPVNFLTSVVFDGPEVIPYWDQIKEYGPTVLPILLTLAGAKYYFHGATNTWERDMHGKVFMITGGTSGIGAQIAYELGQRGAQLILLTRRTNDQWVAEYIEDLRDKTNNGLIYAEECDLSSLYSIRKFATRWLDNQPPRRLDGVICCAAECIPRGKSRQITMDGVERQIGINYLAHFHLLTLLGPSLRVQPPDRNVRVLIATCSSQNLGDVDLNDLLWSNKRYPATQPWKVYGTSKLLLGLFAKEYQRQLMGYERKDKAPCNVRINLINPGIVRTPSTRRFLSLGTVWGLIIYLILFPIWWLFFKSAEQGAQSFYFALFAPIFMKIEGGNVVQECKIMTKVRKEYTDDDLQQKVFHNTEELIKQIETKSAIERKKHENAKKTPEQKAKERQEELNRKRDLHIKPETPEELESKLNSLRNQIGMGTGISSNEMPLFPDDETLKKVISSKKNASSNNSGGSKSNKSQKKSKKV

SEQ ID NO: 7062 - protein, 148 aa, Candida albicans
MSDIDIDNVLNLEEEQYELGFKEGQIQGTKDQYLEGKEYGYQTGFQRFLIIGYIQELMKFWLSHIDQYNNSSSLRNHLNNLENILAQISITNGDKEVEDYEKNIKKARNKLRVIASITKETWKIDSLDNLVKEVGGTLQVSENPDDMW

SEQ ID NO: 7063 - protein, 672 aa, Candida albicans
MAKNNNNNKDSSNPRKPITQDERFKSVHNDPRFKMPKLKNLRVKVDDRFSKDELKKLNAGALGKKVKIDRYGRKIKKESDDLSKFYEHEEDSKEEQSSDDSSEGEESDDDLQALTEKLQQEEQFLDRARGEGLVSSSEDEESSLSSSDSDSDEENEGVVEDEEESDIEIEETKPEDTEPTCAFAVVNMDWDNIRAVDLMATFVSFVPKGGAIKSVTIYPSEFGKERMQKEEIEGPPRELFKSKKKREVDSDSEDIDSDVDVNDIDNLAKITRKLYEEDDGKEDYDSKALRRYQLQRLRYYYAVVKCDSVETARSIYQNCDGTEYESTANIFDLRYVPDDMEFDDDEAKDTCSKIPSSYRPDSTFVTDALQHSKVKLTWDETPKERLTLSSRPLSQKEIEENDFKAYLASDSDESEVEKDSSIKDKYQSLLGNTLTKFGKEENDDDVDMEITFDPGLNDKSGNNAEEEDKEETTIEAYRRKEKERRQKRLAKFKESKQTEEVANSQEGSADKSSKNRKNSKKGKSMPDMDEKSKAELELILMDNQEGNNNEHFSMKEVIKSEKDKKNKKNKKGKKIDQEMVQDGFVANLDDPRFKEVFESHDYAIDPTNSEFKKTETMKKILKERSARNKDKKNKKNSSKNATKNSKRSRSELESNDNVHSLAEKIKKRNKSK

SEQ ID NO: 7064 - protein, 127 aa, Candida albicans
MAAFDEIFDYVDRDTFFQYFRLTLVVCTYLIFRKYYSSWAIKKQTATQLEQDKREQSEKSEREAKESKEKFDTISNEAKEFGWGKKTRNNVKLTEAVLAEYSEQQRQRNQTSYDAQEDADIDDLLED

SEQ ID NO: 7065 - protein, 135 aa, Candida albicans
MSSSSNLQYEEIPKKYIDPLAPKDKGEGSRVNGKDWKIKKDAFRVKTLGVVSKTKKDSFKQRELKRLEEEQYKARLKELKDEKESAKNQRIADLKRRREIKAEKERYERMATKMHAKKVERMRKREKRNKLLKER

SEQ ID NO: 7066 - protein, 413 aa, Candida albicans
MAIEQFITKGDDALKSKDYLGAISYYSQAIKENPQAFSPYLKRSTAYQKLKNNDKAKADISSAFSIATEKGKRVDIGLCYFKLGLVYYQEKKVKLSLTQFEKAVEYDCKEPTLSMWKAKAEYDLKNHPEWNVEGDKEEDDDIDLVLGVENEYTQSMANTEKDKSHEPKIVELDANEESSEKKSNQESTSSAPAAQATTQAPKSTNVDVINKIAPLNVKFRDDWYQSNEEVIITIYAKKVNEEKLKVEFDTNSVSISFPSAAASEYNYYLDPLFAEIVPSESKYKVYSTKLEITLKKKDANKWPELEKQAVEGVTDNQDKDKKVDPSELVYPTSSKKKINWNNFKIDDDDKEEGNENDFFRKIFKDVDEDSRRAMMKSYVQSNGTVLTTSWDEAKDKEFEVLPPDGMEVKKWDT

SEQ ID NO: 7067 - protein, 424 aa, Candida albicans
MLRSGIIKAQPATAIIRPLSRCFHYTNINFNDKPPSSDSPLKVFFDTFKTEVKKSNELKENIKALQDESGRMAESEAFKRAKEAYAKAQLGSTAAGKVLKKGAETVGDAAYKAWESPVGKGVRTGVKVTADVADKAFEPVRKTQVYKDMSEVIDDGSSTAYGGFLTKEQREALRMKELERKKKQGFQGPVRENDEAGGALVATEHKPTGPTMGEKWENFKLKSPIGRGVVYLQERWEESENGLIALIRTIVEKVTGFFSETEQAKVVKQLKLMDPSFRLTDFQRTLTNYIVPEVVDAYIKNDAKVLKEWLSEAPYNVWEANNKQFIQQGLFSDSRVLDIRGVEIVTCKSLQPNDVPVIVVSCRAQEIHLYRKAKTGEIAAGTEDHIQLSTYAMVLTRIPEEFDNKVTDGWKIVEFARGGSRPFH

SEQ ID NO: 7068 - protein, 390 aa, Candida albicans
MSQQINPPLGSTDIAKLSIPTLPQVTTEPPKQNGLWSSNPVFSYINDVYITINEHRKSLGLTNPGTIENLNKEVARDVFLGQYFFTGLRADLNKAFSMMPAFQTSHTLSIGSNVLPAYAFSALYATDDYFLQGNIDNDLSFSGRINYGWDKSNISKVTLQLAHGQPSMIQLEQDYQANDCSINVKTLNPNFLSGNEFSGVVVGSILQSLSSKLAVGLETMYSKQPLAPPDTAVSYVARYNAGNWIASAQLQAQGALIASFWRKVTDKVEAGLETQVAATMKQVADPLMGVGFEPVIEGQTTIGAKYEYRTAVFRGQLDSKGKISAFLEKRIMPTVSILFSGEIDQFKNTSRLGLGLQFEAAGNEQLMLMQQGLVDANGNPIPGAPAPGAL

SEQ ID NO: 7069 - protein, 714 aa, Candida albicans
MAKASKQTKKFQNKHLKHTIEQRKKVQAQNKKIASRKKSGSSSSGESNAPKRADGKAKEVFEDMSVDDFFGGGFEVPKEKNKNKNKQDTIEENEEEDSSSEEEDEEAMKENLKKLEADDPEFYKYLKDNDNDLLDFEAVNPLDAISDDEGDEDDDEEIEKEVPSDDDSEEEPTLGKVKGSKIEITKSLVKKWNQQLDKPTPKITRNILIAFKAAVNIHNSDSEDYKFSITDPKAFSELMLLVLKKVPISVQKLVKYKTNTQGVRTIPQKNQYATQIAAILKSHAGSFITLLNDITNTETAALILASIYEVFPFYLSHRRLLKQILTAVVNVWSSSSDIDTQISTFAFLNNVSREYPKSVLETVLKLTYSSFLQNCRKTNVHTMAQINFCKNSAVELFGINETLGYQVGFEYVRQLAIHLRNSINATSNAKEGYKTIYNWQYCHSLDFWSRVLSQHCNPEKELQNHKSKESPLRQLIYPLVQVTLGAIRLIPTAQFFPLRFYLIRSLIRLSQSTGVFIPLFPLISEILSSTAMTKAPKASTLQAVDFEHNIKVNQAYLGTRVYQDGLCEQFIELSGEFFGLYAKSIAFPELVTPAVLALRRFVKKSKNVKFNKQLQQLIEKLNANAVFITGKRSNVEYGPSNKAEVQQFLSDFEWEKTPLGQYVSVQRQLKAERLRILKEAQEEEAKAQAEQKKKEEEEDEQEDEDIVMEEEDDE

SEQ ID NO: 7070 - protein, 167 aa, Candida albicans
MGTNNKTVTNKSNKRIQGKRHIKHSPNLTPFNETQNASNFLIKSSTPYISAIKQITKKLNKFSKSKNSHTINKFQNEQYKTIKYIAVKGMGKTIEKVASIGTHFQKDYKVDVLTGSTTVLDEFAPIESNQEPDNENKSDDDDDDDDETIYKKRTVSSIEIRIWIKRD

SEQ ID NO: 7071 - protein, 99 aa, Candida albicans
MSNSSSNPSKNEYFIKQRDLLIQEISNNLSIVQTNLETLNRSLHESKQIGKEFDDVARLWSTFYDGMNGMNHQTRENTRDENNKISSSDTEDENNNNKI

SEQ ID NO: 7072 - protein, 215 aa, Candida albicans
MFSGISKLVLGKSAISSAYSIPKPFNYQTISRTLSTSSTVASVQRANKNASMSQLAQKLNKNKTNEKVVYWKLYATFNRHNTRCTLVAVVEDLDFMEKNKDLPYNDKVLYYLQLPHKVKYSVTAGQLGFRKSQRQEYEAGFQVSSKMFKTIEERNYIGPHDKIELILKNFGKGREAFQAALLGKEGSKIKNNIVRVCDATVLKFGGDRPKKLRRL

SEQ ID NO: 7073 - protein, 180 aa, Candida albicans
MTCQEDCSCKNNEAPTTKTTATTTNVGDGPGPGPIPGNNDDDDDDIWSDDDTKLIPENDIIRSHYKKGYVDGITQAKESSLQQGFDDGYPEGAKLGIKVGEILANLINQCKDRNRQGDDDDDDDDEQSVRFNEAKKELNIVNVLKKSYFDEDLNLKKSNDNKETDESYHELINKWENEMK

SEQ ID NO: 7074 - protein, 517 aa, Candida albicans
MWKPQKDKTFRSKYTSQYGYNVDHFNFLNDYKEDWNDYVAYVNESLVEKYSSRSRKFDSIPLNKLNLDDTKYDSTDEDYVRENFKYTNPIALKSNSSTTKVDLVPETPVHLQEHTKRNAFAIAVGGQITCIQWLPQNGNSTSSYFAVSLVNSVNGIKANDPNFSIFNKSKIRDMKSAIQIWKYDFDKNELKLQNMLITSEFGACSNLKWAPIQSNGTILGVLTGLFTDGNVYLFKIEESLPPYSIITEPSLAYKLHEGSTKINITSFDFIGSEKLVVGSNDGSIAEFMLPFRYNGNDIDIPNFKMGICWSAISSLMCIQNPTGKYLCIAHTGAHRSITFVYDNPLQDMYPTTVKLNTQPSFNYPLQNFVITNQAEQSQIAFPRTSHCTFISLARSDAYYTICKVSEILGHPFLITGATNGDICIMNYFKKFLGINSSLSKVTPLRIWKVLAEPDEPITLLADVQIQDQDAVVLPTSMKTESNITAAAWNENRVGSSTYAVGTALGILLLERLDPKYL

SEQ ID NO: 7075 - protein, 400 aa, Candida albicans
MSFRTTSMRMARLATAKATLSKRTFSLLANATTRYTAASSAAKAMTPITSIRGVKTINFGGTEEVVHERADWPKERLLDYFKNDTFALIGYGSQGYGQGLNLRDNGLNVIIGVRKGSSWEAAVEDGWVPGENLFEVDEAISRGTIIMDLLSDAAQSETWFHIKPQLTEGKTLYFSHGFSPVFKDLTHVEPPSNIDVILAAPKGSGRTVRSLFKEGRGINSSYAVWNDVTGKAEEKAIAMAIAIGSGYVYKTTFEREVNSDLYGERGCLMGGIHGMFLAQYEVLRENGHTPSEAFNETVEEATQSLYPLIGKYGMDYMYDACSTTARRGALDWYPRFKDALKPVFEELYESVKNGSETKRSLEFNSRSDYKERLEEELQTIRNMEIWRVGKEVRKLRPENQ

SEQ ID NO: 7076 - protein, 389 aa, Candida albicans
MGKKNNKFLNKIYSQPLPITLTSSKYNVSLPNLYPHNPISWIWYIIRYCQINIVYQVPELHNPPLSVIYENQIFKVIDRESMLKLWRQGFFGKGILSRSEPTWEKRTITRLNLDNSNNGKDLAMEDITKKRREERKFFKLERARFQELELKKRQGIITDEEVEEMNKLEIQLTELRKIQVRFDKQENGEVKEIHIRDEDEDIITENGELLPLEFLQLQEVETFFLKFALQRIDIVNVDSLLDLFYKCCSHHSFSPIPTSNNQFIIEYIAYHYFRTNGWCVRSGIKFGTDFLLYKRGPPFTHAEFCVLVMTKDSKYDWFQIAAKARVIGSVKKAFVLCYIEYPTQEEFDQILQKQNEEDIDHGLLLKELLSKYKISEVIYKRWNPSRTRD

SEQ ID NO: 7077 - protein, 419 aa, Candida albicans
MITTDRNLFINILKCISHLLIIWDKGAKAKAEEDGNGDDEDEDLAQEEEGEEEVKLTNNCIDSISDSQSETIINTLLIADSEMNNAVLDFLKMYLFSEALHEKYSSSIKDSQRHRLRKLLQLNTSKATFNTLMKQLPLLLVSDLPLNEPIEEQPVPSLNLTKRSQYSGVPTSAPELTEELYKIIVAFPEPIRASTWLHCCYEATMTEQAEVTQISIWKAYETQFQEIWKPNTEGTLNHNYKPLLPAVEFIKNVTKAFPYAEAKVVALPQAPGEENQAPKKKFIIKGIQPRQFPVSIDVGNYDALKPMGEATVTEGDESLPIGHMDVKKFHHSLTSGVDNILFADSANKIAKESLNSINESSHDILEYIISEVLEVAGIESKESSIFRLYNKYWIPELVYANPSLLEKGIIETTWLKYLL

SEQ ID NO: 7078 - protein, 364 aa, Candida albicans
MDESFYFALLRISIAQILKANGFDKCKPSTLNVMTDLYLQTFQNAIRESLKCSNMRTNSNSPELQDITQALINISIFKANEATKIHDEYYEESRYNTKSIEAFYQWCKKSEPLAIEKKLNEVPNNLIKNLIEKRKLDIDDGESDLAKRKRKHKERQEFYNQLKLNDDQRHRVDEDELDEDVITAKDKLTWLNYLIEKDLKLGHDLKFLHTDPIIAKEFLKFQNNYKFHPVGVRNDKETNTNWDRIQNHLKHLNKTDHIVGEVSPEEVAPNEGDRDILKSLANVSCLLPYNLKYDENLLEEDLTKLTKAEVIQNEEEGINDQHRAPDDEVEQTPNESTLNDGEINNDGLLIDDTGIGGENSLIFM

SEQ ID NO: 7079 - protein, 354 aa, Candida albicans
MDIVEIKSKIKEWEYAFRKQHNKLPSKADIKDDVEIHKLYSLYKSIKSGQQQKPSKQETVNEPASVQSSPVKRNDYSPRGELGPTPQANGRVLSIFDLKMTPPDSSPLKHKSDKASPSAFAMPPPQSPVKNIIETPTKSKNKSFVTPIKGRKIVFETPSYLNKHRQNPQTPDSHNNNNNNNNNTVINFSVSPSPFKTQRSIGKRLTEVYNTSLKEAEDLKSFNLEEEFQSHEEQESEETETTTNNDRKIAPRSKRTQKRSTRRVKMAPRPVNSKPSLENVNLQDHITKLEEGERKQLVAYMDSDEDDENRDGEVGIASVFESPTKKTRMPVSNNFKRLKINDPRSRRFKQRMRR

SEQ ID NO: 7080 - protein, 350 aa, Candida albicans
MAELKQVTFSPEVLARIAPDVSLQRHLALGVRPNLRNFTEFKPVEVSNSTQFQDNNDNVFSSSVVKSGSTTIINTITLGIVENFNSNESEYATIYPCVEILRGRLGAPTDEEMILSQDLFETLYHNKIIPSTSLKINNLGISIKDDQTTTTSQTNSTIYYPDLNPEQWEYINLTSHHHKSYSFVLLSNIKVYSKSTSTCSLFDLCYLSMLEALKSLKLPRCYVSESFTTKVAMKSRRSNTRGLVDTNKASINIDLNKSLYEKIDLNIKSGTIASNFGVISHEGNTILLADLEGEAEESSVLSRLSIITNNDSINKISLVNGDPESEITLEMLKNAIEISKQRSREQGQQI

SEQ ID NO: 7081 - protein, 403 aa, Candida albicans
MDTVLERIVGTLLETRNYTFTEQFLDQLTELTLQFVNELSADLSKYTRIQRRQQPSLSDIKLLLKLKHISINELIREIELSKKFTYRKQLASLLDQLVEEPIKEQSRPFFDQSSITELVPRLNVKPDYIPSYLPDLPPDYTYQSTPEYMETLTDLKKLRMKLVEESRMTENSLYKLIEYDDIEWRQKFEQELVELSPDSSANETTEVPIPTTNGKSEDFKFDIVEYARMRKRLLIKRDRDLENRRKAREENMFMKAEMYYSPYSTLKPTAEVKQYFSDALSDGFKSVIVSVRNAEKLKEQNIKRQMEENARREQELQKQNESISFSFPTINQLESESESDNDFEQEVKDNIELNFDGSDNERESRNLVVVQNSDEKALQQDPPPSKFAEDVSDMSSDDMDTIA

SEQ ID NO: 7082 - protein, 907 aa, Candida albicans
MSIQLRNGLANQTLDRVLEDLLVRFVVNVPEEDLSSIERIMFQIEEAQWFYADFVRQLNPDLQSMKMKTFSTKILEKCPLIWKWGDPQEALSKFGKYKSTIPVRGVALFNKDLNKVVLVKGTESNSWSFPRGKISKDESDIDCAVREVEEETGFNCRHLIDENDCIERNIRGKNYKIYLVKNVPEDTLFEAPTYEISQIKWFDIKTIQKKCKTNPNTFFIVGTILKPMTKWINKNKGVLNEEEIMLQVELKLKELLGLNAKEPEENVDAGRELLNILQKVGQKESQSAISPSSSYQNNDQQPQPPMVNVPVPQHLHNQIPFFAGAHAAFPFYNQPFFNPMSFMPPQFMPHHPAYVSPHNQQPPNPQSFQKPKTNSKELLSILTAKSDKKRDDENSKQRKPVEDDNIRSRAQQLLSVFPKKHIKETNTSAESEVENENELAKKHLLKSLRRSATPEAGTTETRSPGMSPIIDNSYQEPSNEIEESIRAQRQQVPVTSRRKIKLLKRSDNEASANLLELLGPKKTESVDTANKNPDAGNELLGLLHKKQEQNQESLPNVERSSTRKEESQNTSNELLTMLKKPTAAKESTSESRSQNLLNLLKKPESQNAPGSKGKDQASGDQLADTHLPSYTQNNLQPQLSNLNPLPSPMNFLSSPEQKPQQASQVSSANQLLGLLHKNGTERNKSITSPNELWGTSTPGSTGGPSVGEANKHSNATTGGPFRSNVLSPNLDIWTNDTKTSSLSGSQFQFPEPSRRSSQLLDLLNTNRDPVQDAQYSQSNSNNYNNGGIEIARRDSPSDKFENFEDFEDYNDGYQFNDELLDKTYRNFDIASDEEDVDYLIDPLITHNDKSSHQDNEIKPSSVDNQNDQPKKIRILKPGENIDNLFGSQGSNEPGKGLLALLNGGKAQ

SEQ ID NO: 7083 - protein, 460 aa, Candida albicans
MDFIGEIIEHETEAPKEPTPKPTIGGFPELKKLKEKKVSRWRQKQQQEQSTTSPKTTEIRSEASKIHQENIEKMAQMSEEEILQEREELLKGLDPKLIESLIGRSKKREATDHEHNGHAHEHAEGYHGWIGSMKTSEGLTDLSQLDKEDVDRALGISSLSLSEPEGGSNTKKVAFDDNIKTVKFEALDDEIELDPNGWEDVTDVNELVPNNDHIAPDDYQINPDSDEEGLNNTVHFTKPKQPDLDINDPDFFDKLHEKYYPDLPKETEKLSWMTQPMPKQLSTVYESISDMRFDFKGDLIELSAEGEEPKDSSFEIPTYMGLHHHSENPHMAGYTLGELAHLARSTLAGQRCLSIQTLGRILHKLGLHKYSILPKTDSDDQSFTDEIKQLSLDFEDMMWDLIDQLRIIETITEAADEKKTRNLSVRNYAIEALWLYRTGGGRPEITKQTEEDLIAQAVQK

SEQ ID NO: 7084 - protein, 237 aa, Candida albicans
MFTGLVETIGTVLDYSKHDDSSTGGDGVSITIGNCSEILEDVKLGDSISTNGVCLTVTEFNLGKTLFKVGVAPETLRRTNLGDLKHGAPVNLERAVTSEVRLGGHIVQGHVDTIAKIVDKKPDGNAIAYTFELRDKEFINYIVHKGFIAIDGASLTVTNVDPSKVQFSIMLISYSQEKVILAKKEVGDTVNIEVDLTGKFIEKQVEINLTGQIENSDSPLNKLISSLVEKKVKEYIK

SEQ ID NO: 7085 - protein, 892 aa, Candida albicans
MPSTQIRNSKTRTSLNGKYSKQVQNKSNGPVVDSLQLENLLLRDEDIFQTTLNSEDYLESLAPIMKDAIKSNGLSELLVKLNEIVKSKDEELNQASMESMDEINTCINTIDNIHKEANELNKQFIQVSSSLNKSAYELMSKKKNYVKYKDVCERINETQVVLNECIQVLELMNKILELIRQTKYFSALKLIDEIINIHIQKVEDFSFAKKIVDSIPHLTKMVKDESFENLCKWLSINLERKLQDIASGLYNNLDELQNNWSKIKKENGPTFLPYKINSPVELALRDPELNYNVFEDVSLQINLNAVYDAVLVYQTLQELDTLSSAYHKEWMSKYSRVIYPITTASVSKKDVVFDNNELYEYLRKIAAFFVTDKQLNLITKFQLRSNTQADELWLSYMTKLKPVLIQLLKHHNFTNIQELGSFKTIVGEFLQIMDNHDYDISELYEVMMMIFKEYYAPLTIQTFRKQFVASIQSDRYRPLTVTDEADYTAIMQNVWYKDDASFAPAYVKSFPVTFPFSEDYVHYCIQVRRLLKDVLRFIGDYYNYEIGELTNTIVNNIIEVVLSDEKGYGIAYEIEEFITRNENNKEITAQTYTNLEYYLFSLYEIGKLVNRELRKHTGMGVHNIDANDTFTLRAVETFNKLKKHAEETVFKMVDNKINELLDMVEYDEYLPVEKNDEANFAIKDFALFLENLFTSIFNNLPSQLRTLGLFRTYDFVSEYFLNVLKDANVYNRIFVANFDLDIQYLETSLRNLHGFKEDGDEANGNGGNVALESTFTELRQCIDLLNLEDYEEFINDSSFRMRRFDRVKYEDGINLIKKMQDNESQQQTSVSAMSERGTIGGVIPNSSSTRSFVNMLSNLSTDDAGNTSSGSIESTSTTSKLAQFTTRFKQNK

SEQ ID NO: 7086 - protein, 579 aa, Candida albicans
MYITPNQYAKTFQDIKRSSLSHSTCKLVIFVSCLDVDALCAAKILSLLLRKELIQYQLIPTTGYSDLKLHYDKLDSEVTNIILIGCGAMLDLEGFFDVNPEEFLGDNSTTNGHTIDNDTELELDAVKTDNFALTRKIYVVDGHRPWNLDNLFGSAMVVCLDNGYIDGNLNEEKEAYNVLVEMSDSEDEDEDEGHNQNSHTDDDQEGDKTDADDENDESSVSTSRKGVKSINEDKIQTYYNQSSTIASSCSITVYALVSAIGETNVDNLWLGIVGASGFDCSIFVDEVRRFSTDSGIHMERGTYLPLLRHSSLYDALLYNWIDGDKRIHKILAKMGVPIVAAKQQWQYLDPPIKNKLPGLLKKYLPELPQVEIFYRCGVTSMDVFVSLTALLETGVGLNNTSANSIDHGDLEDENELIRREIKSRESSYIRNFWSAFDSVSSFGISNNIGLEKGITAAKLVQKELFQTIKYIIEQKLIKNLKVYRLCILKDESSHSGFDNPVLLIKLFNRIMDYLKQQTSKPLVVAAELSNTYFVLGMGINNAFSKISGAQMKKDFFEASLVEIKKEDLAPFLEQLTFNL

SEQ ID NO: 7087 - protein, 299 aa, Candida albicans
MSVEVRKRPADNFSSASKRRATVQSTNPKDGNGLSECFKTVSTSLYVSLAPVHLQNPINGIKQQHLDPLIMTYFTKAKGIVVAYSNIKFLENNYDNEDSAYSLAKIEGSSPFTFLWISVDFLCWCPEVGDVLEGDIYMQTPSHIGLLICDTFNASIKKYNIHRTWSFVPNQIDEVSGDDRKTFGHWVDESETKVEGKLQFTIKAIHTTGRIVSVEGTLIRPGEERNAQPVYKERSETKSTGKHMKFADDEVITTTEIAEPDENDELPAYIKDSDDEDSGSDDNKVVNNSDSDEDKIESD

SEQ ID NO: 7088 - protein, 708 aa, Candida albicans
MEVTSLPIKLQPSNIRPIAFRILSKKHGLNINTDALAILTETIGYKFGTDWKSVRSQQFLEEVAKVWKIEDRGLFIDGDGLKQVLKDMNSKSSNDTKRAHRTDTLVDITNDGNQNHTHSHQDKQISFEDKNMEHEERDDVPINWQDYFKVVSPNNQPTSIFDKTRKQFDIVFKNNDDKDKKAERGGKLESIVAELVKNLPASIESFNNRYYLLSDRLSRNENFQKKSLISLSALNSFKEGKTDSITGHEISLIKNMLGRDGQKFLIFGLLSKNANDEYTLEDETDHIELNLSQAFKSQGLFYCPGMFLLVEGIYSASGGNSNQDHGYIGGCFYVSNIGHPPSERRETSLDVYGNLDFLGMHRQIAPVTGEKITKISKKFKKRLVLIEKTLYNHKLIFVGTDLYLDDFKVLDGLRKFFQKLENSIIESIEDEEGQMAEGTNIPLALVFTGSFVSKPLSVTNSSVTNITNSESYKSNFDNFTTIVSKYPNIVSRCKIILIPGKNDPWQSTYSLGSSSLNYFPQSSIPKVFINRLEKLLPKGNLVVSWNPTRINYLSQELVVFKDELMTKLKRNDIIFPRDIQEQEELIAQDDQRTNEERINNLIQNKNTHLPSKIKQARKLVKTILDQGNLQPFLKNLKLINLAYDYSLRIEPLPSVIILNDSSFDNFEVTYNGCKVVNITSVVSLNNRKFNYVEYYPGTKRFEFKDLYF

SEQ ID NO: 7089 - protein, 325 aa, Candida albicans
MANSDDDDDAFLYSDEEQEVEEQGPKVKRVKFADEESNKEEDKTNEKEQQQQKQEASNSESGSGSGSESESGSESDDDIDIIIGDTQPTKSKSSGTTIIGNEALSEMTDPEESTSSSSTTAAAAGTTTTINKRQSSSAINLESVPRYQQEEDGEGDGTLITQLDIETLKLKPWRAPGVDVSDYFNYGFDEFTWLAYCHKQDKLRGEFNPQKVMENIMKGPGGAVGANGTNGVNLGDKTGQQQQQQQQQQQQQPPQPPMGMMMPPPGFMANMPMPPMGSMPPMPNMANMPNMANMPNMANMPPPPPGFNGQFPAPYNIPHTMNQKQ

SEQ ID NO: 7090 - protein, 280 aa, Candida albicans
MAPTEIKGFYVLPLKLTGTKSIHYIYFKKHESKGTANDNRSLFICNLPISTDLSTIKKFFQKVAIGSTIESFINSLLTDYPEDIWINLTKLTSDLDLVDAVDEQASKLPKNCGIVAFIDKASFTLAFNSLKKLSSSLTECEWPIQQFTSNYYLKQYQKQILDPNSLTEEVSQALIDFDKAEQQSIEELQSQRNLVDEDGFTLVVGSHRKTKAGILGKQKLASTVGVVKAQSKMKSKEKQDFYRFQLRQRKKEEMNELLNKFKLDQEKVRMMKEKKRFRPY

SEQ ID NO: 7091 - protein, 499 aa, Candida albicans
  MISC_FEATURE (499)..(499): X=any amino acid
MKIFRLFSLLIVQFIINTTVAVSPVSAVLPKSSFSPFDSPEFCSQIITPTCNTTFTYIDELNKDIRPYLSELVKTSYFRYFKVNLDKQCRFWNAQHFCASENCAVEILEDFNWSQVTNESLKPSGLGKISLPDKSSIDNSIETEEVQTCEDLDYSEIDDDHHCVYVNLVNNPERFTGYGGNQSFDVWKAIYSENCFPNTNPMSMTNDADNGGEQCIEKNLFYRVVSGMHASIAVHLSREYLNSETGEFYPNLKVFMERVGMHNDRLSNIYFNYALVSQAIVKLSEILPLREFIQSGYDDITPAQKQHLLANNDVESVEVYDRLLLDDIIPSLEANVVFNTSNLFDNSNLRDEFRSRFRNISAIMDCVGCDRCRMWGKIQTIGYGTALKILFEDDNYDNHNLKFRRIEIVALINTFDRLSKSIESINMFKEMYLQHLKDVAEGLTQPGVYDKIQNNKPGNGFAFPFVSPLPQKKPDQTNTPKNQQQKQPQETDKKRLTLX

SEQ ID NO: 7092 - protein, 190 aa, Candida albicans
MVRIKHRYILFEILYPPTADTRVTPREDFNQFSQSESNALLTLHQSSPNSINVKTILNVIRKSLSDHYGDVGAGKAGMLLNVKYFSNRTSTGILRCGRDQSDYIIGAMSLIEKMENNYVIIRCLHVSGTIKKCEEYSIERTKQLINVIKNKSKGKVDEYISQMNEINHVEEDEEEEQEEENQDDVRISKS

SEQ ID NO: 7093 - protein, 453 aa, Candida albicans
MSDFKKSETTIQSGQHVLIRLPSEGLKIVHLQDTGIIGLGKFGSFEVSNILGYPLGTSFEIIEDHKVKPIKSISTLDLTDSDETVQRQELTKMFSDSAENNQNIINIGSKIQKLSKDDIDELKKSGASSNVGQMIIEKMIAGHEGFDKKTIFSQQKYLKRKQQKFLRRFTVDYLGGSELLQYYIEKDLNRVLDLSVETLGLMLTYSNVRPGGKYLIIDETGGVLTYAMMERMNCEGTIVSIHENEHANLIALRYSDYGNELETKTVKSVNWLQFIDPQSERIDWTDLPDEEVKKIKNKSQYKKRRDRALQINEVIQLVEEGNFDAFISVSTLNMSEVLEYVLPKIGGSRPIVVYNQFKESLLEVQQALSGDKRVLAPSIYETRVRPYQTIPGRMHPVMTNRGGGGYILWGTRVIPHDAITAVGKGFAKRKRVETPSKTDTGTVEVQNDQENSA

SEQ ID NO: 7094 - protein, 1042 aa, Candida albicans
MGKKAIDARIPALIRNGVQEKQRSFFIIVGDKARNQLPNLHYLMMSADLKMNKSVLWAYKKKLLGFTSHRQKREAKIKKDIKRGIREVNEQDPFEAFISNQHIRYVYYKETEKILGNTYGMCILQDFEAITPNLLARTIETVEGGGLVVILLKNMTSLKQLYTMSMDIHSRYRTEAHDDVVARFNERFLLSLGSCENCLVVDDELNVLPISGGKHVKPLPPKDDDELTPNAKELKELKESLADVQPAGSLVALSKTINQAQAILTFIDVISEKTLRNTVTLTAGRGRGKSAALGIAIAAAISHGYSNIFVTSPSPENLKTLFEFIFKGFDALGYTEHMDYDIIQSTNPSFNKAIVRVDVKREHRQTIQYISPNDSHVLGQAELLIIDEAAAIPLPIVKKLMGPYLIFMASTINGYEGTGRSLSLKLIQQLRTQSNNATPSETTVVSRDKKSNEITGALTRTLKEVVLDEPIRYAPGDPIEKWLNKLLCLDVSLSKNAKFATKGTPHPSQCQLFYVNRDTLFSYHPVSEAFLQKMMALYVASHYKNSPNDLQLMSDAPAHQLFVLLPPIEAGDNRVPDPLCVIQLALEGEISKESVRKSLSRGQRAGGDLIPWLISQQFQDEEFASLSGARVVRIATNPEYSGMGYGSRAMELLRDYYSGKFTDISESTELNDHTITRVTDSELANASLKDEIKLRDVKTLPPLLLKLSEKAPYYLHYLGVSYGFTSQLHKFWKKAGFTPVYLRQTPNELTGEHTSVVISVLPGREDKWLHEFSKDFHKRFLSLLSYEFKKFQASQALSIIEAAEQGEGDETTSQKLTKEQLDSLLSPFDLKRLDSYANNLLDYHVIVDMLPLISQLFFSKKTGQDISLSSVQSAILLAIGLQHKDMDQIAKELNLPTNQAMAMFAKIIRKFSTYFRKVLSKAIEESMPDLEDENVDAMNGKETEQIDYKAIEQKLQDDLEEAGDEAIKEMREKQRELINALNLDKYAIAEDAEWDEKSMDKATKGKGNVVSIKSGKRKSKENANDIYEKEMKAVKKSKKSKK

SEQ ID NO: 7095 - protein, 349 aa, Candida albicans
MNVTSPKISENVRLRNNGNTQLKNITCDMNNNDNESNEDSETKAPPNSYRIYNIFSIILALFRSLIKTTSKTTNSVFQMSMFYINHFILLSLFFMIAIYKNFQYLYRRVYLKYLAVTYYPSKSPQVIREDINKLEKIPKIVSCILDLQDDEDENGGKDGLINSISELTAWSMSAGLTKLIIYEFTGALIENSGCIVDLRKYITKTLVLYFGTEAIPTFSIRIPHKNLIIYSDNHIDGNAVDLEIDLISRIDGKPTLVELTKTHEWLAVNRELSIRDITIDLIDEELHELVGPEPDLLISFAPSLNLEDYPPWHIRLSEIYWEPDNKDVNYAVFLRGLQQFSNCKINIGK

SEQ ID NO: 7096 - protein, 236 aa, Candida albicans
MDIDDILKEFEESSKDEKISSKTSSINLYQDLLRAMINERMAPELLPYKQDLMSTVLTMMSNQQQYLLESHEYGDMNGDSGVLSGDFKLQLMIIETDLERLNYIVRLYIRTRLSKLNKFTIFYINESSQNDNLLSKEERDYIHKYFQILTQLYNNCFLKKLPQMLTYLDDTSGGQSMIVEPDLDQPVFIKCTSEVPILLDYDGATEIDLELIKKGVYVVKYSLVKRYIDIGDVVLI

SEQ ID NO: 7097 - protein, 552 aa, Candida albicans
MPTNIQGEEVIIPPKDEEEILLEKLVFGDAAGFENNLKKLDNLYDYSDEEEEIDEKGSEKESDIEDLQDEDLFFIDDGNNEEHSSGDDMEIDQSEDEEEGEDQDSDNAWEDSDDEKVNISLLTSDKLKKLRKTPQDSVISGKSYIIRLRSQFEKIYPRPQWIEDIENNSDDEKDLSDEDKVDDEEGQVGSTTALLNILSSTEKFINTKQLKLIAANKISITRLKDANYKRIGKSGIQTIDFHPNYPILLTGGFDKTIRIYQIDGKSNNFITSYFLKNCPIMEASFYPQLSGDDTKTSNLIYASGRRRYMNKINLSTGEIEKISRLYGHEQTQKSFEYFKISPQGKYIGLTGNNGWCNLLNAQTGHWVHGFKIEGTIVDFAFANDESFIMIVNSAGEVWEFALEGKITSKTPNKIIRRWYDDGGVGITKLQIGGKNNRWVAIGNNNGIVNIYDRSVFAPETTHPKPIKTVENLITSISSLVFNPDGQLLCIASRAKRDALRLVHLPSGSVYSNWPTSGTPLGKVTSIAFSPNNEMLAIGNQTGKVTLWRLNHY

SEQ ID NO: 7098 - protein, 469 aa, Candida albicans
MFRTQSRYLVRSILANHCVLPSTRMTVSPILNQSIKFYSSKDNATDKSQEKEQPKSILNDDMLARAGFEDVDPKEETSNSEEQATKQTGRKRKRAQTSKDLQRERYANMFYLSALIFGVAGVGYMSRDWDSEKEQEEMDGKNVENGYTPKLMYERLSKRLGSLFTFFSEPAFENLLPPPPPEQYRRPLTLVVTLDDFLIHSNWDTQHGWRTGKRPGLDYFLGYLSQYYEIVVFSSNSQIYSDKTVNKLDPYHAYISYALFREACRYKDGKLIKDLSLLNRDLGKTVMIDVDEDSAALQPENSIIVKKWEGQPDEYLISLIPFLEYLATQPVKDVRPILNSYKDKSNIVAEFAERENKLREQWRKDHGGNNGKPNAGNFIAKLLGIPVPEPKMPLDIIREHGQLQYEHFQKYLQENAHKFLEEEQKLKDEFGKVTLNKLITEGAPNAEEIAKVQQQRALEEAQKQQEGHK

SEQ ID NO: 7099 - protein, 330 aa, Candida albicans
MTDMSNTTTDGNVSSIVVPGQYISPTYKLENSNNDSSIPVKYIPGSGTIISNINIPSPNTSTNSVKSMPIIVSTILGNVSISPIDQTPTSKPSSNDDMVIDNEQTKSDEDKDKDKYVKSYLVSVIPKSTKHQSTTSTTTSNQSGSKAISAIALPKENDIVLVRITKITKIQAYCEIISLDTTTNILPDSGLGNNGNGSHVSMSTTGSNSQHNFNQNSIASSQSTNQSVQIYELGENFKGIIRINDIRLTERDKLKLIDCFKPGDIVKAQVISLGDGSNYYLTTAKNELGVVFAKSENGAGDLMYPIDWQNMIDINSGVIEKRKNANPFLQ

SEQ ID NO: 7100 - protein, 320 aa, Candida albicans
MSATSDRESDFESEDESNFQDKVFNVKSKTSSFFHANTPDNEDFSEDEEDKDEQDEGDTKTKPKDGKHNFEDIAYDEESEENIGDDEDGNADLSLDGGSKVNKKLKKLTSKELAKEQKRIKRTGVCYLSRVPPYMKPAKLRSVLSRFGEIDRLFLKPEDPSVYHKRVKYGGNKKKNFTEGWIEFVNKSDAKLCAATLNGNKLGGKKTSYYYDDIINIKYLPGFKWLDLTQQIAKENEVRQAKLAMEISQQQKLNKSFVSNVEKSKMIANIQKKRKTTDDDNIRRDFKQRKVTTTRSDAKDDLKSKSKPTDKLNDILSKVF

SEQ ID NO: 7101 - protein, 759 aa, Candida albicans
MAKKRRAAILPTNIILLQNVVRRDPESYHEEFLQQFSHYESLRDLYLINPTGVDANSTTEFIDLIGFMSAVCNCYPKETANFPNELKEILLNNHRDLTPELREKIIQCLTMLRNKDIISAEMLIQTIFPLLITSNAGQQVKQMRKQIYSTLIALLKSVNTGTKNQKLNRSTQALLFNLLEQRDNQGLWATKLTRELWRRGIWDDSRTVEIMTQAALHPDVKVAVAGARFFLGADKEREDNFEESSDEDGFDMNELRHKMQINKKTSKRGKKLEQAVKAMKKKNNSKHSATYLNFSAIHLLRDPQGFAEQMFDNHLSSKNSNKFDLDQKILFMNLISRLIGTHKLIVLGVYTFFLKYLTPKQRNVTQIMAAAAQASHDLVPPESIQIVVRKIADEFVSDGVAAEVASAGINTIREILARAPLAIDAPLLQDLTEYKGSKSKAVMMAARSLISLYREVAPEMLLKKDRGKVASIELQKGEKSGLPQYGVENNVTSIPGIELLAKWKKEQGLDSREDEEDDANWEVDDDEDASDIEGDWIDVESDKEINISDSDDDNEEDEQEQEPEKGKAKIGKAEDNEDEVSDLELSSDDDDEDSEENKDGKAVADSEEPPTKKQKIRNENADINAEQAMNELLSSRILTPADFAKLEELRTEAGVSKIMGISNEEAVDSTSLVGKVKYKQLREERIAHAKEGKEDREKFGSRKGKRDTPHSTTNKEKARKKNFVMMIHKKAVQGKQKLSLRDRQRVLRAHITKQKKKGL

SEQ ID NO: 7102 - protein, 564 aa, Candida albicans
MNSQDHFKDDFEGEFKPIKYLPKRKIDKEESSINSVNPNANIKRIKKASSVIGIDDDNTYLDSPLDKTKHSKTVPDGQYDANDHAITLPEAVEDDIETVKTQILDQLNGNLQIFSSTPSVSEKYSEIYSIFERTIKDKESHSVLMVGPRSSGKTTIVKSALKELNGNYKGEFISIYLNSSVQTDDSSALREIARQLDINVKKDVGGYGSDSMELTNEKIGYANFEKKSINDTFSNILSVLTSNKGDRDERMPLVFVIDEFEKFTVDSRQTLLYNLLDISQSSATPLCVVGLTTNITTKEALEKRVSSRFSQRVISLVHEASLENFWDNCKASLLLQDSTIDKLKNPEYGLSWNKHVEQLYCKKNSLLKGMVVRNYHTAKDYRKFNNACKVPVSKLSLHHTYIEESYFKLRTTGSNGVQDLVTSLSDLELLLVIAAVRWIEKFELQTINFNLAYTEYQEMVKNFNTGNAIVSSTSLDSRIAANIKVDRKVLSRKVSLNSWSTLYKLGILLDPKGDYVEGQSNNYSYHINKNLIIEENQMVLVDITLDELNGFIEDKHVFKRFVRL

SEQ ID NO: 7103 - protein, 263 aa, Candida albicans
MESLDEIQWKSPEFIQERGLNTNNVLEYFSLSPFYDRTSNNQVLMMQFQYQQIQIPPGVSFHQYFQSRLSEMTGIEFVIAYTKEPDFWIIRKQKRQDPQNTVTLQDYYIIGANVYQAPRIYDVLSSRLLASVLSIKNSTDLLNDMTSYHISDGGHSYINSIHGSSSKPSQSSAVSKPSSTNTGTNATTTPITLTTPSGATVPSTVSNGISTSTEIASGVFDTLLNDVVMNDDHLYIDEIPLYGEGSTLERLGLKGNKDAGLSL

SEQ ID NO: 7104 - protein, 327 aa, Candida albicans
MIRTIKPKNARSKRALAKKEAKLVENTKSALFVPGSTGNKFLHDAMCDLMAFKKPFAKKFSKKNEIRPFEDSSQLEFFAEKNDSSLMVFSSNNKKRPKTLTFVRFFNFKVYDMIELSIQENHKLLQDFKKLTFTIGLKPMFVFNGPIFDSHPVYQHIKSLFLDFFRGEETDLQDVAGLQYVIALSAGEVEDLNNDKVLPLVHFRVYKLKSYKSGQKLPRIELDEIGPRFDFKIGRRITPTPDVEKEATKKPKQLEAKVKKNVTTDFMGDKVAQIHVGKQDLSKLQTRKMKGLKEKYDQESEEEDVYVSDEEYFGEDIEEPETKRQKV

SEQ ID NO: 7105 - protein, 609 aa, Candida albicans
MSALLSADDLNDFISPGVACIKPLASSSTNTTTTTNTTDSYNENGEVEIQIDSQGNPLEISKIDDKQFQTNKLTPAQISLADCLACSGCITSAEEVLVAQHSHQELIKALQSQKETNKVFVVSISHQSRASLAMAYNVSIENMDKCLIDLFIRQMGFTYIVGTSLGRKLSLINEAKEIINRKTKGSGTGGIDSDSSSGPILSSICPGWVLYAEKTHPYIIPKMSTVKSPQQITGCLLKNLTSNSLNIEKSKIYHLSIMPCFDKKLESARPEVYEEEEEEEEEKDKALVSVPDVDCVITAKELITLLEECPQYQLIPPTLPQEELIGGGCLSMTEIYKQYAPPNWPFIEISWSNDSGSASGGYAYNYLTIYRNDLILKGYDGNKFTINLINGRNPDIYEMRLMYNGENKEKLASAAVVNGFRNIQNLVRKLKPNTGKTTNTTTTTTKSKVNPLAARRRARMANNRGKPETKSTSEVNSQEMEIVADASKVDYVEIMACPNGCINGGGQISAPNTTTTTSITLPQKEIEKQWINAVLEKYNSIPMFDLSSQSSSSSSPNEIIKFIEWSKKFENQFNISDNRLFKTHFNPVEKNIIMSVDDPATALLVGSKW

SEQ ID NO: 7106 - protein, 170 aa, Candida albicans
MTTGALPSTPANEPLIKSADNVANLIESFIELGVLVHDNQGTPQSNQALMNKLNQLISQLSQTSTTANDPNDANTNLKQFLIPIDVISYIEDGRNPDIYTREFIEVNAKSNARLKGKMLGFKKLRDVFGDKLKQEFPQLEKGVDDIINRTNDNSSHTASVITDTANNNNS

SEQ ID NO: 7107 - protein, 247 aa, Candida albicans
MAKLVHNVQKKQHRERSQTQSRARYGLLEKKKDYKLRAADYHKKQAALKALKEKAKLHNPDEYYHAMTRKKTDDKGILISERDNEVLSVEQAKLLKTQDVNYIRTMRLNELKKIEKEKEGKLFGASGKHTVFVDSIEEQESFNPEEFFDTDAALLDNRENRLRMNQLYDNSGLLTSNDLDIDTKNKLDLKKLKQYKLLQRRLKKEKELKEVESIMSKNLEKMKKGNKKKVVDSNGKVHFKWKNERKR

SEQ ID NO: 7108 - protein, 157 aa, Candida albicans
MAPLEAPILAIPGENNTHQQQQQQFQYTGQLQKKKAAEGSIEWYFDQTINFMGDHPVITGIGAFAVAYFAAGFIKSNQPGINGKAFVKGGFGAKMTAKEALQILNLKETNLSKLKLKEQHRKLMMANHPDKGGSSYIATKINEAKDFLDKRGGMKPK

SEQ ID NO: 7109 - protein, 270 aa, Candida albicans
MSDTIILPGDKLPIDEDIFTVKTTIGPGIYKKPKTQELIPSAAGTLHYERAKSSSQQLIYIESNSKRYIPHTNDYVIGIITGAIGESYKVSLQSNSTPVLLSFWAFPNASKKNRPNLKNGQAVYARVSQDIPEIETELECIDPTSGKEGGFGVLDESGYIFDVHLNFARELLFNPKTIFLETLATRCQFEIAIGINGKIWIKCGNGVKKEANDGSNNNQDQGEDQEMIDVSEENLKDLKSTLAAATFLTLCQFVTQDKLKQELNNAFQGI

SEQ ID NO: 7110 - protein, 312 aa, Candida albicans
  MISC_FEATURE (64)..(64): X=any amino acid
MTDIEVKSRSRSIKAISSDAYPPDSSVQELIYELSSDNHISEHRLRLTKLENGKQVALIPHKTXAENGIPKTASKIELFVKDLGPQISWRTVFLVEYFGPFIFHPLFYYVQSLYGSGSFEHTQTQKFAFAIVLLHFLKRELETIFVHKFSNATMPAFNIFKNSGHYWILSGFNLAYFIYGPSDKSGVLKYFFHVNELPSSVVYGLFGLWVFAELSNLTTHLILSNLRKGDSKVYVIPFGYGFNWVSCPNYFFESLSWLAYALLVGNWSAWIFLFVSSGQMWLWAVKKHQRYLKSFGDDYKKLKRKIYIPFVI

SEQ ID NO: 7111 - protein, 248 aa, Candida albicans
MSNDDIILPSVSSLSKLTINDVSKSGFGYNPSIGPISNTITLESSSVLLNKRTISLTPTSSDSIYDRNIITKKPHEINLSSLSFLFCEIISWAHSNSKGIQDLENRLNGLGYQIGQRYLELCKIREGFKNSKREIRLLEMLQFIHGPFWKLIFGKTANELEKSQDLPNEYMIVENVPLLNRFISIPKEYGDLNCSAFVAGIIEGALDNSGFNADVTAHTVATDANPLRTVFLIKFDDSVLIRESLRFG

SEQ ID NO: 7112 - protein, 130 aa, Candida albicans
MKFLTTNFVKCAVKSCQSSLDSFPLKYEECQLVQEEQDYNPEFIVHMLDRLDWNAIIQVAKDLGNESLPPTKPEDLDPIMEDNQAILKDLHTLLVETQIIEGKMICKNCQHIYYIKNSIPNFLLPPHLAN

SEQ ID NO: 7113 - protein, 446 aa, Candida albicans
MKRAFGDNSKPGVKKAKLHQDKEAVHNNENNDKTGLDVEIHPLLKNIGLTNIPKLPKDHNPLRQSNQKWFDPLALNPYLDQSDMVINNKKSRHIPPPLKFISQGKYVAQGEKLREKLKVEHEQTRELEAIKQQGLIPDETIGEQLYQLEVQPLIEWWDRPYLRDNNYMNINDESRKVLDDETQPITSYIQHPVLINPIWETKDSNSPIQPVYLTKKEQKRIRKNERQLKQQEKQDRIKLGLDPPPPPKVKLSNLMNVLTNESIKDPTAVENRVKREIQQRVDKHLAQNEARKLTKEQKHEKLWNKQEKDLANGIHTTVYKIDKLVNPKHLFKLNISAQEENLVGVCLKNPKFNLVIVEGGEKSIGHYKKLMMKRIKWTENVSQSATNDSIDDLSNNKCSLVWEGSLPDVHFQKWSIMYSRDDEEALTALKKFDLENYWRLASSLKE

SEQ ID NO: 7114 - protein, 945 aa, Candida albicans
MTKLDSKYGKILKDKYDGKFIDEWNQILNDDNNNNNNNTTNDHALSAVDLAVTVSQALAVKDSEEFNNTKIASNASVVMMDTFVNDMMIIVDDEKKITNSQLTDQIEDKIENNKWYLKTKLGKNLLQSIKDFDPEYLEYCYSPIIQSGGDYDLKPSAVSTDKPLIGEGVILSSIGLRYKSYCSNIARTFLIDPTSEMETNYDFLLQLQKYIVDNLLKDGVPANKVYQDTIDYIKKERPDLVNHFTKNCGWLLGMEFRDSTFILNAKTTDRKLTTGQIISLTIGFNNLSNDKNDKNDKNDNKTNHQKNKQTYALLLTDTIKITDDSSILLTNYSKDRAAISFSFNDDNETQKENNNNNNKRPGLSQTSNTTALKLESTENTAILKSKLRHENTNADDANSEKLRQEIQIKLHEKRLQEGLARFSKADATDADDFKPIFKKYESYVRESQIPNSVNDLKIHIDYKNQTIILPISGRPVPFHINSYKSGSQNEEGDFTYLRLNFNSPGAGGNVTKKQELPYEDSPDNSFLRSITIRSRDRQRMVDVYKAIQDLKKDSVKREQEKKQMADVITQANLIELKGSRVKKLNNVFIRPTPDTKKIGGVLQIHENGLRYQSQPQSQSNFKNDQRVDVLFSNIKHLFFQPCKDELIVLIHCHLKNPIMIGKRKTFDVQFYREASDMAFDETGGRKRKYRYGDEDELQEEQEERRRKALLDKEFKRFAELIADSSHGMVDLDITFRELGFQGVPFRSSVLCVPTRDCLVQLIDPPYLVVTLEEIEIAHLERVQFGLKNFDLVFVFKDFNKPVVHINTIPVELLEDVKSWLTDVDIPISEGQMNLNWVQIMKTVLADPYQFFIDGGWAFLTGQGESDEEEESDEESDFRVSDEDPQDEDEESDDYASEEESDDYSGSDDDGSGGGDDDDDDDSESGEDWDALERKAAKADRNSGFD

SEQ ID NO: 7115 - protein, 296 aa, Candida albicans
MGTSTSEALKNIKNKQRRQKVFAEIKHEKNKQRHKQRAERAKEERENPELREERIAANIPDTIDSKRIYDETIAAEVEGDDEFQSYFTNLLEEPKILLTTSANAKKPAYEFADMIMDFLPNVTFIKRKKEYTMQDMAKYCSNRDFTALLVINEDKKKVNGITLINLPEGPTFYFSITSIVDGKRIKGHGKAGDYLPEIVLNNFNSRLGKTVGRLFQSIFPHKPELQGRQVITLHNQRDYIFFRRHRYIFRNEEKVGLQELGPQFTLKLRRMQKGVRGDVVWEHRPDMERDKKKFYL

SEQ ID NO: 7116 - protein, 141 aa, Candida albicans
MAKGKGKGKGKGKDKGKSVPNRDNYARISYLYQISNQFYLAHPEYQALSRGYNRNLDLIAKKTVIKLSPHIKRTLCKKCNTMLIPGLTMSMYIENLSKQKSQHNDVFVNKCLNCGKCKRFPVGKDRNYILFTDKQNENIPT

SEQ ID NO: 7117 - protein, 769 aa, Candida albicans
MSINIVLEEIKGTLSSIIPLLSILHNDKQILSSITKTELNHLISRTLNLVRSSDVYNKWCGINLIRVIVEEYSILASEGNNLMNSLLQVLEAYQQQQHHHHHQTTIDLKILTSCIETINYMGDLIRGKPTLTREILTPKLNSIIGYYFQYLHFAPLLILNSLQTLLKFHPTTFRPFGNKLKTKLINLIDGGGGEEFINYPQDLQLSIYNTLAMLPIIEKIEPETKWYNDVINILGEINGLIQIYQEFLNFKDDQDLSNLIQKLPNRPTTTTTTTKLLTDLSIDFNKPQTILSISNHLNILMGVLKSYLTVETSFTVKLPLGLILTTCELICSINTKFLSFKGDIRDETIKKLIKFSLIENYKTTLGVLIELIELYKGSLIPHLTTIWSFLETLIPFQNQNKRIVNEEIIESESLYVEILQFMKQSLSLLGNVSENTQLLRFVDMALILVEPRINPTTTTTTTNNNNNNNNTKQTNVQQGKKQKKRKNTSSVALSDILSHEHLFMTNIPTITITTVRSFINQIITKIILPPTQHYKIMRYLIIESIHAKYYNLYHNVPIELKKLLINAVLYPGYDKISILPIISTILSDDPLLGVFNNPKFPPLPKYINLVNNIEEEEQKEEQEEDAIIEDEVEEPIKEELTTPLKKRKLDIESNEETDNNNIIPVEDQSKIFTATKVEKLTTTTTSSIENNPVVIEELTSSKEIVVESPVDEPTKVDNIIPTTTTTTTTTTSLTSNTANANDDNDNDDDDESSDFEMPEINLDQDSDDE

SEQ ID NO: 7118 - protein, 1264 aa, Candida albicans
MANPVKIGYYDPFGIYPLIKDELNKISPISSLHIRFHPSQPLKTIHDLSLEFTEEIPKKSESSTSENYNVYTRLMLIKIESLDKYRSQVRPLIKEWLKNLVFNEKVNGSSPSWMILLYVPSDAKDKQSTIIKMSHYDKLLKDFSNEGGKELAALFAESTSPTASVGAQNSKSTGYCFKFKQHEFELNEFLVQIKNLLGFTFNQKYHLNSDLITTSGDHENNSLTKYVATYNLAELFYDMKLFNDCINFFNRLSEQLNTLVENNPNLFIYKVDLPAKVFSNKFDFKKFYNNKCQHMHDVNSFTNVNLFELKCFIFFRQASTLEMLVNKNLNNSISLAELQISKLLRNLVLFLNDLLQVFQNEQALIEFEYSIIEYFLNLDIVNKLIEQATKLYEAEPANNNNSYQLKRLFESRGELKLSQRSSLIKLARENSIEIKGLDQVFEDVSLDEEEGPKQSKDSTEQVKLDLKHPKLLQAIQSKDSFVDEFTKLTEGILEDFMGCDRSKTIDVLSIDLAILNYEKGDYSECLQILHDSYDFFIQNGWNYLGGILLEIYYGCMEKTQSTNFEEILSTCLKLLSCLVANHTDINSFRLINNKLQIKKLFDRIEVYANKLDPTKKFERSLNQFFKTDILPYISADESTSRDKYLIRLKLKNPFSLGFVFKHVELIMVDEEGSEIVFHAENVEISDKIDNTIQLSTNNFILGSFSPYRLTIQFYNSLFLVLDYGEKELQMNHASFLSDTVIEHNGNNNDVFVYDGLTPMSVFKPRHEKTLLAYQNINKLTAQFCCANDLKLGSTEVVLKIKNGSNPIHDVRINLFSTTEGLTVVDPDLKVSKLDSHESQTFLIPYNFVRSVNKIINMRAKIEYKVDNEEQYSFQVSYNIDTALTISVTVQDIFKRDFIYSKFQVGTSNPKYPIRIINNDLTTESIYEIIKPSKFPSYDIIAFGEQPSNFFYKIKPKSNKVYLNDTLSLKVDYTNLQEECEEYVSQEIIHQLERIKSVKYWYLIKDVIVSKLTFDLNGFAVYKTIRFLNGLELNLLAERIILQYVESSVDQKNLVKLMSNLLVNHNFETPIDSYEYNNVLHLHISVPVPVLKYLQIVEYEYDKKQYTVGEPINVNLKINTVTRWCPKDRDREFDDSEHESQPLAVSSPQRNKRKNSDNNSDNSILITNRDQFQLVIQQDDNWLMSGFKRFTFNGGQETTKQLTLIPLTVGKIPLPQVSIKELTDGVNLSIDDEEDDDSDDIDIEFINGSETILVIPEVNSITFSF

SEQ ID NO: 7119 - protein, 2037 aa, Candida albicans
  MISC_FEATURE (133)..(133): X=any amino acid
  MISC_FEATURE (1957)..(1957): X=any amino acid
MSTHRPFQLTHGSIEHTLLVPNDLFFNYSQLKDEFIKTLPEPTEGFAGDDEPSSPAELYGKFIGFISNAQFPQIVELSLKDFESRFLDNNNDNIHSFAVKLLDDETYPTTIAKVKENIVKNYYKAVKSINKVXSNLLYHCKHDAKLVAIFGGQGNTDDYFEELRELYTLYQGLIEDLLVSIAEKLNQLHPSFDKIYTQGLNILSWLKHPETTPDQDYLLSVPVSCPVICVIQLCHYTITCKVLGLTPGEFRNSLKWSTGHSQGLVTAVTIAASDSWDSFLKNSLTAVSLLLFIGSRCLSTYPRTSLPPTMLQDSLDNGEGRPSPMLSVRDLSIKQVEKFIEQTNSHLPREKHIAISLINGARNLVLSGPPESLYGFNLNLRNQKAPMGLDQSRVPFSERKLKCSNRFLPIFAPFHSHLLADATELILDDVKEHGLSFEGLKIPVYDTFDGSDFQALKEPIIDRVVKLITELPVHWEEATNHKATHILDFGPGGVSGLGVLTHRNKEGTGARIILAGTLDSNPIDDEYGFKHEIFQTSADKAIKWAPDWLKELRPTLVKNSEGKIYVKTKFSQLLGRAPLMVAGMTPTTVNTDIVSASLNAGYHIELAGGGYFSPVMMTRAIDDIVSRIKPGYGLGINLIYVNPFMLQWGIPLIKDLREKGYPIQSLTIGAGVPSIEVATEYIEDLGLTHLGLKPGSVDAISQVIAIAKAHPTFPIVLQWTGGRGGGHHSFEDFHQPIIQMYSKIRRCSNIVLVAGSGFGSDEDTYPYLSGYWSEKFNYPPMPFDGVLFGSRVMTSKESHTSLAAKKLIVECKGVPDQQWEQTYKKPAGGIITVRSEMGEPIHKIATRGVMFWKELDDTIFNLPKNKLLDALNKKRDHIIKKLNNDFQKPWFGKNANGVCDLQEMTYKEVANRLVELMYVKKSHRWIDVSLRNMYGDFLRRVEERFTSSAGTVSLLQNFNQLNEPEQFTADFFVKFPQAGKQLISEEDCDYFLMLAARPGQKPVPFVPVLDERFEFFFKKDSLWQSEDLESVVDEDVQRTCILHGPVASQYTSKVDEPIGDILNSIHEGHIARLIKEEYAGDESKIPVVEYFGGKKPASVSATSVNVTDGNQVVYEIDSELPNKQEWLDLLAGTELNWLQAFISTDRIVQGSKHVSNPLHDILTPAKHSKVTIDKKTKKLTAFENIKGDLLPVVEIELVKPNTIQLSLIEHRTADANPVALPFLYKYNPADGFAPILEIMEDRNERIKEFYWKLWFGSSVPYSNDINVEKAILGDEITISSQTISEFTHAIGNKCDAFVDRPGKATLAPMDFAIVIGWKAIIKAIFPKSVDGDLLKLVHLSNGYKMITGAAPLKKGDVVSTKAEIKAVLNQPSGKLVEVVGTIYREGNPVMEVTSQFLYRGEYNDYCNTFQKVTETPVQVAFKSAKDLAVLRSKEWVPFGKGCSVCVLTFRCESTYKFKSANVYSSIKTTGQVLLELPTKEVIQVGSVDYEAGTSYGNPVTDYLSRNGKTIEESVIFENAIPLSSGEELTSKAPETNEPYAIVSGDYNPIHVSRVFAAYAKLQGTITHGSYSYASTRALIEEWAANNVAARVREFKCDFVGMVLPNDTLQTTMEHVGMINGRKIIKVETRNVETELPVLIGEAEIEQPTTTYVFTGQGSQEQGMGMELYNSSEVAREVWDKADRHFVNNYGFSILDIVQNNPNELTIHFGGAKGRAIRDNYIGMMFETIGEDGALKSEKIFKDIDETTTSYTFVSPTGLLSATQFTQPALTLMEKAAYEDIKSKGLIPSDIMFAGHSLGEYSALSSLANVMPIESLVDVVFYRGMTMQVAVPRDELGRSNYGMVAVNPSRVSATFDDSALRFVVDEVANKTKWLLEIVNYNVENQQYVAAGDLRALDTLTNVLNVLKINKIDIVKLQEQMSIEKVKEHLYEIVDELSPSRWPNRNLLTWKEDLSSFHXKGISVPFHSSYLMSGVKPFQRFLCKKIPKSSVKPQDLIGKYIPNLTAKPFELTKEYFQSVYDLTKSEKIKSILDNWEQYE

SEQ ID NO: 7120 - protein, 1259 aa, Candida albicans
MDIPPKPTLKAIKKFRTLDEIKYAMKHVFQDAQLGLAGHRKLVVILKNVFKKAIELNQINFFAMCFTKLLSKVLPLKRGVLAGDRIVKFCYSFVNGLVKDANEEKRSKEEEKEEKDKDKDKDTNESDKNEEDQEDQEGEGDQETPISEFISYLIKYLLSGIEAKDKSVRYRVVQTLAYLVEFLTEIHENNTLEALYTLLSNRLQDKESSIRIQAVVALSHFQLFEFSIEGDTGEFEDELISSNQIQNKLINSIQNDDSPEVRRAALMNLVKTQDTIPILLERARDSNSINRRLVYSKIARELITDLDDLEFEDREFLLKWGLNDRDETVKAAATKMLTIYWYQSVNEDLLELIDQLNVKSAIAEQAILAFFKNKPEVLETIKIDESYWKNLTTEKAFLMRTFYQYCNENQLHALMDANFPELLDLSITLEKYLSVRLKTINENENLIKTWETYNAKIDELDNQIFSLENQISRINTDADNFRKSLSNIEEDIIEINIAKDLFKKRIKQLKNNSGNLEDLITEENQEIADQIKDFSMEDLQQQLEDINKNLDEIEHQPEDITAKLEELQTKYDSCIRALEPTSELKIQTVQIFEQEHENDCIPFVDALKELEFIINQLLLIVKDFDYGDEMARRKLLHIIRMTLTEDKLPDGLISVALRVLRALSINEKDFVSMAVEIITDIRDSRDDEEFHSAAATFDDDDDDILGNGDDESQQSSSLSAVTKKRRIEPDMPPDDIVLRCLTMTQYVLEVITHSLDDHLSLSSIYSGIVNYAIQNESKKKLYLAGLTCLGLYSLIDSKIARIATTTLLSAMRSNGEEVKEIGMKAIVDILAIYGMSILDKSSKYKYSRMFFKVLNSFDAPKLQCIVAEGLCKLFLADILYKTDKRSLFGNAIQGGGGGGGGGNDDPTTTNDDETEEETDREHEKHLFEAIVLIYFNPNTKSNQELQQILSFCIPVYAFSHINHQINLAAVSGDVIYRLFTETETELSPSVIIPQLISWCDPRNLVKLSNEEINQATSHLWQCVYLLQVVEQVDARNVKRCIINNLNKFHITEELESNQLQALIKALDATVELFTNNEDNPNFILDKPTKKNFDTFIESIKNKLEIAQKREENESIKSGTNSILHELDDLDIGPGESSQISIKSETKRRDSDRSSQVSKTTSPETSENEDEEDDNEEEEQEKKKSFTDGKNKLELKADKSITFKAEDKREGSVEIDHGQEQVLVESKKAIDSNVEDSLKDIDKFLEEADDVDYGDISMDD

SEQ ID NO: 7121 - protein, 1120 aa, Candida albicans
MDYQDLLHKIIKEFHSLKEFKPWDSSVLYETLLRSVLTTLIELLGIDNPPSYLHLTTNNDSIGDLKIKYYGNALSKSINGHSMLQYLESKHVSILQAVVEIINTRSYRIKESYSAVFKDVSHLFEKLLKERYEAESNLEDYILQCLMYETQFYQGIVDNVLTADDTEKLASFLGTRLSEEDSMFSYRDIDYPLELNINNESLEKIYKIFLGVIGTKRFDIKEVASAVVGVYKRHQRIDHFEKLDSDEILGKFFRNILPQSFQSVTNKVFREFHKEVDDPPSDVLDQLDNIVDDFIAVGIEGVDLGFPALFRHYIKFMNEIFPTVVEDADRDFVARINSLIAQVLEFKDDEKSCDINQVVSEFVSLQSLLLKNNYLSPSTLLMRASTHDYYKNLQIVKITFDGWNENSKRILKLENSGFLQSKTLPKYLKLWYSKSMKLNELCNRVDEFYNGELCRKVWHCWRSQQNVYNLKMEVADKRLLNQYYIKWRKKEKDMKANLTIAVEFDHFHLLDKSFKILKGYFNLAKNSDVLAMSLFQSFEENRDSRIKLKYFQYWNLKISDRVHGLTMKLEKFHQVKDKFVLGNYFETWYYKHNLVEKSNNFVSAKDLQLLAKTFTNTWLKKFLLYKKAFKIEEELGADLKRKTFDRWKEAVQLEVKAKEFHERHLLETAFHEWKLKSILISNRASFDHILVQRCFQTWSVEIKLRELQQKQDTRLVVNIFQKWRTRQLELAKLDEKSQAFYESNMKHLVVQKWNVENSNIGLLEKRADRFFIRRFFIQKWQSKMTKYEDITVYHLEDEIATKLAYKVWRQRYFENYEEKLDNLLETMDTSAADTVRCSRYFGLWRAKLQTVKQIEERVSTSVAPSVAIHFKNWHVKSQQKQELLENALQFEEINLSRFLLIWFQRLQEVSQLEDQAEDLLAQTNFNLLRNAVHKWSMLYNKNIKRHKQLCEDFIARKETAKVRSIFDLWLYKIKEIEANTTIISNPSPLSKRFQHQREMGLTPQKKNSPTKVFTPTTSKDPSPTKLQETTQRMRNQNISALREHFGRARASSTPKKLSPVRLSYTNIPSNLRPQSPPKFDDSDIATAKSLGRIRPMVFPIDDQANFSPMDRTKLQSRNAM

SEQ ID NO: 7122 - protein, 841 aa, Candida albicans
MAPKDSASIDVGYPIMGIKFLNNKTILVAGGGGEGNNGIPNKITAIKSSFKVKDPNRKLQRFREITLPSNEDSPQCIDTAKLVGENKFNVVLGCNQSSQLIKSMNIHNNIRKYEYTNEEHLRFVDAAQFEAEINGDADDYPKIVRLAQNNNVGCFITSTVPSSIYIFNPETLELNYKFIPDKSIEIKDFVLSPHDGNSLCYITSNSINVVATNNTSNVELSSVSIPNLDKQLKGYVLSKVRYINSDELLLAATFVGKKGAVLLRLNIPNKKIIQTQVISKKGVIVSMDVSPTKVAVATNDLALTLINLSNLKVLKAFKNLHPWAITSVSFSPSGDKVASASASGTLVVSKISSIGRSGGSGWFLSVLLALVFGIVAILAAVFPDFVTQLTGQSSLIDYKSFDFAVPVSIVAERYSSIVSQFLDTKSTTVSSVESKILDNTPSAEIPTTESTFLQSVDHQDPIIDSSKVESADVETTVIEVVVEETTVVENSSVETSIIPSEVREAHTEKSSSIEESHVPSTFIESDVVSSTETSSSVESLVESPVVESSEEETPIVESSPVQPPIIEESSSFELEFSESTTETQVVQSSIIESVEEESSLEGTTIIESQSVEPPVVESSSSEISSVESFSSEPANVESSSTASSVLESSSVQASYIESPSVESLPVESISVESPSTESPTAESMSVGVSSTEVSSSESPSTDPSSESPSPDVSTVESARVESSSVENPSVETSSVETPSTETPSTETPLTETSSTEPSSAEIPAVESISSESLSVETPSIEVSSAESHSVEPNVTESLSVQSSTAESDTAPSSITSASTKKARVKRTITKKVTRTIKKDEL

SEQ ID NO: 7123 - protein, 686 aa, Candida albicans
MSLSGMEEFETVLKEISTLPAPGVSGTRIKRLTDIAVKEMNAENEPKLISILYSQCKANSSTNKLGTLYVVDSIVRKFIEEANKKNEALVPSAPEGTYASAVFKINELVESLVDDAMELSINPSINIKIGKLIDIWARSETFSPEVIQNIRYKHFKSTTPPGSPPKASIALVKPDATEGTKESSSILSALASLAKASGSNNETPPSSQSSSTNNNSNNSNSNSNESGSNATNILSQLSALGGNSSNTGSASSQPPSQQQYSSYPQGGGQAGNDDLLNMLQQMQGGGTPTGASPASPVVGSNEARGGPTAEFDRRRGRDNEYGSQYGRRNRSRSPKRGSNTWVRSPPSSSVQALQQNMQNLRQQKQVNHGYPQNTNGQVDQGFVPPNAMGGELNLPGTPHYRPRTVQFDSTIPQGTVKVLSRTLFLGGVPRNMDERSLAQVLRPYAEIQSVILNSEKKHAFVKVYSRREAEQVITSFNKDGALPLRTRWGVGFGPRDCCNYQHGISIIPIQRLTEADKNWIVHAQWGGTGGQPISSGMVVDEPDIEIGSGLSSKAMSKKMPTNSARNGPKSNRPGEPDEEYVKTTLIPQGDIQMTHGAQPQFNTYSQSSVNPLQGLFGNNPQQQQQPPPPPQPPQPQQPPMQFPAGFPQMPPQQPGQPGMNNNEAMAMLAAMMQTMQQQQQQQHPPQ

SEQ ID NO: 7124 - protein, 839 aa, Candida albicans
MPSAISEWSLSMATGGKPLYLPCSQTTASVYSQDGRYVIIALTHQLRVYFISTRQCIKTIDLDLHDLADLKIDVTNGNQVLLFKTSGEILTVNWKDKVSQPIISTIDINKTQSGTSLPLLSVISVKHLFFIIVTGRKEKKKGTPHTRYINYFDRNSESLVPIIEVANSINFATSLDNTKIAFITSGNEIDLFDLSGIFNVDSIENLSDNDIVKETIPFVYRSPVTSIAVSNDSMIAIGTSAGPIQIVYGGLTTPKPQRVLKWHLDQVKGLMFTADNNYLLSGGMEKVLVFWQLDTEKIQFLPRLNGVIDKISIDNYKNDYISLQLNVDPLDNNYEILVLSAVDLVSRLSVNTVRPKFAYNIATTLSKTKKKFIKSSSDFDKFKIRYDYTSQFEIHPKTKSMYFPNGALIQSFDLFKNEQNFIQHGAPVLGVGKVRSETKLLDPLVTLLKFTHDGEWMCTFDEFTNTEVDSLLLKNEKQYALKFWKYVGHKENATSGINNNNKTGHWELTTKIIDPHGTNPILAMIPAPTSYFNGLAFLTADDKGGLRIWRPSVPKEQYKTTSARSQQTAWTLRKSRAPSALSSDAVALSWSDDNSLIFLAHECSILTIDSKSFEEIPDFKIPSLSGSRVRSLNMVNNNLIVLSKTRISSFDLITGELTSLVAKVNTTIGAKNLIAIDPIKRLICLALNYYSEENNTLSIKSKILIFKPNQLKPICVQLHEQGVSSIRYFNSSFVFVDLDCRVGTIYSNEEITETIELGLTQEINNMLIAAQATADVINDRNVKTTVGHQNGNKEGEMDIDNSMAYAAKVVDLHTFQPIFQNIEGVQVESLFERIVNVLK

SEQ ID NO: 7125 - protein, 745 aa, Candida albicans
MAKRKSKQQDLEKKKKLKQSQDEQLSTGLFNNVGQGQHQGDDDDEEGDEIDWDNQEMDYELIPRKITTKKTIEALPIKKSDGTIERVVREVEEEEEEEEEEEPEEEPELENDVENEPSKQENKENKEEGDIDTDDTLTPQEKLIQTKEEIAELGSKLIEDPEENIVCLTRLRKMSESKNFMTSQLSILALIPIFKSLAPSYKIRPLTDTEKREKVSREIAKLRNFEQNLVINYKAYIELLTKYSKISYSNSMNNNKITSDQLKRGNIALKAATELCLSSLRHFNFREELFTIIIKRLNKKPQHQQDYPIFIKSLRVLETLLKDDAEHGDITFDIIKIMTKSIKDKKFRVDESVVNVFLSISLLEDYDPNNNNNNKDDHHNTTLKPKLKKKDRIHLSKKERKARKERKEIEEEIQKAEQAITVEQREKYQAQVLKMVLTLYLEILKAGSSSSQLIDGDGKKTKNDASLLMGAVLEGLSRFGQMSNLDLLGDFLEVLREIMTDIIEEHKQSGDNDNDNDNDDESGGMYSGNELRTILLCIATSFSLVLNHNSMGKLPMAIDLSKFVSTLYIILTDLALDPDLEFSHKTLRLADPLSSSSLSNELENNKPAVNVSTKAELLLRCLDFIFFRSKNGTIPRATAFIKRLYILTLQTPEKTSLANLKFIGKLMNRYGENIKGLWNTEERISGEGNYILGIERQNKDKDVELERSNSGAATLWENVLLDKHYSIMIKDGSRSLMKNSKANTN

SEQ ID NO: 7126 - protein, 798 aa, Candida albicans
MPPIGSSDQFIHQITQQFVFQRLWTGNATTPELAPASTPYNRLVCRNNTDLFYATGNIVRCCTISPNHKNYKLFKVENQFYEVASLLMNKSGTLLAIIGEEQIDVVSLPTNVMKSSGIYVDGASFKIKNLRGKVRKCVWQTVAANDSTLVVLTDNSQIQAYDLTKSLEVPVIDVDLKRYANFANEEAISIAFGSSKNLAGGLTLYVSTLSNIYAIYPFSAKFGNLATTKEAIDIALEDTKAAMELIQEKYPVNLLDTATSTLNKAAIRQFEYYSHFKSQLSGALPIIKEVRDTHTNNPYELFVVSQTLSDWTGYSLQGPLISSNAGIKDLASIGDNDLVSILASIDANATVTYYAQLAPMLMKYNIMSIASEGAPSESSQTVCKPKYVKPKRGFGFIDNSEEEEKALVKSKQSQESFWKEELTSLDLLQRDKLPVDENDDATGFPTFFGEIDSNRFSVCVNSNKLVLVDCSWVKTFVDDLKEDKIDSVSITANYGITSTEKEPITAFAYIKDDVTSTGEYLTVCRSKLVNDMEVIQIVDKAVSDQEEATSTLLLTEEPYKELPLTYIPSKPFSELEEELESLGKINIGADVKGNEDLNSLTVDSLSSLNSLSVRTIQVASSYTIFGIKLQSRILANLDSLKEQLHILEKVKNEYDGDQKDHTEKLEKLTEKQAKLDERMIKLQQKIFDGLNKFKQDKTLPISEAERNWFKEINSINALVNSSTDNEVGLTKKIENLSLQVRSIIEDSGKEKKPKLTAVEQLELEKRLSKLKNWLQREDKSIEILKDKLTNSLKLIGDK

SEQ ID NO: 7127 - protein, 1270 aa, Candida albicans
  MISC_FEATURE (340)..(340): X=any amino acid
MNQHQDQSSMPNGKQQHEVTESSSPPEIPHITANMIPLSNIIKYYTQEAYKQLTTAIENLSMNVNEESDIKRKKYFLNVIINLRQDFIKVYTLIKWASISKDVSKFIDLLNWFRIQEFHFENLIFQLNALTGYNSAKLPNSDIITALEVLYHGRPKLPSYNYIKSDNLSPQKILETLNDLNLVLMTRFALMDNIPKRFDYEIKDGRAYIRVSNEFEVSITVGNDLIIDNPEEYYKSPFYFIDFKFLFGANPESGLITFNDDKISTKLPTSSHKKLEKLVNQTLLTRGLQGLYELLHKYSNSFKIYLLAKQFQTLLINSRWRGNFQINYQTNKSLIVINYXSQHYLSRNWNSFIELGIDTHSNLNYRWFKNGQYCFGDQGNNELDKIFHLQRRNSNNGVTTSSNTISTSAMIAGIRRSTELSNETAIVDDNDNDNNDTNNTGETENEDLNVDLILNVVVNQHAKSIMSEIYSQLLTRFSETDVSMVSPHQLLLQISPKKSTVFAINPLTGFFYFIDPTPIQTYITKKINSPPPPTLSQVSIKQSFIPESDMISYVIDQIIQLRLEVFNKEVNTKLATTAWINNGIIKLSDHELSKLTQFLIQNEEQEGDDNEEDSSTNTRLDSVLQSFKVQFYRRKNWPSSWFLINMISGVTTKSFWWVARIKSISGDWKIQWAQIIKFHGDNAKQELSPNESKVFDKPKRTVDCSIESEQLNFEFFKTLSTLSSNLILDHMILEELQVRSIKFIKLDWETIDDNKIFSKFKQNHDISLKRKNSHNINIDVNVDVADNTSTTTNTKYIRAPKLKYESMFLIYNDKLLPIYNSATILFLKIELVESNKMYLKLFGNLRNLQIKNTSEDIQKLHLNIDEANQYFEIDNTVDLSTVINEPKTLLLNLIFNTLNKLNSLIKILDQLNKSNVTVLDNSMDNITINIKDKYNDNNDKLIIIKLPEQATDSIQLLMKNGSTTTTDEIDLRNNNILEFELILKFLNQYLRESQSNNHNRQQISIIKIIQYLTEINPILQSTKAINQQLAELKRINSTNNNNNNAKRRSILKLSNGLYKLYFNLNIISLTHLQLVFFMNSNTGSNLKKIQRDKIMINLSLIKFDRFSKPNGNFQDSTNGHLIKISFKDSLINENLKFKNLFEIIFKNINELLITKSKQIKSLNQTEKQQQQPLKQEDNSDSAIIKKESQSIEDDLLDFGEYDNDIKPQQQEPQQNEKENSKTTSKENETVRPDDILIKLNYDYLLSMNNLQLMINEITKSCFQYLQQQQE

SEQ ID NO: 7128 - protein, 662 aa, Candida albicans
MTTFSREFTKVYDYQALFNKVLNKRLRFVLNINLILSFILALVYEFMPMANSNSDTNHSIWQSIPVLICVKVPTIFFTLSVIRQVRKQFLIVEYSHHKTLGAQIYYSILSFQFLINWLGYLISSWLIFGVVIIFTSKLKFNLSDYYILSKEYRQHPIINDQWVYYWYNPVFISFFYTCNQLIFQRQRLNFEIGNIRNKPQNYLFKHLPILLGNSLGLNLFVISLTPITYWLVKYYIYKSFILIILIFRLDSDIIPNNNTSWITYLQLSYLSFFIILSWEVVNHVFNVYATIGCLDGNKPISSYSTDPLNCLLSGLRDVDPNYQLSRLTAFQELAYLATSSDKEALKLRFKIFSFRSKKLNAWTSLLEECALVIKETTDRINYRSTSDLNALKSLEISGLKGNINNYRDSKQNSDNLFGNSFINTSPVDKKSSELIKKYQANTSTTAEGKKKSNKVQELIGSIQHFASQFFGNFQKTIGDANQLQEKFAKSFNFKHYLQIYQNYKDKFLQTYIGIFFRITIKRDNESRIINPINFCNSIIAISNLLQYSIEEDKYDIISNDDVCKVLNLLEKPIRATTNYIDYLPASVYVPQNSQPKKHSCLMGKLHDLSMHEFYEICIRFNGKLNDLILTPRTYKLVKWVIDKEIAIQQEIQKQKHQKLNLK

SEQ ID NO: 7129 - protein, 1373 aa, Candida albicans
MRRLKIGIRPQLIIIVCFASLFSLLILGIVTGIYFSANLKNLRLERLLVISQLKRTQVQQAIQYIAYQVMTVSEVDSLTVPLSNYRAGNNSKAVFSEAQNYLQQYVLTTDSFTAARLYDLDLQVVASSFDNMTLISESAQDVVYPLQPNRSMPPVLGTPSGLYFTGPIANNSDNFNSRYFMGITVPVLSNSSIILSQPSISGYLTIVAAAESIRSALNSTSEDDYQAMAVQPVYGDPQKGIDNLSQNAYNGDNEVIGFKLVFPVENSLLEAGTIYNINSSSSMKTALASNSGTATGVKSFFGKKVAIGFSRISVQDNLNWSIVIVQSNSVFNGPANKLRKITIGVVIGIGAFMCFVTFPLAVWFIRPITKLKEATEAITKYKKEKLNSVNSNSPTSGSGSGSGSGSGSRANSDSSADQSLSLDTGKRNSINSSSFSSSYSTGIRLPARIPRSKKIFKDELTELSEAFNIMTEELDKQYTHLEDRVKLRTKELEASKIQAEAANEAKTVFIANISHELRTPLNGILGMTSIAMEEEDPNVIHDSLKLIHRSGELLLHILTELLTYSKNTLNRSKLEKSNFQILEIVYQVRSIFNKLAHDQRVNFKILVKPNIFRKLIIYGDSNRIIQIVMNLVSNSLKFTPVDGSVSVSFKLLGEYDHERSKKLDYKKVCILNDSSSSTVAVPPPTPPSDTKPNPKPKSTPTPKPDPTRSHLVDHNNRSANTTSPLTPVRKPTNQTKNKSITNNVTKQNMKIRKKKKTNKNLHNNNNNNKNDNSDFLMNRRLSGSHKFKYTNDEELSPTAIEKNIDKYLTSSADSDNISVTTLSTVQYETTIFESQFKSKPLPALPVDAKPQVSGKIDENDVNDEDPSGGSIKDDDSEDTINEKQGISSSPSSSSSSNEKQENSPRSNDSTTVTVTRPRHNMMPSAQDFKSYPTFDKKPEYDSNMSNNEIVKNNRVYRIRNMYQPKVWVIQIEVTDTGPGIEPALQEKVFEPFVQGDQTLSRSYGGTGLGLSICRQLATMMHGTLTLKSTIGKGSTFTLTLPLPQTGEIMVPPEDMAEFCEDEFNPAAKINRKVAFEDGDIDTESQQQENPSSEEDTQGDRNVQSSTSSSPPNSSSTDSALPASDSSDIGGTNKSKTTSHGNNKNINAKKRIITNSSASSTKGTKRHTNNDGGGGVNGNHSDDNKDLTLTIDKPSLFTRGSTGTANSGTTSSHSDKKILYPTPTTTTTTTTTTDHTTVLDDISHLRVLVAEDNSVNQEVISRMLKQGGITNLTMACNGAKAIDFVKESIENNENFDLIFMDVQMPEVDGLKATKMIRKNLQYNKPIIALTAFADESNVKECLNSGMSGFITKPISKTNIKKVLVEFLSNEVVTS

SEQ ID NO: 7130 - protein, 437 aa, Candida albicans
MSRQDWFNGPVCGTDNCRSRLYRNQDGLTICQFGHVLEGAVEYNDDPDAGGIVQTRRLNTISFDERGHLSSAVVSNSQTIKTKSNRLYGEDAMALYYRCLQILLKKELKIFIDLFFSEGIRHDLTLIVKNNWVKLLSTDELQENHPKRQVIDTLDLICMIYISALQLQAYPIYIPDLIDNIKLNTIPYIRTLHLIPKHMLDQLPTVYHNRLQPYSLPENSQIYKRLQTTGWRTVGATLRIPTSFYFPFIFRILSEHFLLVNAVDLFVSAFNVLKSTPSFEINFRIKKFIQKFPEIYISSVLIILIRENFRSNDNLKPWLYELNKYELNNEYNSGGTSLLNWSDDKVDKYCDWIYDNLIPKKAKLNDDNTEALNTMEKRLFQIFSLDNDIENTAPETNETPMYLALRSIMNGSELKESGGLQELDTKLDAKLSNILGL

SEQ ID NO: 7131 - protein, 821 aa, Candida albicans
MSRSQIVALLKEQLDTIKQKKSIKLNSLPSTTKPSELIDTIYEFLTSFDPSLELEKLAIQNSQLIELPSNFHKIASSIKYLDLHQNSISYIPQDFFYGFDSLEILDLASNDLEFLPDSLSSVTTLKVISIKDNSFKYISPQLGELPNLNLIEVSGNPSLLPSNDIIRAFQQQKPDLDWVGELKNYLVANRMLINSKIQEAMEKSSQKRQQVPKDSTPETSQTTSDPVIARSKSGSISTSFSSKASRRMGLIIKKSDENSDGSSKEDANNSLISGAVPDHVTTEGIPHVDSPTDISFQLPKSPPTSTPGTTTPSTQTAPATTSTNKNLGVTSTSSARGRSNTFKEIDRMLEKSESVDTERKSNAYFKRLSTLQELPGDELSEYSQPKKPAAEGKQASGNVSKSNNTAASENSPAKPQQQSKLHINPVIIRVSRKILFSFSELHSSIRRFTSFCSDKKVTMKMVSYLYSTKSNIDSLVENLEIMEESGDNSEQIVQALHNCIGSFKSIMKLLHENIQSFVGNIEVCFIRMVYLSVFGSLNELQNAYLLLCPKASAKSSSTEMKQKLSINTTTDADEKLYSTIESATSSTQTIFSELNKTINKGATASANGGVVHPTVASKIKELAKVCAASLDIIKRLNTKLITIRNNPSVTTKKLFAEDINQFIKTVVQTLAAVKAIVKDIPILDDIRASMSNLTKTAKEVTYFLEVSSYKSLLPDSSSTGVSQQPQLISVPSVSNLFTPVAAHAPSLPTSGGQAASNGPTPIRNPSTNSSITTTTLVLPPLNLQESAPLTAPVQSSGQMFAKHGLNPFDGLIMARNNDNQG

SEQ ID NO: 7132 - protein, 636 aa, Candida albicans
MPPKRKLSQSSAESSPVKKSTEESQNVAVTHSPQEYLDFFTSTLDMVFNLRDGDEELAPPFIKLPSKKFYPDYYHLIKQPISLNEIGKRIKTRYSGTSSREFLNDFELLLENASTYNSPDSWIVESARKIVNFVEGQVEEFESTSSTNLSTNKAADDTKKPRIKLKLKSIKKQTETETGPEFGSLVKVRKEEPLITFGRLAEFCINILNDVINHKFPNQGVLSGPFLEEVDTEVYTDYLDYVTKPMSLNTILSNLEKKKLLSPKFPLLDNLKKFHDTTTLIFSNAKAYNNEDSQIYQDAVILEEYFNEQYNKLKSRIESEADKLHPSTPKLKLNLGRIGPSVAEPQLKKKRKRSIKQEFPEEQIHEEEEDIDITQSEPTNADTQDIDEPADSKELDTSKSREVVTERNAPNTMGKTLPLLPEQNSIIQESVIFSSPAVSTNITKFVQQKSSQPATILSRDQEIKKSLFPTQPGNPIATLFSYKVPANGYTDQAHTIALPNGASPFVSFKVSLHNLLYQLKEPELIDDHGILSHLGNDDFQCKLSVNEEEVSNVADCFKEEKGEDVVLGVQYDVKLSYGLNVLSFNCKVAPALSKKIKNTFIEEEEVARRHTRHQLQQMQKTWDVETITFYVVCISG

SEQ ID NO: 7133 - protein, 484 aa, Candida albicans
  MISC_FEATURE (79)..(79): X=any amino acid
  MISC_FEATURE (116)..(116): X=any amino acid
MPLYKEDNFLIIYPGSKHTLFLFGLSDTLSPPQFKIPSIVYQDSITKQYQATNNSENATEEIYPIIESKIVNLDGFHYXSKLYLQRGIANHPTITMNQIPMALITPKLIMGKTINXYITKYVIEYLEITAFNIIDLSLAATFGVGQSTNSTVVYVDDENIQIVPVVGYQAIKFAGKLIKNEGSITISRELKQNLPNLTSQQIEDLKNSDIFEVVIDQQGMVLDYIKDITKTNNDEDNEFDVAKIVTENQNGIPEAIISNTPTEQQQKEQQDSNKPNKELEKNYFIDSKTQEKIWIGKERFSGTNNLVKLISSSIYSSLLSIPDIDKRQDCYDNIILVGSIFKIPGLKEAVLIKLNQDYLVKEPNAIDQSINDPGVNTAILKYQQSTTINDYNEGGSGDNNNSNSNSNSNQVPNSIKLVKYPDYFPEWKKPKEKGGSWHDVYFLGGQIYSKQIYSGSSHHHGKELFVGSDMYEERGPQSIWDASI

SEQ ID NO: 7134 - protein, 916 aa, Candida albicans
MDCLKKYLSQLLLLVPPGTFEVGSNERVGYSILSILEGKSEHLFEVSDFKEILHLPQLQNILQKYSSNNLIDVLNEYVDQLIALSDKYFGKDSVICLQILGVACLQSFVQANFTGPPVSKTAQSLWFPNENTENVQAEAIKLLSIEGQQAYDLMQEPLFLVMSELIFERLLQTPPQLSLFSRSDPTKLLDFVTEASKVQDPITASLCWWKVRGLQVHLSVVSEPPSIISSVCGIILNSSLVNAIAPPDFPELQKLVQIQFLLEVSRIHIHSSTEHAAVSPLIQAKKLSDFQLLLSGAKAKRTKFQNFFTSNLIVLAKSSQNTLYEVETSTPESCQLDSDLLLEKPQYESLEDLEIEIEQDTKRIRYDSFLLQQNTADEKLLPLAMKQEDIPADLKDLDPNNQPALNNLDNLQLLLRLTVLKQTSPASDPLVEEELSALVGRVLYASAGKVNWSIFSRALWERSLLETNKSRTIERGILQMTSLIEEMGIKIKTRIIPESMEEDTSATTASRLRFIHLLPLLPQWAMDAKLAEKYMSLGVLRSAIEIYERLHMSCEAALCYAAVDNEREAENIILQRLATHPEDARAISILGDIRQDPSLWEKAWEVGHYAKAKASLSHYYYSPPRKDIDLAIKHMFDCLTVNPLSYENWYFYGCCGLESGQFELASEAFTRCVSLDDSNSYAWSNLASALLKLDKTKPAFNALKKAIRSGGESRKSWRIYENYVNVAAKLHEWNDVLQGCRELIEIRKNEGDTAIDIPVLEKLVEILVSEEFPGDGERLSHYQSSCIDLVCNVLPKVITSSARCWRIVARVELWRKRPWAALECHEKAYRVMVHNPELESSETIWNEIVDACEDLVSAFESLGELPGKHGAGDLVCKDWKYKARTTVRSLMSKGKDMWEDSPGWERLQNMKRDLSN

SEQ ID NO: 7135 - protein, 372 aa, Candida albicans
MGVISFYLIGQLLYLIRKKYTTTYRQQQQYQYNMDSKHSTSSSSSGSLATRISNSGPISIAAYCLSSILMTVTNKYVLSGFSFNLNFFLLAVQSIVCIVTIGSLKSLNIITYRQFNKDEAKKWSPIAFLLVAMIYTSSKALQYLSIPVYTIFKNLTIILIAYGEVIWFGGKVTTMALSSFLLMVLSSVIAYYGDNAAVKSHDDAFALYLGYFWMLTNCFASAAFVLIMRKRIKLTNFKDFDTMYYNNLLSIPILLICSFIFEDWSSANVSLNSPADNRVTTITAMNLKWGFNPLVFLSVRPGCVRVTSSPTYSRVGALNKLPIPLSGLIFFDPAVNFWSVSSIFVGFGAGLVYAVANQNQQKEQSHQLPPPK

SEQ ID NO: 7136 - protein, 666 aa, Candida albicans
  MISC_FEATURE (223)..(223): X=any amino acid
MARKKSAAKKAREAAAAAAATATTTNSTENAKDIKFEKPSLQKLPQNKKTLSPSKESDLDSDESLSSSSSSEEEDEYGDLITEDVETGINQVLQTIKTDPSKLLDPNVKFFEDPESIEYNETTKKHKPLYITDYNRMQLLEKAKGEKHHEDEEGENGSVPFDDQKTIDGQKSFVTVQKEEKDQLLAEIKKAFDEDVEDDSDSDSDSDEKEQAENNDDDDFFRXEGRETIQNEEDKEEIAVGGSGSNLPDPNQDQQGFLNAFLDSKAWIPKKGDKIINLDKIDQTDEEEFDDAVEKFENAYNFRYEDPNGGAEIISYARNQATLRRSKTNSRKRQREKRQELKRQENEIVQDLLKKKKTATVNKVMDRLSKIKQAIGGDNINVDDKTIERVFGDSLLNDDFDDADWDNKMAEIFNEQYYEAELEKPTWDDDDDEIMGGDINSDEEDEEEQEEEEEEKEEDNASEEPPHKKSRKDLLKAKKSAKKEKQSLKEKAQAIVEANTLKLMDEIEEERGRQRENEHGKEIKFKYREVSPETFGLTTRDIILADDKQLNNFISIKKFAPYRPKELRLKDKRKYTKKKHLQEWKKETFKNLKLPKEIEQNGNDDNSNEIWIPNEDGFDTNYSNKGKNDKKKHNKSKSKTKTKSKTKTKKHDDKSENKNDLKISSK

SEQ ID NO: 7137 - protein, 320 aa, Candida albicans
MVHHKVTIIGSGPAAHTAAIYLARAEIKPTLYEGMLANGIAAGGQLTTTTDIENFPGFPNGIGGSELMEKMKEQSQRFGTEIITETISKVDFSKRPFKLWTEWNEDAEPITTDAVIIATGASAKRMHLPGEDTYWQQGISACAVCDGAVPIFRNNPLAVIGGGDSACEEAIFLTKYASKVFLLVRRDVLRASTIMQKRVTNNEKIEVLWNTEALEAKGDGKLLKSLRIVNNKTKEEKDLQVNGLFYAIGHIPATKIFADQLKTDEAGYIQTTPGTASTSIEGVFAAGDVQDKIYRQAITSAGSGCMAALECEKFISEQEA

SEQ ID NO: 7138 - protein, 820 aa, Candida albicans
  MISC_FEATURE (317)..(317): X=any amino acid
MSDSTLSKISELIKLEDDLAKIGSIRQQFLKEKSSVDVKLSSTTQVQIDSIMKNLANLHNTMERLDSIKGSIGEVQQVHDSTIGEVREYDTIKKMTMVNQFLHQVGSLYEDISGFKRFVEALNEEIQRELQGLQNDLKYPLPNFVRIHHAYTQARNFVDYLEVYSTRLSDDLQSIVYKVVSPIKTTIKLFDELLNEGIQSLTEVTKEGNFECFFNILGVVTWEENEDLKVSLLKSLDMVSADPKTVNYKTFRGRSRNYMKFFFDKSRTHLYEIFDSCVEYYGNDKILVYDGLYWLEDEMRFVYTTLDKLFSCEIGVXSAFIQDVYYTRLHDFTMDLINTDPPAEDLLKILSYDSKYGAFVSEFGVKQKSIIGEELKNSVLDDYLNNITTKMKEWNDNLIRQETKTFTERPNAPDIYPIESTIEDLDADKNEVQLTIDLNVYVMPDFKIALTMLKEQADVAAESKYSRILVEVIESWSECYVKRIANFREVVEDEMDRYMSVFNNEGYLIKESKAKRLFRKKPPVVDIDSLSPEEQSKLSREGLIEYLAALANSLDISDDIMNDKFAPTYKEKVHTNYHARIGKAFDVASESSNALISEILSAITDIIMNDLTPALCKLFTKKWYEDGHSQTGEPTLAKLVVETISEYMGEMRQYCVYPVYQLLFVIFLDNFIPTYIRIGYENILHGDGKKIDPQATKKYKSFSEGITRDIEIFFSGLDPLFTRKDGEYFFASLNAIELLSVLGTVEVNNIKDVWQHEVLPKFYDCSVEYIRGVCLCRKDMDKSETKQLVSQLQEIKVEYHQAVQPPDVPIFTLNDFEFQD

SEQ ID NO: 7139 - protein, 595 aa, Candida albicans
MDEVQMETARIQSPKSYLYTTLATTHLGEIASCIISILISNGRLTAREISNRTKIPTKNIKSALVSLIQLNCIYYWQEEKDRKFYYSLKETGLLLFVYSGDIINHIKRQYGEDGAEIIQNILIHGHVKIEDYLTQFNHDKSMKIDQENKFLKLFNDNWLIKLQDYHFHSLDDIWNKIFEECLKDTPRSSVTSEIKRVAEAQAKAKIKLNTLLESGTTGGGDIFTEVNGMKKLKPDLVVTFNLSRFQKHLRTNAFVNMVRSKIGVLTAIVYDAALRYIENKSPPMDYPLLDIPGLINDPKDVKEYILSIENKLVNEKKITFSARDIQRLLPKDIDFKNSVITPTFAKPKRPLENGSSPTLKKIKLEDGIASSTSTSTSTSSSTSSNGTSIDLNTLEQHLKLLLNGTNTAFVNEISPGNYTIPFSHLTNILKQNNFEALVKATLGDYAFRILRCVKSMKLCDEKAICNGALLKEKTVRSELYHLIKANIIEIQEVPRSADRAASKTFYLFRHKSNSNFNYLKNCLIYDMAEILNRIQDFKLEHKILLEKYKLVEGQEDQYLLDRELKLLNDLQLREIKNLVKFQRIKSLYSLYSLVD

SEQ ID NO: 7140 - protein, 323 aa, Candida albicans
MLPFKKADSPFKSNPVSRVGSSTRLNQLGNIKSNPTTPNAALYVTSSLNPSKNLPTNAANVKSRLQTQKDLDAFEQLPMVQKVNEYERLLNELSEAVSQFKNDELQEKIGQIITCNDVLKQQIEDLNKHRNYSYEVDKLSDRNKILEENSKFILKELVSYRNELKKLPKLPKSDKMVNRNVDVDDILKYAFKLAKFTKAPATVANMPFQIHPNNYVWPAEDSLRRGMLAQASLQAEEIIRHELGETDKENSNEVKTESKVDHDDDDDDEMEDVRISNENTNDEQRSKPPAASEHDTSKRKEEQNQQPVDLNLDLFDPDDEYSD

SEQ ID NO: 7141 - protein, 452 aa, Candida albicans
MSNRLESLNPRKPVSSSSSSGSKSAAKFKPKVVQRKSKEERAKVAPTIKQEPQPRQPLPNSRGRGGARGRGGRNNYAGTHMVSNGFLSAGAVSIGNSSGSKLGLTSDMIYNSNGDLSSSSTPDFIANFKSKQKGSTPGGQSDEEDEDDDPTKINMTQKYRFNEEDTVLFPVRPFRDDGITRAENEIATPDVEIKQEPNDSTAESTPMPISLTQSRETTVKSELIEEKIEQIKETKSKLEKKIAQGGDSFVSEETDKVISDHQQILDILTGKFDKLSTKTEDSHQKQQTQKDDVDDIDVELENDKTEINFDDQYVLFQLPKHLPTYTQPPSAVKLEPGVESVEVDEPATEEKEISKLATNNSKLRGKIGKINIHQSGKITIDLGNDIRLNVTKGAPTDFLQELALIEINPPPKPEDNEEEDVQMVDDDGRSITGKVVRLGTVNDKIIATPCIQ

SEQ ID NO: 7142 - protein, 844 aa, Candida albicans
MEHPPAALRTFSTQSTSSLNSVSTVSSSRIVSSGPVNINNFNKPSTPKDHLFYRCESLKRKLQKIPGMEPFLNQAFNQAEQLSEQQALALAQERSNGNGHSNGKRHQSLDGAMNRLSVGSDSSSIQGSLTRMATNASTSSLISGMPNNNTLFTFTAGVLPANISVDPATHLWKLFQQGAPFCVLINHILPDSQIPVVSSDDLRICKKSVYDFLIAVKTQLNFDDENMFTISNVFSDNAQDLIKIIDVINKLLAEYSNASDSGGGDEDVNMDVQITDERSKVFREIIETERKYVQDLELMCKYRQDLIEAENLSSEQIHLLFPNLNEIIDFQRRFLNGLECNINVPIRYQRIGSVFIHASLGPFNAYEPWTIGQLTAIDLINKEAANLKKSSSLLDPGFELQSYILKPIQRLCKYPLLLKELIKTSPEYSKQDPHGSSSSTSFNELLVAKTAMKELANQVNEAQRRAENIEHLEKLKERVGNWRGFNLDAQGELLFHGQVGVKDAENEKEYVAYLFEKIVFFFTEIDDNKKSDKQEKKSKFSTRKRSTSSNLSSSTTNLLESINNSRKDNTLPLELKGRVYISEIYNISAPNTPGSTLIISWSGRKESGSFTLRYRSEEARNQWEKCLRDLKTNEMNKQIHKKLRDSDSSFNTDDSAIYDYTGISTSPVNQSTQQQYYDHRGSHSSRHHSSSSTLSMMKNNRVKSGDLSRISSTSTTLDSFSNNLNGSPNTTNPSLTSSDATKTIPTFDVAIKLLYKSTELSEPLIVNAQIEYNDLLQKIISQIITSNLVADDVNISRLRYKDDEGDFVNLNSDDDWGLVLDMLTSEDFYQTSSNEKRSVTVWVS

SEQ ID NO: 7143 - protein, 589 aa, Candida albicans
MALKLKLKMPSSSASNSPQPPPPESHSPEQPKLPKLKIKAPSKTPVSSTPDSSMALKRPQEEQSTGEKPKKLKLSLSKTKENGRPKGLPRVRIKPTRIPGEGYDSEAPDLEDDPLIEQGIIIRFLNDSNLDFVHNAVDSGDLTGLNVKWVTKEKAIVNVNSILYSARLIDLPTVTEIFKTVDRKNVFKTLDICQILLVLHVVDPAKLNIDTDFEVPEEFLFNHPFYKYVKNNEIKKKRMVLKDGLLQPFQDVYRRFRPTKVDHRVILDIESKVDELIKLDNEADESHFELLDSKTAQQSRFGTSATPSAVNSPVAMRMEGPEVEPGRFSNVQDHENEEDDEEEDEEDYDDDDLQDDDMELHLEQELEKVLDGELSESEVTIPTSMAGILTNDVGNGISIMTNGEQSEDIDGDEQDDEEEEEEEEEDGDDEEEEEEEEEEENEEGDSESGKQHVKLLEEEIFELEKAVAHHQKNLSTASSKMLRMKFQNTYTSLKASLDSKKRDLAKLLDEQEQQQEQKQPKTTVDEKSQEAEHSVEAEAEIEAQVEADAEDGDEDEDIDQGDDMNQENNNNNGDSDIDEDNADDLDDLF

SEQ ID NO: 7144 - protein, 741 aa, Candida albicans
MSEEDVNKSNVMVESVDLKQESVKNQDDGLDRKTLFVRSIPFEATSEELSEFFSQFVPVKHAVIVTDNERKSRGFGFVSFTLDDDCLTALVESRKTKFKDRLLRVDVAKRRDRKPQEGNERQEKSHVEPIEKRRARLIIRNLPWSCKKPDELKKIFSKYGAVFDAYIPKKKGGQMCGFAFVIMKKNSAAEKAVEGCQGLKIDGREVAVDFAVEKSKWEQMKDEEVEEEEDNESSEEEEEADSTNKDENDEEEEDKDDESDNDDASSEFDELNEVNSDKELDSFDEEMEEPEKKEESSHPKKKSNRQEPFSIFVRNIPYDADTESLKEHFSTFGTVKYALPVVDKETGLAKGSAFVAFAKEDAYLDCLDNAPTVASTSMLIADDVSPSYVYQGRILSIASAVDRDSASKLADRNSLKRKEALGKAPGEKDKRNLFLLNEGRITENSKLAQYISKTDLELREKSYKLRTQQLKKNPTLHLSLTRLAIRNLPRAMNAKALKALGRKAVVQFATEVKEGKRQPLSKEEVNRSVKFKHSIYGADAEEEIAKSKNSKHKGVVKQAKVIMEVKGSGETGRSRGYGFIEFRDHKAALMGLRWLNAHEVSIPEILEGLTDEEKKLAELEGLNKRRLIVEFAIENAQVVKRRREKEMIARNQNKDNSKKRKRDDNEEEDNGDAESTSKGKKFGSSDKKQKKARKGSQKKGNMNKGAPKSEESQKEPTNKSGLSENVKKIIGLKRKRRKSKK

SEQ ID NO: 7145 - protein, 743 aa, Candida albicans
MDIHRCRFVDYTPHTITSLAFSHKSLLTSLPTADVRLAVGRSNGDIEIWNPRHNWTHELTLPGSKGRSIEGLCWSYNEQDPLEPPRLFSIGGSTYITEWDLSTGRPLINYDCNAGIIWCIDINPQNDRLTVGCDDGSVVIVDISGGRGSLEYDLICQRQDARVLSVKWANNEHVIGGCADGRIRSWSSEGETKGRLVATMKVDKAKTESTLVWSLTVLPNKIQFVSGDSTGSIKIWDLTRFTLLQTFKIHDADVLCLVHDVKEEKIFSAGVDRKIHQFDLLNSKNSSKWTHSFNRLLHSNDVRSLAIFENKNYNLLVSGGVERAIVVQNIETFYDGKYKKLLINQQQSNILIVPDSKLVILWQDQTIKIWKVLPDGKHVLMSKLTLSADENITSVDFKDNLLVVAKMTSVRFFELTEISDNKFKIQKIRDDKFDSLVEGAKIVKFIDANKVLILTPDEELYTFDIDSDEGKIELNGEIELLESTQQQQQQQQRKNQHLLRINNLVLTPNKKQIIISRFNGSIEVYPIVNTETEAYVLTKLSSYPHLIECVNDEKLVVINEENKIFEFFINDKDGQLLTPWSKRNSEFLPRQFISLQDKPEGMFIQQKQEKLWIYGSTWLSFFDLSMNIPISKIYKNTSTSKKRNHDGLSMNEEIGELEDETEEIIEASLKQSEIDRLRHQIQTEDKDNQNNVDKTKKPFWITEKYRPIMKAANFGGNDDIIVVERPYSSLQTGPAFDLPKIKV

SEQ ID NO: 7146 - protein, 434 aa, Candida albicans
MSANDEYSSDEESFDESTKSKVLLGFVDAPIISDGKDPEDNDLPTIEDTFIGGQPVWLHPDSKPAEKSLTCDVCNGKLALYLQAFAPIDGKLYDRVIYVFGCKNTKSCSGKKGTVKVIRGIIKDSETVNRIKKENQEALQKDMEAKLKLEKQKKFNDELTKDLFKKKDTPEASNPFGGNSNPFSNPFGSNPFSKKPEEEKEEEKEKEKETSKSKSYADVASKNAPKPKSVKKLQDDLPEYRGLFVYVDNEKFKKIQHDPELEKYKHLIDKEEYDESDILEKPSSSASASGLDNPQASQISNMLNDKYFEMFSNTVKHNPGQVLRYDLGGKPLLYSGKDDVAKKFLAQPANIPRPSFNPSSERRFELQLMPKAIMDLEDLGNNRNVGINDILNGMSWGTIIVCTDEEDFIPEENFDANQVGYIEEWCGVQWEESV

SEQ ID NO: 7147 - protein, 516 aa, Candida albicans
MYKTCSYFVVCDFFTTVHDPQKSKNAEIPKSKQKQKQKQKQKIILINVTHSIIYPLIVAMSRQSFYADPSSAGRQMKYRKDLFPLLDTREITACLLECEFNVTQELIVKPTADFVTNLFEQFLDTFMGIPLGTIRKKARKMSRINPLESDQANGKPQQSPEEEFNDNQENDKTKDTFSALQLLTLHRYLAIFFSTCGINDFVLTDIARPDGYRIRRILSAVINFIRFREDQSPKFDHLANECEATADKVSEVQAENSATMQKINAIKEKLEMDSENDESNRKNLQYINSYNRKLETKLRELKVMQERLTKEHDDYKQEKALLAKKLYDINFLYNETQEQVANLTKYAETDLSILVKITEDLSNDLSSMQTNYKNLEKSYQNMGITIDSIQVNEINLKDLLKLAEDITRNVEKRQIEGKILKDNQDNLDELTRKQMELEGQILIVQNQLNKSNKKYQDLIVQADKKESAVKLKLEETKQEFNDILSEKEKHNEEHIRIMIKIGREFNKNYRYCRCIW

SEQ ID NO: 7148 - protein, 365 aa, Candida albicans
MPPPLNSNILYVGNIPYDWDESTVESVVCGSGNIVDVRLGFDHVGKNKGFCFVEYKTVQDAQRALPLLQQVVIYQNGRNKKLRVELSKEGYKAQKIKPDTRTIMQLNRSRLPANVRLPNEMIANIPYVSQVPVLPSSGFRSGNMPFPIPQMPLPPPAPPIVVGGPIQQIPSRLLQASKFLPFAPNFKLETANNINVLLSKIPPPQFIELLSQMKSLSQTDPTMVRNFFQSQPEISLSVAQALLLMGFIDNGVIEESSKSISSTPQVQTVQPGIQSTFYMGGQIGGYNNNMYINNGQNFQPQQQQQAIPGSNWPYLPPHVQQKLVNMPPDQAHLAAQILSLPPDSLQQLPPHERQIVDALRAQYLS

SEQ ID NO: 7149 - protein, 564 aa, Candida albicans
  MISC_FEATURE (136)..(136): X=any amino acid
MIPDSIISKQGPLGHVWLAANYDKKLTKQQLMNTSIVKSTEYIANHPVITNVSVSQELPSDLDSTNTITLRLSGSLLLGDCRIYSRKAKYLLDGVNGILYQLKASFQLSSGGQFRPSIIFSIQAIYLSNNPFSKIXRGLIRGPSFLNQFGQQNDLDFFDKTGHSKGSGFSGMLNPNASQSSSAYSEYDNSIELPRYEEEAAPPGYTEDFELDFDLNLDDDNSIEYDRDASVSINDREISIISDVHKERTTGDIFDLNFGQPLDDLNDDEAENEEDRQLPSNSEHQERSAESDLQPRRVRQKRTRITEDGQIITNNRKLVVDSEEAMEGLAIQQLKDNQEKILSGQDSAPYISLNLSDFEKLKLIEELAVPVATKKRKLWNLNAELQYRCAELALQEQQQHQQYEENNQQNDFHLDQSFDNDSMDFDLSLPDFDDQHSDNFSDAGILDDEVDEEDDTNYTHTARVTEQIGQELIELFKSSNTVEFEKLIETDSEIHHRNPDKLPLGVVSKNKDRINSRKEATKCFFELLVLATNNCISLGQIPQETTIAGDISITSRDRLFSQFV

SEQ ID NO: 7150 - protein, 525 aa, Candida albicans
MTDILEAYKQSLSELTFNSRPIIDNLTIIAKENPNVADGIVDLITQRIYKTIPDQKLFALYLLDSICKIIGNPYNILAGDEIFNLYSHVFQLVNETIRNKLVNLFETWKITKTRGTNDPLFPKAQLDKIDSFLKKAGYPKAKTNSGVMSQQSLVNDINQLIPIFEKKVRTNPNSKSQDRLRALNQLRSILSSQVMKANELQAIQNQLQNIKEQELSSSSSSASKGGTPIPTPGPTPATTPGPSSIPPVSRVNPAFMIFNDLVLSGLVKKDQEPIPGSKPVYSLVFPQTKYVPSASGLGSNSTLEDLLLSSSSIQRSDYDKLKFTEMVKVSKLSFNNLQDFIKNNKPTTKLRDLLYDSKPSKCSICGKRFASDKEGADKKRLHLDWHFRINKKLSNKGSNVQSRNWYLDDYEWVHFNENDLLEYSTDVRIPDITQEMDETISTDSQYVIVPSTETNMNNKCLICREQIKATYNDEIGEWCWYNCIRQPGEPKNSRKIVHVTCYNESSKKRPADNDDLNPHVKREKF

SEQ ID NO: 7151 - protein, 284 aa, Candida albicans
MSDLSAQLSAFKNKIKSGPSVIVPRKATFTQSPSSPLSSSTTTTTSKNDANVKKRSTTDSVTRVLKKQKANMGEMTGSHLSTQLHLAVEYIKEHDQPISVEKLQNYLSFDISHTLLPLLNEIDRVKYDESKGTLEYVSLHNIRSSDDLLEFLRRQTTFKGTSVKELKDGWAGCVAAIDELESQGKILVLRNKKENAPRLVWANNGGELGYIDTEFKDMWDQVKLPEPDVLYQKLLDQGLKPTGADPNLIKKQPQQKEKKQKKARRGKITNTHMKGILKDYSQLV

SEQ ID NO: 7152 - protein, 636 aa, Candida albicans
MSGPIICSKFDQSGNYLATGMVALDSHQVKVQSITSSQASLNTSFTLEKSNKLVNLAWIPSDSIQLLALCLSKGSILIYSPQTNEIVSELISSANVSILDFHYSTTTRTGWSCDIEGNVYEWDLNSYLLVDSFKVNEYIESVDSINRISTVMFNSQPHLLLGSNAVYLFNIKQRELVKTFPGHIQPVNSITALNNDMFLTSAKGDRFVNLYQLDKTATKAVFVGSSSVSSLSVSIKDDKSVLVIINEEGDIEIFNNPLADAKSQVSTPVPKKKRKQVGVSSRSFNASIKLSRPEPEIKSPQDTHLFINAVSTEDNLITFTWLENSTIPFFDTLKWIDETGSLLLESAKVLLKSKPNLKVTQHLTNGHDVAAPKLYTEGHTIVSDGSNIRDLEFQDHQEDEEDTEESLAEKLERLAMDQTSQQKSRRRKLEEARSGVSLSIVLTQSLKNNDQALLETVLSNRDPITIQNTISRLDPYSCVTFLDKLSEKIQRQPTRFDQVSFWLKWILVIHGPTMASLPNLSIKLSSLRAVLNKKAEELPRLLELQGRLKLMDDSAALRNEFSAEEIAEDLEERSDIEYNEEIDDAKYVGVISDDESMDDVDDFDDLDDEEEEEEEEEEDGIPDAANLDDREDSDLE

SEQ ID NO: 7153 - protein, 722 aa, Candida albicans
  MISC_FEATURE (707)..(707): X=any amino acid
MALNKVQLIKLYSNRLVKSLVPVEFGEAFIQSIINDLQTTLLNTSSEEQNLSIIINKLKMQFLSNNLKNEWVEFQNIVNSLSKFKSLDQICNYLAFLDALRDEKPEDILSTSTASLSPGKQNVMINTVNTALTLSQLIEPYYDTLSEQTILTYLPYTMLGSDSKIFTFSNNYTRLEIPKDINNSFSSLLREVFEFAILYKQLAIVVDRYKGTLVSAIKTAYIAILEAQLNKYVNDINNIFNNKPNSILVVYNSIFPWISILRFLYRVSNRLNRLDGYEFLTFIYSFTNHGDPKIRGIAVTAFTEVVKPYYNIVEHWIVKGELIDNNNEFFIIFDQEQNEFNSIIKLLPKKIPAFIKSSDKIFQIGTTLIFLNKYCRELKWVNQYNVKYSAILFNNHQGLASMTTNEMIKLIDSQYNEILTFLTQIIQGNNKLLTHVYNIKRYYFMETNDFIDAIMVKGKDVFNESSVNISSTYLRKVLQDAIQISSVKNFEYVDRLDSRVLNPQHGNLGWESFTIEYKIDDLPMSYLFEGHQHLQYLKMFHFLWKLRQLNNLLNWHFEMFNELNHNVVTKLSSRNRRPLAKSLSIITSIRFHFTQFLNELIAYLSYDVIEENFQQHIVRKLFYNKNDQDLLLNKSFMNLSEIDPNNDLPKFNVNLLTIDELVELHGTYIDSIINSSLLNEKLKGNETNISYIDQIFDILQTIFNFIXTSQEFYSLVVLWNPS

SEQ ID NO: 7154 - protein, 521 aa, Candida albicans
MYLSNLGGQSRKTGIRPKTNLKTDKYGMEDVDDFFEDDDDDRINKSKGQKSTIALPRGEEVSNYKSTISQPFNNIARKINFNQEDDETFNLPSTSSSSATVTASSVSNKKSPVTTQQSPLRSPLPEQDYDYNQFDVEEDYGDITEEDKQPSPPPPVPKTKSKAKTKAKASTTTNTNTKSTKAASSFTKKMALGKTKRLPSSFDSVNTSSVTEYYDDGDEDNDRDYGESPPGFQLKIHMVDSTFQCYSQPSSNNNKTRRKIIKESPLPSPPPDNPNGLRRSKRTRIKPLAFWRNERIIYSKDLDYDDEQDTTLARDIHNIPLQSIKEVVHIPDNESVDNSGSPNTRTGAAGSTKTRSNRKRTYKQTTTTAPTDYDYESDPEISGSEWFKEDNLSLEVNDNGESKLRKIAYNHKGGNYVKPTDDNYLVASLFDEDKSFFAGGMLQLPSDGFKPPVTVTGSTYMFNVMKGLIQVTLNENMFVVTKGCKVQIPEGNEYSLRNIGQGDAYLFFVQIRKPEEIDTNW

SEQ ID NO: 7155 - protein, 393 aa, Candida albicans
MEQLTVAERYKLAIQQYDNLQNISERQDSVSYQKRLTKLISEFKLILQLVEQLSLFSDNEQIEEISTKYIPFLNLWYYIGELYTKLLMKDDDDCDGDDGNIIINLNYKFENLKLGQRFIFTYLENLMNYDDILTLEQSKKLKILLKGESYQLNPMNKRQEKIDNYKLEQELLKKLSILNQEDQKEEDINKFDEEIIRTIYLDQLKYFILKSFNLLESINMELQVLQHRPTNDDLNSSSSTSSNRLETQDSRSKNKSKKNGGGGDGGDDDDDDDYGFTTKLESIPKISYQVSDLINKQGKILQPFTITSQRQKLKEKVFGTGQILPSMTVEEYLDYELANGKMLKDEVKDNNPANKDDNDSDTEDSEAEEEKRRWDDWKDENPKGAGNMKANIG

SEQ ID NO: 7156 - protein, 531 aa, Candida albicans
MSFFGLHFQLNSLTLNISNMAKKSLSEQISSLYTPKTDYDIEDHDLDVSKDNGIFQHHDGGSENESEDEDTGLRNEHYVESSKSKLRQQNEGVNLGEKYVGNVTSRSKLYDDEDDKQPTEASSGEELDAESAEEEEDEESEDVADDDEDDQESDRSSSSDAENDEDENISHKRELLKQLMSKERSHIVNRLSQSATNDALKGYSIQQQNKTFEKIIDVRLKFQKSVTSSNMLPINTSTYSETKSEDSDELVTKAKKQLYSLLDHLFTLRNELDESTSVKTPKKRSFAKYSEVTSAADAQLNSRRNQILTKWSAKVANSSGRNAMNANKFKTINQSFEQQVNNNLSDMDRLIKRTKLNRRNVTPIGYTTKEEDDHENGNKNKSIDEDDDDIPEDTSVRKKTQGLENDYIFDDEDFYRVLLNDLVDKKVQTSDPTSGITISLRAAQKSNKLKNNVDTKASKGRKLRYHVQEPIANFETSRGSWRWNDDQIDEFFASLLGQKVNMNEIDDEQEEEQENDDNDIIPEDNGIQLFG

SEQ ID NO: 7157 - protein, 1073 aa, Candida albicans
  MISC_FEATURE (644)..(644): X=any amino acid
MSSESNGSASKRRKVLEPSKFRPGFIRKVRVWNFTTYSYTEFNLSPTLNMIIGPNGSGKSTLVASICIGLAGSINLIKRKNLKSMIKTGQEKSSVEITIENYEGHSPIVIKREFTAKESNWTVNNKRATESKIKDIRTKFNIQLDNLCHFLPQERVAEFAGLSPEKLLMETERTLGDGHLLIMHEDLIAKDNESQQLGNKIKDIEGRLAKLHEDRSKLEEEARKLEEYDRKSEEVDNHRLLIPYAKYQDLKNQRTHLKRLRDEAKHKLRTFQANFKPLENDIANAEKSINEESEKYSHLKDSLKSTLNEINQHKSTQKQVTTEISELRANLKSYQTRAEQKKKELEEIKKEIAELQEKQRGLPQVDPEEMQNLSTESTSKRHELRDLEEQFQEVNSQRSDIGRELTHLTEQLRGAEKRLSTKDKLDMLVSDARQNGRSYRLRDEAFDVHKRLRNEPEYEGRYFEAPVISCNVPDINYAAAAEKIIDNNTLFAFTVTNQSDFDFLSKFSQQTNTNTPLRMVNSVVNPTHEYSKHQLREFGFEGYLSDYIVGPKEVLSMLYSTSKIHTIPVSKHQLSSEQVRRLTNVSGNDRLPFTKFVAGDTLYNIQRSKYGSQQAVYITQKIGTSQYFGVQGLSQEAKYAINAXISNLKEKIEQKKRAYEGHRNNIDSFNERLTEIKHYIHDIKRKQSELQEISKRAGQLQTKIELKKEREQKLEKDSKRDYSSKIRMFEQKIDEKYLASGELFASLSNSVLELCEKENQMKLKKLEIIGYKNKKLTAESLLDELGARQEKLKNDYNRYKREYDEIKQSEAFKEIERQNEAYTDEERSRLADLAQVYVENGTFTEATIRSKIDLLEDELSLLTTADRGSIDALKQKLQDIQLAETNLPLLQTEKERLDTRIKGIQEEYEGELTSLVNKISLAFNKRFTKVASDGRVQLAKSERFKDWKLQILVKFRQESELKVLDHQSQSGGERAVSTIFFIMSLQGLTDAPFRIVDEINQGMDPKNEQMAHRYLVHTACQNSKSQYFLVTPKLLTGLYYHPDMVVHCIFTGPYITDNEEKRDNSMGMLDFAV

SEQ ID NO: 7158 - protein, 575 aa, Candida albicans
MFGSTNNTSSGGGGLFGSSNTASSTGGGGLFGANKPATTTTGFGSQPRQGSNLFGSSSNTGGGLFGNQQQQQQQQANTSGGLFGNKPATGGGLFGAQANNTSNTSGGGLFGGQTNNTTNNTGGGLFGGQTNNTANNTGGGLFGGQSNTTGTNTGGGLFGGQQQQQQQQSNTTTSGGGLFGNKPATGGGLFGGSSTTANTGSTTFGSNQGTTGGLFGNKQPNTSGGLFGNTHQQQTQQPPQQQQQSSGLFSSNTTNNAQPSFSWSQPPQSSNSSATTGDTNEIQIIASGPFGSNTTQQVNNNTYTYTPAINDQLTKIWEQWDPNSSKCALKTYIYNKFSDQEINVLLNQPRPANESAEDWENAMIARPGPNYYPIKVNSFNDVAQRIETQLDYVAKSRVLLNNINQNLDNLSSQHDLENTTRIMKAKSRHTKLSRRLLRLATILAIVKLKGYPLLPEEEEISKQFELLTSKLNDPNSSIGKLSDVFARLAILKERAEEFNYQCENSVNLLNNTLIEGEESTSKKGSVTTAAEQSDSNIEEAIHKLSKVLLKQQMGLNYLNDILEKDIEAVNKISKK

SEQ ID NO: 7159 - protein, 322 aa, Candida albicans
MGFNYIKLTYRHLLLPPTVYTYTMVQLSPAEKSYLYDSLTQQPIIRPDLRSIHQYRPLVAKTSFLPGSNGSARVRTEDGSECIVSVKSKVVLISEEEEEQQQQGHNLIEVDIDIVGHRDDSNYVANLKFQLTNLLQQNFPFEVLKLTSKYTFKLYIDCIIISHSCYPLSLISIANYLALKTTRLPLLISDVNDEEIAELPTFSDDWENAKLIQDYHLNANTRKGGSSTKFQPPIFITIGVIGKNLILDPSFEEEQVLENGLIISFYNNKVITPISNTNFAVNSNNSNFKGLDQSLLIQSLTLCNKYCPNIIRALDSLIEEDN

SEQ ID NO: 7160 - protein, 365 aa, Candida albicans
MAKTRSKSAATAAATSPKASPTAAKVTKNKVTKPSTASPSKTTKTKAVKKTTTKKATPKKEEEEKKEVHVETVTKDSSLIPEEITEKAISELKKYISRQSQQQQETENDESKKSKLFDEDEDDEDNKQNESFYLTIDSKKFWSSKPQFKPKSFKLTKPLYDNNQTTTTTSNSNNDINVDNNICLIIRDKLVKSIDELNELENNQSLSQITQIIPLNSIKTEYKSFEKKRELYHQFKIFLVDEAILNIMPNTLGKVFYSKGSSNDKIPIPIKVTSTTTGSQTNGKQLSIVTLTNQLNKVLNNTYYLPPIGNNITIKIGKLKFDNNDLIANINDVVKNLDLDTIKSIHVKTSTSPAIPLFYTKSLSQ

SEQ ID NO: 7161 - protein, 491 aa, Candida albicans
  MISC_FEATURE (316)..(316): X=any amino acid
MSKEESKVIKSALKGSDSTTTITTSSSSSSSSSSSSIQFRIFVGSYEHNLLCLSVILDPSNIKDPIFQPIFHFQAHSLSIKSMDLAKRYLVTGSNDEHIRIYDLQKRKELGTLLSHNGTITSLKFSTEVSTENPQNEDISSRGSSTSSSSTSGYSQKTGKWLLSGSEDGKIIIWRTKDWETFGILKGHTGKINDLAIHPSGRVAISVSQDQTIRLWNLMTAKKAAILKIKGKDHLGQVGDFVKWSPDSKGSFFLIGMLNQILIYKTSTAKIIKKIKISPTLMCMEILKFNNKNWLVVGLSNGVIEFYDFNEKVLAXINEETTTTTTTTTSDVDDEEKEEDKVWDSKPEQLIADFTLRGHTNRIKGISFIQDNSETHDIPYLVSVSSDGRIVIWNLLLKDQIAVYDTGERLNCVVTSPEGIEKSDTMKRRFTSLSQITGKGEIDNNDIPSESEYETDGEEIKNIMQGEKNKKGKKSKKNNIKKKRKVSVTLE

SEQ ID NO: 7162 - protein, 1015 aa, Candida albicans
  MISC_FEATURE (834)..(834): X=any amino acid
MQQDDDSLTNRSSPPMASKDSRLQPPTRTRIRQQKLKYTFIGYIIVLIFLAITQFIGVGFFKEGFLLSRTVLPNISNCSQQIDCMTPRFEKAILLVIDALRFDFVIPIPGSNEYYHNNFPILYDLASSSQNNAILLKFIADPPTTTLQRLKGLTTGSLPTFIDAGSNFNGDAIDEDNWLLQLHKINKTIAFMGDDTWKALFNEYIHPDFNFPYDSLNVWDLDTVDNGVIEHLFPLISKENCTKWDLLVGHFLGVDHVGHRFGPQHYSMKDKLNQMNQVISKVIENIDDKTVLIVMGDHGMDSTGNHGGDAPDELESTLFMYAKNKKFLKKDQSFYNISGLGENYRSVNQIDLVPTISLLLGLPIPYNNLGFPIDEAFGNVDELSVASQKTINQIKAFRDDTPNLSGSLIEQYQSYATNYSRFGGKSKKHYWQLIEQAKQYQSLSLEQCKTLWARFDLRFIGIGIGILFLALTFMITYARSIPAVRVSTMSFEFIGSVVAMTIMGLVLSFSIYIVLKPGDFTLKICLAIGAALGMVIGFWAPIMDRFSVGFIWHQTVDFFLYNFNSWSLMGILFVSFHCLIFASNSYVVWEDKMVSYFLITFGACCVYACFINNKLPERAKILAISHAITFTICTRIVSMVNLCREEQRPYCEPNFTNSWWSVLLLHFAAYLLPACIKSFYMLSDSYHSAAPLWIGTGLKFLLFMNAVYWTFEYVSNSEYFNKLNLIIGLSLIKSLKLAIARLVLFISLILANFSWSRGPLCVKLELSEASNTIDIEESDDMSPGINNNNNNNSNNKTATILGYGNVYGSSYFLLVLNFTVAIMLTTKPSGRYQXSLLIVQILSLLEILDVLSIRRNLITPIIFGLLGYQHFFSTGHQATIPSIQWELGFMTTETIVFPFTHLNIFLNTFGPFFIPALAIPLITIWKIVPSSKPITLLSQIITNITTLITYHLFTGLSSLIFAAHFRRHLMVWKIFAPRFMLSGLLIISLNLFLIFVALWFGTSKILTQINRIFGK

SEQ ID NO: 7163 - protein, 362 aa, Candida albicans
MDFEEETTVCTICHENKSKYTCPACEIKTCSLSCYNKHKYERDCTGKVDSNKYLNRNELAADPVHLNRDYNFLNNVDRKIHVGKEDIIKSAKNVFKRTRNQSQASGNKRHKRNEEDNTDKRITAVKKIFLNDPNISIKRENTLIVSLPIGMSRSNTNKTGFDKKLNSFVWTIEWIMLNEQGEQVTKFISYRLKESLVLQDSVPMNIINNKFTKPVEKCYLKFYLHDVIHKGKMIRLNGGDKISDVLKDKIVLEYPTIYVAANDECLQDRIIDSLQLAEEEEDDTTDSSEDDSSDSESDDDDSDSGSETSSIGDGSGEDNDSDSAPEETSSKLPPFSQKFFEASAEPKPIIEEIGSNKTVEEP

SEQ ID NO: 7164 - protein, 343 aa, Candida albicans
MIYNLYNTVETSLDDFWKLVVARYNSLVYLLVSKVALTRKSFTRIRMSTENVSISNNCCLRYFVSNMSSAPEQDTTIPPGTESPHTEHVVENEYQDDDYVSLDEEDEELIWRVFFQKLEKHNKKSNNNDSESDESEESEDTSEEEEEETGDEDFDEDDLSDLSDIDDPALVATYKALMSEKVNKNLCEEEQRRLLISNFTDDQMERFEAYRRMTVNKPGVKKICNGIVGHTIPQIIAVVIAGVSKSFLGEIISKAFEIQERNSKGRLLMDIEPKKNQKREIISSLQRGEEIEVDERALKFEGDEIHPLQPEHIREAWRLYQLENSVFSGSRKRKMGDDGPFYV

SEQ ID NO: 7165 - protein, 150 aa, Candida albicans
MSFRYSAAGGAHQRDLRTQLFSSPSVGIRTPSKTPPSRTASPYDPSPNNNQAKYNESLLNSLESQNNEEMDTMGQKVAMLKNLGEKMGVEINKSIKLNDDITNGFEKGKITLKNTYNKMIVMSQRAGITWKMWGMVFLIVFLWFFYVWLF

SEQ ID NO: 7166 - protein, 265 aa, Candida albicans
MPAAIRPMKKTVSFSKDVSNNNNNLESDSDTKQSPQSYLTFIPQIKNSLLVVPFHNIFILVGMFYSGLTQDLETVMWKGFLTSIPIQVIYNYIIYINLLPLKKSTRNDHQNNSSGSAINNNNNNNNNNVPLLIGSSIFVSIVLSLPLFVVIILMGAPVYKYSLKTLYLSLHLSQLIFNPLIILSNLNVNKIKRLFKQDHLYRIIFHHGILSSVLLTLGGCWLGVIPIPLDWDRPWQQWPITLLVGGYLGGVVGGVLSLIVNYFSH

SEQ ID NO: 7167 - protein, 400 aa, Candida albicans
MSDPLADYTNLSHDEIDPSSANAAESEQAEPEQQVSEHYEPQPEELTYENDENVLNSIKVQKITDAEAIGEVVRKKVIRDSRPQGYEQGDFNDNSNVTSGSRPGHQQTDEIDISSMDPQQRKRFELEERMSAAIKPSNKRRRKADEDDLERMQDDKIDYLKDQMIKAANSDVEKNSQGQIATEKLKLLKEVSDILARADLAIPILDNNLLEAVRLWLEPLPDASMPAYQIQKELIHALETLPIKTDHLVASGIGKVLVFYQRSKRTEPSLKKIVDRLIGDWTRPILNKSDSYKDRTVQFHEYNRNKFTNKLSRGVKKREAKTLYEENAERRKRAAIPSTRTTAYKIAPQVDKSLLMRQQSRHASNDERFKRINSKLTSMSVKRKAAKKGGPSIEGRDLAM

SEQ ID NO: 7168 - protein, 1265 aa, Candida albicans
MVKISEIARTSTFAWSSKNLPLLAAGTVAGAVDINFSSSATLELWDIFSPTNKTEPIFSATVDNRFYALAWSKPFEGRPQGLLAGAFENGTVEFWDADVLIKTKDLAKASVHKSNKHTGAVKSLQFNPIQNHVLVTGGSNGQIFIWDTKTFSEPFAPGQAMTPMDEITFVSWNNSVSHILASTGNGGYTSIWDLKTKREVLHLSYTGAGGRANFSYVSWHPSQSTKLITASDNDSCPLILTWDLRNSNAPEKILEGHKKGVLSLDWCKQDPTLLLSSGKDNSTFLWNPIEGIKLGEYPTTANWAFETKFAPAAPDIFATASFDGKVVVQTIQDTSPSVSTKVASTDDNEFWSELSTTETQQPVFEVKQAPNWLKNPSNVSFGFGSKLVIINTDSSGKSTVKVDKFVAKGQEKTEKLFKDLKNDNYSSLIQDKLEGETVNENNKSDWEVLKRLSETGKESLFEDANNDEKEATSPETKKENGEDDFFEHLGNGETAKKEEVFVPEGNFKIFTNNENEDSKKLINLILRNKTEEAVSSCLEQKKLVEALVLALDGSDDVKQQVKNAYFKKNKENNLSRVIYNASTKNVTDLVAHANVENWKEVAVGISSFTTDSSEYNSKMSELGDRILKAKDGKRNDAVVCYLAGGALDKISNLWLQELPDYESELLSLKSEEITSPSDARLQALTNFVEKVATYRYITKSTGEFSGPMVEPLAKAILEFVNLVAGSGDFDLANKFLQLLPSEFSGTEKERILKATSKAVEPASAVKSSANAKIAKPASSSGQTRASINAVPAPAYAPPVQAPPVQAPQPPLVQQQQQQQQQQQPNRYGYAQPTYAGAAPKTNPYARTNPYAPSNNIYKPASPVATPSSLSGTTSGVPPPPPKASYKHETEGWNDLPDTFKAKTAAPRRAAAAATPPVSTPTPVSAPAFGSPGQPPSAPSQPGSVGSVSSAGYPKKTFSATNVLPPPPKSISRSTSRTTVPTSSTVPASPKPTPVSNKYAPAVTSDASQPPSSGFASPTLNSSPRLAKNPYAPSVTEQLPPKISYATPPAHHLANNGPSTPSYAPPKNPYAVPPSTSVSHAGIAPPPPAPKLGSAAPPPPQPFGSSMSMPVQPAFNGVPPPPPPVGRAVSTPAAAKIEQPPAREPELPVQSKHPKGDRTHIPENSLPIYNSLTNVLEAIKPNIPEKYAKHGTDMEQRLNILFDHLNNEEISNGVIELLLKVATSLESKDFANATAVNLQIATEHSDEIGNWHTGLKRLITMAEAMY

SEQ ID NO: 7169 - protein, 470 aa, Candida albicans
MMHRIPLQLVPHHPASGIKARPNAAAVPTISYQPTDIIIPTQLYDKIGNLGEYKRLQEAEKKLDLLIARKSLDFQAIQQKSIHPHEYRPSTGVLRIFIYNTCENQPWQKQLLQQKGLPVPDPTLAESSWTLRIEGKFISDIPDEQQQIDETFKFSSFLSAISVDLLPNENYPNIQESQSHIIEWRDDGPNANKPPASVSFDGLDIKRNGIFNIKSKIALLVKNHSNSLKLSEEMSRFVGKQECSQQELLYIIWQYVLFKGLFKKSNAYTEVPAVETSTLPNPADDKDSSDDDLTLVEADDLLFELLKVKTFKFSDLYKLTQAHFVPREPIIVDYEVNTRKSTTLGNVVLDIPVELPLNLLKAQKELLDVNKTAFENLAKADSTISQLDQRISLAIIALQNANSREKFYRELSDDPVKFIENWLESQAETLKALKSDEGYDEEVVRRAKYFEENEHLIKEKIELLLGSNKF

SEQ ID NO: 7170 - protein, 237 aa, Candida albicans
MASLYPLKFNEKLAFFYNTVAATLWFCCLGRFLILLPLVGRKFLPGGMADFFHVVSLLPIIESLFVKSVLRKKFTITSLWGISNGLKMVWLCYGVIFPHPKIAKHTSYSLLITSWCLQYFIHYFYYAFKVKTKSSFHFLFWLEYNNFYLTYPLGLVSEMILLFLSLAFVEQDSIYDYVLRAAFLAYIPIAYFAWGHLKSRKKKRYTEIMNKRNVRQVATLESTTTSTKNTSIELRNM

SEQ ID NO: 7171 - protein, 218 aa, Candida albicans
MSWIFGKSSTNNDNNTTTTTNDQSSIKQTLGFDPKEVADVNTIISTPGAISASRLHPLAGLDKGIEYLDLEEEQLNTVEGSKGLIPSRSWTDDLCYGTGAVYLLGLGIGGLYGFQQGIKTLPESAPSKVKLNHILNNITKRGPFLGNSAGVLALTYNLIDSTIDGIREKHDDLNSVTAGALAGALFKSSAGLKPMAYSSVMMAGAAGIWCGLKRFLQE

SEQ ID NO: 7172 - protein, 673 aa, Candida albicans
MGSSEYNYDESGETWPFFVLALLSFILLPLTIKYISRVFTNTNPTKENQSIVGAIQENSETLKVPNLSEIKSFQSKQKSSKIFNKTLIFLLIGWSIVIYVAKYVTKEADLTVLFDPYTILDVSFTASEREIKSHYRKLSLKYHPDKLPKDLTEEQRSQAEQAYIRLTSAYKALTDEVTRENFLRYGHPDGEQPATHGIALPQFLVEGKYSSLVVVLYFMVIGILLPFIVGKWWSNVKSHTRKGLHVDTAANFVRKFTDRDPAKVITPDVILDYVLESEEIRQEFPNASHAELKDLVYRYLNRQFDSDPKVEKKKVDLIARLPFLINGLIDIAIVFRLHETIFATEDLKKSIIQAVKPTGRYQELLQLPYVDPEIVSKQSIRKLGKLFAISKDEAKKALGIQSDEHLERALNVAQHIPTLRIIDAEIKVPGEEDGAVHPNSQGHISIKFLVKSPKLKSCPDIEDERLKDEETLEYMKNPLIVNEQQKKLPYSYAPYFPQPIRNSWSCYVIGQKENRLLEDSTNYVLENIDLNNLELSQEAWIKGTDVRIGTYKIQLPGAIGNVGNYYYRLVMKNNAYFGCDVDIPIDLEVTPVSIGKSLAGLKKKFDEEDESEDSESDSDISDPEEDSLAGAIAALRGSDLKKKKSSKDEVEEESEDEEVFTDINTDTEDEGDN

SEQ ID NO: 7173 - protein, 339 aa, Candida albicans
MKLSDYYIDKELIYNSAISDIYTAIDKFNNLPVCLKIVDEDFSLPPHSIHREVLILKTLKPHPNIIEYFNDLKICDDIILVTKLYRYDLSQLIEITKYCKRTTRFIYGINGNLVSNQYTLANEIEEKDIKLWLKSMSSGLEFIHSQGIIHRDIKPINIFFARDDITQPIIGDFDISYDLKSPPKDEPPMAKYIDVSTGIYKAPELILGITNYEYEIDIWSLGIILTGLYSENFQSVLVKDDKELTNDSHVSDLYLLNQIFENFGTPNLTDFEDELFCDEYNNENLHFKKFNLQKYPRKDWDIILPRCNDDFMKEIFTKMIRYDRSKRITSKEILQLMLD

SEQ ID NO: 7174 - protein, 271 aa, Candida albicans
MWFSKTNFPVEGKTALIVGASQGIGVNLAERLYEKNCSTILVARTESKLQHQIQNIKEKYPESSAKISYAVADVSNYDECTRLWQTIHPADPDILFCCAGSSIPKLFQDLTKVDIESGIDINYKTVINVVHTGFKHALSNNTDNLEPHNFKKRSVVLFSSVVSFFPFIGYSQYAPMKSAIESLSIILRRELSPYNYRVTCVFPGNFQSEGFEEEQKTKPDITKKIEGPSNPIPGDECARLIIDQLDKGYDSITTDFIGWFLGCSVLGISSP

SEQ ID NO: 7175 - protein, 272 aa, Candida albicans
MSDFEYDNNNTGAFGNISQGGFNTEHAGSSQRQTTTQVRQSLTPVTIKQINDATQPVPDGEFKVNNVELNMISFVGVVRNVENTNASIAVTIEDGTGSIDVRKWVDETISSAEEDFEKYNEMKGKYVYVGGSLKQFNNRKTVQNASISLITDSNQIVYHHLSAIEHHLKAQGITAADAASAGAGQATNSTASAGSGLFMDNPTSLSKDTGSLTDQVIAVLKEASRTMPDGVPVDYVAEKLSITKEESQFQLLKLNDEGKAYAGYDDNSYLVI

SEQ ID NO: 7176 - protein, 345 aa, Candida albicans
MSKIEPVTEKEEEYVSEWDRRRYVPKAGEPELPPQLSEFSNKTTDEVIEELNRLPFFMTKLDETDGDGGENVNLEALKSLAYEGDPDEIASNFKNQGNNCYKFKKYKDAIIFYTKGLEVNCDVDAINSALYLNRAACNLELKNYRRCIEDCKKVLMLDEKNIKACFRSGKAFFAIEKYDEAIKVLEYGLNIEPENKDLQKLLQQVQKRQETLAQIKAKKAQEEEQERLKNIVLENSIKLRHIEIVKSSSPPEVLKTAKIRLEDPKDYQSQLIFPAMILYPTTDEFDFIAEISELTTPLELLEMVLNRPREWFDDPKHKDFNVKKLECFMETESGGLIKVGKIISS

SEQ ID NO: 7177 - protein, 276 aa, Candida albicans
MGLAGTKIKQRFGNDPRNTNWSNDTSRFGHQYLAKMGWQQGSGLGLVSHALTTHVKVSIKDDNLGLGAKLHKRKANGDGGLEEEGTAGLDAFQRILGRLNGKENVVNKVLDNVRDDDIINGKWGMRFVKGETLSSTWDKESKKLISYKNIEDDGKKSRKRKADESETKEDKKTLKKHKKEKKDKKEKKEKKKKKEKKDKKDKKDKKNKKDKKDKKDKKDKKDKIRTGSDETLVSKESSATPPPIATRLSARSKWIKQKRASVMDSKALNEIFMITN

SEQ ID NO: 7178 - protein, 425 aa, Candida albicans
MTSIPSDIKLPPSDVKQTIDKTVGYVIKNGKSFEERLLKNNKNDKFTFIKPDNEYFPYYKWKLDTSKKNQGSTETSTENQHQEEDIIIAKPPDLPFLIDLPIISQHDLDVIKITALYIAQNGESKIPKLLQHETKLNNRAQFEFLNESHSLHDLFQKYIQQYKIVIELYQNSHGENVDQDQEYLQLRQLIKKPRGEYDILTQAYNRAQYIKQNKVIAKREQEESKARQLHYASIDWQDFSIVAKVDFNAIDAVKELSMPLKRDDLIKRSLDARSKDIELPKVAVAATTTSPVQVEVIDTKNQGSTQDQTDNNTSTPSAPPIKGMKIKAAGTSRLKKSSEANTSMTTTNTIKCPITGKLIPENEFDTHIKTLLRDPRYKKEQENYIRKNFSYASNITTDQVYENIKRFVKKRANVEDENPKKKKKA

SEQ ID NO: 7179 - protein, 415 aa, Candida albicans
MSHQQEDVVDDTQEEYINVNEVAEEVADDDQAPPDEEDEEMELDDEHETLEIDMSNNSWTYFDKHTDSIFTIFSHPKLPMVLTGGGDNTAYLWTTHTQPPRFVGEITGHKESVISGGFTADGKFVVTADMNGLIQVFKATKGGEQWVKFGELDEVEEVLFVTVHPTLPFFAFGATDGSIWVYQIDESSKSLVQIMSGFSHTLECNGAVFIQGKDENDLTLVSISEDGTVVNWNCFTGQVNYKLQPHDDFKGVESPWVTVKVHGNLVAIGGRDGQLSIVNNDTGKIVHTLKTLDNVDDIAELSIEALSWCESKNINLLAVGLVSGDVLLFDTQQWRLRKNLKVDDAITKLQFVGETPILVGSSMDGKIYKWDARTGEELFAGVGHNMGVLDFAILDGGKKLVTAGDEGVSLVFVHE

SEQ ID NO: 7180 - protein, 423 aa, Candida albicans
MSSTKQDLPQARAPTLPSKTTPEQRYWRSYITPQLIKENHPITSIEFNPTTPNDFAIASATKIQVFSSKTRQVIKTFSRFKDVVYSGNYRYDGKLLVASDASGLVSIYDSYQPRNLLVSLTPSSHPTHVAKFHPTIGNQLITGSDDRMLRVYDISQTSNGPIIQFDNIDHEDYIRSVNFIPGDSNLIVTGCYDGNVRILDVRDPHRVVAKFDQENPVEDILAVSSNTLVSAGGPYVKIWDLNRMSQIHQLNNFNKSTTCLSNTHTNGLMVGSLDSTIKVFDYTSTNWQVQFGWKFGSGVLSCGVSPINQKHFVAGLTSGLISIRTKKTEPKVKQGIKNDVSGGYARMMKGRDYTGEEEDHIIESSKIITNKTNKSVNELMSSYKKYLGASGSIDDIKPNDLKQEISQCLKAKEICGMLELLGV

SEQ ID NO: 7181 - protein, 549 aa, Candida albicans
MAGDPFLSDPSKKRKRSNKLTSKTKRSKSSTPTPTPTPTPNTNHQDDDISSGSDSENGHANGTNENDHGDNESELSSDEEFADETVNDKRRRLAKQYLENLKQNEHELYDEFDAKDLDDDILARRLQKDIAETKGYVYKFVGDKIKDQLDEEYPLELITTRIGCKNLTSMTINYPFLYTVSKDMEIIKWDINETHKKPKRIKHTKGGNKYFEINTINPQLNHHWQQINCIAASPDGKYIVTGGSDSRLIIWSSENLTCLKVLPTRSSVNSIVFRRNSDQLFAACADLRIRTYSINQFTQLEILYGHQDNISDISALAKETCVSVGSRDKTAMFWKIAEESRLTFRGGDSLEKTNKKKKRHYHQEEEEAETENDESTFYNEGSIDVVSMIDESHFVTGSDNGNVALWSLAKKKPLTTKRLSHGLQPQFTPIQASSESNEELALQQIPKPQPYWITAIHGVPYSDIFITGSFNGTIKIWKLEEPSLRSFKLLGEIKQNNLNGCIVKIDSVEIPNTKKLKIYVLLSKEHKFGRWLGKLPGARNALVNFTVNL

SEQ ID NO: 7182 - protein, 150 aa, Candida albicans
MPKYYCDYCKSYLTHDTMSVRKSHLQGRNHIKFYCDYYEAKAKETNIWNPSSIPYEITLEKLNRYSDAKKSNGSSEDNMDIDKKENSSDHNKGNVVNHSDAGNDNDDDDDEMIFLPPPPNLSGLPLPPPAVYNNQKEYQKAILRQTLTKS

SEQ ID NO: 7183 - protein, 399 aa, Candida albicans
MTEEEKKRLQVLERDAETAYPFLASDEKSSTFKTAEDLESGINPLVSIATTTESQQTLDNVSSISTTTNEKPKPKPKPWVHFVAGGIGGTVGAVVTCPLDVVKTRLQSDVYHSMYNKIPKSGNPIIQAWQHLSETGSVLRGMYINEGASSLFKGLGPNLVGVIPARSINFFTYGATKEFLLGNFSPTNSIQGPRQEETWIHLVSGINAGFVTSTATNPIWLIKTRLQLDKSKGKNYKNSWDCFKHIIKHEGFTSLYRGLSASYLGGIESTIQWVLYEQMRMFINKRSLQIHGNDPSNKTTKDHILEWSARSGAAGLAKFMASLITYPHEVVRTRLRQAPLESTGKPKYTGLIQCFKLVIKEEGFGSMYGGLTPHLLRTVPNSIIMFGTWELVVRLLSEW

SEQ ID NO: 7184 - protein, 845 aa, Candida albicans
MSRLIVKGLPKYYTEEKLREFFSKQGDVTDVKLMKKRNGESRKFAFIGYKSADAAERAVKYFNKSFIDTARIEVEFAKTFSDPTVPLSFKEKRKREEQKLKDEQERLLEQELRAQAKKQKTKSTSEIDDEIASNPKLREYMEVMKPSHQVKSWANDTIADGSGGPSVQDLENALNGNNESPVDKSNIEVVNTVEDASDDEYNDFKELSNKHGENEDEEEEEEMMSLGDLPTNEENKDKNESGENLAANENISDLEWLKSRSTRIKENGEVPEIVPEVKEVNEVTEVTQQSDNEPELTPEEQIAQKIEETGRLFIRNISYEASEEDFRSLFSQYGALEEVHIAIDTRTGKSKGFLYVQFLKKEDATRAYRSLDKQIFQGRLLHILPADKKKDHRLDEFDLKNLPLKKQRELKKKAQAAKTQFSWNSLYMNSDAVLESVASKLGVTKSQLIDPENSSSAVKQALAEAHVIGDVRKYFEDRGVDLTSFDKKERDDKIILVKNFPFGTTIDEIGELFSAYGQLKRMLMPPAGTIAIIEFRDAPSARAAFSKLAYKRFKSSILYLEKGPKDLFTREPTTNEVATIPEQQQNEHAVEAKISANEILGESKEDDEIESVQGPTVAVFVKNLNFATTVQALSDLFKPLPGFVVATVKTKPDPKNSGKTLSMGFGFVEFRTKEQANVAISTLDGHVLDGHKLQLKLSHKQGTGTSASSIKKSGKSSKIIIKNLPFEATRKDLLELFGAFGQLKSVRVPKKFDQSARGFAFVEFNLMKEAETAMSQLEGVHLLGRRLVMQYAEQDAENAEVEIERMTKKVKKQVATQNLAAARLAGKGKIELEEKDEEDFDRDFQ

SEQ ID NO: 7185 - protein, 436 aa, Candida albicans
MKVKTISRSSDTYIPVKNTQESALPRNLNPALHPFERAREYTRALQATKLERMFAQPFIGQLGDGHRDGVYFIAKNYQATNQIASGSGDGIIKYWNLTDRLETASFKAHYGMVSGICIYANKMYSCGDDKTIKIWSVNSDDFDIKVNDDVDGIYRNQLGGAGGGDGKTSGGLLKTFIGEHSFKGIDHHRDDDLFVTGGATIQLWDVNRSKHISDLSWGADNVGTVKFNQTETNIIASSGSDNSIVLYDIRTNTPVHKVVTSLRNNCITWNPMEAFNFATGNEDHNGYLYDMRNLQKTLKVYKGHVGAIMDVDFAPTGQELVTGSYDKTIRLWKTLDGRSKDVYHTKRMQKVFSVKYSTDSKYIISGSDDTNLRVWRSDASSRSNIKSSRQRAKLEYQDKLKERYKYMPEINRIARHRHLPKPVKKAQDMKRLYSKK

SEQ ID NO: 7186 - protein, 527 aa, Candida albicans
MALTGKMGSHERAGTAQYERAGSYKKSKRHTKDKKLNSKLQRIDRQYKEAIQSAAGTDLLLQEEQGFLEAENDMEKTFKFKQDEIADAVDSSTANKKFELKLPEFGPYTIDYSRTGRDLLLGGKKGHVASIDWRKGKLGCELHLNETVHAVKYLHNDQYFAVAQKKYTFIYDNQGTELHRLKQHIEATLLDFLPYHFLLVTAGHTGFLKYHDVSTGQLVSELRTKLGPTQAMKHNPWNAVTCLGHGNGTVSMWAPNMPEPLVKLQVARGPIRDLAIDREGKYMAVAAADKTLKIWDIRKFKEVDNYYSQTPASSLDISDTGLLSVGWGPHVTIWKDILKGKHQSEPYMNHLIPGSKIEKAKFVPFEDILGVGHEEGFNSIIVPGSGEANYDALELNPYESVKQRQQQEVRSLLDKLPADTIALDPNVIGTVDKRASTVRLKPGEITELADKTQQSKDKMEIKAEVKGKNSALRRHMRKKTQNVIDQRKLRIEKNLKMEKEARQRRRNLEQGIPEEKDLLGPALARFK

SEQ ID NO: 7187 - protein, 184 aa, Candida albicans
MSLWGVYTGPQPPKKPLQEMTQEEQAEEGARQMIGFMNSCPGKTVMAGVSGFALGGFFGLFMASMAYDTPIGTDAVKHISELPFKQQMKLQFTDMAKRSYSSAKNFGYIGMVYSGVECTIESLRAKHDIYNGVSAGCITGAGLAIKAGPQAALVGCAGFAAFSLAIDMYLNSDAAPPPKNDYDI

SEQ ID NO: 7188 - protein, 313 aa, Candida albicans
MSFLNTIRGLGRGSKKNKKDLEPSNNAIYSHSNLSGNGLRRTQSPTKFSPSKLSSKGAQGSAAYTSSPTKRSRTGQSLQHQDSQSSLQYQQQSGSVSPSKRSSIQTTKSTTVNADPPLFLCEPYVKTALVKGSFKTIVQLPKYVDYCEWLALNIFELFNHLNRFYGVIQEYATPEAYPTMNAGPNTNYLWVNSSGQAVNLPACQYIEYVITWVTNKLNDQSVFPTKNGGAFPPNFIKDCKNISRQMFRIFAHIYHNHFDKIIHLSLEAHWNSFFAHFISFVKEFNLIDRTEMEPLLPLIENFEQQGKITQASK

SEQ ID NO: 7189 - protein, 352 aa, Candida albicans
MYGQIVIGPPGSGKSTYCHGMYQFMSAIGRKSCIINLDPANDRLPYPCELDIRDYISLEEIMEELDLGPNGGLMYALESLDKQGIDLFIGKIEQLINEGNYLLFDCPGQVELFTHHNSLYRIFKKLTQLKRLRLCVVSLIDCIYLTSPSQYISILLLSLRTMLQLDLPHVNVISKIDMLKNYGELPFRLDYYTEAQDLQYLTPYLEKESNSVLGQNYVRLTELIGELVEDFHLVSFEVLSVENKKSMISLMSVIDKANGYSFGSEIGGDTVWSEATRQNGSGNGGYQDVDIHERWIDHKEEYDAEERKQEQAFAEGLPQEEVDNKPLTEDEEWEAALKDWEEKHGGEGAMLR

SEQ ID NO: 7190 - protein, 216 aa, Candida albicans
MFKKRVIKDSRVSKRKIGDINEASEDAPDTQVTKKSTLITKKSDIQKKSVVMPRSSPQTPLSKSSSDDAAAVEVVSQKSKKGELKPLAANIKTTIITDFQPDVCKDFQQTGYCGYGDTCKFLHVRDESRQKIPIKKDWEIGGQKEVKEKEDIPFKCVLCKSDYKSPIKTECGHIFCKACFLDRYKAKKKGTCFICHKETNGTMVPVNIDKLSATQV

SEQ ID NO: 7191 - protein, 624 aa, Candida albicans
MSSLQLSKGALKQVFSKEGHDSVQIPMILQITNIKAFDVSPSDSKKFRILVNDGVYSTHGLIDESCSEYIKNNNCQRYAIVQVNAFSIFATSKHFFVIKNFEVLAPTSEKSPNNIIPIDTYFLEHPEENYLTVMKKSESRDRESPVPGVTPPLAQSTNSFKSEVGGGVAAQSKPAGTHRKVSPIETISPYQNNWTIKARVSYKGDLRTWSNSKGEGKVFGFNLLDESDEIKASAFNETAERAHKLLEEGKVYYISKARVAAARKKFNTLSHPYELTFDKDTEITECFDESDVPKLNFNFVKLDQVQNLEANAIIDVLGALKTVFPPFQITAKSTGKVFDRRNILVVDETGFGIELGLWNNTATDFNIEEGTVVAVKGCKVSDYDGRTLSLTQAGSIIPNPGTPESFKLKGWYDNIGIHESFKSLKIDNAGSGGDKISQRISINQALEEHSGSTEKPDYFSIKASVTFCKPENFAYPACPNLVQNADATRPAQVCNKKLVFQDNDGTWRCERCAKTYEEPTWRYVLSCSVTDSTGHMWVTLFNDQAEKLLGIDATELVKKKEQKSEVANQIMNNTLFKEFSLRVKAKQETYNDELKTRYSAAGINELDYASESQFLIKKLDQLLK

SEQ ID NO: 7192 - protein, 903 aa, Candida albicans
MSSPPAASSSRDNNRRRKRSPYDDEDDDNNNNDRSSIHQPSSPPLGSSPNPHQHLPSSPAIPFDTALDVDDVEEIVHNDIQDLNPSEPDSEEEGDDLMENLEQDYRANPEQDHYDLGDGNIDDTGDYEEMDAATRRRMINQWNRRDAILNNANRSRRGAFLDDDDDEDEDDEGEDSMGQFGLPIQRRRRREHHDEDQDDLMDDVEIDPFNEELSLESLSDVKAPSITEWILQPAVSRSIARELKSFFLEYTDANGDSVYGNKMRTLGEVNAESLEVSYKDLADSKAILALFLATSPEEMLKIFDIVAMEAVELHYPNYSQIHQEVHVRITDFPNILNLRDLRESNLNQLVKVSGVVTRRTGVFIQLKYVKFDCLKCGVVLGPYVQDSNTEVKISFCTNCQSKGPFKLNSEKTLYRNYQRITLQEAPGTVPAGRLPRHREVILLSDLVDVAKPGEDIEVTGIYKNNYDGNLNAKNGFPVFATILEANSIRRKESSAFMGGNNLVNMWTEEEIREFRKLSHEKGIIDKIIASMAPSIYGHKDIKTAIACSLFGGVPKDVNGKLSIRGDINVLLLGDPGTAKSQILKYAEKTASRAVFATGQGASAVGLTASVRKDPITREWTLEGGALVLADKGTCLIDEFDKMNDQDRTSIHEAMEQQSISISKAGIVTTLHARCAVIAAANPNGGRYNSTLPLPENVDLTYPILSRFDIMCIVRDLVNPESDERLASFVIDSHMRSHPTNEEDILNANGKGGSDAQDDDENMEDEDGVDQPSAARTRSERIEQLNKQKEQEISPIPQDLLIKYIQYARVKIQPKLHQMNMDKLARVYADLRKEAITTGSYPITVRHLESILRIAESFAKMRLSEFVSQNDLNRAIKVSIDSFIGAQKVTVKQKLRSKFMKYTL

SEQ ID NO: 7193 - protein, 103 aa, Candida albicans
MLFFSFFKTLVDQEVTVELKNDIEIKGTLKSVDQFLNLKLDNITCTNGQRYPYLGAVKNLFIRGSNVRYVHMNPNSVDCTLLQDASRRGMFTNIFFSIISAIN

SEQ ID NO: 7194 - protein, 301 aa, Candida albicans
MVDSNFFVDFMMGGVSAAVSKTAAAPIERVKLLIQNQDEMIKQGRLEKRYTGIVDCFKRTAADEGVVSFWRGNTANVIRYFPTQALNFAFKDKFKAMFGFKKDENYWKWFAGNLASGGLAGATSLAFVYSLDYARTRLANDAKSSKGDGKREFNGLVDVYKKTLASDGIAGLYRGFGPSVIGIVVYRGLYFGLYDSLKPVVLVGPLEGSFLASFLLGWAVTTGASTASYPLDTVRRRMMMTSGQAVKYDGALDCFRKVVAAEGVGSLFKGCGANILRGVAGAGVISLYDQLQVILFGKKFK

SEQ ID NO: 7195 - protein, 664 aa, Candida albicans
MTVTDEFKKQVSKTFGPKTDLSDDEYIKLQTLLDLFNKSMDDIFVEWESFNITEVKEDLDLNLSNLIRFQGYLQTKLAKNSTPVSKKTRDTIGSTSNRKQFRTVDNHHLTPQLKKRKFEDNTPEFKTPAGIPVSSPTTDYETANNTFVGLTTNGTPTTTTAKTTPSNSLLETLNPQIDEITIDQLPEGKTFRLSTNFDASKFKFRTMQMKLLESADVLDDQIDRMISLYQDQNKTADLQFGNPCMSTQSDILCCGRIVPDNPLYDKEILNSTSLFLETSRISGIGQRIPLDLSNLSNYSFFPGQIVVLKGKNPSGKSFIVEQNMPLPQLGAPVTSSEELKEFQTLQNNQGLKVLIASGPFSNSNKLNYDKLDKLVDLINTKILPQVVILNGPFLDIGNKVVESGEIIIDSDQSQPQPKTLDDLFKAIVTPVLKKIDSKIQVILYPNLRDTCIKHCSYPQDSFDRKKLGLPKNFKVFPNPSGFSINEVLIGNSNLDIFKDLRDIYKEDTAIISNNRFERIVKHIFEQRRYYPIFPGSIKTEPKQKCTDLLNGAQGEYLDGIAVGGSSLETPYLGLSELGDSLPDVLILPSELKYFAKVIQGVIVINPGIFIKPSKDLNREEGSYAVVNIQPPNFDAEDNIEAIDDTNTLYYHNVNKRSRVDIYSS

SEQ ID NO: 7196 - protein, 212 aa, Candida albicans
MNIFRFFGDLSHLASIFILLYAIETNRSTNGLSLKTQILYVVVYFTRYLDLFTKFYSLYNTSLKLVFIASSIYTVYVMVYKYKKPIQENIDNFPLKYLIGGAILASLIFTHKYSIGEIVWSFSLWLEAVSILPQLYILQKTGEAENITTHYIFALGIYRALYIPNWIYRYFAEGHFDFVSVLAGLLQTGIYSDFFYIYYTKVMKGKKFELPV

SEQ ID NO: 7197 - protein, 293 aa, Candida albicans
MPDPRSLIAEAEKLLKPQSGFFSFLSGSSASMRKEDATDLYIQAANSYRLKKDFNLAGAQFVKAAEIQESLGNHNDTANHLVEAYKCFKGVSPTDAISSLSKAIHIFLTQNGQFRRAANFTMDLAELYESVNDYENASKSYEQAGDYFTTDHAEALANKAFLKCADLYALNGNYKRAVELYDNIIKNSLGNSLSRWSLKDYFFKVVLCVLCMDDVIEAHKRKDQFLQDDPSWGQSREYKLVEGILESIDQGDVEGFSDKVFDFDQFSKLDKLKTQLLLKVKNSVVAKDDDDLL

SEQ ID NO: 7198 - protein, 1088 aa, Candida albicans
MSLQESNNNIPQGAFSFPKEEEAVIKHWDDVNAFQRTLELTEDLPPFAFFDGPPFATGTPHYGHILASTVKDIIPRYATMNGYHVERRFGWDTHGLPVEHEIDKKLNITSKEDVYAMGIDKYNAECRAIVMRYADEWRRTIKRLGRWIDMDNDYKTLYPEFMESVWWAFKELFNKDAVYRGLRVMPYSTACTTPLSNFEAQQNYKEVNDPALTISFPLLDNEDTCLVAWTTTPWTLPANLALAVNPKFEYVKIFDEEKKKNFILLESLISTLYKKPKSAKFKVVEKILGKDLVGLKYKPLFNYFYEDFKDTGFRVIPADYVTNDSGTGIVHQAPSYGEEDFNSTKAAGVINEKKLPPSIVDDSGRMESNVPEIAGMYFKDADKVIIKKLSEEGRLLVNTQVKHSYPFCWRSDTPLMYRTVPAWFVRIGEVIPEMLDNVEKTNWVPSNIKDKRFSNWIANARDWNISRNRYWGTPIPLWVSDDFEEMVCVGSIQELRELSGRDDITDIHRESIDSITIPSKKGKGQLKRIEEVFDCWFESGSMPYASKHYPFENEKKFLDAFPANFISEGLDQTRGWFYTLTVLGTHLFKTAPYQNVIVTGIVLAADGKKMSKRLKNYPDPTLVLEKYGADALRLYLINPPVLRAETLKFKEEGVKEIVSSVLLPWYNSYKFLKDAADLFKKDNGKDFVYDNSLHSTNVMDRWLLASIQSLIKFIHEEMTGYRLYTVVPRLLHFIDDLTNWYIRFNRRRIKGYASEDVEDTQKGLNTLVEALLTLSRAMAPFTPYLADGIYQRIKVYFKQEDLEKIAINPKNVDLRSVHVLSYPSVRQELFDEKIEVAVARMQKVIDMARNIREKKMISLKTPLNELVVLSADADLLKDIDSLKGYISDELNVRNVVITSDEAKYCVEYSCVADWPVLGKKLKSDAKKVKAALPKVSSEEVQRFAECGKITVDGIDLVTEDLQVQRGLPASKAEEGQEFRSHQDVLIILDVNLHPELESEGLARELINRIQRLRKKAGLNTTDDVQVQYRVVKDTIDLPKIIKDNEELLLKSTKYPIEELKEAQDSANVITDEEQTINDTVFNLRLLKI

SEQ ID NO: 7199 - protein, 328 aa, Candida albicans
MSDWVSTFPGYKQVLLTCKKMLGRIIMTGPVPQHVGIIMDGNRRYAKTHKIEIKEGHSLGFDTMASILELLYESGVKCATVYAFSIENFKRSQYEVKWLMELAKSKFTQINQHGLLCEEYGVKIRILGNTKLLPRDVLEILEKTEEITKNNTRAVLNVCFPYTSRDEITHSIKSVVDEATKGGIDITEEAIDRHLYTKDVPPLDLLVRTSGTFRLSDFLLWQTVSPECAVVFVDKLWPAFKPWDMLKILLNWGFNKYMYGNPNGYGVSSNLVVKTPVDGELINTPKSTTGLDRYSEDEETEVSSNNLGTEEDTVTSEEEDSEGIVKKQ

SEQ ID NO: 7200 - protein, 451 aa, Candida albicans
MISNGKDTSLKQVEAEVSTKSTSITPTKNELSNSTSKPTPSNDKSTEQTKEQLVVNEKEKKKQAFVTRTIWTFVMIGGFFAILASGHLALIIMVSVFQMLTFKEVIALTSEPARDKKIPWNRSLNWYFLGTTWYYLDFPALFDFFQESVYSSKFLTLLVKNHKFISYSLYIAGFVFFVWTLKKGYYRFQFAQLCVTHMTLLLVVFQAHLIIDNILQGIIWFFLPATLVIVNDIFAYLCGITFGRTQLIEISPKKTVEGFVGAWICTGIAGVIASHILSKSDYMICPAENLSTHLYNFPHCDLNPIYIPQVYQLPANIVELTGHELITFKPFYFHAAILATFASLIAPFGGFFASGLKRAFGIKDFGDTIPGHGGITDRFDCQFLMGSFTYLYYHTFVSNQNVNLGHVIQLAIMNLSVPQLLQLIKSLLKYLNREEVLTSEQLSRIFDILEN

SEQ ID NO: 7201 - protein, 796 aa, Candida albicans
  MISC_FEATURE (383)..(383): X=any amino acid
MIMEKLGFHKVSNSPSSPSQPKITHNRPIPHPQSPPLPQRPLSEPLKKQLLVDNSPGNDVVIANCVAVNAQDFQNIPDRAPVILDGVFVYSIAKDDRVRPGTIGLAGNMRTWGKWSLGQPVNVENYNIFHNGQQQQYLGAIDLSIDFRAKARANSNPINHDELVALFLKNYENQILQPTQVIYMEYTGIYFQIRVNNVQIIDVNTKDQLPSFKDSDDINTKGILIKSTDVGFYPYEGSIINLTKPKTLKQRMFGGSTPHRTSRRKQIINPDFKLEDLGIGGLDAEFQDIFRRAFNSRILPPELAEKLDYKHCKGLLLYGPPGTGKTSIARKLSKMLNGKEPKIVNGPEMLSKYVGASEENIRNLFKDAEAEYKLKGEDSDLHXIIFDELDSVFKQRGSGKSDGTGVGDNVVNQLLSKMDGVDQLNNILVIGMTNRLDLIDTALLRPGRFEIQIEISLPDEKGRKDIFLIHTKKLTENGILSSDVNFDELSTLTKNFTGAEIEGLCNSAKSYAISRHTKKGALAQIDPESIAKMKITRDDFLLALNDIRPAFGTDEEDLSQQAQHGIIQFNQTIRNIFEKGQSIIDVVRSSETEHLRSILLYGPPGVGKLSIATTLALNSDFPFIKMLSAETLVGMGEFRKIQEIDNVFRDVHKSPLNVLVIDKIENIINYNPIGPRFSNDILQVLMVYLTKKPPKGRRLLIIGTTSQYQVFKHMNLIDSFNDAIAVPPIKHIEEVGKVLDKLGFMNKSEREEILSQLSRYDINIGIKSLIDVLMVSKYSRDTVDEVVNNIVEKMSG

SEQ ID NO: 7202 - protein, 109 aa, Candida albicans
MSVFLGSSAQFSQATIDPEKIKLADIQFSAMAFTFNKLLRRCEQKCLLREYGEGELTKGEQECIDRCVSKYVKANVIIGEHLQKQRLDPFNSMPEYRKVQDILASSVKS

SEQ ID NO: 7203 - protein, 102 aa, Candida albicans
MTKPRFLTDIERAKVLEFQDMIHYSPRYSDDSYEYRHVMLPKNMLKAIPHDYFNQETGTLRILTEEEWRGLGITQSLGWAHYETHAPEPHILLFKRPLNPGQ

SEQ ID NO: 7204 - protein, 767 aa, Candida albicans
MAKQGKNKVSKPRKPPTLKQKLKKESKVVKAKDLQWKPVEIPDNLGDYEGFYGLEEIDGVDVQIVNGKTEFIVRDNGKVENKSKKEETNENGENNMDVEDNETPEVEDEKPTEQEEEEEEEFAGFEDDDNNQEDANTSERVSNNDKDDKLAESNDELNAVSFANLDLPLPDDNEINLPNWQEGDLGSSISAYTLYGLSQLDFKKPTPIQKETIPIALSGKDVIGKATTGSGKTLAYGIPILEKYIQSLNLIKQNNKDKKINHPTGIIFAPTRELAHQVVDHLNKLAKYSPLSTRGIVSITGGLSIQKQQRLLRHGPGIIVATPGRMLELVQGDSELAKRLASTDIIVLDEADRLLQDGHFDEFEKILELFGKNRPKSKSIEWKWQTLVFSATFSRDLFRKLDRHQKGKSSSLMGNDEIVQLLNEKLKFKDKKPTLVDANPKEIVSGQITEALVECGPTERDLYLYYFLLMYKGSTLVFANSIDSVKRLVPLLNNLNIPAFSIHSSMIQKQRLRALEKFKEASQKNEVAVLVASDVAARGLDIPNIDHVVHYHLPRSADVYIHRSGRTARAGKEGVSAMFCSPQEASGPLRKLRRLVAGNSNKESRLNMHNDVKLLPIEMDLVSQIKPRVEISSKLADASISSTATRKEDSWVKQAAEDLGLDDLSGLEDFEDDIIKKQRKRKEGKMLSKDETKALKYELKTLLANPIKKNTRKSYITSGLQNLAHQMVTGAHHDDVLGHEKVNALSDLKGSKNKNKKIEKKRISKKK

SEQ ID NO: 7205 - protein, 436 aa, Candida albicans
MSETEAEKNIEIWKVKKLIKSLEMARGNGTSMISLVIPPKGQISLIQKMLTEEYGTASNIKSRVNRLSVLSAITSTQQKLKLYNSVPRNGLVVYCGDVITDEGKEKKLNIDFEPFKPINTSLYLCDNKFHVEALNELLENDDRFGFIIMDGNGALFGAVSGNTREVLHKFTVDLPKKHGRGGQSAVRFSRLREEKRHNYVRKVAEVAVQNFITADKVNVKGLILAGSADFKNELSKSDLFDNRLQAKVIKIVDISYGGENGFNQAIELSAETLANVKFVQEKKLLEAYFEEISQDTGKFCYGIEDTLKALDLGSCEKIIVYENLNTIRYTLKDIEGEEVVAHVNPELPDKSWQLDKKTGTEMEIVKEESFLEWLAENYKNYGAELEFVTDKSSEGAQFVQGFGGIGAILRYKVNFEQLADESSEDEYYDDDDDSFI

SEQ ID NO: 7206 - protein, 317 aa, Candida albicans
MVELSDYQRQEKVGEGTYGVVYKALDTKHNNRVVALKKIRLESEDEGVPSTAIREISLLKEMKDDNIVRLYDIIHSDSHKLYLVFEFLDLDLKKYMESIPQGVGLGANMIKRFMNQLIRGIKHCHSHRVLHRDLKPQNLLIDKEGNLKLADFGLARAFGVPLRAYTHEVVTLWYRAPEILLGGKQYSTGVDMWSVGCIFAEMCNRKPLFPGDSEIDEIFRIFRILGTPNEEIWPDVNYLPDFKSSFPQWKKKPLSEAVPSLDANGIDLLDQMLVYDPSRRISAKRALIHPYFNDNDDRDHNNYNEDNIGIDKHQNMQ

SEQ ID NO: 7207 - protein, 550 aa, Candida albicans
MASFKLATDLPEWKKLEETYKSVGEKFSVRDAFAKDPKRFEEFSWIYKNYDDSKILFDFSKNLVNKEILDQLVTLAKEAGVEKLRDAMFAGDHINTTEDRAVYHVALRNRALRKMPVDGKDTAQEVDDVLKHMKEFSDSIRDGSWTGYTGKSITDVVNIGIGGSDLGPVMVTEALKAYSKPGLNVHFISNIDGTHTAETLKNLNPETTLFLIASKTFTTAETITNATSAKNWFLATAKDSKHIAKHFAALSTNEKEVVAFGIDAKNMFGFESWVGGRYSVWSAIGLSVAIYIGFENFNDFLKGAEAMDQHFLTTPLENNIPVIGGLLSVWYNNFFGAQTHLVVPFDQYLHRFPAYLQQLSMESNGKSVTRANVFTNYQTGTILFGEPATNAQHSFFQLVHQGTKLIPADFILAAQSHNPIEKNLHQRMLASNFFAQSEALMVGKDEAKVKAEGATGGLVPHKEFSGNRPTTSILAQKITPATLGSLIAYYEHLTFTEGAIWNINSFDQWGVELGKVLAKVIGKELDDKKAVATHDASTNGLINQFKEWEE

SEQ ID NO: 7208 - protein, 797 aa, Candida albicans
MVDESKQLQGNKDGDKHQTQESTNTSGNSQPSAPTPAQVPSVQQQQQQKSSTQNQQSTTGSARSSQGRSNQPQYSQADLNRIVLEYLNKKGYHRTEAQLRLESSNIPTPAVPLATPATTELASVNEIGDNKDLKEKLTKAEQELKELRDKQSKIEKELREAKDREVKISKEKELKQLKELEKKTKRESDPEIYFTAYSMLRRWVGSSLDLYKPELSRVLYPLYIHCFLELISKGFSSEAKLFFDKFRSDHLVLHGIEVEKFAGLSLPEHLEENDLAVAYRKYKYRILVSKTSLNLLIYFLHENEAVGGGILIRIINQYLDPVISTNRPDKIDQEGEANPEEGISEYVTDTNEVKKFNEQNVKLGKLPIDPDVAKEVEAELKIKDEKIEPVNNKTLTKEFQDMTKPDQDSPVRESLPLPLKDANDIKKMIIQVEDSRSKIKLGAIQASLPSVCMYTFHNTNNNMTCIEFNDDSTLVAAGFQDSYIKLWSLDGKPLKSVLKRDRHKPQENTRKLIGHSGPVYGVSFSPDNKYLLSCSEDKTVRLWSLDTYTALVSYKGHTQPVWDVKFSPLGHYFVTASHDQTARLWATDHIYPLRIFAGHINDVDCVEFHPNSNYVFTGSSDKTCRMWDVHTGNCVRVFLGHTNSVNCLAVSPDGRWLASGGEDGIICVWDIGSGRRLKSMRGHARASLYSLAFSRDGTVLVSGCADNSVRVWDVKKNTNDAGPEPEAFNNNVNGNETNSDGTSSTQQQQQPQQQQQSKKESIATSDHMNAFFTKKTPVYKVQFTRRNLCLAAGAFQG

SEQ ID NO: 7209 - protein, 809 aa, Candida albicans
MKKKRKLIFTLLNILFLFFLQSLSNNHNMSTTTAAVLPTVQLQVNYNEVKTIAKDFITKFKDSMIDIDDEINQTHEGKYMNILQQVANRQKTSINIEFDDLKLFLTNYDPDSSNTYQEARRLLPTMLTNTRHFVELFSQVIDDLMPEPTEEISYRDDVLDVILHQRRLRNARLQQESNEEFNQLRDGFTQPDSAAANVGGQEDNIANPTDANLFPAKLTRRYCLYFVPLSNAKALSVRQTKGKFVGHFITVRGIVTRVSDVKPSALVIAYTCDKCGYEIFQEVNSKTFTPLTECNSPSCVNDNNKGQLFMSTRASKFSAFQEVKIQELSSQVPVGHIPRSLTVHVNGDLVRSMNPGDTVDLSGIFMPSPYTGYRALKAGLLTETYLEAQHVKQHKKQYDSMTLSSQAQDKIDELLLQGDVYNKLAKSIAPEIYGHLDVKKILLLLLCGGVTKEIGDGLKIRGDINVCLMGDPGVAKSQLLKAIGKIAPRSVYTTGRGSSGVGLTAAVMRDPITDEMVLEGGALVLADNGICCIDEFDKMDESDRTAIHEVMEQQTISIAKAGITTTLNARTSILAAANPLYGRYNPRLSPHENINLPAALLSRFDIMFLILDQPSRENDEKLAQHVAYVHMHNKQPDMDFTPVDFNTIREYISRAKTFKPVVAKEVGEYVVQEYVKMRKESHRNEGSTKKFSHVTPRSLLAILRLAQASARLRFDNQVRLDDVDEAIRLIEVSKSSYKEREVEDESSTTKIYNIIKSIVTQDGGDRVALDQIKDRVIAKGFTLEQFEHCIMEYDGIWQVVDDGENLLIL

SEQ ID NO: 7210 - protein, 384 aa, Candida albicans
MSKVPAIYQLGHLPIKDHVFSPDRSILAITKGNDVEVYQISPSNLSSKPQLIAVLKDHDKTVTSVDISPDGSKILTCSQDRNALVWEYANGEYKPTLVLLRINRAATVCRWSPDGSKFAVGSSDRIIAVCYYEEENDWWVSKHLKKPLKLTITTIDWHPNGVLLACGSTDGHVRVFSGYIKGIDAKPDPSVWGIKLPFQTLCGDYTNETNAWIHGVKFSPDGNALAYVSHDSSVGFVYPQGEGLPPRAIFNVNTDNLPFKSVVWLNDQQVCAGGFTCNLVVFQGDENGWQQAYQVEEQKDLTKEVPHSKLGEGDDDDEEISSHQALNMFKQMDLKGRVSKPSAGGKPAKALNTIHQNTINSIRNFDQGRVSTSGIDGKVVIFNV

SEQ ID NO: 7211 - protein, 474 aa, Candida albicans
MSTDSYTPSQEPGSKRLKTGESVFARRGVSPSTGGVASAYGNESEKKPSWLQTNKSDIDGKYDKYGERRNAHTTTRDSRLDRLKRVRQKSAEREDVGHEGDEGDEDEGILPYIHLQAANPAIIHNEKQENYRTFQSRISNRENRDINSIVRAHYNQRTQQAKQQGSRVNSPIYKMRNFNNAIKYILLGNWAKHNPEELDLFSFLDLCCGKGGDLNKCQFIGIDQYIGIDIADLSVKEAFERYTKQKARFRHSNQNSNRYTFEACFATGDCFTQFVPDILEPNFPGIIERAFPVDIVSAQFSLHYSFESEEKVRTLLTNVTRSLRSGGTFIGTIPSSDFIKAKIVDKHLQRDEKGKAKFGNSLYSVTFEKDPPEDGVFRPAFGNKYNYWLKDAVDNVPEYVVPFETLRSLCEEYDLVLKYKKSFTDIFNQEIPKYFSKLNKNLIDGMKRSDGKYGAEGDEKEAVAFYIGFVFEKV

SEQ ID NO: 7212 - protein, 884 aa, Candida albicans
MSIDNQASTALKNSGQEVKNNTNQTSELSKEEKLRKRREQLELWRQKKQQQQQEQEEVQNKAKKTEDSTNNTSTEEVKKSRQQRIEEWKRARLQKQQATKEKTTTITIKKKVHSQTTRPTLKRNLDFGDDEDDRKNSHRPVFKKPSLEYDEISEHQNDKESEDELDVFLASIRESELKSDNTKAEKAIESIPEGDVENEKENDDYGGDGDEEDESDEESRLQDLISTKLTKLQNKGKELQSIDHSQENYQEFRKVFYREAYELSALSDEQVELIRQDLDNIKVKGTDVPRPILKWSHLALPTNLSSVIHDKLKFEKPSAIQSQALPTILSGRDVIGIAKTGSGKTLSYVLPMLRHIQDQQFSKDNQGPIGLILSPTRELALQIEKEILNFTKRNNNLRVCCCYGGSSIENQINELKKGVEIIVGTPGRVIDLLAANSGRVLNLKRCTFVVLDEADRMFDLGFEPQVNKILTQIRPDRQTVLFSATFPRKMETLAKQILTDPVVIIVGGISVVAPEIKQEVVLFETSAEEQDKYKQQRVEKLHDILANYQIEHPDSKILVFTEKQNDADELVANLLSNRYPASAIHGGKDQMDRKYAIKEFASMDSGINILIATSIAARGLDVRNLGLVINFDPPNHMEDYVHRVGRTGRAGAKGNAITFVSSSQPKEVFNLVKALKLSHSDIDPKLEEIANKFVTKVKAGKEKISSGFGGKGLDNLQEVRDNKLKLEKQRFGDQQPQRQQEETETKKSNDEPVPDIALPEFNIIEGNTPETSGPDKCKFYCRIVINDLPQKVRWNIVQRESLSKIIDESRTSITTRGQYYPPGSKPLSNDQERNGSLAKLYLLVEGLTLQSVTEAITLIKKKMLESLDILNQRENLQPTGRYVV

SEQ ID NO: 7213 - protein, 115 aa, Candida albicans
MQPKSISLLQKIDSIIETIIVKFTNIFENLQDANKTTEILSMESLAMENNCIQIIRLCQDLISISRNLKEIWVLNSIKVTQEKFEWKQEEIDIMFTQFNLLTDKIAEFETDMNKE

SEQ ID NO: 7214 - protein, 150 aa, Candida albicans
MSSSYYFSIIGTKDNPLYELEFSSFKSANISTTDNVPGKSQFPQSTKELLPFIANSSLDLIDDQAFTTNVLNLGKIDQFYGLSINAYVLQSQVKFILCYNSKEESTIKQFFQEVNELYTKCLMNPFYNVDDAIVSPDFDLKIKQLARKYL

SEQ ID NO: 7215 - protein, 501 aa, Candida albicans
MTYSIRTVTNYLNSLAPRFLLSKGDIEILESPITFYKTLLFKISNSKHRIFLSSLYIGKTQHELIQCIDDAMAKNADLKVYVLTDALRGTREAPDNCSALLLASLQKKYGQRIDIRMFHTPHLSGITKFLAPKRINEGFGLQHMKLYGFDDQIILSGANLSEDYFTNRQDRYYLFNNKPLTDYYFKIHTAISSLSYRIMHTDKLKQGFKLTWPTSNATCEPHLNIERFISDSSYLLTPLLKQQQLNAFEEFDENEEYDTIVYPVSQFTPLFPHNQDQSTEKPAILRLLSYADSLKTKWWFTAGYFNMLPEYQQRLLNGKSQGTVITASPKANSFYKSPGVSYYLPQAYLLFAKQFLQKVRDLGKSALITVYEWQKGIVNTPGGWSYHAKGLWITAPGEDEPSITVIGSSNYTKRAYSCDLESNAIIITKDKDLKMKMKHEIDNLMENVHELKLEDFSPKLESQVNGDAETESVDEPKYSVEEDRKISYGVHLAVKLLGGRL

SEQ ID NO: 7216 - protein, 488 aa, Candida albicans
MYKSIFKTTGRLGKTVSSRNFVTTLPKPLATSSSPATNAPNKTSNPKTGELHVSTPVDTAKISIEPPEGSSISLKSASRDASLFGTRPIYLDVQATTPVDPRVLDKMLEFYTGLYGNPHSSTHAYGWETDKEVEKARTYIADVINADPKEIIFTSGATETNNMAIKGVPRFYKKTKKHIITTQTEHKCVLDSARHMQDEGFEVTYLPVSSEGLINLDDLKKAIRKDTVLVSIMAVNNEIGVIQPLKEIGKICRENKVFFHTDAAQAYGKIPIDVNEMNIDLLSISSHKIYGPKGIGACYVRRRPRVRLDPIITGGGQERGLRSGTLAPPLVAGFGEAARLMKQESSFDKRHIEKLSSKLKNGLLSIPSTQFNGCNDAKSQYPGCVNVSFAYIEGESLLMALKDIALSSGSACTSASLEPSYVLHALGADDALAHSSIRFGIGRFTTEAEVDYVIQAINERVDFLRKMSPLWEMVQEGIDLNTIEWSGH

SEQ ID NO: 7217 - protein, 849 aa, Candida albicans
  MISC_FEATURE (140)..(140): X=any amino acid
MDIHHKLHSKGRLDRYYYLAKEKGYRARSSFKIIQINEKYGHFLEKSKVVIDLCAAPGSWCQVASQLCPINSLIIGVDIVPIKPLPNVITFQSDITTEDCRSRLRGHMKTWKADTVLHDGAPNVGLGWVQDAFTQSQLTXQALKLAVENLTAGGTFVTKIFRSRDYNNLMWVFQQLFEKVEATKPPASRNVSAEIFVVCKGFKAPKKLDPRLLDPKEVFEELGGGNESKQNNEAKIFNPEKFSSQRQRQGYQEGDYTLFHTMPIMDFIKQDDPINQLGSLNKFDLPAPKDDDNDDDDHDHDHEWKILSKLKLCTPELLECIKDLKVLGRKEFKMILKFRKQARDILGIDKDEEEEEENPKIEVEPLTEEQKIDQELQDLINKQKQKAKRLKKNANELKQKEIIRNQMNMLTDMNIGIEAAQIGADSLFNLKTAEKTGQLDKLAKGKKKMIFNDEELAKDNEIHIDEEEINDNDKDSADELDELENQLDDMYHQYQARKAERDANYRAKQARGDADDEAWNGIEEDNDDVESGKDYEMESESDDDDDEHIRLIAEKKSNGSLSRTARNFFASDSIFNELSDDVILEEIENKTKGSNGKMVESIQEQVANDNNENDDGDNDDNDEEESDFEIVPNQKSDDDDDDESMNSDDDEVSTTTKSTTHQQKVDLATVEAMTLAHQVALGQKNKYDLIDEGINRYSFRDKDNLPDWFIDDEKKHSKLIKPITKEAAIAIKEKQKQLNARPIKKVLEAQSRKKLRALKRLEKIKKKSDLINEDSGKSERDKADEISKLMKKLNKKQKQKPKTTVVVARGSNRGLSGRPKGVKGKYKMVDGVMKNEQRALKRIAKKYKK

SEQ ID NO: 7218 - protein, 417 aa, Candida albicans
MSLSNKLSVKDLDVAGKRVFIRVDFNVPLDGKTITNNQRIVAALPTIKYVEEHKPKYIVLASHLGRPNGERNDKYSLAPVATELEKLLGQKVTFLNDCVGPEVTKAVENAKDGEIFLLENLRYHIEEEGSSKDKDGKKVKADPEAVKKFRQELTSLADVYINDAFGTAHRAHSSMVGLEVPQRAAGFLMSKELEYFAKALENPERPFLAILGGAKVSDKIQLIDNLLDKVDMLIVGGGMAFTFKKILNKMPIGDSLFDEAGAKNVEHLVEKAKKNNVELILPVDFVTADKFDKDAKTSSATDAEGIPDNWMGLDCGPKSVELFQQAVAKAKTIVWNGPPGVFEFEKFANGTKSLLDAAVKSAENGNIVIIGGGDTATVAKKYGVVEKLSHVSTGGGASLELLEGKDLPGVVALSNKN

SEQ ID NO: 7219 - protein, 922 aa, Candida albicans
MKSDFKFSNLLGTVYRKGNLVFNQDGTKLLSPVGNRVSCFDLIKSQSFTFDYQHRKNVQCIALNNQNTLMISIDEDGRAILVNFVSRVVLHHFNFKSKVNDIKFSPCGKYFAIAIDRFIQVWKTPDLTEDRQFAPFVRHRIYSGHFDEVLNISWSLDSRFFISTSKDMTAKIFSLNSDEKDVAMTFSGHRDYVINAFFSHDQEIIYTVSKDGALFKWEYTERPKPENEDSDSEDDATDKPMSWRITAKNFFYADGKLKCACFHPQSKLLVVGFTNGEFRLYEIEDFNLIQSLSMGQNAVNTVNINKTGEWLAFGSAKLGQLLVYEWQSESYILKQQGHFDSMNTLCYSPDGSRLVTGSDDGKIKIWDVRSGFCLMTFTEHTSAVTQVQFAKRGQVLFSSSLDGTIRAWDLIRFRNFKTFTATSRVQFNCLAVDPSGEVIVGGSQDTFEIYVWSVQTGQLLDSLTGHEGPISCLTFGKENSILASASWDKTIRIWNIFSRNQTVEPIEIQSDALCLTMRPDCKELAVSTLDGHVTIFDIEDAKQLHLIDGRKDIVNGRYLEDKFIAKNSNRGKYFSTIAYSFDGLTLLAAGNNNSICMYDIENEVLLKRFIVSENMSLDGTLQFLNSSKITDAGTNSDLIDRAGELSDLEDRVDNSLPGSHRGGDPSERRTRPEVRVTAVEFSPTTAAFAAASTEGLLIFSINQELIFDPFDLDVDVTPEATLESLKEKEYLVALVMAFRLNENYLIHRVIESIPLQDIKLVCQDLPVIYVNRVLNFIGELLTKKESPHIEYYLIMVKNLLIQHGRYISSNKFEFQSSMKLLSRFLNKTAKDVINVGKRNDHLLTYLTVSKDLKTASGHSEGEENIEMNEDSEAEDIDIDEDDDDEEGWLGPNGNSVKAANGIVFSGPADSSDEEDEDELIEV

SEQ ID NO: 7220 - protein, 520 aa, Candida albicans
  MISC_FEATURE (277)..(277): X=any amino acid
  MISC_FEATURE (408)..(408): X=any amino acid
MATVIPPPSKKQKREAQKVRELDLIPKDLPNVLIKFQASDTGESTGGSIRVPGGITEKQLEELLNNLQGESDDPVPYTFSLLNSDEKDTTNNNNKLIDIKDDLYHSVLKPGIKTTEDFLTLVYTPRAIFKVKPITRSNAAIAGHGSTILCCAFAPNDSSRMCSGAGDSTARIWDCNTQTPLHTLSGHSNWVLCVTYSPDGKLIATGSMDNTIRLWDATTGKPVGKPLLGHSKWVSSLSWDPLHFVHASDNPRLVSGSKDGTVKVWDTTAKNLCHDIXVVISEPFLVLNGSVQTLFIVRLMIQTIKAWDISANGKCIQTLKSHAHWVNHLSLSTDYVLRKGGFDHTSNRTTQISPEELRARALQQYEKVAKLNGSISERLVTASDDFTMYFWEPLKSSKPICRMTGHQXLVNHVNFSPDGRFVVSSSFDNSIKLWDGIRGTFISTLRGHVAPVYQTAWSADNRLLVSCSKDTTLKVWDIRTKKLSVDLPGHSDEVYAVDWSLDGKRVASGGKDKMIRLWSH

SEQ ID NO: 7221 - protein, 513 aa, Candida albicans
MSNFIEVQRSNIEEIGIIEDSLSRRLLRNPYILPSNLQPRPNILVSKVTKPNSTKRISILQQYELGYFKDRYNQIIKGLNHCLTDEKESFSRTLELITEPGDGFEKFDEMINGISSNDNIVEDPRKLYSSFSSLNKELNPQDVTLKINKKTGKEQEFVKRKHFLSSIASHLKNIEINDILDLHHFHDLYVSNFGPISYIEYLYKFSSFPYTNVNGFYSKYLTELSRFLEATLLKLQPLLDYNALLQNWKKEYDNANEERKSNGNDGDKLFCKACNKLFSKETVYQSHLSGKKHKKNASQQNPDNFVSSLPWLEYFIEKLCQVLAPELEYTRAQVEKLSNLSERELQLDRQVQHDIENEFVAINNEFDDDDLSQNEHGDDDDNDDYLDDSFKNLPLGPDGTPIPFWLYKLQELHKQYNCEICGNISYKGKSVFMKHFSGSKHQYGLKCLGVDEKNMKMFKNITKIDEATELWKVLRKETKLKVTELENSVEVEDKEGNVMSEKDYIDLKKQGLL

SEQ ID NO: 7222 - protein, 256 aa, Candida albicans
MDYSGRVNSKKGAGGIASNEDINIQTKQRVQELLSTHVLDIDNDPYVFRNHLGMLECKLCLTTHINESSYISHLGGRKHHLNLERRRILDEKQNKSREHQLSSQNILSINNIEKRSWKKIGKPIYKITKVRDPETLRTGILVNIKLPKITVKEPMFRIMSYYELTSKNQNSCRNFIEKYKSDDDDDAEDDDDSDGGDDNKYQYLVVSAEPYDNIAIVIPNKHEIDKPLEENKMSDSYWWYWDNDTKEFFLQFLYKL

SEQ ID NO: 7223 - protein, 362 aa, Candida albicans
MKGLILVGGYGTRLRPLTLTLPKPLVEFGNRPMILHQIEALAAAGVTDIVLAVNYRPEVMVSTLKKYEEEYGVSITFSVEEEPLGTAGPLKLAEEVLKKDDSPFFVLNSDVICDYPFKELADFHKAHGAAGTIVATKVDEPSKYGVIVHDRDTPNLIDRFVEKPVEFVGNRINAGLYILNPSVIDLIEMRPTSIEKETFPILVEQKQLYSFDLEGYWMDVGQPKDFLSGTCLYLTSLSKKHPEKLCKEKYVHGGNVLIDPTAKIHPSALIGPNVTIGPNVVVGEGARIQRSVLLANSQVKDHAWVKSTIVGWNSRIGKWARTEGVTVLGDDVEVKNEIYVNGAKVLPHKSISSNVEKESIIM

SEQ ID NO: 7224 - protein, 842 aa, Candida albicans
MANSHRNTLKHDHKPFKSKHATKGQIKARIKGKVEKSSNSSGGSKSSKVVSKLERKNLSKQQRDNKILETKLTKKLFEGNSGAEKIVTIITLTNDLSAVDIANRLFNEQEDTSNESITRFDFGYPSVTNINIAKFKTNLKVIIPKQNNMISILDAAQVSDFVLLGISATEEIGENSFGETVLRALIAQGISTTIGVLPNIVSAYPKRNLQLDVKQSLQSFYHHFFPSRDGSSNRGSGTDSGGNKLYSLELDSDNSNCLRIICQKFPQSITWRDSRGWLVADKVEIFNPNGMPVENQQQMMVVEGMVRGVGFNVNRLVHLPGLGDFQLHKLEKLARKARGNSSRNHRGGMDIDTGNDGDAEETFLPNEQQESLDELNPDEGIDMGTMEDDDDFLNNDNFGVRSEGKIYFDNGNSNGTSSSSTGKKLVPRGTSEYQGRWFVDDVLDEDASDLEEQREGEGEEEEDANIVDDDMMVEDNMEADDITDSIHDSEMMHVDLSPEEESRQLEEYRSLAKDDLEFPDEIELHPNESAIERLKGFRGVKSLGNCDWDYDEYDPEAPSILKRLFQVSNYKATKNKVNKQFIKQTEITAGNRVRLYIIIPPGASNNVSSVIGSCSSVPFPVYELLEHEHKLGVCNFSFEAWQDYEKPIINKEQIIVQYGPRRQIIQPLYNQANNNPNNVHKLENFVHHNQGGGGAIIATAITPVLFTNSPTLFFKIHPDADDSSNSNGGSVEFVGKGTYLGSDAKRIMVQRVVLTGHPIKIHKRVVTIRYMFFNREDINYFKAVSLFTKNSGRVGFIKESLGTHGYFKANFDGKLTSQDVVAMSLYKRSWPEVSTAWNKFNY

SEQ ID NO: 7225 - protein, 433 aa, Candida albicans
MSHEGQEELLDYSDSEEIAVSTTTQASGEAQSNDKESDKKGSYVGIHATGFRDFLLKPELLRAIGDCGFEHPSEVQQVCIPQSILGTDVLCQAKSGLGKTAVFVLSTLQQLDPVPGEISTLVICHTRELAYQIRNEYARFSKYMPDVKTDVFYGGTPIKRDIEKLKNKDTCPHIVVATPGRLHALVEEKAIRLNNVKSFVIDECDKVLESIDMRRDVQDIFRATPHQKQVMMFSATLSQDIRPVCKKFMQNPLEIYVDDEAKLTLHGLQQYYIKLDEKEKNRKLSDLLDSLEFNQVIIFVKSTRRANELNKLLCACNFPSIAVHSGLPQEERIERYRSFKEFNKRICVSTDVFGRGIDIERINLAINYDLPNEADQYLHRVGRAGRFGTKGLAVSFVSSKEDEEVLEKIQSRFDVKITEFPEEGVDPSTYMNT

SEQ ID NO: 7226 - protein, 231 aa, Candida albicans
MAEEQRRQIEQLMGKENGSSIRRRDPEMTSSRVCRAFLVGTCPHDLFVGTKQDLGRCPNLHLQKHKLEYEHRTKKLGEKFPDIEYDYYKLLSKYVSDLDRNIHNAQLRLQHTPEEKAKIARVTKELDDLDVEIGLMVQELNYLVAKNQASKIIDYAIELNAKCEEREKLSQQARRITENVGQTSQQKLQVCDGCGAYLSRLDNDRRLADHFVGKIHMGYLENTRKLQGGTK

SEQ ID NO: 7227 - protein, 826 aa, Candida albicans
MTGEEDKKQHFDASGASAVDDKTATAILRRKKKDNALVVDDATNDDNSVITMSSNTMELLQLFRGDTVLVKGKKRKDTVLIVLADDDMPDGVARVNRCVRNNLRVRLGDIVTVHPCPDIKYANRISVLPIADTVEGINGSLFDLYLKPYFVEAYRPVRKGDLFTVRGGMRQVEFKVVEVDPEEIAIVAQDTIIHCEGEPINREDEENSLNEVGYDDIGGCKKQMAQIRELVELPLRHPQLFKSIGIKPPKGILMYGPPGTGKTIMARAVANETGAFFFLINGPEIMSKMAGESESNLRKAFEEAEKNSPSIIFIDEIDSIAPKRDKTNGEVERRVVSQLLTLMDGMKARSNVVVIAATNRPNSIDPALRRFGRFDREVDIGVPDAEGRLEILRIHTKNMKLADDVDLEAIASETHGFVGADIASLCSEAAMQQIREKMDLIDLEEETIDTEVLNSLGVTQDNFRFALGNSNPSALRETVVENVNVTWDDIGGLDNIKNELKETVEYPVLHPDQYQKFGLAPTKGVLFFGPPGTGKTLLAKAVATEVSANFISVKGPELLSMWYGESESNIRDIFDKARAAAPTVVFLDELDSIAKARGGSHGDAGGASDRVVNQLLTEMDGMNAKKNVFVIGATNRPDQIDPALLRPGRLDQLIYVPLPDEPARLSILQAQLRNTPLEPGLDLNEIAKITHGFSGADLSYIVQRSAKFAIKDSIEAQVKINKIKEEKEKVKTEDVDMKVDEVEEEDPVPYITRAHFEEAMKTAKRSVSDAELRRYESYAQQLQASRGQFSSFRFNENAGATDNGSAAGANSGAAFGNVEEEDDLYS

SEQ ID NO: 7228 - protein, 752 aa, Candida albicans
MSSTLPPFSDLNATWTFIQPGLEYILGAHGEQGVTATVYMNCYTAVYNYCVNKSRRGTTPVSISNNSDNNSYSLAGAEIYKKLEEYLTEFIKNLKRLPNESFLEFYVRKWTRFTIGAVYMNNVFDYMNRYWVQKERSDGRKDVYDVNTLSFIKWKDEMFKPNSKLLIEQILTCIQQQRDNMIVDTNLISSAIKSLVFLSIDIQDLKKPNLIIYVNSFEIPFLEATMEYYAKESAAFLASHNVIDYMKKCETRIGEEVSRSNNYLEERTKKPLLEVLNAALIEKHANEMYDQFLVLLEQNQIDHIQRMYKLLARVQKTLDPLANTLELYIKKEAAAALEEIQTQAENSEAKKKIVEPKVYVHTLISIYNRFNDIVVRAFSKDTKFIKSLDNACRHFVNNNPIATPKPRSPCRTPELLARYADGFLKSNSKDNEMNADNLMIVFKFIAERDSFEEHYRRLLAKRLVNGTSKSEEMEESVIHRLQEENSIEYTSKMTKMFTDIKASDDLKIKFKDGMNVLFDFSPMVLARSTWPFHSSQDYNDLKLAPELKVTIDSFKAMYLQQGKGKQIEWLWNHGRAELKAHLTKGKGGKPFNFIVSQIQLMVLLAYNYSKTYTLDDLVKIVGIKKELLQNHVTPFVKYKLLKEEGDQLVIVDHYPSKKNKVSFIGAITKTKEEDVEEITKEVQQSRTIFLEASIVRIMKSKKSMAPNNLLNEVVVQAGNRFNAKNIDVKRAIDSLIDKEYLKRNGDDYEYIS

SEQ ID NO: 7229 - protein, 665 aa, Candida albicans
MNVLVYSGPGTTTEGVKHCLETLRLHLGSYYAVLPVNETVLLNEPWMRKTSLLVIPGGADLPYCNVLDGNGTRKISKYVKQGGKFLGLCAGGYFGSARCEFEVGNPTMEVTGPRELGFFPGTAKGCAFKGFKYESRTGARAVKLSVNTAALPGCASHIYNYYDGGAVFANAEKYKDVEILARYDDKTDIVDLEKAAVVYRKVGKGGVILSGTHPEFAPHLLHPRDEDGAGYFIVVDTLRAYDHNKKVFMRDCLKKLGLRVAESVDTTIPRVTPMYVVSPFKDKVRDVYSILTSKLGKSFEDSNDAFYFADETQETSEYVGSEEDPVKYINFLTSAGIPDLKMVPYFDIQKYFDNLRMLSGGDIKFGSILGYSEVITSTNTIMDKNPQWLEHLPNGFTITATTQIAGRGRGGNVWVNPRGVLATSVLFKIPPSPSSSSTVVTLQYLCGLALIESILGYGSNVSGQGVGYEDMPLRLKWPNDIFIMKPEYFKSLDDKSDISATVDGDDEKFVKVSGALINSQFINKTFYLVWGGGVNVSNPAPTTSLNLVLEKLNEIRRGKGLSPLPPYEPEILLAKLMFTIDQFYSVFEKSGLQPFLPLYYKRWFHTNQKVDVDNGSGKQRTCIIKGITPDYGLLIAEDVETKKVLHLQPDGNSFDIFKGLVYKKN

SEQ ID NO: 7230 - protein, 498 aa, Candida albicans
MSSVVYYKFLHQKNKSVIHFDGTSISVFDLKKEIILQNQLGSGQDFNLRLYHSEQPDQEYELDQDVIPRSSYVLAKRSPAFVKSGKYNNASRYITGKPRINRKAITSTVGHNSNSNPLVSAQLQQQQQQQLDENATEEDRIKLMFQNQSNAWEQTQEDLAHHKMVFNKPTASSTANKQDDHPPPGYICYRCGKKDHWIKNCPTNNDPNFEGKKIMRTTGIPKSYLKTISREEVESKANTLTTNDNGDVVDSEGNVILITDDGDYAIAMADSKTWQNYQEKLQNAALKSKREYESKLVAEIEKDNKWEFLDPLANTKAVLTSPIVMTPCCTDSSKLQNLKNFNYNQPELERVLIDNDFHCPNCGKADVFLDSVIPNKDLEEKLKEYVSSKEKELNIKDPSKRTAAEMTADDNNDPHHSGEPDAKKQKIVPNTVQPGMFPVGVMPPPPPPMPFALPPGLQIPPPGFGMVPPPNFMPPTQGQQFNNNNNNNNSNNQFNQPK

SEQ ID NO: 7231 - protein, 343 aa, Candida albicans
MSTAAVATKPSVTSKPATKQVSNYTKEKKVGEGTYAVVYLGKQISTKRQIAIKEIKTGLFKDGLDMSALREVKYLQELKHPNVIELVDVFSATNNLNLVLEFLPCDLEVLIKDKSIVFKSADIKSWLLMTLRGIHHCHRNFILHRDLKPNNLLLAPDGQLKIADFGLARALVNPNEDLSSNVVTRWYRAPELLFGARHYTGAVDIWSIGIIFAELMLRIPYLPGKDDVDQLDVTFRAYGTPTEQIWPNVSSLPMYNALHVYPPPSRQELRNRFSAATEKALDLLISMTQLDPSRRCDSTLALLHDYFTESPRPTDPKKLPKKSSPEKRENEDEQNNGSKRRHV

SEQ ID NO: 7232 - protein, 359 aa, Candida albicans
MAPPAVLSKSGVIYGKDVKDLFDYAQEKGFAIPAINVTSSSTVVAALEAARDNKAPIILQTSQGGAAYFAGKGVDNKDQAASIAGSIAAAHYIRAIAPTYGIPVVLHTDHCAKKLLPWFDGMLKADEEFFAKTGTPLFSSHMLDLSEETDDENIATCAKYFERMAKMGQWLEMEIGITGGEEDGVNNEHVEKDALYTSPETVFAVYESLHKISPNFSIAAAFGNVHGVYKPGNVQLRPEILGDHQVYAKKQIGTDAKHPLYLVFHGGSGSTQEEFNTAIKNGVVKVNLDTDCQYAYLTGIRDYVTNKIEYLKAPVGNPEGADKPNKKYFDPRVWVREGEKTMSKRIAEALDIFHTKGQL

SEQ ID NO: 7233 - protein, 467 aa, Candida albicans
MNIKLFRHLPKSITRSIIMSKFSPPINRNMVELDRSFFHKEVPLLAAYFPNPKFLGQFVKSCQNDILYVQTVKHIISMDDSKAILLRDDVKSISDLNPETQLKINEFGIILKPYTLKLDYSFWKSEEILKSILPENLIDDVPSGFSQAGHLAHINLRDEYKPFGKLIGQVILDKNPSVLTVVDKVNTIANKFRTFPLELLAGEPNYIVEQSESGCKFKFDFSKVYWNSRLSTEHERIIGKFNSGDVVGDVFGGVGPFAIPASKKNVIVLANDLNPESYKYLQENIKINKVEPFIKPFNLDGREFIRKAPELLLQWHNSQNGIIEKKIIKKVSIDDNKTKKNFERKPIIETTKIPKFYHHFVMNLPDSALTFLDEFIGLYGSNPQLKTDPEFKLPIIHVHCFEKFENNENPTPEELHNRVYEKICKLIQFPLNKEKMEFHEVRMVSPTKPMFCVSFELPEEVAFKQSK

SEQ ID NO: 7234 - protein, 240 aa, Candida albicans
MELYSPEGLRIDGRRWNELRRFECRINTHPNSSDGSSYVEQGNTKVMCTVQGPIEPALRSQQHSERANIEVNLNIASFSTFERKKRSRNERRLVELKTTLEKTFEESVMINLYPRTNIVINVQVLCQDGGMLAAVINSITLALIDAGISMYDYVSGVSCGLYDQTPLLDVNNLEEHDMSCLTVGVIGKSEKLALMLLEDKMPLDRLESVLSIGIAGSHKIRELMDQEVRKHGIIRASKMQ

SEQ ID NO: 7235 - protein, 207 aa, Candida albicans
MPPPDKARRDVLISKALSYLLRHGAEKEKLSIDDQGYVKISDVLSHQRLKSLKTTRDDINRIVQENDKKRFTIKDDMICANQGHSLKAVKNDNLTPMTVDELNQLRIYHGTYRTKLPLIKSSGGLSKMNRNHIHFTCEQYSTCSGIRYNANVLIYINASKCIEHGIVFYKSLNNVILTSGDKDGKLSWEFIDRIVGLDGNEINKEQV

SEQ ID NO: 7236 - protein, 315 aa, Candida albicans
MTVSPNTAEQAYLDLCKRIIDEGEHRPDRTGTGTKSLFAPPQLRFDLSNDTFPLLTTKKVFSKGIIHELLWFVAGSTDAKILSEKGVKIWEGNGSREFLDKLGLTHRREGDLGPVYGFQWRHFGAEYKDCDSDYTGQGFDQLQDVIKKLKTNPYDRRIIMSAWNPPDFAKMALPPCHVFCQFYVNFPTSSPDPNNPKQAKTAKPKLSCLLYQRSCDMGLGVPFNIASYALLTKMIAHVVDMDCGEFIHTLGDAHVYLDHIDALKEQFERIPKQFPKLVIKEERKNEIKSIDDFKFEDFEIVGYEPYPPIKMKMSV

SEQ ID NO: 7237 - protein, 397 aa, Candida albicans
MNQLLINKHEKFFNRCLIGLPSTAQSEDSNKLAIIYFCLHGLQLIQKFQFTNQELIYYRNFIINQFMIENNQIISFRSTYYFQKTNQKYDCPNLSSTLFALYNLLILKSPYHTIINRKKIMNFLCKCQVKDGINKGGFVPTLYYNEENGDYKQYGEPDLRVCYMALLIRHLMKYDDNNNNNNNNNNNNNREDSNETDIDLISLQQFILDRININGGFSSTIMDESHLGFTFCAIASLKLLNYPLEKLKSTKEWLIHRQVDYPENLYPKDGNGDGNGNGDNYEYYRNIDIGGFNGRENKLSDTCYSWWCTGSLYNIDVNFIKLVDLNKAEDYLLNKTQNQLFGGFGRDPDSTPDPMHSYLALASLSLWNHEKFALQEINPILTITKESYQFFKEEIKY

SEQ ID NO: 7238 - protein, 1710 aa, Candida albicans
  MISC_FEATURE (1710)..(1710): X=any amino acid
MDYSGITRGSIRAEALKKLAELTVQNPSSNLKEVNTGIQKDDFSKLLSATPKLLNSRGKLNGSVSNGGGAGGSSGVRDRLSEVAIAKKEYEVIIALSDATKEPMKVDSQIQALINKFKAYLFELPDQKFAYSIVSNSATISPWNLLGEKLTTGLINLAMQNTKQYLDEVVDIFQEFIEKFFDNMNLHLTHFLTLAGVLDGFNQNAKFLSISSRTYKIFIALDSNIDDADFLNDVENYTDYLYDEPNEFQDLLTRDFVINFSPILYLESLSRLMCAIVNGIIDNKDQSLLHYILEKVANKYDQVDDKSNSAVFAKDNLDFSRAHMDIINNLTGLALRKLEFLDRGETYIVYSTYDRLKLGYLAKSHNLQILSCGMFTDNLDLKTSRKLFKSSIEIRDVMLDPDLGLTVFEFGSLLVYKDESIGPSLTRAFTSVIANPKLDPHYCLKASKAVGLGTKKLPQDTVVTTIYSLTNLLFVTNEGLLLPSKSTKRFNTGLSGGDNLLGREAFASPMSSRRTSFTSFSQAFSKGANSSEFDENDYRKVCENAVTGIIEVCEKCNDESVPALTCTILSQKVSKIDSPIGPLILKGLSSCAPFLPEREFVILIRLLNKISFDALEKKNMVLMGYLTESKMLLAEKLKVSNPLFTVYLHELLQTINSKGDVQQLEHHRSHNEISEVGDQIAIYLKPLAALLPDVHLGEKPLEIKSTVTINLFRNIWFNMVVHGYNINSKNTKTFRNELERIAYNSPPLASELSWDRTETSIELNTVLRRGSSNHNIKDHRHYLGNIFEVHRSLSYPKLMFLSAAVFVESLRVRNGNCSDSLLYFTDPTFKISGVDKYLGHISFKIVKDFIQLINTGANKQFSADHIAEQLTTMLIYCCYPVPEMQDAAMQCCDLLISRVPSSLCHKKSLFAVFDLLTLLFDSIADADVHEYEPTTVFRARCTGIKVSMSDDYHWRTSTFNRFHDKCKHWLKILLHKCNIDVKSLIQSYISANESLQFDSPVQFGLSFALEMAGAISSNDREWSAITYANSSNLNALPTIVSQLSWRSSFVTEIMNKLPLRTDEETDFAFQAIREKVYYIKARLVPGDNGGFDYPTNDEIMKLLSEIAGLTLLSDVNNAELIRYLVEIPFTMFVPSIMITASGVWFAVMKDKPQLSVLLLSEIAKKWEESIQLRKGVFSQEFDLVHPEFEKMEYAPSNRVLVNKEADNAQKNFAPHLEIIRLFASNFEATLNQSDHLLKIFTRFVEVGLENLKIASYHPLSRLVRFELVKFSFELLQYHIKLGSRSSKYLSELILDGALTWFRQRSTYPFGGNKLKFKSELILLKEVAKFVTGLNNFQSELIDMKAKILLYFMDDEICKFTVWLHSMNPSDTSGTYVNQQIGGQHLKFAYEIDPILAVNLAMRYKLKSLDELLQQLIIKDPLPAISYPDAVQFFIGINAGTHMPSYHLLFWAPLAPIDSITLFLPPFGSNSYILQYTMRSLESHDVNLTFFYVPQIVQSLRFDYKGYVERFIVETAKVSQLFAHQIIWNMLANSYKDEDSQEPDDLKPTLDRIQQTMLKSFSAHDLKFYEKEFGFFNEVTSISGKLKPYIKKSKAEKKEKIDEEMALIKVEPGVYLPSNPDGVVIDINRKSGRPLQSHAKAPFMATFKIKKELVDYDEQGHKQSFEIEKWQSAIFKVGDDCRQDVLALQLISMFRTIWSNAGLDLYVFPYX

SEQ ID NO: 7239 - protein, 226 aa, Candida albicans
MSKHIEDSLKICTVCASNNNRSMESHKQLMDAGYDVHSFGTGTAVRLPGPSVDKPNVYEFGTPYQVMYDDLISQKSRKLYESNGLIHMLERNKSVKEAPEKWHRNAPLGKFDLVITCEERCFDSVIDDLMHRMYDRDPSDNDDVKRLVHVINIDIKDDNENAIIGGKGILKLVNMIHDFRRKKKQELGHDLEDESDIILEDQMMSIITEWQRDHTNLPTLYSVSYY

SEQ ID NO: 7240 - protein, 176 aa, Candida albicans
MTVSNNTSVTYPIQQQATIIAGFGRGSSELGIPTANIPINTELNKLEPGIYYGWCKLIPLTAQCDEIKKRVDGKDVLFNHGNELTNEERDIFPMVMSIGWNPYYHNKDKTAEVHIIHKFQKNFYGSKIEYVVLGYIRPELNFDSIDELIDTINSDIEFAKSKLKSDEESGKEYFTK

SEQ ID NO: 7241 - protein, 561 aa, Candida albicans
MSVSSSKQPGNDANDANSSVKGVSHLIIVQIIAKLLTFVLNQLIIRYLSPSIIGVTTYLEFICSTILFFSRESIRLSVQRVRNNSDNKDYVAQKVVNFGILAIAFAFPIFMVIGYWQLNYSSVMDKLFVSPFYKPVIVLFVASVILELLVEPIYCLYQFQLDFGKRSKFEGSAIFVKCIVSVLSILLARQYFVDQKFEGVAICAFALAQFSYSLTLFACYLMSFRFEFQNNKINYNLVKLKDENAREFYFEQDTLTIVKGFFVQMIFKQFLTEGDKLLISHLCTIEEQGMYAVMANYGSIIARLLFQPLEESTRLMFTKLLNENTRSQGDEKPQKSESHKCMQTFNYLKLISIFYFNLSLIILFAGVTSGPYLLKLLMGGRASNWESTDIFKLFPQYVVYLPFLAFNGILEALFSSMATNSDLKNFSKFMTLITILVLIFSYLLIDVLNLRISGLILANVFNMSSRIGYCYFKISKFYSKENVKVSFVDIVRYSCPSILITSIIWIIQLFIIGKNTTNFVQLILNACFSFVLVIILMVMERKNSKKPFEKVTNKFMKPKLD

SEQ ID NO: 7242 - protein, 496 aa, Candida albicans
MSLTLDELTQLKKQVKERDEEIDLLNAFINKNPRLSSPCVIVHGYKSIGKTFTVTKFLKALGTNFSTINCDECVSKKILLRRCFDRIRIDSGCPIGSLNTRNDLAKYGNNGDSFSTFVSALELFVEEFDYKLEHHVLLLDRFDQCFEYVNDLLAGFTRLRESSTILQNFTVVVIISGEDPKEIVTLSNPHVYFKVYNESQIISILQESRLCKFNINDVSDDSTESIEFYNQYVKAIVDMLYPYTGSDMSLLIDFTKRLWDPFIEPIRQGRLQITEFVKCLKEGIHLFTNEDVVSTSGVIEFKTLQWEKQVTHGGHVHDLPLHSKFFLLASYLASYGSYRNDLHKYSKVKVVKYKKRQSTKATSVTKGHMSKESIDTRLLSANYVDLERILAILSVIYRNYAPSLNHSDKDELLYMDDRIIEDEEKKESERSKFTLTRNIDLSNQIATLFSLGLLSKTNSSDILTAKVRWKCNIDWKTAEGIAKSVDFPISDFMMDD

SEQ ID NO: 7243 - protein, 168 aa, Candida albicans
MKVYSILILNKAGGLIYQNELVPGLSKLSANDYLVLAGTLHGVHAIGSKLSSTINNNNNPNGEELNAAHNAIILSSGKAGSANSNRTGLQKIETDMFNLYIFQTVSGLKFIMITAPNVANSETVTDELFRHLYILYSDYVMKDPFYSLDMPIKSSLFDGRVKQLFAQS

SEQ ID NO: 7244 - protein, 283 aa, Candida albicans
MIRKQARERREYLYRKALQLQESSLTEKRQQLKAALASGKSLSKELAEDEKLQRDFIYDESEQIEIDDEYSRLSGISDPKVVITTSRDPSVKLLQFSKEIKLMFPNSLKLNRGNYIISDLVSTCNRVQVSDMILLHEHRGVPSSLTVSHFPHGPTAIFTLHNVKLRHDLPNLGNVSESYPHLIFENFQSDLGKRVVKILQHLFPPGVKKDSSRVITFVNNDDYISVRHHVYVKTKDSVELSEIGPRFEMRLYEIRLGLPDNKDADVEWQMRRFIRTANRKNYL

SEQ ID NO: 7245 - protein, 276 aa, Candida albicans
MAAPTAIRKSTEKSGINEQIQENSTLQSNQALDQNNDDEDMLIDTNAIPTTTVEDQDQSEPSNSLTIQQGETTELQLDESGKPKFSAASKSNMKVKLESRKVAVPPHRMTPLKNVWSKIYPPLVEHLKLQVRMNLKTKTVELRTNKYTTDVGALQKGADFVKAFTLGFDVDDAIALLRLDDLYIETFEIKDVKTLTGDHLSRAIGRIAGKDGKTKFAIENATRTRIVLADSKIHILGGFTHIRMAREAVVSLILGSPPGKVYGNLRTVASRMKERY

SEQ ID NO: 7246 - protein, 292 aa, Candida albicans
MSAIYKALQSKSSKETSEKTKHINRQRLLVISSRGITYRHRHLIQDLLALLPHARKEPKFDSKKNLHQLNEVAELYNCNNIFFFECRKHQDLYLWISKPPNGPTLKFHIQNLHTLDELNFTGNCLKGSRPILSFDKSFLENDHYKLLKEMFLQTFGVPPNARKSKPFIDHVMTFSIVDGKIWIRNYQINETLDVKENDKIEDDEDYDVDQLNLVEIGPRLVLTLITVLEGSFSGPKIYENKQYVSPNFVRAQLKQQAADQAKSRSQAALERKIKKRNQVLKADPLSNDALFK

SEQ ID NO: 7247 - protein, 279 aa, Candida albicans
MSLQQDTELEKHLLSRCYDSQSKIVELLQDRYSVTGSQKSTILFKNIVTDTKKPKSLLHQENTQPTKITQERKKTTRQVLREYISGTLNNQRKLIKKIQSHNRKNTTGHQPFPIHQYLQKYKIPNFDDFFQMNKLWQKYAQDLIFQNGNSMQSLSSILPRLTAADFNGCLLTVLQSRNTNVIGTRGIVVWDAQHSFILVVPRNEDSKEWNEEKSRFSPSEMVGGLKVIPKKHTMFGFDIIDPRNENDCYGFTIVGSRFEIRSVERSGKKFKNHSVDDIL

SEQ ID NO: 7248 - protein, 520 aa, Candida albicans
MSNYTQMDPANQPGGAQVATVLCCNCGVPMDGSSGLVMCYDCIKLNVDITEGIPREANVSFCRNCERFLQPPGQWIRAELESRELLALCLRRLKGLNKVRLVDASFIWTEPHSRRIRIKITVQGEAMANTIVQQTFEVEYVVIAMQCPDCAKSYTTNTWRATVQIRQKVPHKRTFLYLEQLILKHNAHVDTVSIQETKDGLDFFYAQKNHAAKMVDFLQAVAPIKVKKSEELVSMDIHSGSSSYKFSYSVEIAPICRDDLVVLPKKLAHSMGNISRLVLCNKITNAIQFMDPNTLQTADLSAPVFWRSPFPSLLDATQMVEFIVLDIEPTGDIRGKYVLADIEVSRASDLGSNDQTFYVRTHLGGILHPGDSCLGYYLTNTNINSELWDTLDTDNTPEVVIVKKHYARKSKKSKNRKWKLKRMAREHNDIVANDDSRQARQEQERAERDYELFLQELEEDDELRQTINLYKAGENQPQVSRNHDDMNDEDEDDDEDAPEIGIDELLDELDDMTLDDTPMN

SEQ ID NO: 7249 - protein, 300 aa, Candida albicans
MYNPYGNAADAYQQQQQQQYQQQQQQPHSTNLQHPQPIHHVSSHQPPPGAAGGQFNFLNDPAAALASQFARSGFEQSNQYLQENFGSLQGDIKYYFQVSNSYVFKKIILILMPYNHKDWNRVSTKETGTNQFLPPNLDINAPDLYLPLMSFVTYILLWAAFQGINGDFHPQLFGYLASQTIAFSVLDVVIFKTGLYLLNCPQSKIYDIISFSGYKYVSIIVLLILKYLVGNYLGSFYYIDVLLLIANLSIFLMRSLRFLILPQSTSMNNTITSKQRKIRIQFLFVYSVIIQGLIILYMSK

SEQ ID NO: 7250 - protein, 218 aa, Candida albicans
  MISC_FEATURE (47)..(48): X=any amino acid
MSKKTTGDDIWKNNVEKIVCIYTHFFEYEVKGFYHVIQITNTHIEFXXLFTLTYGSVVAQLCRDFQNNYIEVNNQLDKMGYNIGLRLIEEFLAKTGIRRCQTFKETAEVISKLGFRIFLNIQPIVENWSNDGKSCSLIIPEPNPLTEFVELPITADSKIAKELWYSQILCGVLRGALQMVQLDCDVSFVKDVLRGDDRTEIRLKLNRILKDEVPAGED

SEQ ID NO: 7251 - protein, 245 aa, Candida albicans
MATRTQFENSNEVGVFSNLTNSYCLVAVGGSENFYSAFEAELGDVIPIVHTTIAGTRIVGRMTSGNRRGLLVPTQTTDQELMHLRDSLPDSIKIQRVEERLSALGNVICCNDYVALVHPDIERETEELIADVLGVEVFRQTIAGNVLVGSYCSLSNQGGLVHPQTSIQDQEELSSLLQVPLVAGTVNRGSSVVGAGMVVNDWLSVAGLDTTAPELSVIESIFRLQDAQPDAIGGNLRDTLIETYS

SEQ ID NO: 7252 - protein, 251 aa, Candida albicans
MAYYQQQMGNPQNMQFYQSNYSYQQPTNAQGTSGMMGSMDSNFGSNIDVSGVMGNGELTPGLLAAFGTSGYPGEPPLLEELGINFQHIRSKTLVVLNPLTKDIPSDIMADSDLAGPILFVLLFGTLLLLAGKVQFGYIYGVGLFGIIGLHYLFKFMSNETTIDLIRSASVLGYCLLPLVLISVLGVVTSLDNLVGYILSAIAVMWCTYSASGFFVSVLKLHNVRPLIAYPLCMFYTVFALMAIFVENVEEK

SEQ ID NO: 7253 - protein, 196 aa, Candida albicans
MNRGRGGFRGGRGGRSGPVQYGPPDTVLEMGSFMQACEGDIVCRSINVKIPYFNAPIYLENKTQVGKVDEILGPLNEVFFTIKPSEGVKAESFKEGDKFYIGPDKLLPLERFLPKPPSVGPKPKRKTGGKSAGGSSRGGFSSRGGGRGGFSSRGGGRGGFSSRGGGRGGFSSRGGGRGGARGNSRGGFRGGRGGRF

SEQ ID NO: 7254 - protein, 249 aa, Candida albicans
MSESFNTYESEFQFAIQEAQTKISQINSVDADIYIYMINTNKDVSTPMVVFGEWDGFENFLVLEQRKNYLKSIEGANEEAREVLDQMTIEVSNLPSNQRSSYNAKIRNYRTELDTVTVTYNKLLDAQDKVELFGSNRYTDDSGDSSEQRKQLLSNNSSLERSSQRLHDSQRIAMETENIGSNILNDLRSQREQINGARNTLSQADNYVDRSVQTLKTMGRRLTANKFISYGIIAVLILLIFLVLFSKFS

SEQ ID NO: 7255 - protein, 535 aa, Candida albicans
MNISILLVSLFLSLACADEIKPSGEFHEHLHLKPLSRNRLLTNFEFDVESSPFQIDYYNSSSPVEASRRSHYNYFPNSLGLIIESTNTKELQLRFTQGWWDASSWGQLPFNGKYSGGTGVEVSAVIEAPNVEVAKRNWLKLTKTLSGFFCASLNFIDDHITTYPKHAVKEINLAEYAPEKGNKLYLLRAALPSEPVCTENLTPFLKLLPTRGKSGISSLLDGHKVFDSLWHGMSIDVTTNCDTNNQCTLKLHQTVNQIVDIIRSLRKRKEGAIPKPTPGDQLRCDTEKTYNSWQCFPLSDPVNLEWNLETIYGRGINGPALADDPQVSKVTIDIDPSSWNIMLLREKENSIEGSSLTNQEETNQIVQYLHENVKFDFQFIAQNSSIVLPIDTPPLYASRSLTGYSLDKGGLRTVFTNNNDEPVKFVYFESTPWFMRLYLHTLRLTLKNSTGLFDIFDHEQYIKDVYFRPAVDRERPSHMELIMEVPAKSTLAISYDFDKSLLLYREYPPDANHGFDVEPAVISVFDKDSEKVYEF

SEQ ID NO: 7256 - protein, 326 aa, Candida albicans
MAKAPKKKFSTASNPTANKVAAEKHLNSVFKFNTNLGQHILKNPLVAQGIVDKAQIKPSDIVLEVGPGTGNLTVRILEKARKVIAVEMDPRMAAELTKRVHGTPQEKKLEILLGDFMKTDLPYFDICISNTPYQISSPLVFKLLNQPRPPRVSILMFQREFAQRLVARPGEELYCRLSANVQMWANVTHIMKVGKNNFRPPPQVESSVVRIEIKNPRPNIDFNEWDGLLRIVFVRKNKTIAAGFKSSNVIEILEKNYKTFLATQESNNNDSMMVDDKSISLKDVVKNKITTVLTETGFSDKRAGKLDQTDFLKLLYAFHQVGIHFA

SEQ ID NO: 7257 - protein, 288 aa, Candida albicans
MSSYSTRQVGAANTLDYKVYIEKDGKLVSPFHDIPLYANEEKTILNMIVEVPRWTNAKLEISKEQKLNPIIQDTKKGKLRFVRNCFPHHGYIHNYGAFPQTWEDPNQSHPETKAKGDNDPLDVCEIGEKVATVGEVKQVKVLGVMALLDEGETDWKVIVIDVNDPLAPKLNDIEDVETHLPGLLRATNEWFRIYKIPDGKPENQFAFSGECKNKKYAEEVIGECAEAWEKLIKGESVDSKGIDLTNTTLSSTPSYSDAAAQEIPSASPAPAAPIDKSIDKWFFISGAH

SEQ ID NO: 7258 - protein, 358 aa, Candida albicans
MPSTHNRDKPWDTPDIDKWALEEFKPEHNASGLHFAEESSFMTLFPKYREQYLRSIWSDVTKALDKHFIKCELDLVEGSMTVKTTTKTFDPAMIIKARDLIKLLARSVPFPQAVKILQDDIACDVIKIGNFVANKDRFIKRRQRLVGPNGNTLKALELLTKCYILVQGNTVSAMGPFKGLKEVRRVVEDCMKNIHPIYYIKELMIKQELSKNPALANEDWSRFLPSFKKRNVARKKKTSKKSVEKKVYTPFPPAQQPRKIDLQIESGEYFLGKKEKELKKLQEKRSKQEEVSETKRQERAKDFEAPEEEVYENKLLKKEKKEKKEKKDKKEKKDKKDKKKKRSHDDEDHSPEPKKSKH

SEQ ID NO: 7259 - protein, 133 aa, Candida albicans
MKVEIVEWKSYCTWHWDLASSDGYVDELCGICRVSYDGTCPNCKYPGDQCPIVLGSGCTHNFHLHCILKWLEQETSKGLCPMCRQIFTFKEQKKQTPEEVAKLKKLIDGHKVMRERPEQADQEFEEYVPETIG

SEQ ID NO: 7260 - protein, 435 aa, Candida albicans
MSGQQLLEEARKAVTNKQYDEAEIKYKQIINPSESSTSTTTTTTTTTTTAKQLQQQESAILELGKIYETLNEPTKLSDLIADSRSILGNFAKSKTAKIVKTLIEDFDKLSAKDEKSLDIQIDVTKSSMQWAIESKLSFLRQSLQLKLSDLLYQKKHHHEAIKIINELLREYKKLDDKSSLVEVQLLESKIYHALRNIPKAKAALTSARTSANSIYCPTILQAELDCQSGILNSEDKDYKTAFSYFYESFEGFNSQDDPRSIIVLKYMLLTKIMLNLIDDVNNILNNKNVIKYKSKDIDAMKSIAMAYSNRSLKEFENSLLTYANELKFDAIIKNHFNALYDNLLEQNLLKIIESYSCVELSHISKVIGLNLQQVEGKLSQMILDKVFYGVLDQGNGWLIIYDEPRKDAAYEASLELVKNLSNVVDLLYEKASSLN

SEQ ID NO: 7261 - protein, 544 aa, Candida albicans
MASVARPAVAPSNATFKDKEKPQEVRKANILAARAVSDAIRTSLGPKGMDKMIRTKNGEIIISNDGATILKHMAVLHPAARMLVDVSHAQDVEAGDGTTTVAILTGAFLGAAERLLSKGIHPTLIAESFQRAAQRSVEILLDMSYKISLDNREQLIRAATTSLSSKIVSQHSQLLAPLAVDSVLKVINEEEISSGPDETIMKKNVDLNDIRLIKKVGGTIDDTHLVNGIVLTQNVVKHAGGPVRVEKAKIGLIQFQISPPKPDMENNVVVNDYRQMDKILKEERAYLLNICKKIKKAKCNVLLIQKSILRDAVNDLALHFLSKLNIMVIKDIERDEVEFLSKAIGCKPIADIDNFTEDRLGTADLIEELDSSGSKIVEITGVTSKNIKPTVSVIIRGANNLVLDETERSLHDALCVIRCLVKQQALIAGGGAPEIEVSRQLMKEANKLSGVEQFVYKEFAQALEVIPTTLAENAGLNPINVVTDLRNRHENGEKDAGISVRRSGASNTYDEHVLQPVLVSTSAIVLASECVKSILRIDDIQFSR

SEQ ID NO: 7262 - protein, 339 aa, Candida albicans
  MISC_FEATURE (339)..(339): X=any amino acid
MPHHIMSINDSNHVQIGGRKSKLAVVQSEIVKKVIEDTFPNLSCSILALSTLGDKVQTQPLYTFGGKSLWTKELEILLLDSVDEFPKLDLIVHSLKDMPTNLPEEFELGCIFQREDPRDAIVMKQGSSYKSLKDLPAGAIVGTSSIRRSSQLIKNYPHLRFESVRGNIQTRLNKLDQPNNEYCCLILASAGLIRLGLGHRITSYLDDMYYAVGQGALGIEIRKGDDNIKSILKKIEDPIATICCLAERSLMRYLEGGCSVPLGVHSDYNESKQELTLKGIIVSPDGTVSIEDEVIKRITCDEDCEQVGIELGDKLKAKGAKEILDKIDMTRNINARPTX

SEQ ID NO: 7263 - protein, 159 aa, Candida albicans
MGSKKESKSKSSSDDVSTEDNYEKRMSAVLPFAKPLASKKLNKKILKTVKKASKAKHVKRGVKEVVKSLRKGEKGLVIIAGDISPADVISHIPVLCEDNSVAYIFIPSKEDLGSAGATKRPTSCVMIVPGGGKSKKNADKTDEYRDGFDDIVKEINASE

SEQ ID NO: 7264 - protein, 212 aa, Candida albicans
MSAEDTKPKTEESTSIPKPPTSNVFSMFGAKKEKKPEQEDSDNKKESDKKEEKDTSKSTGDDNEVAEEEEADVEFTPVVQLDKKVDVKTNEEDEEVLYKVRAKLFRFHGDSKEWKERGTGDVKFLKHKTTGKVRILMRRDKTLKICANHLISADYELKPNIGSDRSWVYTVTADVSEGEPEAQTLAIRFGNKENADLFKEHFDNAKKEAKKD

SEQ ID NO: 7265 - protein, 236 aa, Candida albicans
MFGDTANKLILDAKRSSNLSAIPIYQSDLVKSIVRETNDLNKDAEYLVEEQEQLQETQDQENSKINQCQLFVTHLSMRRNKRCLLAYEKSRADKITEFCWLNIDPIETSTSSSTTSTNTNSNVNQSSSNNAVNPLTKNLSNYTTSLDMNNLNHHEQDFFKQYQDLIMEFKSSFEDIDLSGDLNPPTNIFIDVRVLKDGGEVTTEYGSFNLIKDSQFFVRKSDVERLIQQGYLEEII

SEQ ID NO: 7266 - protein, 462 aa, Candida albicans
MLDINAFLVEKGGDPEIIKASQKKRGDSVELVDEIIAEYKEWVKLRFDLDEHNKKLNSVQKEIGKRFKAKEDAKDLIAEKEKLSNEKKEIIEKEAEADKNLRSKINQVGNIVHESVVDSQDEENNELVRTWTPENYKKPEQIAAATGAPAKLSHHEVLLRLDGYDPERGVRIVGHRGYFLRNYGVFLNQALINYGLSFLSSKGYVPLQAPVMMNKEVMAKTAQLSQFDEELYKVIDGEDEKYLIATSEQPISAYHAGEWFESPAEQLPVRYAGYSSCFRREAGSHGKDAWGIFRVHAFEKIEQFVLTEPEKSWEEFDRMIGCSEEFYQSLGLPYRVVGIVSGELNNAAAKKYDLEAWFPFQQEYKELVSCSNCTDYQSRNLEIRCGIKQQNQQEKKYVHCLNSTLSATERTICCILENYQKEDGLVIPEVLRKYIPGEPEFIPYIKELPKNTTSVKKAKGKN

SEQ ID NO: 7267 - protein, 594 aa, Candida albicans
MSEEVDKVAEQVQKTYLDDVTGEQVSKTELKKRQKQRAIEAKKAAKAAATPAKTTTKKKDELADLNPNQFFEIRSRQISELREKNNADPSAFNPYPHKFNVTTKIPEFVEKYAHLQRGETLKDVTVSVSGRIMTKRESGSKLKFYVLKGDGVEVQIMAQAQDAPSVEAFESMHEILRRGDIIGVTGYPGKTAPAKGGEGELSVFATKVQLLTPCLHMLPTEHYGFKDQEARYRKRYLDLIMNDSSRERFRVRSKIIQYIRKFLDNRDFVEVETPILNVIAGGATAKPFTTHHNDLNMEMFMRIAPELFLKELVVGGMDRVYEIGRQFRNEGIDMTHNPEFTTCEFYQAYADVYDLMDMTELMFSEMVKEITGDYVIKYHPEGPSGKEMTLDFSRPWKRVNMIEELEKVYNVKFPAGDQLHTAETGEFLKKVLKDNNLECSPPLTNARMLDKLVGELEDASINPTFIFGHPQMMSPLAKKDRNIPGLCERFEVFVATKEICNAYTELNDPFDQRARFEEQARQKAQGDDEAQMVDETFCNALEYGLPPTAGWGCGIDRLAMFLTDSNTIREVLLFPTLKPDALVLKGEEPLKDEN

SEQ ID NO: 7268 - protein, 111 aa, Candida albicans
MLTFCPNCSNMLLISAGDDGLNRFYCSTCPYEFKINGLQMYDRKKLNRKEVDDVLGGEGTWDNVDQTAAQCPIDSCGGDKAYFFQLQIRSADEPMTTFYKCVKCGHRWKEN

SEQ ID NO: 7269 - protein, 244 aa, Candida albicans
MSSKSAAAILQRQFKDLTDPKKGIPSFHIELDDDNIFLWNVGVMVLNPESLYHGGYFKGQMRFPQDFPFSPPSFRFTPALYHPNVYRDGRLCISILHQGGDPTSDEPESETWSPAQTVESVLISIISLLDDPNGNSPANIDASVEFRKNYNVYKKKVLQEVERSKKDIPEDFIMPETSDNAYSNYNNSKNKEGAEEPVDEDFWYESEEEESFDEESLMDENMDDQFEDDDEEEEDDEDEDMGGK

SEQ ID NO: 7270 - protein, 68 aa, Candida albicans
MAAEGLEKLTEVPVEFFKDGSAFVKKCQKPDEKEYLKIIRAVGIGFIMMGVVGYAVKLVHIPIRYLIV

SEQ ID NO: 7271 - protein, 275 aa, Candida albicans
MSQTSSFVKKLASNDKPTRDSALESLKNFLGSKKDLSLLDLKKIWKGLYFSMWYCDRSKAQERLAENLGKLYSETVSVSLFPQFVLAFFDIISIEWPNIDQWRVDKYYLLIRRILRHNFKFLKQNNWDEELVENWVNVLHQSVLSGEKNVSMGLPYHLCDIFIDELELVMFEDIQEEIDDLDNDASLQDKTKLLGKKIDIVSEVPVLKLLEPFQKLNKSAQLKTLREKCAEEVLNDERLKDWGVIEADDSDDSDNEGSGDDDDDDDEDEDEWKGF

SEQ ID NO: 7272 - protein, 622 aa, Candida albicans
MSTKGKGKTKNGRGDTHAKNERIAIVSADRCKPKKCKQECRKSCPVVKTGKLCIEVTPASKIAFISETLCIGCGICVKKCPFDAITIINLPTNLEGETTHRYSANSFKLHRLPTPRPGQVLGLVGTNGIGKSTALKILAGKQKPNLGRYDDPPDWEEILRHFRGSELQNYFTKVLEDNIKAIIKPQYVDNIPRALAKSKVKQVGAILESKNEKNDDYNYILNVLELKNVLNREVENLSGGELQRFALGMTCVQDANVYMFDEPSSYLDVKQRLRAAEIIRSLLNPTTYIICVEHDLSVLDYLSDFVCILYGAPSVYGVVTLPASVREGINIFLDGHIPTENLRFRTESLQFRLADAADDLILDKSNSLEYPSLQKTQGDFKLRVEAGDFTNSEILVMMGENGTGKTTFCKLLAGAIAPDGGQEIPKLNVSMKPQKIAPKFTGTVRQLFFKKIRAAFLHPQFQTDVVKPLKIEDIVDQEVQTLSGGELQRVAIVLALGIPADIYLIDEPSAYLDSEQRIICSKVIRRFILHAKKTAFIVEHDFIMATYLADRVIVFEGQPSKDAVARSPESLLTGCNRFLKNLNVTFRRDPNSYRPRINKLDSQMDKEQKASGNYFFLENTEL

SEQ ID NO: 7273 - protein, 244 aa, Candida albicans
MSEPINKPEDEEMDVEFNDVDDQIVPDELPEQAQKQDDQQPQQSQSQTAETKIDTGDSAKPQNDATSSTAHPTGTANGTPPASVIPELPDLTRKDKSLKEVLDLMDGDFAPIIPDAVTDYYLAKNGFETSDIKIKRLLALATQKFISDIAQDAYEYSRIRSASAVYNSSNPQVRAKLLLQGQQYANQQTLTGNANNNGEGDQQQSSQSHSNAGNQQGKIVLTMEDLSNALSEYGMNTSRPDFYR

SEQ ID NO: 7274 - protein, 721 aa, Candida albicans
MSDQQNTQDQLSGAMANASLNGDQSKQQQQQQQQQQQNYYNPNAAQSFVPQGGYQQFQQFQPQQQQQQYGGYNQYNQYQGGYQQNYNNRGGYQQGYNNRGGYQQNYNNRGGYQGYNQNQQYGGYQQYNSQPQQQQQQQSQGMSLADFQKQKTEQQASLNKPAVKKTLKLAGSSGIKLANATKKVDTTSKPQSKESSPAPAPAPAAFASQEEKKEEKEAAAATPETKKETSAPAETKKEATPTPAAKKESTPTPATATKKESTPVSNSASVATADALVKEQEDEIDEEVVKDMFGGKDHVSIIFMGHVDAGKSTMGGNILYLTGSVDKRTVEKYEREAKDAGRQGWYLSWVMDTNKEERNDGKTIEVGKAYFETDKRRYTILDAPGHKMYVSEMIGGASQADVGILVISARKGEYETGFEKGGQTREHALLAKTQGVNKIIVVVNKMDDSTVGWSKERYQECTTKLGAFLKGIGYAKDDIIYMPVSGYTGAGLKDRVDPKDCPWYDGPSLLEYLDNMDTMNRKINGPFMMPVSGKMKDLGTIVEGKIESGHVKKGTNLIMMPNKTPIEVLTIFNETEQECDTAFSGEQVRLKIKGIEEEDLQPGYVLTSPKNPVKTVTRFEAQIAIVELKSILSNGFSCVMHLHTAIEEVKFIELKHKLEKGTNRKSKKPPAFAKKGMKIIAILEVGELVCAETYKDYPQLGRFTLRDQGTTIAIGKITKLL

SEQ ID NO: 7275 - protein, 640 aa, Candida albicans
MSLDVSLRDRQISILQRMLHLNKEGSADLTLASKSEEIIWKVLVLDAKSRSVLSSVLRVNDLLKCGITVHSLINSKRANLPDVPVIYFVEPTIENILYIIEDLNQDRYDSFYINFTSSINRELLEEFAKKVSISGKSQKIKQVFDQYLDYIVTEPNLFSLNLPEIFTQFNSSNTDEEKIHKLVDIIANGLLSTIVSMDIIPVIRAQQNGPAEFVAQQLDLKLREYLSNTRGSTVATASIQQRPVLILLDRNFDLASMFSHSWIYQCMVSDVFQLQRNTIKITKHAAKDGEKDSTKNYDVDPKDFFWNKYSQLPFPDAVESADAELNAYKNDAKEVTAKTGISSLDDIDPNANATANIQQAVEKLPELTARKATLDMHMDILSSLINELQAKNLDKYFEIEQNATDPKVLKEFLELLVVDSERDSSLDKLRTFIILTLLVDLTPEYIEKVKSIFKEKYPQVDLSSFNYILKFKEHSKLANLSTLNETSNNFTNQASQMNSSALLSGLSSKLYGLTEGKISEGLTSIATRIKSFIPEKKLLPITTIVEAIMDPINASQQSVQLTDEYVYLDPKSRGGHSKPPKRQSYQESLVFVVGGGNYLEYQNLQEWANDPNKAHRKVIYGSTEITSASEFLEECSVLGS

SEQ ID NO: 7276 - protein, 241 aa, Candida albicans
MLIVGLTGGIACGKSTVSKELKDRYGVAVVDADLVAREVVYPNKPAFNQIVAAFGDEVPNLINEDGNLNRAALGQAVFGNKEKLAILNSIVHPAVKWEIFKQIIRAYFSLNKLVILDVPLLYESGLSLLCGLTVTVSCERNVQIERLLARNNELSESDANKRIESQMSNKERNYRSDIVLDNSGSLDSLKESIKCLVPEMKPNLIWYLLDLFPPFAVTSALFTFTIRRIAERFKGTKPKSD

SEQ ID NO: 7277 - protein, 554 aa, Candida albicans
MFSTARSDTLFLGAQKISGDDVRTQTVLAAQTVANVVKSSLGPVGLDKMLVDDIGDVTVTNDGATILSLLDVQHPAGKILVELAQQQDREVGDGTTSVVIIAAELLKRAHELVRHGIHPTTIISGYRLALRESIRYINQVLSQNVDQLGKETLINIAKTSMSSKIIGSDSDFFGKMVVDAMLAVKTTNGKGETKYPVKAVNILKAHGKSALESVLVDGYALNCTVASQAMVKSVKNAKIACLDINLQKARMAMGVQINIDDPDQLEEIRKREYGIIIERIQKILASGANVILTTKGIDDLCLKEFVENDCMAVRRCKKEDLRRIARATGATLVSSLSNLEGEETFETSNLGYAEEVVQTRISDDECILIKGTRQHTSSSIILRGPNDFSLDEMQRSLHDSLSVVKRTLESGHVVPGGGAVEAALNIYLENFATTVGSREQLAIAEFANALLVIPKTLASNAAKDASDLVAKLRTYHAAAQIAKPDDEKRRKYKNYGLDLINGKIVNEATNGVLEPTVSKIKSLKSALEACVSILRIDTIIEVHPEPPKEDPHAH

SEQ ID NO: 7278 - protein, 952 aa, Candida albicans
MSDSGYTLIYEPNTATKVSVNEFKNLLEKGKDDVKVDTMKKILITILNGDPLPDLLMHIIRFVMPSRNKELKKLLYHYWEVCPKMDESGKMRHEMILVCNAIQRDLQHPNEYIRGNTLRYLTKLKEPELLETLVPNVRQCLEHRHAYVRKNAVFALWSIHKVSDHLAPDADELIYRFLYEENDSVCKRNAFVCLGDLNREAALQYIQDNISVIETLDPLIQLAFIEFIKKDSIQNPALKQQYAQLMTEIIESSSNVVMYEAANTLTVLTSNPQSILLAGNKFVELATRESDNNVKIITLERINQLHKQHPGVLQDLSLEILRVLSSQDLDVKKKALDVTLQFITTRNVEDVVKLLKKELQSTALSNDDKNADYRQLLINAIHQLAIKFVEVAANVIDLLLDSIADLNTTAAYEVITFVKEVVEKFPDLRDAILRRLILALPHVKSGKVFRGALWVIGEYALEESLIQESWKYIRGSIGEVPIIASELKSKKRDDTEESQEEETEYDGKPRRKGPVVLPDGTYATESALTSETTDSLESDSKTPIRKQILAGDFYLGAVLASTLVKLILRLQSLKQTQEKILNGLKAEALLIMVSILRVGESSLVSKKIDEDSADRILSYIKILNDEEDLQEIKTSFLEDTKDAFKAQINNAELKKAEALAKDLHDNAEQIDDAIVFRQLDKDNKKSKASVDDVAAASGSNELKKENLSSRLNKIIQLTGFSDPIYAEAFVKVHQYDVVLDVLLVNQTTTTLRNLSVEFATLGDLKVVDKPTTANIGPHGFYKVQTTIKVTSADTGVIFGNIVYDGQHSDDSRIVILNDVHVDIMDYIKPATCSESQFRKMWNEFEWENKITIKSPIETLKEYLDELMKGTNMQCLTPGAVIGEECQFLSANLYSRSSFGEDALANLCIEKQSDGPIIGHVRIRSKGQGLALSLGDRVASISRKGKKATIARV

SEQ ID NO: 7279 - protein, 337 aa, Candida albicans
MSKELSLNQKNYLIQALKSNIRLSTSTNTGGSRKFNQFRPIDIKLSNTRYGSVELSLGKTKVMVNITSRITEPYQDRPFEGIMTINCEIPNHIKLQSNDTTNNNNDNEDEFINLINRALDRAIRRSNAVDLENLCIIAGEKVWELIIDLQVLNYDGNLIDSGCLAIITALLDFKKPDVTINNNNTSNSSSTSGGGGNIIVHDDEMKRPFIELSILHIPICLTFSLFNLGSKETNLKTNDIDQEIWLLDGDAMEESCRDGYLIMTMNQNHELIQLSKIGGGGNNGGVSIDGQQLINLCHESIDEINRLTNLVKSTVKNHQLNRYNNENYKLLESSADR

SEQ ID NO: 7280 - protein, 383 aa, Candida albicans
MNRLLSFILPIFLIFSTVLSSDSPNDSVNINNSDPSRHSNNWAVLVSTSRFWFNYRHMANTLSLYRTVKRLGIPDSQIILMLSDDIACNPRNAFPGSVFNNMDEAIDLYGESIEVDYRGYEVTVENFMRLLTDKWDSDQPRSKRLLSDENSNIFIYLTGHGGNEFLKFQDAEEISAHDLADAFSQMYDQKRYNEIFFMIDTCQANTMYEKIHSPNILAVGSSEIEESSYSHHSDMDIGVAVIDRFTYYTLDFLEKIDRDSKETMDKLFAEYTFENVHSHPGIRTDLFKRNVSEVLLTDFFGNVQNVVVDDVNMELLENEKVTESNEDNNQTKNIIKERGPTQFSFECDENSKSLIKVPQLHARIFGVVTVGVIVALWFISSKF

SEQ ID NO: 7281 - protein, 191 aa, Candida albicans
MGKTVSKLSKDDLRQLRQATYFDKRELQQWYKGFLRDCPSGQLSEEEFVKVYKQFFPFGDPTDYCHYLFRVFDLDNSKYIDFKEFIIALSITSRGTEEQKINWSFKMYDYKKEGKIGYKEILPIVRATYKMVGPMVELPEDQQTPEARVDRYFQLLGKDKNTDKLDLNDFKKLAQLDSGIAAALNSYSGLV

SEQ ID NO: 7282 - protein, 482 aa, Candida albicans
MKPRFLSYTTRLLTKPFKVAIVGTGPGGFYTAHHLLNKSSPDVKLNIDFFEKLPTPYGLSRYGVAPDHPEVKNCEDHMINIMKDFGNSESRHKVRFLGNVEVGKDIALKELEGNYNSIVLAYGCTSADNKFSIPGADLPGVVPARQFVNWYNGHPDYYGENKYIPPPLDKVDTVSIIGNGNVALDVARILLADPREHWAKTDISVDAQQLLEKSTVKHVRIVARRGVLESAFSNKEIRELLELPAKFVPLPKDLLDFDTKKLGRVDKRRVSLLEKYSKQQREHTNRSWELEYYKSPEEFIQGENNLLKSTKFVINKPANDPLAPHKVEPTDETVTENNELVILSIGYQGSPIQGFEELGIWYEKNRLQNKSGRILSTKSKEKDEHNAVFKPGWYAAGWIKNGPQGAIASTMMDSFDTADKILEDLANDAYIKINSDKELEFSNAVDWGNWEKLNTYELEKGEALGKTRLKVCNKDEMLKLMK

SEQ ID NO: 7283 - protein, 624 aa, Candida albicans
MSKDIYLKKILGEECVSRIRNSKILMVGAGGIGCELLKDLVLTGYGEIHIVDLDTVTLSNLNRQFLFRQKDIDKSKSFTIASAVQSFNYLGVKLIPHHGNVMDTKQFPIEWWGQFNFIFNALDNLEARRYVNKMALFLRKPLMESGTTGYAGQIQPIYPYYSECFDCHPKETPKSFPVCTIRSTPSQPVHCITWAKEFLFRQLFDENDNSNSMNDANQIQNETDDKDELENLNKEANELIELRSKILSLDSNSFINELLKKIFKVDIERLLSIETLWKARKKPIPLDMTEYREALQQLLEQESSSSILTADTKVWTILENIYSLYKSSESIQKRLKSGNEPFITFDKDDEDTLIFVAAASNLRSFSFGIPLKSKFDIKEIAGNIIPAIATTNAIIAGFSSLSGTQFFQHQKDLTSSDFSNIFKRASSVFISIRPNKYITGDRLSKPAENCASDSLTARGVLTVALSDLAVLTLEGFIDRLAYKYGYSKEDISIQIGKSKLIYDVDFDDYLQTKLKDVPGVANGEVMLIQDDADELENLELYLNIKDDTVELKLPILELRPKKMVPQPNHNEENNSEYAKELEGGTILLDDDDDESFGNEIEILDDEEEEDMKIVEPPVKKRKLD

SEQ ID NO: 7284 - protein, 411 aa, Candida albicans
MEDPVSLDNVNSVLSKLNNVSATNSNETDVYLKLKKLEKELDLLLLQEEYIKDEQRHLKRELVRAQEEVKRIKSVPLVIGQFLEPIDENTGIVSSTTGSNYVVRILSTLDRELLKASSSVALHRHSNALVDILPPEADSSISIVGEDQKPDVTYADVGGLDMQKQEIKEAVELPLTQGDLYSQIGIDPPRGVLLYGPPGTGKTMLVKAVANSTTASFIRINGSEFVQKYLGEGPRMVRDVFRLARENSPAIIFIDEIDAIATKRFDAQTGADREVQRILLELLNQMDGFDQTSTVKVIMATNRADTLDPALLRPGRLDRKIEFPSLKDRRERRLIFSTIASKMSLAPEADLDSLIIRNDPLSGAVIAAIMQEAGLRAVRKNRYMILQSDLEEAYTSQVKTGTEHDKFDFYK

SEQ ID NO: 7285 - protein, 173 aa, Candida albicans
MFFLKDLSLNLTLHPSFFGPQMDQYLREKLLSDVEGTCTGQFGYIVCVLDSMNIDVGKGRIIPSTGMAEFEVKYRAVVWKPFKGEVVDAVVTTVNKMGFFADVGPLSVFVSTHLIPSDMKFNPSANPPAYVSPDENIEKGSRVRLKIVGTRTDVNEIYAIGSIKEDYLGPSPM

SEQ ID NO: 7286 - protein, 279 aa, Candida albicans
MSTGLLDSWADAGDEFSAPPEVIANPDGTKTVITFRTNQDGKKVKITQKIKEVKVQEKVHPLIAQRKNWKKYGKEKNSPPGPDTSTTQLGEKVDLKLGTSWKQDEKKEEEDKAHERAQKIAVQTIKCRVCGGDHYTAKCPFKDTLGAAAGVTPSGTTPEPTSEGGAGAAGAGKYVPRHLRADANGNVPTREARDDSTTLKVSQLNSFVDEDMLRNELFAKFGPLQRVTIVRNRETGESRGFAYVSFATEEIAQRALDTFNGKGYHSLILHLEWSKKKKT

SEQ ID NO: 7287 - protein, 190 aa, Candida albicans
MSSSANRPIVISGPSGTGKSTLLKKLFAEYPDKFGFSVSNTTRKPRPGEVNGKDYNFSTVEEFKQLIDENKFIEWAQFSGNYYGTTIKAVKDVAEQGRICLLDIDMQGVKSVKKTDLNARYLFISPPSIEELKSRLTGRGTETEDSLQKRIAAASDEMEYAQTGAHDKIIVNDDLDKAYAEFKKFIVDEQ

SEQ ID NO: 7288 - protein, 110 aa, Candida albicans
MDQLNVKEQQEFQQIVEQKQMKDFMNLYSNLVSRCFDDCVNDFTSNSLTSKETSCIAKCSEKFLKHSERVGQRFQEQKYVDLSRVTNGNMPLMIIIIYHQIILTNKLILL

SEQ ID NO: 7289 - protein, 126 aa, Candida albicans
MSAPNPKAFPLADSALTQQILDVVQQSQNLRQLKKGANEATKTLNRGISEFIIMAADTEPIEILLHLPLLCEDKNVPYVFVPSKAALGRACGVSRPVIAASVTSNDASSIKNQIYGIKDKIETLLI

SEQ ID NO: 7290 - protein, 441 aa, Candida albicans
MSSEKLFRIQCGYQNYDWGKIGSSSAVAQFVHNSDPSITIDETKPYAELWMGTHPSVPSKAIDLNNQTLRDLVTAKPQEYLGESIITKFGSSKELPFLFKVLSIEKVLSIQAHPDKKLGAQLHAADPKNYPDDNHKPEMAIAVTDFEGFCGFKPLDQLAKTLATVPELNEIIGQELVDEFISGIKLPAEVGSQDDVNNRKLLQKVFGKLMNTDDDVIKQQTAKLLERTDREPQVFKDIDSRLPELIQRLNKQFPNDIGLFCGCLLLNHVGLNKGEAMFLQAKDPHAYISGDIIECMAASDNVVRAGFTPKFKDVKNLVEMLTYSYESVEKQKMPLQEFPRSKGDAVKSVLYDPPIAEFSVLQTIFDKSKGGKQVIEGLNGPSIVIATNGKGTIQITGDDSTKQKIDTGYVFFVAPGSSIELTADSANQDQDFTTYRAFVEA

SEQ ID NO: 7291 - protein, 526 aa, Candida albicans
MRVKKPTSKRTTTRMREGIKKKAAAKRRKDKKIAKKDVTWKSRKSKDPGIPASFPYKDKIITELEEGRRIEQERREQLKLQKPQERQEALARGEIVEDDDEMDEDDQEEGDGANGLAALLESAQQAAKDYDGEDYEDNENEDMVDSEEDVEYEISDIEDTQDEEFGELEKSRKAYDKIFNTVVDEADVILYVLDARDPESTRSRKVEQAVWQNPGKRLILVLNKVDLIPTHALNQWLNFLKSSFPTVPVKAAPGATNSTSFNKNLTNSMTSDALLKALKSYASKSNLKRSIIVGVIGYPNVGKSSIINALTNRHGNNSKACPVGNQAGVTTSLREVKIDNKLKVLDSPGIVFPDEIVNTKKQSKTQQLAKLALLSAIPPKQIVDPIPAITMLLKKFSKDTEMADGLKNFYQLPPLPSSDLNEFVKHFLIHIARSKGRLGRGGVPNLESAAMSVLNDWRDGRIIGWTLPKASKSAAGVSSEEVDLDAPKSSLRGEKEPPKVEQTTIVSSWAKEFDLDGLLGDNFGLQ

SEQ ID NO: 7292 - protein, 196 aa, Candida albicans
MDIILGIKVSDGTLIATSKAATRGISILKDTDDKTRHLNAHNLIAYTGEAGDTVQFAEYVQANIQLYSMRENDIELSPKATASFVRNQLASSLRSRKPYQVNCLIGGYDVKKNEPSLNWIDYLGTQVELPYGAHGYAAFYTTSLLDKHYRKDMTVEDGLKLMDMCVKELQTRMPIDFKGVYIKVVDKDGIRQIESN

SEQ ID NO: 7293 - protein, 481 aa, Candida albicans
MQESKDIKMKDVQQDDVSSEIDTLVKEIEQSFILLSKVATTFDNRYVSKVFRDLGPLRRKLVRNGNSVLATVINNTYPQTHNSKTYLLKYLNESPTSVGNDAMDVDNTTLIPEIELYIHLLVQVYLLDTGKLEELNSLGEHVVQLMKSFNRRSLDFIQAKVWFYVCRAKELIGDLYSIRPELSYSLRTATLRHDIETTASVITLLLRNYLLTHDISQASDLVEKVEFPENAGNALVARYYYYLARINAIQLDYSTANECVITAIRKAPQTSLANGFVQAATKLSIVIELLMGDIPELKVFKNKSGNLEPYFNVTKAVRLGDIKLFGEVLHKFEADFKKDDNFTLVSRLRQNVIKTGIRIISLSYSKISLKDICIKLHLDSEESTEYIVSKAIRDGVIEASINHQKGYMQSKELLDVYSTKLPQAEFDQRIKFCLSLHNESVKSMRYPNDNEKENTNKEIEPSEEVELLKAIEEGDLDDFMD

SEQ ID NO: 7294 - protein, 609 aa, Candida albicans
MSISASKAKREQKRLEREAKKAAVGKSTKKTKKQAEKDAAEDEVEGAEEQIAKMKLQTDEHGLSDRVTTGVLESLETSRDIKLSSVSLLFHGKVLIQDSTLELNYGRRYGLLGENGCGKSTLMKSIAAREFPIPEHIDIYLLNEPAEATEYSALEYVVREAEHEMKRLEDLVEELIVKEGPECPALEGLYEKIDEMDPSTFESRAAIILTGLGFNSVTIKKKTKDMSGGWRMRVALAKALFVKPTLLLLDDPTAHLDLAACVWLEEYLKRFDRILILVSHSQDFLNGVCTNMIDMRLKLLTTYGGNYDSYVKTRAELETNQMKQYNKQQEEIAHIKKFIASAGTYANLVRQAKSRQKILDKMEADGLIQPVVPDKVFTFRFPEVEKLPPPVLAFDDMSFSYSGKPEDNLYEHLDIGIDMDSRVALVGPNGVGKSTLLKLFQGKLQPQTGRVIQHTHIKLGVYSQHSADQLDLTKSPLEFVRDKFANISQDYQYWRGQLGRYGLSGEAQTAQMATLSEGQRSRVVFALLALEGPNLILLDEPTNGLDLGTIDSLADAINAFNGGVVVVSHDFRLLDKVAKDIFVIENKTATRWNGSILDYKKSLASKVVL

SEQ ID NO: 7295 - protein, 206 aa, Candida albicans
MSDPFSINGGAAVAMIGKDCIAIASDLRLGQQSLGVSNNFEKIFSVGDKTFLGLTGLATDVISLKELFRFKTNLYKLREERNIEPSTLANLVSSSLYERRFGPWFVSPIVAGLSSKDNKPFICGFDSIGCIDFSHDFIVSGTASDQLYGMCESLYEPNLEPEDLFETISQALLNAVDRDALSGWGAVVYIVTKDKVIKRVLKTRQD

SEQ ID NO: 7296 - protein, 832 aa, Candida albicans
MAPNISTSRSNNNTTTINVKVVAAESLYKRDVFRQPDPFAVLTVDGSQTKTTITAKKTLNPYWNETFNFQAKEDSILVIQVFDQKKFKKKDQGFLGVINVRIGDVIDLSLNSSEETITRDLKKSNENLAVSGKIIVVISHNRNSNGGGVTTATTRGTGASSSNNIATITSGVNNLRIGSATTTANSTAQASSDATVGANGSGPTSSLPPIGQGHPETAATPGGAAGAAGAASRQYSSFEDQYGRLPPGWERRTDNFGRTYYVDHNSRTTTWQRPALHQSETERGQQRQSETEAERRQHRGRTLPGEGSVSPLPTGSGNSITSGNVTVNASGANTPVNPAAAVSMAASGATTSGLGELPSGWEQRFTTEGRPYFVDHNTRTTTWVDPRRQQYIRTFGPNTTIQQQPVSQLGPLPSGWEMRLTNTARVYFVDHNTKTTTWDDPRLPSSLDQNVPQYKRDFRRKVIYFRSQPALRILPGQCHIKVRRDHIFEDSYQEIMRQTPEDLKKRLMIKFDGEEGLDYGGVSREFFFLLSHDMFNPFYCLFEYSSHDNYTLQINPNSGINPEHLNYFKFIGRVVGLGVFHRRFLDAFFVGALYKMMLHKKVVLQDMEGVDAEFYRSLKWILDNDITGILDLTFSAEEESFGEIVEVDLKPGGRDIEVTEENKHEYVELITEWRISKRVEEQFKAFIDGFNELIPQELVNVFDERELELLIGGLAEIDCEDWKKHTDYRGYQENDQVIQWFWKCINEWDSEQKARLLQFTTGTSRIPVNGFKDLQGSDGPRRFTIEKAGEANQLPKSHTCFNRVDLPPYTDYESLKQKLTLAVEETVGFGQE

SEQ ID NO: 7297 - protein, 238 aa, Candida albicans
MDLKLPPTNPTNPQQAKTFMKSIEEDEKNKAEDLDIIKKEDIDEPKQEDTTDGNGGGGIGIVPTLQNIVATVNLDCRLDLKTIALHARNAEYNPKRFAAVIMRIRDPKTTALIFASGKMVVTGAKSEDDSKLASRKYARIIQKLGFNAKFCDFKIQNIVGSTDVKFAIRLEGLAFAHGTFSSYEPELFPGLIYRMVKPKIVLLIFVSGKIVLTGAKKREEIYDAFESIYPVLNEFRKN

SEQ ID NO: 7298 - protein, 146 aa, Candida albicans
MSNLQDLINHDDDEYLPSPSPPQQPEPQHASSSELKTSTTEDLPDSVTQEHILTSFEKIKTHFPAARIKKIMQSDEEIGKVAQATPVIVGRALEIFMANLVEVSLLEAKKQGVKRITASHVKSAIENTEQFDFLVEAVEKYPSLRN

SEQ ID NO: 7299 - protein, 631 aa, Candida albicans
MKSNTESLAWENLRYDLHSWIKEAISSMGYPTMTPVQASTIPLLSGNKDVVVEAVTGSGKTLSFVIPVLQKISDRLYKPDSDGDLPEPVKRGHMLSIVLSPTRELANQIQSVFNQVLQYLPEDKGTRINTQLLVGSIGNVREDLNQFLTNQPQILIGTPGRILEFLGSSQSIKTSSLEIVILDEADKLLDFSFEKDVINILKKLPKQRRTGLFSATISSAGNTIFRTGMNNPVKVQVKSKNYFGEQSNSPKSLQLSYMMINPELKITTLLTILSKYQYKKAIVYFPTCTSVRHFYQIFNKVYQQESSDEPLKFFSLHGQLNTKSRLKTLDNFTQGDINLYKHILMTTDVAARGIDIPDVDLVIQIDPPTDPNVFLHRCGRTGRANKVGRAIVMLNDNCQEEDYIGFMEVKGIFLTKQDIPTSSATKNLHENFQIKLRQYMLEDRARHELAVKSYVGFIRYYSKHIASSIFRLATLDYLGIAKMYGLLRLPKMPETKYIDNSIMPTDGWLGEIIDMDKYSYADKLQEKIRLENLENDKLKKIQDAKRRKELKIKNEAWSSKSERKENKLDRKEKLKRKREAIEKQIMEEERSNGGGNKDEEDEVVEDWKDMVRKNKKKQKKNNSIQGSFDDL

SEQ ID NO: 7300 - protein, 210 aa, Candida albicans
MSGKGTSSRAYDMIMKLLLVGDSGVGKSCLLLRFVEDKFNPSFITTIGIDFKIRTIESKGKRIKLQVWDTAGQERFRTITTAYYRGAMGIVLIYDVTDSRSFENVENWFQTVTQHANEDAQIFLVGNKCDDEVNRQVSKEQGQELAAKLNVPFLEASAKSNENVDSIFYELASIIQEKHVEENIGGVGGASGAGGIDVSQNNSGAKNNCC

SEQ ID NO: 7301 - protein, 149 aa, Candida albicans
MSLPQGYTFRKLKLTDYDNQYLETLKVLTTVGEISKEEFTELYNHWSSLPSIYHPYVITNASGIVVATGMLFVEKKLIHECGKVGHIEDISVAKSEQGKKLGYYLVTSLTKVAQENDCYKVILDCSPENVGFYEKCGYKDGGVEMVCRF

SEQ ID NO: 7302 - protein, 496 aa, Candida albicans
MSDLHLQILKLVDDNSGVIENTLKSPELSKIDVSTLQANLTSLWAKEMIVFSKIETDRWVLTKEAEQYLKAGATPEVQVVDEVLKALEGLTISQLKEKLGPMGAVGQGKAFKNKWLSKDGDKLIAQVEKLPEDVVLNELKTISETGTLNDKKELTELKKRKLVTLTKIVGYKIEKGPKFALEIVNLETDITSDMVLNHTWKDAQFKPYNFNSEGVYPNSGALHPLNKVREEFRQIFFSMGFTEMPSNQYVETGFWNFDTLFVPQQHPARDLQDTFYLKDPKKAGEPEDKQYWENIKQVHQEGKYGSIGYRYPWKAEESLRMVLRTHTTAISAAMLHKLAQDPKPTRLFSIDRVFRNEAVDATHLAEFHQVEGVLAGYDITLGDLIGFMEDFFGKMGVDNLRFKAAYNPYTEPSLEIFAYHKGLKKWVEIGNSGMFRPEMLESMGLPKNLRVLGWGLSLERPTMIKYGVSNIRELLGHKVSLDFIESNPAARLDELL

SEQ ID NO: 7303 - protein, 207 aa, Candida albicans
MNNEYDYLFKLLLIGDSGVGKSCLLLRFADDTYTPDYISTIGVDFKIRTIELDGKTIKLQIWDTAGQERFRTITSSYYRGAHGIIIVYDVTDQESFNNVKQWLQEIDRYATGGVMKLLVGNKADLSDKKIVEYTAAKEFADALDIPFLETSALSSTNVEQAFYTMARQIKAQMTNNANAGNAANAKGKSNVNLRGESLTSNQSNSCC

SEQ ID NO: 7304 - protein, 252 aa, Candida albicans
MSFANKQDPKTLVLFDVDGTLTPARLTISEEMKKTLEKLREKVVIGFVGGSDLSKQVEQLGPNVLNDFDYCFSENGLTAYKLGKELASQSFINWIGNEKYNKLVKFILRYLSDIDLPIRRGTFIEFRNGMINVSPIGRNASTQERNDYEKFDKQHHIRETMVEALKKEFPDFGLTYSIGGQISFDVFPTGWDKTYCLQHVEDEHFENIHFFGDKSYKGGNDYEIYNDPRTIGHAVNSPDDTIRILNETFKLQ

SEQ ID NO: 7305 - protein, 312 aa, Candida albicans
MERLQRLLGQGAGLGGAAPTQSDGPAIDNSETVYISSLALLKMLKHGRAGVPMEVMGLMLGEFVDDFTIHVHDVFAMPQSGTGVSVEAVDDVFQTKMMDMLRQTGRDQMVVGWYHSHPGFGCWLSSVDVNTQQSFEQLNKRAVAVVIDPIQSVKGKVVIDAFRTIDTTTLMMGQEPRQSTSNVGHLNKPSIQALIHGLNRHYYSLNIDYHKTEYETNMLLNLHKKNWQSGLKLVDYNHKEVENLDNTEKMVSIAKLYNQRVQEEKELTEDQLKTRYVGKQDPKKHLSDTAEKLIDENVSSLLTSNIDAVAIQ

SEQ ID NO: 7306 - protein, 561 aa, Candida albicans
MSAEPEIPKVEVPKLEESVTEDTPAPTTDDQNNQTPQVIDVEKLQHEFQESAKRYLVEQTAQVIVPSFAKWFDLSKIHDIEKKSLPDFFVEDGSGYKSSQDYKYIRDFIVNTFRLNPKEYLTITAVRRNLSGDVTNIIRIHQFLEQWGLINYQIDPKTKSSVLGPQYTGHFQITLDAPQGLVPFVPENAELTKATPSNVTKTDDLNNENIPTAKENELPLNLEIRRNVYATGEKKTNYKTNNIVHYSCSICGKDTTEVRYHNLKIKSYMYNPTSTINNASVLCEICYDQGLFPSSFHSSDFIQLKRTEEGEKWSEQEILLLLEGIEMFGTYEPPSSTGPVNVNANLNNQWDKISEHVATKTREQCIIKFIQLPIEDKFLTKLIKEENEKDTTKSVVSQSLVQDIAAKLVSTTEGREFISQNAEENLKHAQLEQTNLVNQVIELTLEKFNLKLKKIDELQANLLKYENQLNLERKQILLERWVQFEKISKLKESNPELSTVLDDLLKPVKINEIHKSVKQSNQTENGDDKMDVDESSNENDDNTSKLPVSVKEPKAYQFWSG

SEQ ID NO: 7307 - protein, 278 aa, Candida albicans
MNHDPYSWGRPSNDTYGPYNYKIAHANNNQVEQTTHNFPKMNTQQPIITGTSVIASKFKNGVIMAADHVGSYGSLLRFNNIERLIKVGKETVVGISGDISDLQYIVRLLDELEIDEEVYDNDGGEYLRAPNVHEYLSRVLYNRRSKMNPLWNAIIVGGFNKDRTPFLKYVDLLGVTYHASTMATGFGSHLAIPLLRNLIPEDKDYVKVDEQQVSKAIEDSMRVLFYRDARSGENYSVVIIKLDENTGELSFQFIKDAKVQNQSWKFAGDIRGYGSSQQ

SEQ ID NO: 7308 - protein, 277 aa, Candida albicans
MSLQKLTAEIYSLFGKGDYQGCQQLLAPIKLELVKHDLLVPLPSNTTDKNQINDLRIAQRILEIGALSSLLTNNYSGFENYFAQLRPFYSNPKLHNLQKVHINTDITKIISLYLLYLLSQGLISKFHVELEVIYNSSQYDAQQDKYLQFPINLESNLMEGNYIKIWKLLKEEKNLPCQEYTHFVDTLINALRFEIAKSLEKTYDSIPISNCKNLLYLPQELSDANFEKTLKETYQVDNWKFEDGVIYFTKNENETNVDNQSVIKNLLGYAEQIESIV

SEQ ID NO: 7309 - protein, 391 aa, Candida albicans
MSTPIVLDQGTGFVKIGRAGTNFPDHTFPSMVGRPILRAEERNILVPSDVEIKDIMCGSEASQVRSLLQINYPMENGIIKNWEDMEHLWDYAFYERMKINPQGQKILLTEPPMNPLKNREMMCQVMFEKYGFDGVYVAIQAVLALYAQGLSSGVVVDSGDGVTHIVPVYESVVLNHLTKRLDVAGRDVTRHLINLLFRRGYAFNRTADFETVRQIKEKLCYVSYDLGFDAKLARETTTLVESYELPDGRVIKVGSERFEAPECLFQPHLVDVEQPGVGETLFNTIQSADVDIRSSLYKAIVLSGGSSMYPGLPSRLEKELKQLWLTRVLQGDASRLDKFKVRIEDPPRRKHMVFIGGAVLANIMADKDHMWISKQEWEEQGPRVLEKLGPR

SEQ ID NO: 7310 - protein, 458 aa, Candida albicans
MSREDPIKAEKDFSATLDEQFPLIEKISDYKQALDKYLVLEKQTRQSSDLASSKRVLNKIVTTLVDNNDWEYLNDLITILSKKHGQLKSSIQAFIKDVIDNLDKLDENNKQQLELKMKLIETIRTVTDKKIFVEVERAIVSRQLAKIYLNKLNDLDKAVEILCDLQVETYSLMPFSDKIEYILEQIQLTLQKGDYGQAKILSRKILLKSLKNFAKADEFKATYLKYLIDINVFDYDYISIVKNLLLLIEIPLIKESAEYKEYLVSVIYYIILSTYDPHQNDLINKIKSNPIFTKNVDANIVKLLDVFTTNELIHWSNIESLYKTSFANSKIFADEKNYKNLQKRIIEHNLRVINKFYQSIRLDRLAQLLQLSVDEAESYVSELVNQGMIVAKINRPQGLVKFDKTKHIEGSDPRTSDNHINAVLNDWCYDIEKLLEEVDAIGHLINKEEMMYGIKQKS

SEQ ID NO: 7311 - protein, 842 aa, Candida albicans
MAGSQLKQLKAALKDKGLIGQTNVSQKKSKKKNSQSSTTNNTKNINRDEKLQQLKEIRDQFNKFDQKINRSKHDISIIHQGKFVKVGSKQHNSSAIKNGNMQRQMKMQYDLEKFQHGKTGGILDKRFGENDSHLSKEEKMLARFTKERQSGSSKKRSVFSLASDDEQEPDESDGEDNGGFMLTHGGNALSLDDEETINYVDEDSLQQQPPKKKSKNEVMKEIIAKSKFYKQQRQKEFAKTQDQIDELDEDFGDVMDDLRNVQSQISKTTANSGSGKADGVFSTKTPEQIEYDNKVRELTYDRRAVPAERTKTDEEIRKEHEEKMKKLEADRLRRMEGFVDDDRDTQGDDLDNDFWAGSDRENDENEADGFTIKNSDQESDSEEEEQYQPPHKRQVKSQKITSVIMPFTIEEFIQEMSNVDPNKQPEYVKKICETYKPNLAEGNKEKMSNFVGILFEYILHIANQYQDFEPFVKILRKLAESSTSSRATTITTTTTTTTTTKAYNESLVERVREHIKHIQSRIDKQLTPGDLVFFTIIAYLFSSSDHYHIVITPSLILINQILSNIIYHPKTVTDIAHGVYLIDVLLMYQRFAKRYDPEIISFIEHALFMMIPEVDKLDTLKLLSISPTAATAGSITVQFSMNKSEKICSQEQTLSIKQLYEEDLNKSSLISKLIQLMDKCVTLWKEKSSLIEILESFISILKHITKYNATVAGPILTKFTRLHANLVKDRKPLTLQHHKAIAIATFAPKFEENFNPDKKSYDVNRERQELNKVKHELKKEKKAALKDIRQENRFIAREQISEKKRMYDDYHKKMANIVNSIQSEEGAEKNQYERERKQRKRR

SEQ ID NO: 7312 - protein, 1066 aa, Candida albicans
MSSGLNLSSLKDKIFSKLNLQKDNQTKSQQKSKKASSNDKEIQKDKKKPATPAKANAKKTKGVDEILRREALALGATDEDLKLVEGIESDDDKSEQEFDDDSKLDKNFSADLSKFMKGIGLGEEEAMVVSEEEEEEAMVVSEEEEEEVPELVEGEEEEEEKVSEDDVVEEEEESISEKESESEDTSDSESEKEVVVKEAKIDNKKSNQDPDKVTDLSSVSSSKLIVPNRTDWFNIVEVPAETPEKLDRFARERLLERAQKTIEKDNKTYLEEFASNTSQKKFLSQILSDGTLNDKISALTLLIQEAPLHNLKALDTLLAYCDKKSRTAALQSIVALKDLFVNSLLPDRKLFAFDKQPLRKDDSDIQLAIYYFEDHLKKVYFKLIQILEKLSHDPIVHVRMTVVNHIFDLLGAKPEQEVNLLKLGVNKLGDIDNKVSAKASYLILQLEQAHPAMKQIITDAVIDVIFQSNNDDHAKYYGVTTLNQTILTRKEHELANSLVKTYFALFEKILVESDGYNKDTKDDKSIGDSKKGRKNNRKNFKKGKKGGKSVKIEEKTEQELVEEKNAKFFSALLTGLNRAFPFSKLPNEIFQSHLDTLFKITHSSNFNTSIQALVLINHIVSEQGLNSDRYYRTLYESLLDPRLANSSKQGIYLNLLFKSLKNDIANIPRVLAFVKRMLQICSHWLNVGAVAGMLYLMMELSKTIPEISDLLVEFASRPDDTEESSEKDTEEVDKTKDENKDIEYDPRKSNPKFANANRSSLWEIHQFLNHYHPTIAIYASSFLDGTEQVKPDLGLYTLSHFLDRFVYKNAKQKPQTKGSSIMQPLGGAHTGSLLVRSTNLVDTTVPVNTENWLGKKIEDIKPDEKFFHQYFSTKVNKLKTKKDDKKSKEEGDNDDDEEDDNEMDDDEVWKALVKSRPEVEDASEDDFSDFDEEDFADMDSEEENEEDANEEKEDVEGEFSDAKLEAELDGDDDEELDQDDFDDDEKAMFAINDEDEFEDDEIELKMLGDDDDDEEEESEEEEEETKKRARENDSHSKKKSKKQRVKDLPIFASAEDYAEYLDSDNE

SEQ ID NO: 7313 - protein, 564 aa, Candida albicans
MVEKNGKLYSRNIPNAPEDNRPLSERSDREYGKLTSNDYLYVSKHPLGEPLPTPIDDEPPYIILIATYINYLILIIIGHTRDFFGKIFKPKEYEHLVEKDGYAPWYDGFESFYVRRLKTRIDDCFARPIHGAPGRYIKCFNRFRSGKTGYLYDGTSKECLNLSSYNYLGFAQSSGVCTDFSVKCVDDYGTSGCSPRLYCGTTDLHRQCEEVIADFVGKEDAIIVSQGYGTNANLFASIADSKTLVISDELNHASIRFGIRLSGASVKVFKHNDMNDLENLIRNQIAQGQPKTHRPWNKIIVAVEGLYSMEGNMCNLPEIVRIKDKYKCYLFVDEAHSIGALGPEGRGICDYFSVDPAIVDVLMGTLTKSFGATGGYIAGDKTLIEKLRLNYISQSYSEGVPPPVLGQIISSLKVIKGELNPGEGKERLQRIAFNSRYLRLGLKKLGFIVYGADDSPVIPFLLFVPSKMPAVSRMLYDMGIAVVIVSYPATPLTSARARLCVSSALTKEDLDYVLAKISDIGDLVFLKFSSGIAGGCKVPGEPPRWSIEDVLATNVEDCKKPKLM

SEQ ID NO: 7314 - protein, 748 aa, Candida albicans
MKNHILKVLLSKTNNQHGSKTEKASSTQSKSKKSKDLVDERFQAIVLTDSFETRFMPLTAVHPRCLLPLANVPLIEYTLEFLANAGVNEVYLMCSAHADQIQEYIENSKWMGDNSPFSVTTIMSIESRSVGDTMRDLDNRGLIAGDFLLVSGDVVTNMDFSKALQFHKQKKAQDKDHIATMVLNQASPLHRTRSQIDPAAFVLDKETNRCIFYQSIPPVSGKKTCISIDPELLEDFQGELQVRNDLIDCHVDICSPHVPQIFQENFDYQYLRSDFLKGVLTSDLLKKTIYAYISKDSSEYAARVESWSTYDAISQDILARWCYPLVPDSNLVEGNSYSYELNNIYKEDKIILAQSCKIGTSTSIGRNSSVGEGTQIKNSVIGRNCTIGRNVVIENSYIWDNAVIKDNSVLNRSIVAADAQIGNNVTLSPGSVIGFNVIIGDDKVIPHNVKIVETPIVTENEFGDFDDESNSEDENEYEDGNAVPVLAVKDVELVGETGKGFAYESEIESGDEDDEEFVGNGTYSGIIYQMNSLNVSDDSIASVSNKKVKKHSHRRRLSMNSMISDNGGAFESDEGEEEEDFGVEGLATVTRAIENNHDIDTALLELNTLRMSMNVTYHDVRSVTTQALVNKIVDFITTGTLTPQEAATKIFTKWGIMFKRQVFSPEEEVDLLNIVEEKSSVLDKAYNQIVLFLGVKSFYDMEVVEEENILKWWNDGENDEVRTLAAKFITWLQEADEEDSDEDDEDSE

SEQ ID NO: 7315 - protein, 164 aa, Candida albicans
MSSPKVIIVSSDNEKFPVEPKIAEKSILIKNMINDLHPDGLEEDFEIPTPNVRANVLCKVLEWCEHHKNTVFQDDEDEDAKKSVPVEEWDRNFLKVDQEMLYEIILAANYLNIKPLLESGCKMVAEMIKSKSPEELRRTFNIINDFSPEEEAAIRKENEWAEDR

SEQ ID NO: 7316 - protein, 534 aa, Candida albicans
MSYDDIENATPDIVIGSTIEEPEEDYQVESDNELQAADHESSQINEESAKGKKSVAFTGLDEDEENAEELARKEFEEGGGLPEQPENPDFNELTPLSPEIINRQATINIGTIGHVAHGKSTVVRAISGVQTVRFKDELERNITIKLGYANAKIYKCDNPECPEPDCYRSFKSDKEIRPKCQRAGCDGRYKLLRHVSFVDCPGHDILMSTMLSGAAVMDAALLLIAGNESCPQPQTSEHLAAIEIMKLKHVIILQNKVDLMREESALEYEKSIIQFIRGTIADNAPIVPISAQLKYNIDAVNQFIVNYIPVPMRDFTASPRLIVIRSFDVNKPGADVDELKGGVAGGSILTGVFKIGDEIEIRPGIVTKDDQGKIQCKPIFSNVVSLFAEHNDLKFAVPGGLIGVGTKVDPTLCRADRLVGQVVGAKGNLPSIYADIEINYFLLRRLLGVKTEGQKQGAKVRKLEQSEVLMVNIGSTATGARVVAVKADMARLQLTTPACTEINEKIALSRRIEKHWRLIGWATIKKGTALEPIS

SEQ ID NO: 7317 - protein, 449 aa, Candida albicans
MDENYDVIVLGTGLTECVLSGILSVEGKKVLHIDRQDFYGGESASLNLSQLYGKFKPSSQKPELKGRDRDWCVDLIPKFLMANGELTNILVNTDVTRYMEFKQIAASYVYRNGRIAKVPSNAKEALASSLMGIFEKRRMKRFLEFIQNYDEADASTHQGFDLDKNTMNEIYTYFGLENGTKDFIGHAMALWSTDDYLNEVARPTYERIMLYASSVAKYGKSPYIYPLYGLGELPQGFARLSAIYGGTYMLDTPIDEVLYEGEGPDKKFAGVVTKEGTARAPIVIADPTYFPENVKKTGAKVIRAICILDHPVPGVELDSLQLIIPQNQVGRKHDIYVAVLSDVHCVVPKGYYLAIVSTIIETDAPHAELEPAFKLLGPRVDTLMGIAELYEPIDDGTKNGIYLSKSYDASSHFESTTDDVKDIYFRITGKPVELKKRPTAEEEEALQGL

SEQ ID NO: 7318 - protein, 765 aa, Candida albicans
MKFFIDDLPVLFPYPRIYPEQYSYMCDIKKTLDVGGNCILEMPSGTGKTVSLLSLTVAYQMHYPEHRKIVYCSRTMSEIEKALIELHKLMEFRANELGEVEDFRGLGLTSRKNLCLHPTISKERKGVVVDEKCRRITNGQLKEKIEKGVPTEDSLCSFHEKLYDLEPHNLVPPGVYSFDALIKYCKEEGTCPYFTVRRMIPFCNIIIYSYHYLLDPKIAERVSRELSKDSIVIFDEAHNIDNVCIESLSLDLTDETLKKASRGANKLGEAIEDMKAQDSEKLQNEYEQLVEGLRQAEIARDQELFMANPVLPQDLLDEAIPGNIRKGEHFIAFLKRFIEYLKTRMKVLHVISETPTSFLQHLKELTYIERKPLRFCSERLSLLVRTLEVTEIDDFNALKDIATFATLVSTYDSGFQLILEPYETEGSTVPNPILHFTCLDASIAIKPVFDRFSSVIITSGTISPLDMYPKMLKFETVIQESYAMTLARRSFLPMIVTKGSDQVSISSRFEIRNDPSVVRNYGSLLIEFAKITPDGMVVFFPSYLYMESIISMWQSMGVLDEVWKHKLILVETPDAQETSLALETYRKACSNGRGAVLLSVARGKVSEGIDFDHHYGRTVLMIGIPFQYTESRILKARLEFMRDHFQIKENDFLSFDAMRHAAQCLGRVLRGKDDYGIMVLADRRFARKKNQLPKWIAQALNDSDTNLSTDMALATAKKFLRSLAQPTNPKDSEGVSIWNIEQLQEYQQQFQKDEMDIDEEDLDLL

SEQ ID NO: 7319 - protein, 1240 aa, Candida albicans
MGRLIGLELFNFKSYKGKSIIGFGSSYFTSIIGPNGAGKSNMMDAISFVLGVNSYHLRSQNLKDLIYRGRRNIDTDSTTLDAIEQDPTSAYVMATYEKDDGEILKLKRTITASGNSDYQINGQSVTMLNYSMVLKQENILIKARNFLVFQGDVETIASQNPKDLTKLIETISGSNEYINEYERLKEEHEKAHELTTSVFSRKRTLNSESKQYKEQMAEQRQFEEKIITKNDTVKKINLYKLFHNEKKHNQLKDEIKSKNEELKLAKKELSNKEKTYKSIMTDYSSSVLNAKKQKQQTEAAQQKIDSTKRELIPVEANQRSLSNKINFHKLKVGDLVKDIARQKTQVSSVERQLRDAQRMFDDFQAKIAAAVASSTNISPEAQKEYEELRSKFLAENGSELEEQISLLLNNKDSLNSAKSNLENQKTNAENRIAELESIVATDLKSKLHDVSNEINEVLDKKSDKVEARNALIKQKDEFNHEELKLNTRLRDVLVKLDELASQQRESNKQKKLRENVATLKRLFPQGAIKGLVYELVRPTQQKYESALATLLGPNFDSIIVESSAVAYKCIDILKERRAGVATFIPLDSIETDIINLSHLRSIHPSALPGVDIIEYQDKSLEPAVNYIIGNTVVVDTIDTARNLKWQSNTRFDNKIVTLQGSVIHKSGLMTGGQQQQKSSASLSWSKQEWTKLNELKEELNQKIFKLQEKRPKDLEINLLAEEIGALDDKLPVLRNQKTSIERIIKDRESEIEFQTGLFKGFDKSIQEKMNEITKINGKIDKVNEKMKSSKDLIFAEFCEKYGFVNGIEDYENMHGSTLRVRAKERAQFSKTISVLQNKLDFEKERLKETKDRRKSIESLIVDLEDDLAKVLTEKKKLEESLDKAEAEYEVLQTEISQFDDSMQSQLKTSKSIESDLDDSKSLVSTLVKEITQIEENLLKTDSERANVLRNCKIQNINLPLIDGDLDSISVGENLESSIKEVYKIELDYEMLEERFKEVFNNKLQSELEVILQNTISDLEKLTPNAKAIERLREVETKLRNYDKEYNVARQKERQVNERFKKVQEKRYDKFMDAFNHISGCIDSIYKELTKSAMSPLGGSAYLTLEDEDSPFLSGIKYHAMPPMKRFRDMELLSGGEKTMAALALLFAIHSYQPSPFFVLDEIDAALDNANVARIGNYIKKYAGPNFQFIVISLKNSLFEKSDALVGIYREQRENSSKTVTLDLREYPDDDVPLSTVTATT

SEQ ID NO: 7320 - protein, 350 aa, Candida albicans
MSESLQSVLIIGGSGFLGLHLIEQFYRHCPNVAITVFDVRPLPEKLSKYFTFDPSKIQFFKGDLTSDKDVSDAINQSKCDVIVHSASPMHGLPQEIYEKVNVQGTKNLLSVAQKLHVKALVYTSSAGVIFNGQDVINADETWPYPEVHMDGYNETKAAAEEAVMKANDNDQLRTVCLRPAGIFGPGDRQLVPGLRASAKLGQSKYQLGDNNNLFDWTYVGNVADAHVLAAQKILDKSTRDDISGQTFFITNDSPTYFWTLARTVWKNDGYIDKYYIKLPYPVALTLGYISEFVAKNILKKEPGITPFRVKVVCAIRYHNIAKAKKLLGYKPEVDLETGINYTLDWMNEDL

SEQ ID NO: 7321 - protein, 895 aa, Candida albicans
MSATEPTNEKVDKIVSDDEDEDIDQLVADLQSNPGAGDEEEEEENDSSFKAVPEELLQTDPRVGLTDDEVTKRRKRYGLNQMAEEQENLVLKFVMFFVGPIQFVMEAAAVLAAGLEDWVDFGVICALLLLNAFVGFIQEYQAGSIVDELKKTLANSALVVRNGQLVEIPANEVVPGDILQLEDGTVIPTDGRIVSEDCLLQVDQSAITGESLAVDKRSGDSCYSSSTVKTGEAFMIVTATGDSTFVGRAAALVNKASAGTGHFTEVLNGIGTTLLVFVIVTLLVVWVACFYRTVRIVPILRYTLAITIIGVPVGLPAVVTTTMAVGAAYLAKKQAIVQKLSAIESLAGVEILCSDKTGTLTKNKLSLHEPYTVEGVEPDDLMLTACLAASRKKKGLDAIDKAFLKSLINYPRAKAALPKYKVIEFQPFDPVSKKVTAIVESPEGERIICVKGAPLFVLKTVEDDHPIPEDVHENYQNTVAEFASRGFRSLGVARKRGEGHWEILGIMPCMDPPRDDTAATVNEARRLGLRVKMLTGDAVGIAKETCRQLGLGTNIYDADRLGLSGGGDMAGSEIADFVENADGFAEVFPQHKYNAVEILQSRGYLVAMTGDGVNDAPSLKKADTGIAVEGATDAARSAADIVFLAPGLSAIIDALKTSRQIFHRMYSYVVYRIALSLHLELFLGLWIAILNRSLDINLIVFIAIFADVATLAIAYDNAPYDPKPVKWNLPRLWGMSIVLGVILAIGTWITLTTMLLPKGGIIQNFGGLDGILFLQISLTENWLIFVTRAQGPFWSSIPSWQLSGAVLIVDIIATCFTLFGWWSQNWTDIVTVVRTWFWSFGVFCVMGGAYYLMSTSEAFDNFCNGRKPQQHTDKRSLEDFLVSMQRVSTQHEKST

SEQ ID NO: 7322 - protein, 247 aa, Candida albicans
MSNSAGFDRHITIFSPEGRLYQVEYAFKAINSANITSLGITGQDSAVIISQKKIPDKLLDPKTVSYIFKITPSIGMVATGSVADARAQAMRARSEATEFRYKYGYEMPVESLSRRMANISQLYTQRAYMRPLGVALTFIQVDFADEGRGPQIFKCDPAGYFTGVKAVATGPKQQEATTYLEKKFKKTDAVKGDWQKTVEFAIIALSSVIGTEFRKNDIEIGVATEGEFRILTPEEIDERLISIAEQD

SEQ ID NO: 7323 - protein, 751 aa, Candida albicans
MASTISSKPQLKVLGIDVESIRVLLKVIIFISIAGAAISSRLFSVIRFESIIHEFDPWFNFRATKYLVTHSFYEFLNWFDDRTWYPLGRVTGGTLYPGLMVTSGAIWHILRDWFALPVDIRNICVLLAPVFSGLTAICTYFLTKEMKDSSAGLLAAIFMGIAPGYISRSVAGSYDNEAIAITLLMATFYFWIKSMKMGSVFYATLTALFYFYMVSAWGGYVFITNLIPLHVFVLIFMGRYNAKLYTAYTTWYALGTLASMQIPFVGFLPIRSNDHMAALGVFGLLQLVAFGDYVKSKVPTKQFKSFLIVSIVLVVGLGIGGLFGLTAMGWIAPWTGRFYSLWDTNYAKIHIPIIASVSEHQPTAWPAFFFDTSMLIWLFPAGIYLCFQELKDEHVFIIIYSVLCSYFAGVMVRLMLTLTPVICVAAAIALSKLFDVYLDIVDLFTEKVGKYDDDVSDESKSSTKKSSSRFPIAGYLSKVLVLSTFTFYLFYFVLHCTWVTSNAYSSPSVVLASRNPDGSQHIIDDYREAYYWLRMNTPEDAKVMAWWDYGYQIGGMADRTTLVDNNTWNNTHIATVGKAMSSPEDVSYEILRQHDVDYVLVIFGGLLGYSGDDINKFLWMVRIAEGIWPDEIKERDYFTDRGEYKVDKDASSAMKNSLMYKLSYHRFTELFGGRDGVDRVRNQQIPANEVPKLNVVEEAFTSENWIVRIYKVKDLDNVGRDLHQATAFEESSSGTSKRNRSIKRPKLEVRE

SEQ ID NO: 7324 - protein, 276 aa, Candida albicans
MYRNWLYFGRDSIDNLLNNYSFLLPRIRKTRQLKLNMDSKSTCVSIGKFPFDYTEEQVRDIARSVGPVLDVKLLFDELTGKSKGYAIINYGDNETASSAVRNLNYMTLPNGRFLKCSFVTDYDMSSKESVKLPPLPLGIQIHPNQNASQVISTILSNIDSNSALQILKEIKVMSIDNPKSTKVLLERFPQLSLALVELGLLSNTTNQELIELTLNKRPVDLTELSLDHVRLLQSVEKLTDEEIDELDESQQEIVRKVKEEIAKGTYGEVSAVKDNA

SEQ ID NO: 7325 - protein, 401 aa, Candida albicans
MTTSIDKSYVHEGGIRPYFEQQIQDTEIRIQQTTQNLRRLEAQRNKLNNKVRQLKDELKLLQEPGSYVGEVVKVMGLKKVLVKIHPEGKFIVNVTKDIDVKKLTPSIRVCLKADSHDLYKILPNKVDPLVSLMMVEKVPDSTYDMVGGLDKQIKEIKEVIELPVKHPELFESLGIAQPKGVILYGPPGTGKTLLARAVAHHTECKFIRVSGSELVQKYIGEGSRMVRELFVMAREHAPSIIFMDEIDSIGSSRVEGSSGGDSEVQRTMLELLNQLDGFESSKDIKIIMATNRLDILDPALLRPGRIDRKIEFPAPTVAARTDILKIHSRSMNLTRGINLRKIAEKMNGCSGADVKGVCTEAGMYALRERRIHVTQEDFELAVAKVMSKNDDGAVSLQKLFK

SEQ ID NO: 7326 - protein, 174 aa, Candida albicans
MSAIIRQAIRPALRSVSSKRIAVTALRYNSTAAEPAKAPVDAKITTIVDQISTLTLLETSQLINELKERLNISDISLPVGGAQAAPVAQAAPAEEEVKEEVEEKTIFSIKLESFDAKSKPKIIKEVKGMLGLSLVESKKFVESAPKVLKENVAKEDAEKIKATLEGLGAKVSLE

SEQ ID NO: 7327 - protein, 493 aa, Candida albicans
MVALKREAEPRENGKSKKAKTSLATSSFVLHSYSKLPNINEYAKAKSTPLDVFVWGTGSMCELGLGPSAKNKEVKRPRLNPYLTEEKLGGTKIVDFAVGGMHTLALDGKNRIWSWGGNDSGVLGRDTSQAKEVLKDIDGKNGNDDDDDDDDEDGDLNEAESTPALVENLPEGEIVQLAATDNLSAALLSNGDVYAWGCFRCNEGLLGFLRDEIKLQKTPLKIKELKNIVQLAAGKDHLLALDSKGIVYAWGNGQQYQLGRRILERHRYRSLEPQQFGLYNIKYIASGDFHCFAIDHSDNVYAWGLNQYGQCALTGDNGELEDGSVLMKPTLIPELSHKGIKEIAAGEHHTLALTEDGQVYAWGRYDMKEIGIPKDKLPKSTFKDQHGNPRSVPVPTKLEFAVKIKTIGVGSHHSFAVTEDGVVYAWGFAETYGPGLGPSIDDVEKPTRIVNTATKNEDILLIGAGGQFSVSGGVKIEDEEKAEVRLDKYEDLE

SEQ ID NO: 7328 - protein, 519 aa, Candida albicans
MDAKPPTSHSLWSPYDTVRDAADSLGVTISDETAKSLAMDVEYHIHEIIETAVKFMRHSKRRQLTTSDVSNALKILNIEPLYGYDNTQPLNYKETMVGAGGQTLYYIDEHEIEFEKLINQQLPKVPRQVNFTAHWLAIEGVQPMVPQNPLPSEIKSLPAAVRGATTSMLGNDILSLGSKNENGESNDSTKHESELLSNGGSSSHTNNSNSNKKSTEKDMEIKPLIKHVLSKELKLYFDKVVDVLISTDPEKEHLKNAALTSLKSDPGLHQLVPYFIQFIAEQITNQLRNIEILSTMLEVISALVDNKTIFLDPYVHALMPCILTLLLAKRIGPVIKLTQENKEEWQDALKSQLAIREFAAILLQHIIKVYGSSYSTLRPRITRTLLRALLDSTKPVGTQYGALLGLKNMGNEVLKLVLLGNLKVWYSAIIEKNENDYERQILINALLDTLRKLKLEDKLLNQTKAQDSDDMDIDSNNEISDEVKTKLVERFGKSLADLLIEQEDGKQIIKGIFFGELSV

SEQ ID NO: 7329 - protein, 767 aa, Candida albicans
MANEEKRSNKRQKLIDNYEAEKIAEASEESLRTHPHPSDKIELIHHDQGEFKGLIRHQTTAEQAQKLEDGPKNPFTGHDFTTKYFDILKTRRDLPVHAQREEFLKIFHSTQIMVFVGETGSGKTTQIPQFVLYDEMPHLTGKQVACTQPRRVAAMSVAARVADEMDVELGEEVGYNIRFENNSGPKTILKYMTDGMLLREAMEDHDLTRYSCIILDEAHERTLATDILMGLLKQVSVRRPDLKIIIMSATLDAEKFQNYFNNAPLLAVPGRTHPVEIYYTPEFQRDYLDAAIRTVLQIHATEGEGDILLFLTGEEEIEDACRKISLEGDELVREQNCGPLKVYPLYGSLPPHQQQKIFEPAPTNPNPNGRPGRKVIISTNIAETSLTIDGIVYVVDPGFSKQKVYNPRVRVESLLVSPISKASAQQRAGRAGRTRPGKCFRLYTEEAFKKELIEQSYPEILRSNLSSTVLELKKLGIDDLVHFDFMDPPAPETMMRALEELNYLQCLSDEGDLTALGRLASQFPLDPMLAVMLIGSPAYSCSEEILTIVAMLSVPNVFVRPASARKRADEAKLSFAQADGDHLTLINVYEAFISPEASEIGTHKWCRDNFLSYRSLTSAKNVRNQLQRLMQKYDLQLISQYNQVSEFEYWENVKKALVAGFFMQVAKKKSGNKGYLTVKDNQDVLIHPSTVLSKEGEWLIYNEFVLTSKNYIRTVTVVKPEWLVEIAPKYYNLDHFAKGDVKLSLERVVERVGNMKKLDKKKKKSKN

SEQ ID NO: 7330 - protein, 449 aa, Candida albicans [sequence omitted]

SEQ ID NO: 7331 - protein, 182 aa, Candida albicans
MSTTETTEKTESNSKPEVGFTGRKIVYDKDGKPCRTCNSLLDFQFASGKIKKSPVTPESKKVNKSELKSYPQDEPPDVTELGKSSWTLLHSIAATYPETPTTKQQSDMKSFINLFSGFYPCWFCAEDFQKYIAKNEPKTRNQEELGRWLCDAHNEVNKKLNKPQFNCDLWKKRWKDGWDNEE

SEQ ID NO: 7332 - protein, 321 aa, Candida albicans
MEVLHQLTTNHTSSLSNLINNHPTSFSSILKEVDITNHSLTYIEKLWASYYIYMNNDILATGLLFFITHELMYFGRCLPWFIIDKTPWFNRYKIQPTKIPTNQEQWECFKTVLKQHFLVEALPIWLFHPVCAKLGITYDVPFPNWKIQAIQIAIFFICEDFWHFVFHSLFHQGWFYKNIHKVHHKYAAPFGLAAEYAHPVEVMALGVGTVGFPILYAYLATVYTNMPPLHLFTLTTWIVLRLFQAVDSHSGYDFPWSLNKFFPLWAGAAHHDEHHHYFIGNYASSFTLWDWLFQTECGTYARKRRERNSQASAESKHKKTL

SEQ ID NO: 7333 - protein, 1119 aa, Candida albicans
MLYSRNLLLSTSSILFRKRIDFCIRRKLLSSSSIVTNNMSDSSTNPPPPPHPAAAAAAAAAAAEQPVATTPQEGQPKQKTAKELEKERKKAEKLAKFNAKKAKQAAEANNKPKKDQQKDDKKTKKANTPTTKIPEFVDKTVPGDKKILVSLDDESFKAYNPKNVESSWYSWWEKQGFFEPELTANGEIKKEGCFSIPCPPPNVTGALHIGHALTVSIQDTLIRWNRMQGKTTLFIPGFDHAGIATQSVVEKQIWAKEQKTRHDYGREKFIEKVWEWKEEYHQRIKNQFKKLGSSYDWSREKFTLNPDLSQAVTEAFVRMHEDGTIYRASRLVNWSVKLNTAISNLEVDNKTIPGKTLLSVPGYESKIEFGTLTSFSYPVVDSETNEKLTVATTRPETIFGDTAVAVHPKDPRYTHLHGKFVQHPFLDRKLPIICDAETVDMEFGTGAVKITPAHDQNDYNTGKRNNLEFINIYTDDGLLNENCGPEWKGMKRFDARYKVIEQLKQKGLFVDQKDNEMTIPVCSRSGDIIEPLLKPQWYVDQKQMAKDAIEVVKRGEIVINPKTSEAEYFQWLENIQDWCISRQLWWGHRCPVYFVNIENEQIHDKLDNNYWVAGRTEEEAFKKAQEKFPNKKFTLEQDEDVLDTWFSSGLWPISTLGWPNETKDMELFNPMSMLETGWDILFFWVSRMILMSIKLTGKVPFKEVFCHSLVRDAQGRKMSKSLGNVVDPLDVINGIPLQGLHDKLLTGNLDPRELKKATEGQKLSYPNGIPECGTDALRFALCAYSTGGRDINLDILRVEGYRKFCNKIYQATKFVLGRLGQDYIPPTTSELTGKESLVEKWILHKLSHAAKLTNESLEARNFGDATNHIYNFWYDLCDVYIENSKSLIQDGTPEQKKSAQDTLYTCIDGALRLIHPFMPFITEEMWQRLPRREPEITGNLKTIMKAPYPVYKSEFDDIKSLEAYNLVLDITKGARSLLSQYNILKNGQVYVETNNEEIYKIANDQQDSIVSLIKGVEKITVVKTLDQVPSGCALQAIGPECTVHVLVKGQIDLDAEIAKVEKKLSNVLEQKKKTDESISKFTEKTKPEAKDSAYKRLEKQTAEIEGYEQTIAILEKLKL

SEQ ID NO: 7334 - protein, 587 aa, Candida albicans
MARIKKRGTTGNAKNFITRTQAIKKLQISLADFRRLCIFKGIYPREPRNKKKANKGSTAPVTFYYSKDIQYLLHEPVLDKFRQHKTFAKKLQKALGRGEVSDAYKLDQHRPKYTLNHIIKERYPTFADALRDLDDPLNMLFLFANMPATDKVSAKVVSEAEKLCNQWLAYVAKERCLKKVFVSIKGVYYQATVKGQEIRWLIPYKFPTNIPTDVDFRIMLTFLEFYSTLVHFVLYKLYNEAGLIYPPIIEKSIGLSGYVLQDKDAPLKKKEEKNDEEGKNLSKKELNKAIKADQEQQENDEQDNNNGESVEDIELDEFTSTKEDSLLQPSKYASSTAELFSKFIFYIGREVPLDILEFCILSCGGKIISEIAIDDLKINDPEAYKKLNLSNITHQIIDRPKILQKVPGRTYVQPQWVFDSINKQELINVNEYAAGETLPPHLSPWGDAGGYDPNKEVEKEDGEAVEDTDEEEEEVEIEDGDEDQEDEEEEEDEDLKAQKELELEAAGVKFSEINEENKKSHSKKSKGTSNKEADEEKELKKIMMSNKQKKLFKKMQYGIEKKENREKQLTKKKKQLNKKKEQLKKLN

SEQ ID NO: 7335 - protein, 409 aa, Candida albicans
MTVITDPVEQYNLITKGLQETLNGQIIKDVLEKENRPVKIYWGTAPTGKPHCGYFVPMIKLAHFLKAGCEVTVLLADLHAFLDNMKAPLEVVKYRAKYYEFVVKAILKSINVPIERLKFVVGSSYQKGGDYVMDLFKLSNIVSQNDAKRAGADVVKQVANPLLSGLIYPLMQAIDEEHLGVDAQFGGVDQRKIFVLAEENLPSIGYKKRAHLMNPMVPGLGQGGKMSASDPNSKIDIIEEPKVVKKKVNSAYCAPGELKDNGLIAFIEYVIQPIAELKTGVEGAFKLDIDRPEKYGGPLSYDSIEQLKADFVDGKLAPPDLKSGVADKINELLAPIRAEFESSEEFQVAQKNGYPVEKPKQEKKKKVKKIGTRYPGTVSGGDSADTPANSNDGEKAAEKKSADEKPTTE

SEQ ID NO: 7336 - protein, 491 aa, Candida albicans
MSEESNQQVFSTVGEQAQEVDNAIKQTGAADAEGHPVQEVESLCMNCHKNGVTRMLLTRIPYFREVIIMSFECPHCGFKNSEIQPAAQIAEKGARYVLKVENKKDFNRQIVKSGTATGKFTELDIEIPPKRGQLINVEGILQEMIDDLESDQPQRQKVQPEVYEKIDQVISKIKSFINCDPNTVPLTVTVDDPAGNSWIEYVPGEPTHKWAMYEYNRTAEQNVFLGLISADDVAQHRQAELANKKQATDSNISSNLNKEQSQSQSQSQEEHSNPHTTGFKSDASEIENFSNEVQTFAATCSSCYKPCETHMKTVNIPHFKDVILMSTVCDHCGYKSNEVKTGGAIPEKGKRITLKVTDPEDLARDILKSETCGLNIPELNLDLTPGTLGGRFTTIEGLLTQVLEELHSRVFTQTSDSMDDETKTRWTGFFARLQDAIDGKIGFTIVMEDPLASSYIQNVYAPDNDPNMTIEEFERTFDQNEGLGLNNIKTD

SEQ ID NO: 7337 - protein, 1079 aa, Candida albicans
MDAILDFSTDLDINLFDQTVDTFFKGSGNDQKNAQLVLNKFQEHPDSWKFADKILSNSNNAQSKYIALSSLNKLIQYRWKTIPDNERIGIRNFIVNMIISLCDNEQEFETQRALINKIDLTLVSVLKQEWPHNWPEFIPEIVMSSRSSYNVCENNMIILKLLSEEVFDYSQDQLTQAKAQQLKVSMKNEFEKIFTLCYEVLDKTTKSSLIIATLNALLKYIQWIPSEYIYQTDLLNLLSTKFLAPADTRAISLKCLTEVSSLPAHNEKTLIYFKNTLEQIYSIVPLTTNLKQTYKVASSSDQSFLQDLAMFLCTFLTNNLELLEKHKEAGELLQNSLFYLLELSRIEERELFKTCLDFWSTFVYGLFKEIRDLPSNELTPMMQLAYGNSLRPTSSGGAPDPALLQKFPLRQHQYAEILSKLRLVIIENMARPEEVLIVENDEGEIVREFVKESDTIQLYKSMREVLVYLTHLNVIDTEQIMIEKLARQIDESEWSWQNINTLCWAIGSISGAMNEDMEKRFLVSVIKDLLSLTEMKRGKDNKAVVASNIMYIVGQYPRFLKAHWKFLKTVVNKLFEFMHETHEGVQDMACDTFIKITHKCKKHFVAVQANETEPFINEIIREIQQITEDLQPQQVHTFYEACGIIVSAEYNKTARDKLLSELMALPNMAWTAIIQQAGQDPELLSNTETVKIIANIIKTNVAVCKALGPGFYSQLGGLYVDMLSLYKAVSQMISDAVAKDGIIATKTPKVRGLRTIKKEILKMIETYINQADNLQEIVRDLVQPLFGAVLEDYSSNVPDARDAEVLRCLTALVSKAGHLIPDGVVLILQNVFECTLDMIKNDFVEYPEHRVEFYKLLKEINAKSFQGLLQLSGEAFQSLINAALWAFKHNNREVEDNGLSLTLELIENVEKLGDTPFTKAFYENFYFQILSDTLYVFTQPDHKAGFRYQAQLLAQLIHLVEDNVIKYPLYTSDQAPEGTSNSDFLKQYLSQLLSSAFDNLQEVQLINFLKVLTTVYNDLFKFKSVLRDFLVQLKEFGGDPTDYLFAEDKQIEREEQDRLQRERDMQVGGLIRPSEMDDE

SEQ ID NO: 7338 - protein, 553 aa, Candida albicans
MSKPRKQQKCKTCGHTQFDVNRYTAAGDVSCLRCGTVLEENPIVSEVQFGESSSGAAMVQGAMVGADQARATFAGGRQNAMESREQTLSNGKRKIKRIAAALKIPDYIAEAAGEWFRLALTLNFVQGRRSNNVLATCLYVACRKERTHHMLIDFSSRLQISVYSLGATFLKMVKALHITSLPLADPSLFIQHFVEKLDFKDKATKVAKDAVKLAHRMAADWIHEGRRPAGIAGACVLLAARMNNFRRSHAEIVAVSHVGEETLQRRLNEFKKTKAGTLSVKSFREVENLESSNPPSFEKNRAMELKISKKLQQQQTDNFEDLSKMTEEEKQSVFGKLSKEEAQKQLLMNTILSDITITTENLNDQMDRILKMKKSSLENSLYKTPYELALANGSEQDPSKIWNINKPKNLVANLPKTDDILQNVSSEVELNSDDDDEIVLESKLTEEEVAIKERIWTGLNHDYLVEQEKKRLKQEADELTGNTSKSSSGNRRKRNKSSLPAELRKELGDIDLDEDGTPRSAADSAKMYISKTSVSKKINYDSLKGLLGGNMGF

SEQ ID NO: 7339 - protein, 255 aa, Candida albicans
MFLTRSEYDRGVSTFSPEGRLFQVEYSLEAIKLGSTAIGISTSEGVILGVEKRVTSSLLESSSIEKIVEIDHHIGCAMSGLTADARSMIDHARVSSLTHNLYYDEDIGVESLTQSVCDLALRFGEGAGGEKRLMSRPFGVALLIAGVDKEKGPQLYHAEPSGTFYRYEAKAIGSGSEGAQAELNNEYHKSLTLKEAELLALKILKQVMEEKLDCKNAQLASVTKDGGFQIYSDEKTDAIIKELNAQATDEDTVIS

SEQ ID NO: 7340 - protein, 119 aa, Candida albicans
MSAPINKEKVEQEAEQQIHKIRITLTSTKVKQLENVSANIIRNAAQYNIVKKGPVRMPTKVLKITTRKTPNGEGSKTWDAYEMRIHKRVIDLQAPASTVKRITQITIEPGVDVEVTIAA

SEQ ID NO: 7341 - protein, 91 aa, Candida albicans
MFGLGGTTPQISSQQKLQAAEAELDMVTGMFNALVSQCHTKCINKSYNEADISKQESLCLDRCVAKYFETNVQVGENMQKLGQSGQFMGRR

SEQ ID NO: 7342 - protein, 552 aa, Candida albicans
MSQSIYVNEKSGVDTTEAKGTQEKPYATPAFALYTHPDAKVFVYKQSEEDAEKFEYVEISASALKKAKKGVEGLKKKAEKQAKLEEQKKQQQATAKLAELDLSSIEEDKSLPSAQKIKIRQLKDHLDTRVLVQGWVHRLRVQKGLAFITLRDGTGYLQCVLTGDLAKAKQTQELTIESTVAIKGVISKLPEGKTAPGGVELKADHYQIIALAPGGDESFTNKVQENADPNLLLDQRHLALRGESLSAVMKVRAAYSAAIRRFFTEEGLTEVTPPCMVQNQVEGGSTLFKLDYYGEEAYLTQSSQLYLETCLASLGDVYCIQESFRAEKSHTRRHLSEYTHIEAELVFITFEDLLTHLEKLLSKTIQYVLEDPVAGPIVKQLNPDFKAPKAPFKRMEYIEALDWLNEHGIPNEDGEKFKFGDDIAEAAERKMTDTINEPILLTRFPAEIKSFYMQRCKDDPRVTESVDVLMPNVGEITGGSMRIDNYDELMAALKRENLNLDSYYWFTDVRKYGSAPHGGYGIGLERQLAYMLNRYTVRDCSLYPRFTGRCKP

SEQ ID NO: 7343 - protein, 691 aa, Candida albicans
MALEQSLAQLSLATVASPENGKALPTKSLIFKPKTAKTATPIPLFVFALQDTTTPSNLIAKSAGVKEPRLAKDDLVEEFFKTTTKEVSIANLSKELAGKIKIVIDDNVLKAAKNEELLKLSTQSSAACLSAKTVVEFLQSTGIEIIEVDFSAEPTQAPASASPGGSGAAASSKKEKKDDAKLEDAKLIGITVDKEKDFSSWYTQVVTKGEMLDYYDVSGCYILRPNSYFVWETIQDWFNARIKKLGVQNTYFPMFVSQRVLEKEKDHIEGFAPEVAWVTRAGNSELDEHIAIRPTSETVMYPYYAKWIRSHRDLPLKLNQWNSVVRWEFKHPQPFLRTREFLWQEGHTAHLTKDAAANEVLQILDYYAGVYEELLAVPVVKGKKTENEKFAGGDYTTTVEGFIAATGRGIQGGTSHHLGTNFSKMFNISVENPEGSEKPRIFAYQNSWGLSTRVIGVMIMTHSDNKGLVLPPRIAQYQAVVIPVGLTSKSTDAQRKEINEGAEKIEQSLRANGIRVTGDYREIYNPGWKFADWELKGVPLRFEFGPKDLAGNQVTIVRRNDGKKYTVKLDELDTEVPKLLDQMHDDLLTKAKQEFDEHRVKVDEWKDFVPTLNKKNVILSPWCGDADCEDDIKDSSAKKDDGEEEEVDEKAPSMGAKSLCIPFEQPELKEGQKCVKCDRKAVTYCMFGRSY

SEQ ID NO: 7344 - protein, 522 aa, Candida albicans
MLSRRTITRKLNKGVSKSLLSFARYNHSITSTTTPASSQPHIELTTFANGLRLITDSTPGHFNAVGAYIDAGSRYEDPKAPGLSYLRDRLSWKSTEDFTGQQMLENLSKLGGNYMSSAQRESMIYQASVFNKDIDRMVGMIGQTIRYPIFSDQEFQEALQTAEYEVAELAYKSDLYLPEELHTVAYKENTLGLPLFIPQERIPLVSKSDVIDYNNKFFQPQNTVIAMVGVPHEYALKLIMENFGDWANTTTTKPNPGIKNYTGGEISLPYTPPLYANLPELYHIQIGFETTGLLNDDLYALATLQKLLGGGSSFSAGGPGKGMFSRLYTKVLNKYPFVENCMSFNHSYIDSGIFGITLSLVPEAAHVSSQIIAHELSQLLVTEESQGGMNAKEVQRAKNQLISSLLMNVESKLARLEDLGRQIQCQGKITTIDEMVDKINRLTIKDLQNVAEKVLTGKVITSNGGTSLGLPSIVMQGERETFGDVEFILRRYGLGNYKGPEITEPRDFSSNQNEKKKKSRWF

SEQ ID NO: 7345 - protein, 315 aa, Candida albicans
MSYDLNIPWPVNNYDKSPTLQQLTNLRNIIITNYSLGITHQAINFQISIESVKIPTTTTATSKINPIPINQLLNELLPKFPKLKLFSRLTLIVNDSSKLPQLNKLQNQFDIIAIQPLNEKVLQLSILNLDIDLISINLASKLSFYLKFKTLNNATEKGIKFEICYSQLISGNTNSGGGGYIDDSTNTNLIKKNFFNNVLQLIRGCRSRGIIISSGAQTSLQLRNLSDILILLKTLSSSPSDLSKNNCSKFITINPERVLINGKLKQKSHRQTIVVNNDGDLLQEKQTISGSGGGFKKKLDDTSSGRLLKKRKTTK

SEQ ID NO: 7346 - protein, 730 aa, Candida albicans
MYYSEEIGLPKTDISRWRLRSDALGRETWHYLSQSECESESEPQSTFVQWLLESPDFPSPPSSDIHTPDEAARKGADFLKLLQLDNGIFPCQYKGPMFMTIGYVTANYYSKTEIPEPYRVEMIRYIVNTAHPVDGGWGLHSVDKSTCFGTTMNYVCLRLLGMEKDHPVLVKARKTLHRLGGAIKNPHWGKAWLSILNLYEWEGVNPAPPELWRLPYWLPIHPAKWWVHTRAIYLPLGYTSANRVQCELDPLLKEIRNEIYVPSQLPYESIKFGNQRNNVCGVDLYYPHTKILDFANSILSKWEAVRPKWLLNWVNKKVYDLIVKEYQNTEYLCIAPVSFAFNMVVTCHYEGSESENFKKLQNRMNDVLFHGPQGMTVMGTNGVQVWDAAFMVQYFFMTGLVDDPKYHDMIRKSYLFLVRSQFTENCVDGSFRDRRKGAWPFSTKEQGYTVSDCTAEAMKAIIMVRNHASFADIRDEIKDENLFDAVEVLLQIQNVGEWEYGSFSTYEGIKAPLLLEKLNPAEVFNNIMVEYPYVECTDSSVLGLTYFAKYYPDYKPELIQKTISSAIQYILDSQDNIDGSWYGCWGICYTYASMFALEALHTVGLDYESSSAVKKGCDFLISKQLPDGGWSESMKGCETHSYVNGENSLVVQSAWALIGLILGNYPDEEPIKRGIQFLMKRQLPTGEWKYEDIEGVFNHSCAIEYPSYRFLFPIKALGLYKNKYGDKVLV

SEQ ID NO: 7347 - protein, 59 aa, Candida albicans
MHLMYTLDAEGKRIYTLKKISEDGEITKSAHPARFSPDDKYSRQRVTLKKRFGLLPTQN

SEQ ID NO: 7348 - protein, 298 aa, Candida albicans
MDTSTVLEKYTQDLSNLPLEVRHLLEEIKSKDVQVSEARKRYQTRDHQLHKFIRTNGTLTKHPKEDQLYSKIEEDMKLVQKLQKEKILLANTALFLISKHLYHFETDIAKLERDELLPPLEHPIELTEVSKDEYAKSLNGFSDSASATPTPRNGSSATPVAETVKKIQKKKLSVKGASSSSAQSSSASRQVKRLRSEEIEDPLPYEGGSLAFNGNVAMSINSAADANGPNGEDADNNLYCFCQRVSFGEMIGCDNEDCKYEWFHWSCVGITSPPKDDEIWYCPDCASKMEKRKKKRKN

SEQ ID NO: 7349 - protein, 222 aa, Candida albicans
MSDPINANPTIIDVADLPTRLNNDNNNNNDNNYQTTNKLNLKKNKQMISQLVSLSLLNPDESPEAADDETSLSSDEENEDDDFDPIDEQEIFDLIATISDPEHPLTLAQLAVVNLSDIKITNPPNCGGDGGDGGGGGISEVLIKITPTITHCSLATLIGLGIRVRLDRSLPSRYRIKILIKEGTHQSENQVNKQLNDKERVAAACENDQLLNVISQMLSTCK

SEQ ID NO: 7350 - protein, 73 aa, Candida albicans
MASPQREGFSIPSSISHAALGQVQSKSLGVKYNCAQCAASFSLSKSDTIRCKECGHRVIYKARTKRMVQFEAR

SEQ ID NO: 7351 - protein, 183 aa, Candida albicans
MVRALKHHEKKLLKKVDFLDWKQDQGHRDTQVMRTYHIQNREDYHKYNKICGDIRKLAHKLSLLQPTDPFRIKHEQLLLEKLYNMGVLSTKSKISDLENKVTVSSLCRRRIGVVMCRLKMAETISDAVKFIEQGHVRVGPNVITDPAYLITRNLEDYLTWVDNSKIKRNVLKYKNKIDDFDLA

SEQ ID NO: 7352 - protein, 2416 aa, Candida albicans
MGRKLPPPPPPPGISNKNKRRKENDGKPITENSNGAGKQQLPPPPPPPSSSQSLNSKLRPPPPPPPPPPPSADSKKQSAPSTSLENEQEPRKRTWSNVVKSRRQKKSDTKRSATQVIPQKPEMPPQHLRKIMIDHGDLTSNKIASDKRSHLGSLKYLPHALLKLLENMPQPWEQQKEVKVLYHTTGAITFVNEIPRVIEPVYIAQWATTWNMMRREKKDRKHFKRMRFPPFDDEEPPLDWLENLDDTELVDAIRSKEIEDDDELRDWFYDTRPLVEDPDIVNGDSYRKWNLDFGTMNKLYQLSRPILHEGQTQKFDKNSLFTAKSLNVAIPGGPKFEPLFKDKINNPELEDFTEFNSVDRIIFRQPIKTEYKVELPFLYNSFVKKVSVSPLGAPLDCRSQQPQSKGLPAFTFNPKFNLIVPKTQPKKSEDKDDDDDDNNDFALDVEPFLSWTTTEETNDIEEFGEVPVEPKGTADALDLFFAPYPFNRRRGKTIRAQDAALTKDWYLHQAPKSSNTKVRVSYQKLLKNYVLNEVHKRPNSRRRSHKNKHQKLLRSLKMTKYFQQTTIDWVEAGIQVCRQGFNMLNLLIHKRGLTYLHLDYNFNLKPTKTLSTKERKKSRFGNAFHLIRELLRAVKMIVDSHIQYRLGNVDAYQLADGLYYLFNHLGQLTGIYRYKYKVMHQIRQCKDLKHIIYQRFNKVIGKGPGCGFWQPAWRVWLFFLRGIIPLLERWLGNLIARQFEGRRQNDVAKTITKQRVDAYYDIELRAQVMHDILDMIPEGLKQSKSKTVLQHLSEAWRCWKANIPWKVPGLPKPIESIIERYIKAKADGWISVAHYNRERIRKGAHVEKTVARKNLGRLTRLWIKNEQERQMNFGKNGPFVSPDEGVKIFQTMVSWLESRKFNPIPFPPISYKHDTKLLVLALENLKESYSANAKLNSAQREELALIEQAYDNPHECLVRIKKFLLTQRIFKEVGLEMMDYYSHLVPTYSVDPLEKITDAYLDQYLWYEADKRRLFPNWVKPSDDEIPPLLVYKWCQGINNLHSVWNTSAGECGVMLETSLNKFSENIDFTLLNRLLRLIMDTNIADYITSKNNVSLTFKDMNHVNQYGIIRGLQFASFVYQYYGLVVDLLILGLDRALEIAGPVQNPNNFLQFKDLETETASPIRLYSRYLDKIHIFFQFDNEEASGLIQDYLSEHPDPNFENVVGYNNHRCWPRDSRMRLMRHDVNLGRATFWEISGRIPTSLTSIEWEDSFASVYSRDNPNLLFSMCGFEVRILPKIRAKELSSSQEGVWDLVDQNTRERTAKAFLQVSQEAVDHFHNRIRQILMSSGSTTFTKVAAKWNTALIALVTYYREAAIATPSLLDVLVKCETKIQNRVKMGLNSKMPSRFPPAVFYTPKELGGLGMLSASHILIPASDLRWSKQTDTGITHFRAGMTHQDEKIIPTIFRYVTSWENEFLDSQRVWAEYAIKRQEAIEQNRRLTFEDMENNWDRGLPRISTLFQKDRHTLAYDKGHRIRREFKQFSLARFNPFWWTSNHHDGKLWNLNAYRTDVIQALGGIETILEHTLFKGTGFDSWEGLFWEKASGFEDSLKFKKLTNAQRQGLSQIPNRRFTLWWSPTINRANVYVGFLVQLDLTGIFLHGKIPTLKISLIQIFRAHLWQKIHESVVQDICQVLDKELEVLQIDNVEKQAIHPRKSYKMNSSTADIVLTSTYKWKVSKPSLLNEKDDKMEIPATTFWIDVQLRYGDYDSHDISRYARSKFLDYTTDGMSSYPSPTGIIIAIDLAYNMYDVYGNWFPGLKPLVHNAMREIMKANPALYVLRERIRKGLQLYQSQPQEAFLNSNNYAELFNNDTQLFVDDTNVYRVTVHKTFEGNLATKPINGCIFILNPKSGQLFLKIIHTSVWSGQKRLGQLAKWKAAEEVAALVKSLPREEQPKQLIVSRRGMMDPLEVHMLDFPNISIRPSELHLPFAAVMKIDKLSDIVLKASEPQMVLFNFYDDWLKSISPYTAFSRVILILRALNIDTETANHILRPSANIVTQDHHIWPSLSDEQWVDVEAQLRDLILSDYSKKYNVNIQSLTQSEVRDLILGQDIRAPSVKRQEIAEIEDGKSNNQVENKELTALKTTTTNVHGEEITTVTTTNYEQSTFSSRNEWRNRAIAANNLHLRAKNIYVSSEEFVDDENSFTYILPKNILQKLIQISDLRIQVGAFLYGKSPADHVGVKEIKCIAIVPQLGNVNSIQFPNTLPDQVGYLKDLELLGWVHTQSQEFSYMTSFDITTQSRFFDEYKPNFVTMTVAYTPGSVTVSSFEITKEGFDWGRTNNDMMSETPSGFSKDYAKKNQLIMSDKIAGTFMVPDDDIWNYFFMGAIFNAAELYDLKLDIPLTFYDELHRPIHFSNFTHIEAGNEEEANQEDVFS

SEQ ID NO: 7353 - protein, 582 aa, Candida albicans
MTTNESIDITELRTHLYHSACKLNNLSLYQASKWCAEALNGLKDKQQPVTYPPLALDSDDLLDQDILILAKSYFDCKEFDRAAHVLKDCKGGDAKFLRLYSMLISVDKRSTEETDGSLNIGMINETNEDTGTTSKESALNSLNSQLSKIILESENYLKQKQNAFLLYLNGIIYNKKKKYQLARQSLHDSLQIFPYNWSCWQELIASFSSFEEAHNYINKCKNTNNPLANNVMFQFFEVVILQEFYHQSNTLFDNLSNLAALFPGFVFLKIQQFLISYHNLDYFQAEATFDQILVEDPLRLDDLDTFSNMLYVMEKRSKLSYLAQYASQIDKFRPETCCILANYYSMKCEHEKAIMYYKRALTLNKNCLSAWTLMGHEFVELKNSHAAIESYRRAVDTNPKDFRAWYGLGQAYEVLDMHLYALYYYQRATNLQPLDKRMWQAIGNCYEKIDQLEEAFKSFAKALSIGKVMHGDSAFDNKDFDECDFSVEPHICYRLATISEKLGNHKDTYKYMRLCFAQEFEWGVGDETSKARLWLARDALNNWKFEEAYELAKDLNYSNAHDIEEARAIARDARNRMKNQMH

SEQ ID NO: 7354 - protein, 440 aa, Candida albicans
MSFNDLGVAKWLSESLDAMKIYTPTAIQSACIPAILKGHDCIGGAKTGSGKTIAFAAPMLTQWSEDPFGIFGLILTPTRELALQIAEQFAALGANMNIKVAVVVGGEDFVQQTLALQRKPHFVIATPGRLADHILNSGEETISGLRRVKYLVLDEADRLLSNSFGSDLQRCFDVLPTSDKRQTLLFTATITDAVRALKEKPPTPGKPPVFMHEVETVDKVAIPSTLQISYVFVPSYVKEAYLNSILHLEQFKDSTAVIFVNRTTTAEVLRRMLRKLDFRVASLHSEMPQSERTNSLHRFKAGAARILIATDVASRGLDIPTVELVINFDIPADPDDFIHRVGRTARAGRKGDAVSIIGEKDIDRIQSIEERINKKMELLEDVNDDNVIKESLSATSVAKRESLMEMDKENFGERKKINRKKHGLDKVKPERVTKPKKSKK

SEQ ID NO: 7355 - protein, 448 aa, Candida albicans
MGKFLQLLSHPTELKAVIQLFGFRQPLHPGKRDVNDKELVRCYELLNLTSRSFAAVIEELHPELRDAVMIFYLVLRALDTIEDDMTIKSSIKIPLLREFDTKLNTKNWTFDGNGPNEKDRTVLVEFDKILNVYHRLKPQYQDIIKSITFKMGNGMADYILDEEFNVNGVATVEDYNLYCHYVAGLVGEGLTNLFVLANFGDKTLTENNFAKADSMGLFLQKTNIIRDYHEDLQDGRSFWPREIWSKYTENLQDFHKVKTPAKEFAGVSCINELVLNALGHVTDCLDYLSLVKDPSSFSFCAIPQVMAVATLAEVYNNPKVLHGVVKIRKGTTCRLILESRTLPGVVKIFKEYIQVINHKSSVRDPNYLKIGIKCGEIEQYCEMIYPNKQALPPSMKSLPENKFTKIVASRESIDLSVQRRIEQENFNCNVVLFGIGALILSLIYFVLY

SEQ ID NO: 7356 - protein, 294 aa, Candida albicans
MSSELLQEVPKSIEHVKHIILILSGKGGVGKSSVTTQVALTLVNKGFNVGVLDIDLTGPSLPRMFGVENKQVHQSTQGWVPVSVYNNNNNQGTDSKRGNLSLMSLGFLLGDRGNSVVWRGPKKTAMIKQFLKDVVWGSTETPLDYLLIDTPPGTSDEHIAIAEELRWANPIDGAIIVTTPQQVATADVRKEINFCKKVNFQILGIVENMSGFICPHCSECTNIFSSGGGKALSEQLNLTYLGNVPIDPQFVELVELQNEQENKKLIELYDDCELKPILNGIVDKILDKNLPSRI

SEQ ID NO: 7357 - protein, 318 aa, Candida albicans
MEIDSHEGPSVTIREAEKDHVNFILKNVDLAVANSMRRTIIAEVPTLAIDLVEIDVNTSVLADEFLSHRLGLIPLVSEGIDNLTYSRDCTCDNYCSKCSVTLQLIANCATESTMNVYASDLQKMSHNGSKLGDPVIRDPQARGPLICKLRKHQELSLTCIAKKGIAKEHAKWSPTAAIGFEYDPWNKLKHTDYWYEVDAEAEWPKSKNCDWEEAPDPEAPFDYKAKPSTYYFDVETVGNLPPNEVIIKSIETLQTKLAAISIELNKEDVEVNEAAAGGFTSYGRTEYGRTEYGGADGGQTPGGRTPYGDSGFGGAQWG

SEQ ID NO: 7358 - protein, 952 aa, Candida albicans
MALVSAAPYLALLGEPDSTLKSYALSSLNQVVDQLWAEIANNITELEELYEDDSFDRKELAALVISKVYYNLGDFDAAVKYALYAGNEFNLEEKSQYMETIVSQCINLYNSLSQQKFNDSTTKIDPRLTAIFEKMLNKCLKANEVKLSLGVALESYRLDLVESILQDQIKNNEEQALNLINYVLVCSNNTVSNTNFRVQVLNSLISLLLSLKKHQDFFTIIKIIVQLNDSELAVKLFQELINQNEDLIAYQAAFDLVNAASQELLDLVMEKLSNAKESENGTLKKILNILSGVPTCDLDNTFLFKNNNADITILNKTKNLLDGRSSIFHSAVTFANAFMHAGTTDDSFFRKNLEWLGRATNWSKFSATAALGVIHKGNLSQGRTILKPYLPGSSGSANNKGGSLFALGLIFAGHGREVIGTLKSFIDDNGNAAGSNDIDIQLHGAALGAGVAGMGSKSESLYESLKVVLYSDSAISSQAAALGMGLVMLGSGNEEAIKDMLTYALETQHENIIRGLAIGIALLSYGREEKADEIIDQLMNQESSILRYGGAFTIALAYAGTGNNNAIKKLLHFAVSDPSDDVRRASVLSLGFLLIRDYTAAPQIVKLLSQSHNPHVRYGTALALGISCAGRAYPAAIEVLEPLTKDAVDFVRQGALMASSMILIQQNEFIYPKVKEFTKQYADTIKNKHEDALAKFGATLAQGIIDAGGRNSTINLENSQTNTLNTKAIVGLTLFVQSWYWFPLAHFLSLSFAPTSIIGVRGQDLKAPKFELNCHANPEYFQYPPKVEEAKEKQPDKLATAVLSTTAKAKTRAKKKQSQKEGGDIKAEDKMDVDEETKPKVDAKESNDDEKKETKKQPVSDEPVTVRYARTPYKISNLSRVLPVQSNFISFIKDDRFVPVRKYRGSSGIVVLQDNKPEEKVEFIKTVRQLNITEAPVPEPFTLSGEDLQDDE

SEQ ID NO: 7359 - protein, 706 aa, Candida albicans
MSEVADKVKDLSLKDKKKKPTNPLYLDPQPEFIEERIKLFDELKAQYGEEISKKEKLPIKITLRDGTIKEGTAYETSPMDIANSIGKSFAERQVIAKVDGKLWDMPRPLEGDVKLEFLDFEHPEGKAVFWHSSAHILGEACECHYGCHLSHGPPTEDGFFYDMSINNGETFVTQADFGNLEQVATKAIKEKQKFERLEMTKEQLLKMFHYNKYKVKFISDKIPDGTSTTVYRCGPLIDLCVGPHIPHSGRIKAFKVLKNSSSYFLGDATNDSLQRVYGISFPDKKLMTEHLKFLAEAAERDHRKIGREQELFIFNEMSPGSAMWLPHGARIYNTLVDTLRTEYRKRGYEEVITPNMYSTKLWETSGHWQNYKENMFSFEVEKETFGLKPMNCPGHCILFKSRERSYRELPWRVADFGVIHRNEFSGALSGLTRVRRFQQDDAHIFCTTDQIGTEIAGVFDFLKKMYGIFGFEFKMELSTRPEKYVGDLDTWNSAEKKLEQALNDFLGEGKWELNPGDGAFYGPKIDIMISDALKRWFQCATIQLDFQLPQRFELEYKSDKGPNTRPVMIHRAILGSVERMTAILTEHYKGKWPFWLSPRQILIVPVGPKYYDYAQKLQKKLNDDYFFYCDVDVSGNTLPKKIRTGQMYKYNFIFIVGEEEENSESVNVRNRDIPEEQGKNAMVGFDDVVKQLVALRESKRSDNKLQ

SEQ ID NO: 7360 - protein, 526 aa, Candida albicans
MSVQIFNDQATEERAENARMSAFIGAIAVGDLVKSTLGPKGMDKLLQSSSNADHALVTNDGATILKSIPFDNPAAKVLVNISKVQDDEVGDGTTSVTVLSAELLREAEKLIDQKIHPQTIIEGFRIACNVAIQALNKAAVNNGDNPTLFRNDLLNIAQTTLSSKILSQDKLLFSNLAVDAILRLKGSTNLNHIQIIKKVGGKLSDSYLDQGFILEKKFGIGQPKKITDAKILIANTSMDTDKVKIFGAKFKVDSTSKLAELEKAEKLKMKNKVDKIAKFGINVFINRQLIYDYPEQLFTDAKINSIEHADFDGVERLALVTGGEVVSTFDSPDNVKLGHCESIEEIIIGEDTFLKFSGVAAGEACTIVLRGATEQVLDEAERSLHDALSVLSQTTRETKTVLGGGCSEMLMAKAVDQAAANETGKSALAIEAFSRALRQLPTILADNAGYDSSDLVTKLRSAIYNGMSTSGLDLNHGIVADMREMGIVESYKLKKAVVSSAAEAAEVLLRVDNIIRAKPRTADRNH

SEQ ID NO: 7361 - protein, 452 aa, Candida albicans
MSPVMENVNMESFKDSVNAESSKPSESDMKFYYQRLLPFRYIFQWLSHSPKPTKDFTMREFAYEYRSKIYQRYNSFGTLEEFKKSVVTANPTRFEIGAVYKINPKERKNLPKQAFKPESKELVFDIDLTDYDDIRTCCQGTDICCKCWKFIQVGSKIIEAALREDFGFEHLVWVFSGRRGAHCWVSDKRARELDETTPKPIIDYLDVLSSKNQNGSLNIKKPFHPHVERSFEIVKKEFLNVILQEQDPWNTTSEETKAWKQVDELLAFIPNKALQIELKNKWKGQTFGSTSKEKWDDISTVASNVLKSNSQVAQLTEAKKDIIIYYMYPRLDVQVSRQVIHLLKSPFCIHPGTGNVCVPFDPLKNISGNPADDDYGFNPKSAPNLRKIQNELEEWEQNRSDENDSQEKVIADYEKTSLKPYIDYFAKFVNNLLKEELKGTEKRSREEDPLSF

SEQ ID NO: 7362 - protein, 166 aa, Candida albicans
MNIRQQITQFLSLAYVFSSAFMLWKTLSVIANSHSPIVVVLSGSMEPAFQRGDILFLWNRDHQQKVGDIVVYEIDGKSIPIVHRVLREHHNSEKQLLLTKGDNNAVDDLSLYAKKQQYLNQKQDLVGTVKGYLPFIGYVTILISENVYFKYGMLGLLGLSSLFSNE

SEQ ID NO: 7363 - protein, 214 aa, Candida albicans
MNGISVDINHLKKGEVNLGTSIMAVTFKDGVILGADSRTTTGSYIANRVTDKLTQIHDTIYCCRSGSAADTQAVADMVKYYLQIYSSQLPPGETPTTNIAANVFQEICYNNKDNLTAGIICAGYDRKNGGSVYSIPIGGSIHKQNYAIAGSGSSYIYGWCDENYKPSMEQEQCVEFVKTALSQAIKWDGSSGGLIRMVILTKNGVERRVVYLHE

SEQ ID NO: 7364 - protein, 529 aa, Candida albicans
MSIQAPVVYLNTSTQRQQGRQAQVANITAAKAVADIIRTCLGPKAMLKMLLDPMGGIVLTNDGHAILREIDVSHPAAKSMIELSRTQDEEVGDGTTTVIILAGEILAQTFPYIEKNIHPVIIIKALKQALKDALEIIHDVSTPVDIKNDAAMLKLIKASIGTKYVNKWSTKMCELSLKAVRTVMVEKGDYKEIDVKRYVRIEKIPGGEVTDSEVLDGILLNKDVVHPKMKREITNPRIILLDCPLEYKKGESQTNIEITKEEDWNRILQIEEEQVKLMCDQILEFKPDLVITEKGVSDLAQHYLLKGGASALRRVKKSDNNRIARATGATIVNRVEDLKESDIGTKCGEFKVELIGDEYFTYLVKCENPQACTVLLRGASKDILNEIERNLHDAMAVTRNVMFEPSLSPGGGATEMACSVRLAEKAKTIEGIEQYPYQAVADAFEVIPRTLIQNCGGNPIKVLSQLRAKQAQGQYTYGIDGENGKVVDMKDYGIWEPEVIKQQSIKTAIESACLLLRVDDIVSGVRQSQ

SEQ ID NO: 7365 - protein, 1106 aa, Candida albicans
MRFFFSSSLVMRCMLNRTRTTKRKKKFIVKFNPLTIKHYNQLQKMDDLFDVFDEAPQAAPPKIEEIKDEVKPETTDNQTRSTKKRQFDNNNKTTTNSNNSSSSNNKKHKQAEDIKPVVFDSVEIETSREVKPSEGLSNSATVDADNKLKLKHQIRHQVAIPPSYPYVPIGEHKRKHEARTYPFTLDPFQDTAISCIDRNESVLVSAHTSAGKTVVAEYAIAQSLRDKQRVIYTSPIKALSNQKFRELQAIFGDVGLMTGDVTINPDAGCLVMTTEILRSMLYRGSEVMREVAWVVFDEVHYMRDKSRGVVWEETIILLPDKVHYVFLSATIPNAMEFAEWIVKIHNQPCHVVYTDFRPTPLQHYLFPAGGDGIHLVVDEKGTFREENFQKAMATISDNSGDDPASSDSGRGNKKGKTNKGRNHQDGKGDIYKIVKMIYMKKYNPVIVFSFSKRDCESLALKMSKLDFNTDEERNSLTQIFYNAIELLPEADRELPQIKNILPLLKRGIGIHHSGLLPILKEIIEILFQEGFLKVLFATETFSIGLNMPAKTVVFTSVRKWDGVGFRWVSGGEYIQMSGRAGRRGLDDRGIVIMMIDEKMEPQVAKGMVKGQADRLDSAFHLGYNMILNLMRVEGISPEFMLEHSFFQFQKASSVPILEGKLAQCKQEFADITIEDEPIIKDYYDLKQQLLKYNEDVRKVITHPGNILPFLQDGRVIKVKIGDLDYGWGMVTTFTKRNRRHQEEFAPHDAYVVEVFITTMFIDSPVNLIKKFNPMLPEGIRPAKSGEQTRAEFISITLSSIEKISTVRLRVPDDYKSSTAKRTLVKTLKDLPKRLPDGIPLIDPVQSMKITDDDFKKLLQKIDILDSKIVSNPLNNSARLDDLYAKYTAKVDLNNQIKKLEEQIFQAKSIIQLDQLSNMKRVLKKLEFTGSEEVVELKGRVAAELSTGDELMITELLFSGFFNELTPQQICGLLSAFIFQERAKELPKLKPELAEPAKVIHETANKIAKISKQSGLEIVEKDYIEQFNLALVEVVFVWSNGASFSSICKMTDIYEGSIIRALRREIELIKQLVDASKIIGNQELVDKFEKCIELINRDFVQVSSLYM

SEQ ID NO: 7366 - protein, 1240 aa, Candida albicans
MHIKKIIIQGFKTYKNTTTIDLLSPHCNVVVGRNGSGKSNFFAAIRFVLSDAYTHMSREERQGLIHEGSGTVMSAYVEIIFDNTDGRFPINKPEISIRRTIGLKKDDYSLDGKSATRSDIMNLLESAGFSRSNPYYIVPQGRITSLTNSKNHERLNLLKEVSGANVFENKLKESMKEMNQSNLKRARIDETLVSIEERLKDLQIESADLKDFQKLDKLKKILEFNIFDREYNELNESLEELEEKHQSILQESNKDLIELEKREKLCVELQDSINELKISAKVLKLEKEQSDLDCDQLLKVIAEKEIKLRELSLNNELSKEQNIHINEQIGILQSEINQHKQEISRYKPELNKLQQQESSLKQQLSEISSKQRALYAKQSRFSKFVNKKDRDSWLNTEISKLKRQITDKDQEMRHISNEVKTRESSLEALSESIKKLNDSLNDEEHIKTLANLKTTINDSKQQITQLVDQRKILWRDEIRLKSVHDSLTNDLTNATNIVNQTMDRAQAQGIAAVKQIAQRLNLSDRVYGTVAELFNVNDKYKTAAEVIAGNSLFHIVVDTDVTAATIMEELIRNKAGRVTFVPLNRIDNIEVEYPDSHENQCLPLIKKLKYNEQVYKAINQIFGKTLVVSELSKGGELSRKYKLSCITLDGDRVDTRGVLSGGYRDYKNSRIDALKIQTRKKQELEKTDRELVKVTEEIESTNSQLNKLNNELQLNVRDLDRLSVSKEPIKIELSQLTNKKFNLDQEISSLKSNLQNLQNTKNSIKVNLKQHESELNSEFTQVLTQDEQNELDELSKSAIELESKLDNIVTRSSELDTKISGIESEVINNLQPKLNKYRQEQQKQQQQQLQLQQESSKSSDTKSNLEYEELQQELENLHIQLDTSQSRNSQVVENLTKINEEINNCEQELAQANKQQIKIIKNIEKFSKQTNNLLNQKSIKSQMRDDANQKIRELGVLPEEAFQSEKYDQYSSDQLLSKLNGINQELTKYSHINKKAIEQFNLFNRQKEDLMARRIDLNNSKASIENLITNLQQQKNDAIKKSFNQVAKSFKQIFEKLVPRGTGNLIMQKKNDNNNNVNVTDDVNSGNDDDDDDDDIDNYSGVAISVSFNSKNDEQQRIEQLSGGQKSLCAIALIFAIQNCDPAPFYLFDEIDSNLDTQYRISVARLIHELSRNNEDNNNNEGRSRGAQFICTTFRPELLQLSGDKFYGVTFSNKVSSVNEINKEEAMSFVEGQQQQQQQS

SEQ ID NO: 7367 - protein, 469 aa, Candida albicans
MATASTTTVYGGDEINAIVLDPGSYTTRIGYAGDDFPKVITSSYYGQVKNDKKKIFGESINVPRANYDIKPILKESIIVDWDAAIEQYQYYFDQQLKVVGPEQPILITEPIWTETSYRQQLVETFFENFEFSGIYLAKSPTCVSFQQGRSNCLVVDLGHDSVSVTPVIDGICLLKSSMKTNYGGKFLSNEIQDYLIDTKKVVMEPSFKIKSKIPTTYPDPPKYELKNNNTIPTSSSSSLSQSFLEFQNEKIYHNFKEILEVPEKNSSSGTTTTTTTTNKDSSRLFELPTGQSIVIDRFKIAESIFDPTIYKFTNSKLSFPPNNGEISITQANEYRPLKRVRKNDDDEEEDSNQSTPKPEVNIRGISQLISHTLSNIDIDLRASLANNIIVTGGVSLISQLTERLYLELSNNNPGLKIRLHAVGNSTERINQAWIGGSVLASLGTFHQMWVTKEEYNEVGVDRILNQRFR

SEQ ID NO: 7368 - protein, 121 aa, Candida albicans
MAHRLLVNVIFTGASVFGRAFTEAYRQAAKASAAGAAGRPAKASSAGGIPVEEAMKILDLEKSELSLDKVEEKYEYLFNVNSKEQGNSFYLQSKVYYAMDTLKKELEYLEKLQNEKGAASN

SEQ ID NO: 7369 - protein, 549 aa, Candida albicans
MAFSNQTPTIVVLKEGTDSSQGRGQILTNINACLAIQDTLKPTLGPFGSDILIVDSNGKPTISNDGATILKLLDIVHPAAQMLVDISRSQDCEVGDGTTSVTIIAGELLKEAKNFIEDGINPHLIIKGYRKACQLSIEKIESLSIDVLENNTDSGNFRDLLEKCATTAMSSKLIKTNSKFFTKMVVDAVLTLDRNDLNENLIGIKKVPGGSLEDSLFIDGVAFKKTFSYAGFEQQPKSFSNPKILCLNVELELKAEKDNAEIRIDQVNQYQQIVDAEWKIIFDKLESIYQTGAQIVLSKLPIGDLATQYFADRNIFCAGRVSDDDMNRVIQAVGGDIQSSCSNLLKDGKLGQCESFEEIQIGNERFNIFKGCPQTKTCTLILRGGAEQVIAEVERSLHDAIMIVKRSITHKKIVAGGGAIEMELSKYLRDYSRQIHGKQQLIIAAFAKALEVIPRQLCENAGFDSIELLNRLRSYHAKGETWYGIDFQLENIGDNFKSFIWEPALVKINALSSATEAATLLLSVDETIRNDEQEQAQPQGAPGRGRGAY

SEQ ID NO: 7370 - protein, 154 aa, Candida albicans
MSADHTRDPCPIVILNDFGGAFAMGVIGGCVWHGIKGFRNSPYGERSYGALSAIKARAPVVGGNFGVWGGLFSTFDCTVKAVRKREDAWNAVIAGFFTGGALAIRGGWKHTRNSAITCACLLGVFEGVGMMMQRLQAQPTMAPVYPEEPTALAA

SEQ ID NO: 7371 - protein, 351 aa, Candida albicans
MSDKLAARERFLDVFEDLVEELKQILVSYNMPQEAIEWFVRSLNYNTPGGKLNRGLSVVDTFAILNNTTSDKLNDTEYKKVALLGWAIELLQAYFLVADDMMDQSKTRRGQPCWYLVEGVNNIAINDSFMLEGAIYILLKKHFRQDPYYVDLLDLFHEVTFQTELGQLLDLITADEEIVDLDKFSLEKHSFIVIFKTAYYSFYLPVALAMYMSGINDEKDLKQVRDILIPLGEYFQIQDDYLDCFGTPEQIGKIGTDIKDNKCSWVINQALLIATPEQRQLLDNNYGKKDDESEQKCKDLFKQLGIEKIYHDYEESIVAKLRKQIDQIDESRGLKKDVLTAFLGKVYKRSK

SEQ ID NO: 7372 - protein, 481 aa, Candida albicans
MNTTPSRKRTIRDISNTQLPLTPTKTPTKSKKLKIDNNNSFDTGKPSCVKKLDFGLLTPTKKPSTSPSIPTSIYSQAKALFQRGSNVSHSNDYFLTSREKEAKYITDFVANSIQQKISNSLYISGPPGTGKTAQVQLILQPYQQNSRIRVVKINCMTLNNPEQIYHEIYCKIMNKLSISFHKRKTCDDFMTLMNDNENQQFDSVIVLLDELDSLITSDQQVLFQLFKMASINCIPQTKIKLVLIGISNTLDLNSKFLPRLVRNNIQLDNLQFLPYNADQIKSIIMNRLSNLKQEIFHPGAIQFCCKKSASISGDLRKAFDICYKSIELVERSCQGTDTINKVMIQHVAKICMTSFGNNENQLNNLNLLQKAILCQLFNYQKEVFSKRSNKTAATTTTLTVNSFYDYYKKQYEMNDLIGSLKHTEFIEILYALESSSCILLTNSNKNSGNSNKIIKLNVPYDDIVKSVENIGILKKILQKPN

SEQ ID NO: 7373 - protein, 474 aa, Candida albicans
MSSSQFYNKGVDESVVSRQEIEEFTKRNEFFLKPSSRKYAKQYFSMYQYRLKNLRDRVHKTAMEKWGHGTKKINGNTIEKQDKILDIASGKLCWVIGTVFCDAKYKLDILNDVEKGTDDVLPLEPVTYVNEDEQPIVMLEDESGRAILNNDNFLAKNLLVTGCIVAVLGIEIQAGIFEIMDIAYPDCAPQKPLPLGENKRGKIALVSGLNIGDEGHYDLKLELLKQYLLGELGNAEDKLDGSLISQLIIAGDSIMPIQNLRAEMDLKNFVTTNNYGSKNISKYNVESFKKLDEFLTDILVSLPVAVMPGKNDPAEICLPQQPLHRSLFKNNSSLLDGNRLTRLTNPQWIDAQTVKILGTSGQNVDDIQKYIVPKKDHQFTSIEIMENNIKWQNFVPTAPDTLYCYPYENYDPFIFSDDLPHVYFVGNQQQFDSKLFEHDGVNVRLISIPKFKESGQFVLLDLDTLETEVVTIEI

SEQ ID NO: 7374 - protein, 177 aa, Candida albicans
MASTSTGLPPNWTIRVSRSHNKEYFLNQSTNESSWDPPYGTDKEVLNAYIAKFKNNGYKPLVNEDGQVRVSHLLIKNNQSRKPKSWKSPDGISRTRDESIQILKKHLERILSGEVKLSELANTESDCSSHDRGGDLGFFSKGQMQPPFEEAAFNLHVGEVSNIIETNSGVHILQRTG

SEQ ID NO: 7375 - protein, 548 aa, Candida albicans
MARAPQGMPDLSNAIVAQDEMGRPFIIVRDQGKKERKHGIEATRSHILAARSVASIVKTSLGPRGLDKILISPDGEITITNDGATILSQMDLENQIAKLLVELSRSQDDEIGDGTTGVVVLASALLDQALELIDKGIHPIKIANGFDEACRIAVEHLNTVADNILIDDKENLLRAAKTSLGSKIVSKAHDHFAKMAVDAVLEVADLDRKDVDFELIKMEKKVGGSIEDSSLIKGVLLDKDFSHPQMPKEVRDCKIAILTCPFEPPKPKTKHKLDISTVEEFKVLQEYEQKKFQEMIDAVKQSGANVVACQWGFDDEANHLLLANGLNAIRWIGGSELELLAIATNGRIVPRFEDLTPDKLGTAGVIRELEFGTTKDRMLVIEECSNTKAVTCFIRGSNEMIAAEGIRALHDSLCVVRNLVRDSRVVYGGGAAELTCSLAVSEAADRQKGIDQYAFRAFATALDTIPMTLAENSGLDPIETLSALKSKQVNENSSHLGVDCLGKGTNDMKELFVIDPLIGKRQQLLLATQLTRMILKINDVIISGKDEY

SEQ ID NO: 7376 - protein, 419 aa, Candida albicans
MSMNTPAVVMDNGTGLTKLGFAGNDSPSFVFPTAIATSSASSKAGKGPRGSSLASKRGLEDLDFYIGDEALEAASGSQYGLHYPIKHGQIEDWDQMERFWESSIFKYLRCEPEDHYFLLTEPPLNPPENRESTAEIMFESFNCAGLYIAVQAVLALAASWTSPKVQDRSLSGTVIDSGDGVTHVIPVAEGYVIGAAIKNIPLAGRDITLFIQQLLRDRGEADTSLQTAEKIKQEFCYVCPDIVQEFSRFDQYPQEKFAQYMVEYTDKNKRNTVDVGYERFLAPEIFFNPEICSSDFLTPLPTVVDQVIQASPIDVRKKLYKNIVLSGGSTMFKDFGKRLQRDLKSIVSERIQLSERLSGSQSTGVDVQVISHKKQRNAVWFGGSLLAQTSEFKSYCYTKSDYDEYGPSIVRNFSLFSVP

SEQ ID NO: 7377 - protein, 388 aa, Candida albicans
MPTPPPTIICIGMAGSGKTTFVQRLNSHLHSKKTPPYLINLDPAVLKIPFGANIDIRDSVKYKKVMEQYNLGPNGAIVTSLNLFSTKIDQVIKLIDKKQDKINNVVIDTPGQIECFIWSASGSIITESFASEFPTVIAYIVDTPRNTSPTTFMSNMLYACSILYKTKLPMIVVFNKTDVTKDDFAKEWMTDFESFQMAIQKDKDLNNEQGSGYMSSLINSMSLMLEEFYSNLDVVGVSSYTGQGFDKFMEAVDNKVDEYNEFYKAERERILKQKEEDEKKRQTKSLNKLMKDMKMKDTKGDHTKKDSEVLSDYEEDDNEIDDEIQGEVLRDEDEPEREYTFPEDRQSEVNSRNDADLQSRYQQAFESTAKPASSKTAENIANYINRTQ

SEQ ID NO: 7378 - protein, 225 aa, Candida albicans
MSDVEEQYQEEQQPVVQEELQVVELATTIPLDVQEAQREVKLFNKWSFEDVEVKDVSLVDYIQIRNPVFVSHTAGKYASKRFRKAQCPIVERLTNSLMMNGRNNGKKLKAVRIVKHALEIIHVLTEQNPIQVVVDAIVNSGAREDSTRIGSSGTVRRQAVDVSPLRRVNQAIALLTIGAREASFRNIKTIAECLAEELINAAKGSSTSYAIKKKDELERVAKSNR

SEQ ID NO: 7379 - protein, 602 aa, Candida albicans
MSSDWEELRTETGEVYYYNYKTNETSWTFPETEETLPVSEKQETITTSTTTGKWEEYTTDDGKKYYYNAITGETTWEKPNEIIEEELSNEKLAEKTELSELDKTLKSKPVELTGPTSKTDNEAKQSFLKLLSDNKVNSTWSFQAVMENLVDKPEYWSVKDPVTRKQLYEEYLVSKFQSELSNKSLLLENFKRNFNEELRKLEAKNLVTYNTRWITIKKLWIDQDNPIFKHSMMSDSELAAIFYEYTDKLREQHEKLLQTKKNQALIELSTYLRQVNSSLVEKSQTWESLYENLINDSRFQSNKNFQNLTKLNILQLYENEIFPRRIDDIKSQITVISKINYRNDRKARESYKKLLGELEIDADTEFKDIIDKIENNDAFIEICGRNGSSALELFWDIVDEKKQILKVKKNLVDSVISTMKNGNTYDEKMWESLETFSNALKSTRDERLANLDLTLGDGGKGKEITMIYTSLKEEFELKKQQEREKYLKKMDEDIAKLARWIYDNDRNLGENFLRMEGTRFVISNRVNYEDEYEKLSKFDQFKPLKQYEIELSTTKITKKIIEEFVSEYNKHASRKRQSSITSETNKTGDKRLKTGVATVLNY

SEQ ID NO: 7380 - protein, 306 aa, Candida albicans
MTDSKYDYSDITPVDINTEEPQICQILYDEDYKQIMGILLSLMKAEEYSERALHITELGINELASHYTIWIYRFNILKNLPNRNLYDELDWCEEIALDNEKNYQIWNYRQLIIGQIMELNNNDFDPYREFPILEAMLSSDPKNHHVWSYRKWLVDTFDLHNDAKELSFVDKVIDTDLKNNSAWSHRFFLLFSKKHLATDNTIDEELNYVKDKIVKCPQNPSTWNYLLGIHERFDRSITQLEEFSLQFVDLEKDQVTSSFALETLAKIYTQQKKYNESRTVYDLLKSKYDPIRSNFWDYQISKLTSV

SEQ ID NO: 7381 - protein, 394 aa, Candida albicans
MDDSVRSLIRFVSRGFYSTPYVLILDAVLRHSVLSEDDLIHLLGIKRKELRSLCNRLVDDRLLTNHIQREDNGQQKYVTRTYFFIHITEAIDSIKWKVHSIVNVLKQEMSSFGNPQGYVCPRCGNKVSQLDAISMLSEDKTEFICDVCQGVLIEDDSSQQATLKQERLEKLMKQLDPIIKFLKIIDETQIRDNDFESALLQAIPAQSATTASYTLSNRVSSKSRSNAQAMQNAAARSQATLHVSITANDENYEREQMEKENRRQKLEQNALPSWHSNSTVGQSNTFGKLEDEEDDHMGTPSSIKEEREQGEAYTDSKEIYGSDSKEGTTEQSSVMATPEPQSTVNNNSNFNNVSAELKEREAQDALAAYYAQLAEQDADEDDDDDDDEEFDDII

SEQ ID NO: 7382 - protein, 130 aa, Candida albicans
MSAPAYYELYRRSTIGVTLMDALDTLISDEKIQPQLANRILINFDRIIAENLKNENIVGKSKLIFKGDLDTYRFCDDVWTFIIKNVIIKLNDVSSKDSGGGDKDKDSGDLELNVDKFKIVACNSRKAGEM

SEQ ID NO: 7383 - protein, 713 aa, Candida albicans
MCGIFGYVNFLVDKSRGEIIDNLIEGLQRLEYRGYDSAGIAVDGKLTKDPSNGDEEYMDSIIVKTTGKVKVLKQKIIDDQIDRSAIFDNHVGIAHTRWATHGQPKTENCHPHKSDPKGEFIVVHNGIITNYAALRKYLLSKGHVFESETDTECIAKLFKHFYDLNVKAGVFPDLNELTKQVLHELEGSYGLLVKSYHYPGEVCGTRKGSPLLVGVKTDKKLKVDFVDVEFEAQQQHRPQQPQINHNGATSAAELGFIPVAPGEQNLRTSQSRAFLSEDDLPMPVEFFLSSDPASVVQHTKKVLFLEDDDIAHIYDGELRIHRASTKSAGESTVRPIQTLEMELNEIMKGPYKHFMQKEIFEQPDSAFNTMRGRIDFENCVVTLGGLKSWLSTIRRCRRIIMIACGTSYHSCLATRSIFEELTEIPVSVELASDFLDRRSPVFRDDTCVFVSQSGETADSILALQYCLERGALTVGIVNSVGSSMSRQTHCGVHINAGPEIGVASTKAYTSQYIALVMFALSLSNDSISRKGRHEEIIKGLQKIPEQIKQVLKLENKIKDLCNSSLNDQKSLLLLGRGYQFATALEGALKIKEISYMHSEGVLAGELKHGILALVDEDLPIIAFATRDSLFPKVMSAIEQVTARDGRPIVICNEGDAIISNDKVHTTLEVPETVDCLQGLLNVIPLQLISYWLAVNRGIDVDFPRNLAKSVTVE

SEQ ID NO: 7384 - protein, 195 aa, Candida albicans
MFILSEISDLIRIPPSAFNVPIQHSISDELNKKYANKIIANLGLVITIWDILDIKDGLLKPGDGGSYVEVRFRSIVWKPFRGEILTGWVTECTAKGIKVRMEFFDEIWIPKDFLFENCKYSESEQAWIYLLDENELFIDVNEKIRFRVEEENFYNVKPKLEDEQTEEEKKATTLPPYTITASCQDYGMGCVSWWD

SEQ ID NO: 7385 - protein, 444 aa, Candida albicans
MPPKEDWDKYIPPSEEETSEKITPLTEGDIQVLKHYGSAPYADSLKEIDKDLKPIEERIKTNQGIQESDTGLAPPHLWDVLGDKQRMQEEQSLQVARCTKIIEASQPQQPTGLQNADTKSKYVINIKQIAKFVVGLGERLSPTDIEEGMRVGVDRHKYEIQLPLPPRIDPSVTMMTVEEKPDVTYSDVGGCKEQIEKLREVVELPLLSPERFVKLGIDPPKGILLYGPPGTGKTLCARAVANRTDATFIRVIGSELVQKYVGEGARMVRELFEMARTKKACIIFFDEVDAIGGARFDDGAGGDNEVQRTMLELITQLDGFDPRGNIKVMFATNRPNTLDPALLRPGRIDRKVEFSLPDLEGRANIFRIHSKTMSVEKDIRWELISRLCPNATGAELRSVCTEAGMFAIRARRKVANEKDFLKAVDKVIKGNLKFSSTSQYMQYN

SEQ ID NO: 7386 - protein, 427 aa, Candida albicans
MARGILKQQLKSHQLIDAIDKAKSKPTKKTPVTEKTVEEEKEIIEAAPVTTKVKSNKKSKKSNTKKDDDDYQSEVLSKKEQRRLKKLQTKQQEEEKEAENNEEEEEEDDDDDDEEELDLEKLAASESESDINDEEEEDDDDDDEEEDDEVENDDEAEDDIPLSDVEVDSDADIVPHTKLTINNMAALRESLARIELPWSKHSFIEHQSITSADKTESEIKDIYDDTERELAFYKQGLDAVKQSRKTLLKLKIPFSRPMDYFAEMVKSDEHMDKLKNKLLTEAANKKASEEAKRQRQLKKFGKQVQHATLQERAKQKKETLEKIKSLKKKRGANEISNDDDFQIALEEATENNQKYGHGGSGSGGDNKRRKPNSKRLAKDAKYGFGGKKRGKRENDAASSADISGFSTRKMKGKSTSRPGKSKRSRRH

SEQ ID NO: 7387 - protein, 1021 aa, Candida albicans
MSDNMQIDSPSPQEIDEGLYSRQLYVLGKEAMLKMQNANVLIIGLNGLGIEIAKNIALAGVKSLSLYDPKPVSITDLSTQFFLSESEIGQPRDVASREKLAELNSYVPINVVDNIDEETLLKFKCIVSTNISLEEQVKINNITHANNIGYINADIKGLFGQIFVDFGDKFTVIDQTGEEPLSGIVSDIEKNGTVTMLDDNRHGLQDGDYVKFAEVEGMPKLNEGNPHKVEVLGPYAFKIKIDESYGEYVKGGLYTQVKVPKDLSFEPLTKQLAAPEYLISDFAKFDKPAQLHLGFQALHAFQTKHQGELPAPYNEQDATEAFRYAEELATQNPSILGEDKLDEKYLKELFYQARGDIPGVVAFYGGLIAQEVLKNCSSKFTPIKQWLYFDSLESLPSETEYPRNEENNKPIGSRYDGQIAVFGKAFQEKIANLKVFLVGSGAIGCEMLKNWAMMGLGSGPEGKIFITDNDSIEKSNLNRQFLFRPKDVGKNKSDVAALAVQQMNPDLKGKIDSKLDKVGPETEDIFDDKFWTQLNIVVNALDNVEARTYVDRRCVFYKKPLLESGTLGTKGNTQVVIPNLTESYSSSQDPPEKSIPLCTLRSFPNKIDHTIAWAKSLFQGYFAESPESVNLYLSQPNYVEQTLKQNPDIKGTLENISKYLNNRPYTFEDCIKWARQEFETKFNHDIQQLLYNFPPDAKTSTGAPFWSGPKRAPKPLEFDINNKDHLDFIIGGANLLAFIYGLKEPNATVDDFKKVLEQVIIEPFQPKSGVEIAATDAEAEEQANNLSGSIDDEQIRKIAASLPEPSTLAGYRLTPIEFEKDDDTNHHIEFITAASNCRALNYGIEIADAHKTKFIAGKIIPAIATTTALVTGLVCLELYKVVDGKDDIEQYKNGFINLALPFIGFSEPIKSPEGKYNNKKFDQIWDRFELNGDITLQELLDHFEKEEGLTISMLSYGVSLLYASFFPPKKVKDRLGLKLTSLIKEVSKKEVPSHVKNLIFEICCDDEEGEDVEVPYICVKL

SEQ ID NO: 7388 - protein, 808 aa, Candida albicans
  MISC_FEATURE (808)..(808): X=any amino acid
MFKVTTITHLTDDTTRPLICLTTRKGFKYLFGKVPEGTQRVVNTFGSEVKFSKLQGIFLTGSILSWSDIGGLPGFFLTVSDATKNGLTVMGCERILSYILATWRQFVFRMGIKLHILDAETNPTIVDEEVVISPIMIDPANQTSPPENSSKLVRQIKKLASLMFPLDTSQVNSRDPESYKSDPTQNDIHTHVHLPSASEIATTQQSISYCISFVPVLGKFDPKKAKELGLTPGPQFRDLTNGLSVVNKNGDTITPDQVIAPNRVFRKILVIDVPSNDYYENTINSDRWFEHDHPKNAGEVGLVYHMLGQDLDLDLSDYKERFLSKFPSDTYHVISHPSMTNNVIMNDRFISNTLKIKSILNENFNLVNSENFKPLSNSQVDRLHALQSYHLNDNGVVPDSSSAIKTTNKSLFEEEVESLDIPNAANFETMEKTKIELDCNKHTNLKDRVQVFMLGTGSALPAICRNVLGNLIRLPYQDDSGAISYRSIVLDGGENTIGSLLRLFGHENGKEFVQIFQELSLIHLSHLHADHHLGIVSLINEWFNINQDESKLLYLVVPWQFITFLKDWYSLESQYNKVFDMNRLVCISCEDFMMDNRTPEFIKIDMDKFEEFYDEGGLHKPIPRDRLLSVDHKKIKNMYETVGLNSVTTVRALHCAWAYSTTFDFKLNENGETFKISFSGDTRPNPRFSECGYGSDLLIHEASMDGNWIEEAIAKKHSTMIEAVAVSKLMNCPKLILTHFSSRYGISNNCVPKNELQSCADNLDTYLNKSHCELNIFQSQSPSDLSLEEIDLWFAYDLMGVCYGDMHX

SEQ ID NO: 7389 - protein, 1070 aa, Candida albicans
MRIFFFVGDVSIFTTITISFLEFNIDNNTFPPPRINNISTMNILDDLDDELDELETTTKPKVKILNKKKEDKPIVDDDLDLDLDDDDFNLPKIKPPTKFKKMKREDALRIKKETPSSLSPSSSVPSKPQGVSSNLPFRPATPPVSEPSTYEEEDLGDINLDNFSNIEADREWYNIDEESALARNNEIDEDLPQRQRKRIRNTRHPKKTPKTSFNESGASFNEFGEYIDYDHQKSLNELNRIPITSHVFIPPFLENSKQYLQLQISGSSIRGIGPTVNPVKDPTSELASMAKQGSFVVQNRRSKRERALQAKEAAGVENSNIGSIIDTANTTEEIKQEEKNADVNETKHQDIQQQRKSLPAFAVRNDLLTTIRDNQVTIVIGETGSGKTTQLTQFLYEDGFGANIDKNGEKRIIACTQPRRVAAMSVAKRVSEEMNCKLGEEVGYSIRFEDKTDNKKTVIKYMTEGILLREILADPMLANYSCIIMDEAHERSLNTDILLGLFKNLLAKRKDLKLIVTSATMNANRFTKFFGVAPQFHIPGRTFPVEVFFNRDVNMDYVEMAVKQVLTIHLGRWNADNNNANDGDILVFMTGQEDIEITCDLIKEKLNLLEDPPPLDIFPIYSTMPQDLQKKIFNKTNLQRRKVVVATNIAETSLTVDGIKYVIDCGLVKVKVYNPKLGMDTLQVVPISLANADQRSGRAGRTGAGIAYRLYTEKATEPDSMYVQPIPEIQRSNLSNIMLLLKSLKVNDINSFPFLDPPPKDLLNCSLYDLWAIGALDNLGELTKLGHSMTQFPIEPTLAKLILLSTQPEFHCSEEVVTIVAMLSVPNIFNRPKERANEADMAREKFIISESDHLTLLNVFNQWNINLNKFKGNYTKINNWCNKNFLQLKSLYRAKDIKHQLMLIMKKNKLAILKSKTDDDIRKCLCASFYQQSAKLTKMNLNGQPEFVNLRHSYMKMFLHPTSSLLDSNLSTNYVIYHELVLTKKEYMNCVTTVDPIWLLEYGYKFFGVADSHRNKIDSEAILNKQKFEKQLLKDKEIYDDIIKQQSKRRSNEISTSNRVSSLFKKQRGI

SEQ ID NO: 7390 - protein, 578 aa, Candida albicans
MSVEKKVEELSIGENPAASIANESAPATTATNSNNVEGEEVVLGEDGQPLSKKALKKLLKEKEKAAKKAEREAQLAKEKAAREAEAANDPAKENYGKLPLINSSTRNADEKRILFKDLSVANDGETVTFRARVHKTRQQGATMVFLTLRQQSELIQALLKTNKDTDATAVSKQMVKWTGSINLESIVLVEGKVAKVEEKIKSATVQDVEILISKIYTIQETPEQLPLLIEDASRSEKESEELGLPGVNLDTRLDARVIDLRTPTNQAIFKIQSGVCQLFREFLIKKGFTEIHTPKIIGAASEGGSNVFEINYFKGSAFLAQSPQLYKQQLIAADFEKVFEIAPVFRAENSNTHRHMTEFTGLDLEMAFEQHYDEVLEVLEELFVFIFTELKTRFSKEIATVRKQFPVEEFKIPKDGKMVKLHFKEGIAMLREAGKEVDDFEDLSTENEKLLGKLVREKYDTDFYILDKFPLAVRPFYTMPDSEDPRYSNSYDFFMRGEEILSGAQRIHDPKLLTQRMKEHEVDPNVPGLNDYVEAFTYGCPPHAGGGIGLERVVMFFLDLKNIRRASLFPRDPKRLRP

SEQ ID NO: 7391 - protein, 507 aa, Candida albicans
MDDSDEEYMGSKSPSSKLPSTAPEKSASPGGAKSGMSARTRSSRRGEVSDLKGANGYAWEDEYQRSWDIVKDDEQGGNSFEAMVQSIIENRKKKIMKNPSTPFQRGIIRTLIIIIDGSSAMSEKDLRPTRLSMTLNYLQEFVVEFFDQNPISRLGIILMRNGVANLVSEVSGSPQYHVDKIRNLKARQHNRFEPKGDPSLQNSLEMARSLLKFNFGSTSNNSKNSKEILVIFGALFTSDPGDIHKTIDSLVKDEIKASVIGLSAQVAICQELVNRTNNEPRNSQSKHYGVIMNESHFKELLMESVTPLPLTESEKQIQESEQNGVPVLRMGFPTKVQPTLTSAIGGSDYIVEFPHLNASFPTQGSEDSKDVVEIQTNKPAAAVATTSSSVIGYQCPQCKCKVCNLPTICPVCGLMLILSTHLARSYHHLVPLAPYKEVKVSPIYDSTYCFGCQLKFPEGVKLGTHKGTLESMTSSRYRCLKCSQDFCINCDVFVHEVLHNCPGCENN

SEQ ID NO: 7392 - protein, 209 aa, Candida albicans
MRIYQCHFCSSPVYPLHGITFVRNDAKEFRFCRSKCHKAFKQRRNPRKLRWTKAFRKAAGKELVVDSTLTFAARRNVPVRYNRDLVATTLKGMSRIEEIRQRRERAFYKNRMKGNKERQLAADRKLVADNPELLRLREVELRRKAEKLAAKENAMEEDEEIEVEEEEEGDEEMISEDEEMESEDESESESEQKRVKQKVVLKNKRKSRN

SEQ ID NO: 7393 - protein, 255 aa, Candida albicans
MAVINQPNSQIRLTNVSLVRMKKGKKRFEIACYQNKVQDWRSKVEKDIDEVLQIPQVFINVSKGQVANNDDLQKCFGTTNQDEIIAEILNKGEIQLNEKERNANLQQKQNEFLNIISTKCINPRSKKRYPPSMIEKVLNEVKFHLNPTKPTKIQALDAIKLLVEKQIIPIARAQMKVRITLSKKAYLKTFQDEIKPVIDQIVEEDNNGKQYEIVGIIDPINYRVLVTLIENTDGSNKVAKGEGSIEVLDMSAIKE

SEQ ID NO: 7394 - protein, 337 aa, Candida albicans
MSTSIQNRTIEFQQCVSTYDKINKKHNKHVNNSPALSTPKKSYFSQQAGLIAKDISHVTELLSKLAVLAKRKPIFDDKPIEIGELTYVIKQDIFKIETNIQNLQKYLKGDTSVSIDAQTTQFSKNVLTLLNSKMKNVSGEFKNVLEIRQKNEIINKNRTENFLSSVSASRSSNNQSPLVDNPNASLSNLSENPFLASSPPENLPYDPDADPDTSSPYGVSNNGEYLSLPSQTQQMLLMEEQQYGNQQYLQQRNRAVESIESTINEVGNLFQQLATMVSEQGEQIQRIDANVEDINMNITGAQRELLKYYAHITSNRWLFLKIFGVLIVFFFLWVLVS

SEQ ID NO: 7395 - protein, 207 aa, Candida albicans
MTEIPTIIETSETESFSERAHVPDDTASLDDLFADLKKESRSLPTVKDFKSIEKSIQSLPRINANLETALQKKPIRIHDPVIPPKKKTTETSDERWFNMKQPEMTPEIKRDLQIIKQRSALDPKRHYKKDKWEIPKFFQMGTIIEGNTEFYSSRLKRKERGKTMVEELLHDDTTKKYFKRKYHEIQQTKTSGRKGFYKKVKNARKKY

SEQ ID NO: 7396 - protein, 592 aa, Candida albicans
MPTIPVDKEDLFKLLGRSYTTEEFDELCFQFGIELDEDTTEDVKGTDERPQLKIEVPANRYDMLCIEGIAQALNEFLGNTSAPNYKLSPSKPEISLTIKESTYPIRQYAASAILRNVKLDERAYDSFISLQDKLHANLCRNRTLVAIGTHDLDTLTPPFTYEALAPKDIVFKPLNQTKEINGEELMEFYEKDKNIGKFLHIIKDSPVYPVMLDANRTVASLPPIINSDHSKITLNTKNVWIDVTGTDRTKTEIVINQLVAMFSRYCKEPFEIEPIQIISEHNNETRVCPNITPRTAKAEISYINSCVGLDYSGEEISKLLKKMSLDATPSTEERDILDVKIPITRSDILHQCDIMEDVAIGYGYDNLKKTKPKAESLVAAPLPVNKVADILRLASSQAGYLEVMPLTLSSHDENFAWLKQKDDGTKAVKLENPKTIEYQVVRTTLLPGILKTVKENRKHSLPIKVFECGDIVLKNPELERGAFNQRNWAALSVGQTSGFEMVQGLLGKIMQTMRTPWLENPSKDQRRGYWIEEDKENTTFFPGRGAKIYFRNADNAEAKAIGSIGVLHPEVMNNFDIPYAASSVEINAEVFL

SEQ ID NO: 7397 - protein, 243 aa, Candida albicans
MNSIYNHGLKQTQTITKDLTQFEKNLSTSPLSLQGAITTSLTAFRKTIKEYSDLLEKNVNDTSYTKHENRLNKFNQDLNEFTSKFDTLKKQRDIQVQEANKQELLGRRHISTTATAALGSTSSDNPYESSSNPSQQQQQQLQDEQNTMSYREGLYHEKNSLERGSEQLDRILEMGQQAFEDIVEQNEILRKVQTKFEESLITLGVSQGTIRSVERRAKQDKWLFWFCVVVMLVVFYYIVKLFR

SEQ ID NO: 7398 - protein, 346 aa, Candida albicans
MSLLKDSTVAVITGTSSNLGFNIAVRLLEGLPDNKEITLVVTSRTLPKVKEVISDIKKYIVAKIPTKVNKVEFDYLLVDFTDMVSILSAYYELNKRYKHIDYLFINAAQGVYGGIDWTGAVLEVLQSPIEAVTNPTYKLQKVGVESGDKLGLVFQANVFGPYYFIHRIKHLLENGGKIVWVSSLMSSPKYLSFNDLQLLRSPASYEGSKRLVDLMHFGTYNKLEREHGIKQYLVHPGIFTSFSFFQYLNVFTYYGMLFLFYLARFLGSPYHNISGYIAANAPVAAALGQTKQNCKTASACTRSGKEYLLEEEIDSTGSDDVVSYLDTLTKEWDEKLKDQIVNTRQP

SEQ ID NO: 7399 - protein, 455 aa, Candida albicans
MSNRGRQPSGPPPSRKRETKWSGKPKRYANFGAQSFDTVITGHLTQEQLDAYQRYFRIEEISNFLSVAKQQHKSIVDVLPSAKVDETDHYKRDPSPPPKYDKNGNRTNTRERRVTEALEKERHELVELAASSIKNYMIPSNYRRPSRTVERLYVPVKDYPDINFVGFLIGPRGNTLKKLQEDSGARLQIRGKGSVKEGKSSDGFGSSQTGTDIQDDLHVLITADSPLKISKAVKLVNEIIDKLIFSPQGMNFMKRDQLKELAVLNGTLRETKPFDPEAHEKKQQQQMDITKIVCKICGNIGHIARDCKQNNGKRPLDDNAENEPTTINKKARTDVPPPPPPPPPPAPPSSSTEISKQVPPPPPPPPPPAPSAAASGFATTENYKQGLVPPPPPPPPPPPPPVRSALVNFENNSKVLLTKEKEESGSSELKNTGESSSSSSGVPPSPPPPSSNVPR

SEQ ID NO: 7400 - protein, 701 aa, Candida albicans
MNETSNRDHQVTSKEILDVAFEKSKSKFTTPRQTIQDTEELQSYQQTKRKEFEQHINKNRLNLGQWTRYAKWEIENNHDFPRARSILERALDVNIQHVPFWIQYIQLELSHKNINHARNLMERAINTLPRVNKLWFLYVQTEEMLKNYPMVRAVFERWLDWHPDTSVWDAYINFEARYEEKENVRTIFKKYVHEFPNAGTWYKWIKYEMENNRDDVNTVRAVFESAVDTLLSNKSEENDDDEEFATIISSWTSWEVSCGEASRANEIFKLLLDNKTNKLEISDQTKSSIYTAFVEFEKNFGNKDSIEQSVLIKRRIKYEQEIQNDPYDYDSWWKYMTLLQNSSNKSDLENAFKKVTGNVVHDKHKSIKWRRYIMFWIWYAFWEEMTNNNPDSAREIWNNCLKVIPHKSFTFAKVWIGYSEFELRNSEDGLAKARKILGRAIGQTSINKPKIKIFKYYIDLEKKLGDWNRVRLLFQKWLEVSLLTTSSSELVIEKYVEFESSIEEYDRCDSILSSARQLSENPEYSSSFNLQRLLEITVEFYKEEMQYDKIREIYRALLDKDPNAHNWISFALFESSIPSAEQLEEYLQGDNEEFEATVDESQIESTRNIFEEAMTYFKDKDDKESRLVIIEAWRDFEEVNGSDESLSKVTKRLPVIVRKRRTVGSIEEEYIDYIFPDDESKKLPGKMSKFLANAKKWAQQN

SEQ ID NO: 7401 - protein, 981 aa, Candida albicans
MVKSYNRYDQEKCFGVITSQANIVWLPPSETQSSTSMGRALTSGLEEILIWDIKTGEIMNRMSDGLTPGSSNASTTVPPSPVSYLTYHQETNIIAAGYTDGSIKIWDISSNSVIINFEGHNSSITQLKFDKNGTRLVSGSSDSSIIMWDLIGEVGMFKLKGHKGPITGLELLSEQQNTQQDGDNVDDVDDMDDYLVSVSKDGLIKLWELKSQQCIETHLAHSNECWAMGINPTKDMLITSGNKDQVKVWSLDLSLEDGLKIGERGSFEKTSKSRSNEIAFKSLKSSSSSASLIQLFSIQNADRTMEIFRIRSEDEIKRGITKRTKRLKDKGLDEQEILESLQSSEISMLITPFTTMRTMAKIKSACWTNNIKKLDILMSLTNNSIEYHTIPVPETPKKAQSADLYSVKQHTIDLLGHRFDIRAMDISPQDNKLLATASNGELKIWNTRSYNVIRTFVLEGGYALCCKFLPGGTLIVVGFKNGDLELYDLATSSLVDRVEKAHSAITVGGAAPSNDDSAAIWSLDITPDGKTLVTGGNDKCVKFWNFKVEQDIIPGTNTTVSHLKFVHTQTLELNEDVLCVRISPDAKYLAISLLNNNVQVVFLDTLKLFLTLYGHRLPVLSIDISHDSKLIITSSADKNIKIWGLDFGDCHKSIFAHQDSIMNVRFIGDTHNFFSSGKDGLIKYWDGDKFECIQRLPAHQSEVWCMAISDDGLFMCSTSHDHSIRLWSATDDQVFLEEEKEKELDEIYENKLLDQIDGVDGEDHTNMKDDNDEEIDEATKVSKQTMETLKAGEKLMEALDIGVEDIEANKEYLSLVKQGKQAIKPTPNSILLAFNMTASQYVLNVLSKIRPAQLDDALLVLPFSYSLKLLQFIEIWTNKENITQNVVSISLICKVLFFVISSNSKELISQKDPHLKNQLIKVKEQLRQELSKTSNQLGVNTQGLKFVKKQWKLQHASEFIDEEEQRQYEEKRAIKRTYTTI

SEQ ID NO: 7402 - protein, 106 aa, Candida albicans
MSAGIPVRLLNEAQGHIISIELINGDTYRGKLLENEDNMNLSLYEATITQGKSGKVSHMDQVFIRGSMIRFISVPDILKNAPMFFMKPGDKPKPPIRGPPPKRKRV

SEQ ID NO: 7403 - protein, 671 aa, Candida albicans
MPTEQTHNVVHEANGVKLRETPKEFFERQPNKGHIHDVNQYKQMYEQSIKDPQGFFGPLAKELLSWDHDFHTVKSGTLKNGDAAWFLGGELNASYNCVDRHAFANPDKPALICEADDEKDSHILTYGDLLREVSKVAGVLQSWGIKKGDTVAVYLPMNAQAIIAMLAIARLGAAHSVIFAGFSAGSIKDRVNDASCKALITCDEGKRGGRTTNIKKLCDEALVDCPTVEKVLVYKRTNNPEIHLTEGRDYYWDVETAKFPGYLPPVSVNSEDPLFLLYTSGSTGTPKGVVHSTAGYLLGAALSTKYIFDIHPEDILFTAGDVGWITGHTYALYGPLLLGVPTIIFEGTPAYPDYGRFWQIVEKHKATHFYVAPTALRLLRKAGEQEIAKYDLSSLRTLGSVGEPISPDIWEWYNEFVGKNQCHISDTYWQTESGSHLIAPLAGVVPNKPGSASYPFFGIDAALIDPVTGVEIEGNDAEGVLAIKDHWPSMARTVYKNHTKYMDTYMNPYPGYYFTGDGAARDHDGYYWIRGRVDDVVNVSGHRLSTAEIEAALIEDKKVSEAAVVGIHDDITGQAVIAYVALKEGNSDEDSEGLRKELVLQVRKTIGPFAAPKSVIIVQDLPKTRSGKIMRRILRKVSSNEADQLGDISTLSNPQSVEGIISAFGAQFGKK

SEQ ID NO: 7404 - protein, 467 aa, Candida albicans
MFKRLSALKKYNGGIKYRGFNTAAVPSPTYQTSILPNGLTVASESMPGTRTATVGVWINAGSRADNPKSSGTAHFLEHLAFKGTQTRPQAALELEIENIGSQINAYTSRENTVYYTRCLASDIKQNIDILSDLLTKSKLENRAIDNERHVILQESDEVDKMYDEVVFDHLHAVAFKNQDLGRTILGPREMIKTINRQDLVDYITTNYKGDRMALVGVGCVDHQELVKLGQNFFGNIVKSEEPFNQSGGTLPLFYGDEIRIQDDSMPTTHVALAVEGVSWSAPDFFVASVANGIVGTWDRSVGIGSNSPSPLAVTAATGGPGKTPIANSYMAYTTSYADTGLLGVYFTADKNANLKLLVDAIQKEWGRLSRGDITDEEVERSKSQLKASLLLALDDSSAIAEDIGRQVVNTGYRLSPEEVFSRVESITKDDIVNWANYRLKGKPIALAAVGNVKTLPSHKEISEGMFF

SEQ ID NO: 7405 - protein, 479 aa, Candida albicans
MSSKEDYIIKPESVSPSNDTSQWPLLLKNYDKLLVRSGHYTPIPAGSAPLNRDIKSYVSSGVINLDKPSNPSSHEVVAWIKRILRVEKTGHSGTLDPKVTGCLIVCIDRATRLVKSQQGAGKEYVCIVRLHEQLKDDKELNRALENLTGALFQRPPLISAVKRQLRVRTVYDSKLIEFDNKRGLGVFWASCEAGTYMRTLCVHLGMLLGVGGHMQELRRVRSGAMSESDNLVTLHDVLDAQYVYDNTRDESYLRKIIQPLESLLVGYKRVVVKDSAVNSVCYGAKLMIPGLLRYEEGIELYDEVVLMTTKGEAIAIGIAQMSTVDLQSCDHGIVAKVKRCIMERDTYPRRWGLGPIAQKKKQMKADGKLDKYGRVNENTPENWKKDYKDLDEQPAPPIPESKLVAPEPQLPKKKSLIEEVEVDIDVEDKSEKKEKKDKKEKKEKKDKKEKKEKKDKKEKKRKAEDDSSKSEKKKKSKKD

SEQ ID NO: 7406 - protein, 267 aa, Candida albicans
MSELKNGTSEPKKNETTQSDSKSKSTSANKSSVPPASLVPVQPTALTSRDKTTQRLIVVLSQACLETYKMNSGGPGGDRFALLNCDDHQGLLRKMGRDIAEARPDITHQCLLTLLDSPINKAGRLQVYIQTARGVLIEVNPSVRIPRTFKRFSGLMVQLLHKLSIRSENSKEVLLKVIKNPITDHLPTKCRKVTLSFDAELKRVQDYVTTLDENESICVFVGAMARGKDNFADEFVDEKIGLSDYPLSASVACSKFCHGCEDVWGIY

SEQ ID NO: 7407 - protein, 516 aa, Candida albicans
MPGLDYLLFEEATGYGIFKVLIQQDDIASRSKEVQEAANDLSKFSKMVELVSFAPFKGAAQALENANDISEGLVSPYLQSILELNLPKTSSKKRIALGVSDKNLGPSIKEVFPNVDVLSNEIVQDFLRGIRVHGAKLFKDLQEGDIERAQLGLGHAFSRAKVKFSVQKNDNHIIQAIALLDQLDKDINTFAMRVKEWYGWHFPELAKIVPDNYSYAKLGLSIKDKASLTDDSLHDVAAILNDDSGLAQRVIDNAKISMGQDISEQDMDNVITFAQRVVNLYEYRQQLYKYLTDKMHTVAPNLSTLIGEVVGARLISHAGSLTNLSKQAASTVQILGAEKALFRALKTKGNTPKYGLIYHSSFIGKASAKNKGRISRYLANKCSIASRIDNYSEEPTTAFGEILKKQVEDRLKFYDTGSAPMKNSDAIKAALALNGQDLAGAEEQKDVDMVSDEEQVKKEKKEKKEKKEKKDKKEKKEKKDKKEKKDKKEKKDKKDKKRKSDDGEETPKKKKKKSKD

SEQ ID NO: 7408 - protein, 298 aa, Candida albicans
MVTIGNAHDDLIHDAVLDYYGKRLATCSSDKTIKIFDLDGTDNYKLITTLTGHEGPVWQVSWAHPKFGSILASCSYDGKALIWKEQPETQQWSIIAEHTVHQASVNSVSWAPHELGAVLLCTSSDGKVSVVDFNDDGTTSHVIFDAHAIGANSATWAPVSTSSKDSAALKQQRRIVSCGSDNLAKIWKYDAANNTYVEEAKLEGHTDWVRDVAWSPSNLIRSYIATASQDRTVLIWTQDRDGKWQKQLLTEEKFPDVCWRCSWSLSGNILAVSGGDNKVSLWKENLQGKWESAGEVDQ

SEQ ID NO: 7409 - protein, 799 aa, Candida albicans
MDVLKTTYAHTDIEPIYVGGTSASISTSNGELLLATPLNEDVIITNLDTNEIIYKIPGDGEVITNLTITPDGSYLAMISQSQLLRIFDLNKGSVIKNFKLPSPVYISSVDSTSSLFAFGGSDGVITVWDIENGYVTHSLKGHGTTICSLTFHGELNSQDWRLASGDTMGTVKIWDLVKRRCIHTLKDHNTAVRGVGFDQDGDLFISGGRDNVVIIYNTKNFKTINTFPINEQIEAAGFVSLIDDRQYFYTGGSENVLKIWDIKSGEMIGRSPIPLKTNEELLIIDVIKLYNNNLYLVISDQTLIELDLQELTPGHGHGHGQDDEIVEFPIVKRIAGNQGIIADIKYVGPEFNLLAMATNSPALRIVDIEKPLELRVYEGHTDILNAVDVSTDGKWIATASKDNEARLWRWNGELQDFEPFARFQGHAGAITAISLSKSQNEPKFLVTGSTDLTIKKWKIPNTPNSIVKTSEYTRRAHDKDINSIDVSPNDEYFATASYDKLGKVWQTDSGETIGVLKGHKRGLWDINFYKFDKLIVTGSGDKTIKVWSLLDFSCKKTLEGHTNSVQRVKFFNREHPQLLSCGADGLIKLWDYKQGEIIKSLDNHDQRIWAMDLKNDGEYFTTADADGKLSFWTDNTEEEVKFKELQAKEKIEQEQSLSNYIKNKDWSNAFLLALTLDHSMRLYNVIKSSIETNEDKDSIIGSFSLENTISLLDDGQLVKLFKKIRDWNVNFKFFEISQKLLNVVLNNFAVDKLTEVPGLMKIMESIIPYNERHYNRIEEMVEQTYVLDYTVEQMNKLIA

SEQ ID NO: 7410 - protein, 567 aa, Candida albicans
MLRVNSKSSIKTFVRHLSHKELKFGVEGRAALLKGVNTLADAVSVTLGPKGRNVLIEQQFGAPKITKDGVTVAKAITLEDKFEDLGAKLLQEVASKTNESAGDGTTSATVLGRSIFTESVKNVAAGCNPMDLRRGSQAAVEAVIEFLQKNKKEITTSEEIAQVATISANGDKHIGDLLANAMEKVGKEGVITVKEGKTLEDELEVTEGMKFDRGFISPYFITNTKTGKVEFENPLILLSEKKISSIQDILPSLELSNQTRRPLLIIAEDVDGEALAACILNKLRGQVQVCAVKAPGFGDNRKNTLGDIAILSGGTVFTEELDIKPENATIEQLGSAGAVTITKEDTVLLNGEGSKDNLEARCEQIRSVIADVHTTEYEKEKLQERLAKLSGGVAVIKVGGASEVEVGEKKDRYEDALNATRAAVEEGILPGGGTALIKATKILDEVKEKAVNFDQKLGVDTIRAAITKPAKRIIENAGDRKVSLSVGKIYDEPEFNKGYDSQKGEFTDMIAAGIIDPFKVVKNGLVDASGVASLLATTECAIVDAPQPKGSPAAPPAPGMGGMPGMF

SEQ ID NO: 7411 - protein, 574 aa, Candida albicans
MSTSASSSYLDDETTWDSFNLDPRLLQAIDQLGFSNPTLIQSSAIPLALEEKRDIIAKASTGSGKTAAYCIPIVNNLLTDDSAQGIKSIILVPTRELSNQVFQFVEKLLTFSTNKINVLNLSSSYSDQVLNSLLVNKPEIIISTPAKLIQILEKNEKNIDLSTVKNLTIDEVDLVLSFGYLDDLKKLESYLPVKKNLQTFLMSATVNDDLDDLKQRYCTKPAILKLNEDSANQNNLVQYYAKTTEFDKFLLAYVIFKLNLIKGKTIAFVNNIDRGYRLKLFLEQFGIRCCILNSELPINSRLHIVEEFNKNVYHLLIATDETNELNEEQDDNEDGDEDTKDKGNAETKPKKSKKSKFKQDKEYGVSRGVDFRNVACVLNFDLPTSSKAYIHRIGRTARAGKAGMALSFVLPLSEFGKHKTASLASAKKDEKVLGRIVKQQSKNGFEIKPYQFDMKQVEGFRYRADDAFRAVTQTAVREARVKELKNELINSEKLKRFFEENPQDLASLRHDKELHPARIQSQLKNVPQYLLPESARQDVKNIGFVPFHKNKIHKHRKGKGKGRKKVDPLKSFRK

SEQ ID NO: 7412 - protein, 783 aa, Candida albicans
MNEQNEFSDEENFKFFGLGGCNEVGRSCHIIEYKNKVIMLDSGMHPALSGHASFPYFDEYDISKVDILLISHFHVDHSASLPYVMQQSNFRGKVFMTHATKAIYRWLMQDFVRVTSIGNSRSEDGGGGEGSNLYTDDDIMKSFDRIETIDYHSTMEIDGIRFTAYHAGHVLGACMYFIEIGGLKVLFTGDYSREENRHLHAAEVPPLKPDILISESTFGTGTLEPRIELERKLTTHIHATIAKGGRVLLPVFALGNAQELLLILDEYWSQNEDLQNVNVFYASNLAKKCMAVYETYTGIMNDKIRLSSASSEKSNPFDFKYIKSIKDLSKFQDMGPSVVVATPGMLQAGVSRQLLEKWAPDGKNLVILTGYSVEGTMAKELLKEPTMIQSATNPDMTIPRRIGIEEISFAAHVDFQQNSEFIEKVSPSKVILVHGDSVPMGRLKSALLSKYASRKGTDQEVKVYNPKNCEELIIGFKGLKIAKVLGSLAEEQLQVLKKIIQDEVSAENSKITELTEEKEEADEIKEDNGETDTTQKPNESSINVLKTGQVVSGVLVSKDFNLNLLQLQDLHEFTQLSTSIVKSKMHLKINADISLMVWHLEQMFGYINVINDDDEEWECVIMDVVDVFIDRSKGPGLFITVEWINDNLMADSLADSVIAILYSIDSSPASVKLSSQNHNHGDNHIVKKEDSMEIDRPVEAHAKTDIKSRIERIALLLKAQFGDSLKELPEEKAIIQIGKTVANVDYKRLEVECSSKVLKDRVENVIKRGCQLTAPLSQNPKIA

SEQ ID NO: 7413 - protein, 365 aa, Candida albicans
MSKLLTPEILALIDPVVSSLKRHQLVDDKEIALTIAQLLMKVISAARWSNTYDLIELIRQVGVIFTEAYPRKVIPGNIVRRVLALIRDETETETETETEQTDNIPMMSSMFSLLATHNKNETIKEQTQLQSKKQTSDMRAIIIQGIRDLVDEISNVNDGIETMAVDLIHDDEILLTPTPNSETVQHFLIKARLKRKFTVVVTENYPNDIKAAHKFVKTLAEHNIETILIPDTTIYAVMSRVGKVIIGTNAVFANGGCLSNSGVANVVECAKEHRTPVFAVAGLFKLSPLYPFTRNDLIEVGNSGKVLNYDDFELVQNVDVVTNPLEDYIPPQHIDIFMTNIGGFSPSFIYRIVLDNYKAEDNKLE

SEQ ID NO: 7414 - protein, 214 aa, Candida albicans
MAQEVPTFKLVLVGDGGTGKTTFVKRHLTGEFEKKYIATLGVEVHPLGFHTNFGELKFDVWDTAGQEKFGGLRDGYYINGQCGIIMFDVTSRITYKNVPNWHRDLVRVCENIPIVLCGNKVDVKERKVKAKTITFHRKKNLQYYDISAKSNYNFEKPFLWLARKLVGNPQLEFVASPALAPPEVQVDADLMQKYQQEMEQATALPLPDEDDADL

SEQ ID NO: 7415 - protein, 875 aa, Candida albicans
MDILQILEAALGTADPNQRTQAEIQLNEAANNHFPEYLQLLIEALVNEDAKTEVRMLAGLALKNQLVAKDNKTKLAQQERWLKLDGELKSKIKQTALQGLNITDQKVANTAAQLVAAIADIELPRAEWSELIPTIMENTKTDNPENVKRSSLLAIGYICESADPNDPNILSQASGILIAVVQGAQSSEPSKQVRLTALNALVNSLEFIKFNFENEGERNYIMQVVCEATQADDSELQASAFGCLARIMSLYYRFMSLYMEKALYGLTISGMQSADEKVSCMAVEFWSTVCEEELEIALQKHELGLDSLQAAQNPDLITFNFALIASGEVLPTLLTLLTRQNEDPEDDDWSVAMAAGACLQLFAQNIGNYVVEPTIHFVGSNLANKENWRAREAAVMAFGSILDGPDHEQLKHIIAEALQPILLLIKDSDLQVKETVAWCLGRIADMVVDAIDIETQLPNLLMALVDGLQDHAKVATNCCWTLINLVEQLCTDYYEKDSTVMSPYYSTIIPILIQTSARNDNEYNARASAYEALSTFVTYSAQDTMPIVQNIATEVLGRLESSIILQSQVTTTEDKGNLEELQSNILSLLTNVIRRLNSEVIIAADNLMDRFIKLLDAQEQNSLIEEDIFIAVSALSSAIGGDFIKYLDAFLPYLRKALQNVESSTCITAVGLVADLAQSIGSQMGNYWENLLQLLGNALTNADSKKELKPAVVSAFGDIATAIGPDFAPYLEFVLRTCTEAGNIQPQDGSIDTLDFVFNVRESVLDCFVGIVGGFINQPQALAPAIVTILQYLQKVTLDPQMSSSESVARSAAGLLGDIAAMYPNGEFKQVFTEEWVTDFIKRTRSNPLFDNKTKDAARWARDQQKRQQQQLFGQ

SEQ ID NO: 7416 - protein, 479 aa, Candida albicans
MSGFRVLDLVKPFSPFLPEVIAPERKVQFQQRVMWTIITLLIFLVMSEIPLYGIASSDSSDPLFWLRMMLASNRGTLMELGISPIVSSGMLFQLLQGTKIIHVDMQNKNDRETFQTAQKLLAILLAVGQATVYVLTGMYGPPSSLGVGVCSLLILQLVFASTIVILLDELLQKGYGLGSGVSLFTATNTCEQVFWKAFAPTTSTSAKGTEFDGAVVAMFHLLGSRKDKKRALIESFYRPNLPNMFQLLATLLVFFAVVYLQGFRIELPMKSTRQRGPYGSYPIRLFYTSNIPIMLESALASNIFIISQLLFMRWPNNLFVKLLGTWDARAGSSQLYANGGLAYYIQPPFNFTDALLDPIKTTIYIAFVLGSCAVFSTTWIEISGTSPRDVAKQFKEQGLVIAGHRDTSAYKELKKIIPIAAAFGGATIGALSVVCDLMGTLGSGTSILLAVTTIYGYYELAVKEGGFNKSIVSGFSDGI

SEQ ID NO: 7417 - protein, 766 aa, Candida albicans
MSSKSSSKKKNNGVSTPESSTAPAKKIKIPKSFIVRPNVPTNNKSVANVYINPEILSAMELNNGNLVLVSSSDSGSAGVVATVYSSNDIVDKNVITISFPYRQLCGLLLGDRVELVKFMNQPQYASDISISGVEETVTEDVRSALLDIGLVYPGLQINVDNKRITIVDVNDSLDASMDKLSIKDSDSLLSVHTVSPPYLFSPTTSINVATSSFPARSKYPNLPQQITYDQVGGLSKQIELLKSTIELPLNNPTLFSDFGISPPRGILLHGPPGTGKTMLLRCVANSITEAHVLTINGPSIVSKYLGETENAIRDIFNEAKKFQPSIIFMDEIDSIAPSRTSDDSGETESRVVAQLLTVMDGMGDNGRIVVIGATNRPNSIDSALRRPGRFDQEVEIGIPDVEAREEILTKQFAKMNSEKCQITKEEIASIASKTHGYVGADLTALCRESVMKAINRGLTVGIPQTAIKVTVDDVYHALPEIRPSAMREIFLEMPKVHWSDIGGQEELKRKLIEVVQLPLEASDSFKNLGVSSPKGVLLYGPPGCSKTLTAKALATESGLNFLAVKGPEIFNKYVGESERAIREIFRKARAASPSIIFFDEIDAIAGDRDGDSSTTAASNVLTSLLNEIDGVEELKGVVIVGATNKPTEIDPALLRPGRLDRHIYVAPPDYDARLQILQKCSRKFNLQSGDESVDLQKLAELTDGCSGAEVTLLCQEAGLAAIMENKEATTVTNKHFEHALKGISRGITPEMLEYYEKFSKKSGLNI

SEQ ID NO: 7418 - protein, 226 aa, Candida albicans
MEEDNQQDQNNQYVIYHPFISEECHFYFIISCTNSFIRVALKIGLIGDSQIGKTSLMVKYVEGSFDEDYIQTLGVNFMDKKIQIRNTTITFSIWDLGGQKEFINMLPLVSNDAVAILFMFDLTRKSTLNSIKEWYRQVRGFNKTAIPFLVGTKYDQFIDLSFQDQIEITQQAKKFGSAMKAPVIFCSTSHSINVQKIFKIILSKAFDLKLNLDEIVNVGEPILIYK

SEQ ID NO: 7419 - protein, 538 aa, Candida albicans
MVNTDFEKIYLNQSRAGGRMRIAESGLGWKASASSGSTSQPFLLPREEILIASWSRGSKGYELRVQTKNKGVVSLDGFDHDDFTQLKQELTRNFHINLEHREHSLRGWNWGKTDLARNELIFNVNNKPAFEIPYSDISNSNLTGKNEVALEFNLDNNKNGDEIVEMRFYVPGTIENETTIVKNETNGDVIEEAVVNETSAAQQFYEQLKDKADIGQVAGEAIVSFSDVLFLTPRGRYDIDMYPSSLRLRGKTYDYKIQYEQIERIFSLPKPDETHHLIVLQIDPPLRQGQTRYPFLVLQFVKDEETELELNVSDEDFEKKYKDRLKKTYDAPTNVVMSHCLRGLTERKLITPGAFQSRYLQAGVPCSVKASEGYLFPLDRCFLFVTKPTLYIPYSEISSVVMSRTGDGVSASRTFDLEVNVIGSNQPHVFSNIDREEQEFIESFCKEKGVKVKNEEKIAKARLAKALEQEANDDDDEDADMGSAGDEDEDEDVDFQSGSDSDVAEEFDSDAAPSSDDDEEMADSKETDDRPPKKKAKN

SEQ ID NO: 7420 - protein, 251 aa, Candida albicans
MADRYSFSLTTFSPSGKLVQIEYALNAVRQGVTAIGIKCGNGVVLATERKANSPLIRNDTNIKVEYITPNIGMTYSGMGPDFRVLVDRARKLAHTNYKRIYNEYPPVKIMVQEIAKVMQESTQSGGIRPFGVSLLVGGYDESNEGKFQLYQVDPSGSYFPWKATAIGKSSNSAKTFLEKRWNDNLQLEDGIHVALLALKECIDGELNGDNLDIAIISDPQEQLLGFKGTDIPGPRFKKLSPEEINDTLDSL

SEQ ID NO: 7421 - protein, 872 aa, Candida albicans
MARNNKQQKSKSKNNKKKQQNHRKNDDEGNELSIYDNKIREFEDGILDARKYLQSDDIKVDLDEEIDSDDALGSDDDYDVLNSKFSQTIRDKARKKRSGKKVNESESEDEGYSSIDEGQLVTLSEAWDMDDRDLDETLGNTSQNDIVLNDTWETESSEDEEEGEDDDQDEEDEDEDDDSFEESTDEEEIFGNHDDDEDIDLLKTVDRLQSKIASRQPKERKKLIVETRQENEYNLPTGGNQLSLQDMMANINEDENNKAILLDKESKAIAIPLPKRIQQRNDRAAAYELSKKEISKWKDSVQALRQAEVLKFPMINQEQDTIRDSALTFRSDNVPTTELEKRINNVLTESSLVDDKKEATFEEIAVAKLSPEEMKKRTNELRLMRELMFRDEKRAKRIKKIKSKQYHKIQKRERLKNQEMVEGEDFDMEDEDHDTKRATERMSLKHKTQSQWAKSMIKSGLSKDASNRAELEEMLRQGEKLRTKQMGFEDGDQSDENADDIINEYDQDDIDDENNLRSKLGKGVMNMDFMKKAEARKREENLKELEMLRKLENGEGDLEIFEEDNSAVNVTKNQGRRIYTPAAASQINDNTNEQALEDIENDNAKSLDKKLAKKYKVIDNQETKTSAKSESNPEVLPVDESNPWLSSNTSANNDTTKKNSAKITTVDKESSKLAKAAAKLAKSKLKKHKSSDDNTLIDVNETLAVNDIYQDGSEDEDESVPTMFKQKDLIKQAFAGDDVVSEFENEKKRVIEEEDDKEEDLTLPGWGDWAGGDSKPKKRKVVRKIDGVMAKDRRKDKNMKNVIINEKVNKKNLKYQSSHVPYPFETREQYERSLRMPVGQEWTSKETHQKLTMPRVIVKQGTVIDPLKAPFK

SEQ ID NO: 7422 - protein, 285 aa, Candida albicans
MEDKRELLKQPIHGIYIPIGLILFGTWIFGWEYMPYSIGFIVVIVSIQYYGALKRASSMHQVKWQEFELLDKTLIAPMTSIYRFKLRREDEVLDIPTGHSLACCFNVDGKDEVRFYTPISNQFDKGFFDILVKHYEHGVVTKKLANLQVGQTVQFRGPFGKLQYVPNSAKELALVAGGTGITPMLQVITAIITNLEDDTKIKLLFANNTERDILLKDELDNMAQKYPGLEIKYVTGKFVDKKSFEFLPSPTSDSKIFICGPPAFVEYINEMTKDAGFEKDQVFCF

SEQ ID NO: 7423 - protein, 451 aa, Candida albicans
MVMTNSPQNIGIKGIEVYIPGQAVNQSDLEKFDGIPQGKYTIGLGQTNMAFVNDREDIYSISLTVLSRLIKNYSIDTNKIGRLEVGTETLLDKSKSVKSVLMQLFPGNNDIEGIDTVNACYGGTSSVINAINWIESSSWDGRDAIVVAGDIAIYDKGAARPTGGVGAIALLIGPDAPIVFDSIRGSFMEHAYDFYKPDFTSEYPVVDGHFSLSCYVKAVDSCYKNYSKKITGDANKTVGVYDHFDFSAFHVPTCKLVTKSYARLLYNDYVSNPSKFADLIDETTRKHIDGLTYDESLTDKILEKTFVGLAKDETKKRVQPALQVPTNTGNMYTASAWVSLASLLYYVGSDNLKNKRISIFSYGSGLASTLLSVTVKGDVSAITKVLDFDYKLGDGRKIQSPEDYLAAIELREKAHLQKSFKPQGSTDNLSQGTYYLTEIDDKFRRAYAIKE

SEQ ID NO: 7424 - protein, 430 aa, Candida albicans
MPINLGLQRIAKLLGHLNNPQNAYKSIHIAGTNGKGSTLAYISSVLTEAKIKNGKFTSPHIINYHDCISINNQTYPKSKFDRINQQVIKINNDLNLECTEFEILTATAFKIFALEEIEMALVEVGVGGRLDATNVLIPYGETIGTSKGGVVATAITKIGLDHEKLLGGTLLAIAKEKSGIIKYGIPCFVDSSNDSIVLQAIREKSREVSCPLSVVEPIQANDDNQFIKYSPLKGSYQANNLSLAVEILKSLPYRISEEILINGISKTNWPGRLQTIQHKSLGSILLDGAHNESAAIELGKYLNTKYRKQEPEANMSEGNHTPIILVIGMTKGKAIGNLLKHVMSENDIVIPTMFTQPENMPWINSESISTLTSIAKDYCRDVRNIGDDAHIHQVFQYLKNNKNDKSLENKPIVVCGSLYLCGDVLREIAN

SEQ ID NO: 7425 - protein, 517 aa, Candida albicans
MSKRSAEDDLSGNGSTSHTAVKTNKDSLPTTTNGKEEEPDNMDIGEFEDPYGDEFESDEEIIELDDNNDEEDDEMIDENSTQAKIEELEAKEQEQEQQSSIYLPHKSKPLGPDEVLEADPTVYEMLHNINLPWPCLTVDILPDSLGNERRSYPATVYLATATQAAKAKDNELLAMKASSLAKTLVKDENEEDEEDEDDDDDVDSDPILDSESIPLRHTTNRIRVSPHAQQTGEYLTASMSENGEVYIFDLSAQYKAFDTPGYMIPKSSKRPIHTIRAHGNVEGYGLDWSPLVNTGALLSGDMSGRIYLTNRTTSSWTTDKTPFFASQSSIEDIQWSTGETTVFATGGCDGYICIWDTRSKKHKPALSVIASKSDVNVISWSSKINHLLASGHDDGSWGVWDLRNFTNNTTSNPSPVANYDFHKSPITSISFNPLDESIIAVSSEDNTVTLWDLAVEADDEEISQQRKEAQELHDIPPQLLFVHWQRDVKDVRWHPQIPGCLVSTGGDGLNIWKTISV

SEQ ID NO: 7426 - protein, 350 aa, Candida albicans
MRPIKLMGHERSLTQVKYNREGDLLFSVAKDNAASIWYSSNGERLGTLEGHQGVIWSIDVDPETHLCATGGGDLAIKLWKVENGQCVYTWDSPSPVRRVAFSPDGKKLLAIADQVMGHIGTVSVFDINDDDATLSQQKAEPSLVIETKSEGSKATVAGWSGDGDYIIVGHDNGYVSKYDSKTGKLVTSLQAHGIHNEEKNVSITDIQFAPEDRSYFITSSKDKTATLIDVDTFEILKVYKADAPMNTAAITPVKDFVILGGGQEARNVTTTAESQGKFEARFYHKIFEEEIGRVKGHFGPLNTVAVHPDGTGYSSGGEDGFIRVHTFDKSYQDFLFDAERTERAAAAGTI

SEQ ID NO: 7427 - protein, 431 aa, Candida albicans
MSQLPFIVGAPGKVIIFGEHAAVYGKPAIAAALSLRCYLLVSPSSDSNTIRLQFPDIKLDHSWNIKDLPWEEIKPYLTYDSANKPQIPSELVPEIVDKLSSFLNGFDNKMHYYACFCFLYLLMNLCDSKVSGMNFIVRSTLPIGAGLGSSASTSVCLSSALALMGGWINKPSLHENDKLDTADIPDLEFIDKWSLIGEKCFHGNPSGIDNAVATFGGAVMFQRTSTPEQPSIRTNMRNFPAIKLLLTNTKVPKSTADLVAGVGRLNAEFNSISTSILTAIEHLSQEAYKVMMNPMFGKEETNVLRKLVNINHGLLVALGVSHPALETVKIIGDKHRIGATKLTGAGGGGCAITLVNDDVEESVIHNAIKEFEDSGYESFETSLGGKGVGILFHEDLDDATKFSESQICNYVDRAAIEDSLGMANVKEWKFW

SEQ ID NO: 7428 - protein, 610 aa, Candida albicans
MAPPLYVKGGVWTNVEDEILKAAIQKYGIYQWERISSLLPKKSAKQVKARWVEYLSPLLNKTDWTKEEDEKLLNLHKIFPNQWRSISNILNRTAVQCVERYQKLIDEAAGIKPGDDEENLGLSGPGIETLPAVGASSGLAVGEMNLNPESKPARPDDEDLPDDEREMLAEAKARLGNIQGKKAKRKARERMLEESKRIALLQKRRELKSAGINVKLTTRNKKKRKEFDYNADIPHEIIPQAGPYDTAEELKQNDFEKQQFGQQVSTKGISMKDIDDRIAKEESRRKKEVEKKKSERKREFNAAASLISEHEDSKRRKLNLPEPGTHNFEKTKSDVLTLTNQANNKLSEKEIARNQNKKRAAVAQLIKATFERLPPPKHETGEILPFVSTNILEFRNDVNANDISDIAGAKLPDETATNVSTLISRVVQRELPIPHPNNLRDLSTVKFDTLVDKLIAEECHRLIRSDYKQYHDTTINGVSTDKYDRDLLEKINQDIDKEFAQMDVSTVHSFEDYVLPKNFKVAESIIENLHTFHNENEKLTNKILQSTNYEDQRDQKLQQLTHLWRELSDVNLSYSIEKKLFELESSAIDKELLCLRSEIDKLNKKIETLR

SEQ ID NO: 7429 - protein, 471 aa, Candida albicans
MAPKRSKNQLRREKLKQRKLEKQAEEPDKSVNVEEPKTGPNSTTISIQIDDDPLYEQFQSVLNKFNNPQEIEITKQESTEDSKDLVYQNGDSSENESDDEDSSDENDEETQKQQQQLSKRQLRIQNKIPLAKLKSSVKSPQVVEWYDVDSKDPYLLIAMKSQPNIIPVPSHWSSKRNYLSSRRGIEKLPYQLPKYIQATGISEMRSGGRDHRTLRQQQREKVQPKMGKLDMDYEKLYQAFSKFQIKPRVFPYGELFEEGKHSNDELVTKAAKIKPGIISLEMRSALSMPQNDGTIPPAWVTIMRDIGKPPSYKDLVIPGLDIKYSNAGYKDRNSDSRREKLKHWGALNTAIESSDGEDDEEDDDGQDEESSVATDSIEVNTTFYPLEEDEVSEEPSLNDILAGLSSANDKPKEEKKLYKIIEERKVTDDDSLTGYTYDLKNDSVEEYSENEDSKNSEDTKNSEEEPEDFKF

SEQ ID NO: 7430 - protein, 154 aa, Candida albicans
MGKSSGKGKGGKNRRRGKNVNSGQKRELIYKEEGQEYAQITKMLGNGRIEVSCFDGIKRMGHIRGKLRKKVWMGQGDIILVSLRDFQDDQCDVVHKYNSDEARTLKNVGELPENAKINETDTFGADDDEEVNFEFGGADEDESEEDEELDIDDI

SEQ ID NO: 7431 - protein, 1091 aa, Candida albicans
MTVLPDEYHSALTQLLENLLSTDNTIRAEAEKSLDQNWTSKDNVELLLVFLAEQACQGNNDTIRAFASVMFRRMAIKSPKELQSVTDRTIGVIGEPARQQIRGILLAGFTSPQSNQVRHKLSDAISEVAKEDASPAGTWNELIPALFEATRNEDPSFRESAFRVFSASPELIDNSYIDEVLPVYNAGFEDANDDVRIAACTAFVAFFRKLPKNTWKLLSPLLPNLLNSLPRFLQNGQDHALASVLEALIDLVELAPKMFKDMFPTIIEFCSAVAKNKDLDLNSRMAALELLSTFAEVSPSMCKLTPTYTEQMVLITLSMLTEVCIDDDDAAEWNNKDDSEDEDEEPEYGAARQALDRVALKLNGQALAGPLFQYLPAMVSSSNWRERQAALMALSSAAEGCADVLMNEIPKILDMILPSLEDEHPRVQYAGCNALGQMSTDFADVIQRTSGDRILPALISKLTNKSVPRVQAHAAAALVNFSEAATKEVLEPYLDDLLNNLLILLQSPKRYVQEQVLTTIAIIADAAEKTFVKYYDTLMPLLVNVLRTDVGAENKLLKAKCIECSTLIALAVGKEKFAPHSQELIQLFGHIQQSATEDDDLVKSYLEQAWGRICKILGKDFLPYLPSVLPPLMLTAKASQDISLLEEEDAEELKLNEEWDVINISGKWIGVHTVTLDEKVTAMDLLRTYAVQLKEDFMPWVKEIAEEIAIPGLDFYLHDGVRGSAALTLASLLRCCVAATGNNSTEALTLWSKICNKLSESLCSEPVPELLIAYYTTLVESINVLAPNAVSGTQLQALSKAVNANMIEIYNRIKERDNAEDEYTEDVEEDEEEYTDEELLDEINKVIAVVFKNVKSNFLETLQILGPTISSFINDENTTVKFCGLSIVSDILEHCGPDSVPFKEMFVKVISESVTSANASIRQICTNAIGMAAQYGGDGYAEFCLSLLEPMFKMAMVPDARADENVYATENCVSAIAKVCHRFSSSVPNLDSLIDQWISLLPIVQDESAAPFAYMFLSELIDRNHPSVLKQVPKVVESVLQALAHASISGNTAQKVVISTRTLLGSIPHEEAVALLQKNPSDLDVVQKFFS

SEQ ID NO: 7432 - protein, 283 aa, Candida albicans
MFRNNYDNDSVTYSPTGRLFQVEYALEAIKQGSAAVGLTSNDYVVLVALKRNAEELGSYQKKIIKIDDHMGVALAGLAPDARVLSNFLRKQAMQCKMVFNRPIQTYKAVLSIADKAQENTQTYGSRPYGVGLLIAGYDETGAHLFEFQPSGSVLEYFGAAIGARSQAARTYLERNLEEIKKCDDVEKLVLHGLYALRDTLSQDVELTFKNTSVSIVGKDQSFVSYDDENVQQWLDKLDSVSNARNRDGDDDEDGDEQEEGNATQAQEGEGTEAPAEDRMETDE

SEQ ID NO: 7433 - protein, 295 aa, Candida albicans
MAILNSNPEVLLRKRKNADRKRIEKQEQIRERQLNKNKLKKKNQNKFIRAETLVSNHKSNELERKRIKSLIKKQKQTQQQQESAAADSGDAKLLFLIRIPNHTKGLKLPSKVYKILKDLKLTSVNTGTFVKADSQTMDSLKFIAPYVLVGQPSLTSIRKLFQKRARIMVPDEEQEQEKTTNEQEAGQSEDSESDTKQKIIKLDNNQLVEDKFGNDLGLICIEDLIHEISQLSDNFNSITNWLLPFQLNAPVNGWGPQAKLARLLKADENKQKISLAQDFKLQEVEDIDKIIDEQN

SEQ ID NO: 7434 - protein, 328 aa, Candida albicans
MSVILASAGYDHTIRFWDALTGVCSRTIQHPESQVNRLEITSDKRFLAAAGNLYVKLYDIRQTGNSGNGANGTTNTSASTSSSNQNNSNNNPVMTFEGHKNNVTSLQFQADNKWMVTSSEDGTVKVWDVRSPSVQRNYKHQCPVNEVVIHPNQGELISCDQDGNIRVWDLGENSCTHHLIPEDDVPINSLSVASDGSMLVAGNNKGNCYVWKMQNQRDATVLTPVTKFRSHSKYITRVLLSTDMKHLATCSADHTARIWSTEQNFNLETTLQGHQRWVWDCAFSADSAYLVTACSDHYVRLWDLSNSETVRQYNGHHKGAVCVALNDV

SEQ ID NO: 7435 - protein, 618 aa, Candida albicans
MGRRAKNKQGVPPTFDEFQASKLKNDTKRKRNGAKEQKNDLPVSKKPKSSTSSSKQTDRAESSKPKPKTKSKVTKDVEVEEEVENLPEVDLEELASAKKSLFDDSEEEELDDEFDVEGEEDFDSDEGERARPMFSDDEDEDLEDLNAENMELYSKRLDEEERLEAEEAEKELLEAETKQPRAKVLPTAEEEEEMAKGPQDVTMVRTRMLEVVKVLENFKELAEEGTSRTDYTNRLLKDICEYFGYSEFLADKLFNLFSPAEAMEFFEANEIARPITIRTNTLKTRRRDLAQALVNKGVNLQPIGSWTKVGLQIFDSQVPIGATPEYLAGQYILQAASSFLPVMALEPQENERILDMAAAPGGKTTYISALMKNTGCVFANDANKARTKSLIANIHRLGCKNTIVCNYDAREFPKVIGGFDRVLLDAPCSGTGVIAKDESVKVSRTEKDFMQIPHLQKQLLLSAIDSVDAHSSTGGVIVYSTCSIAVDENEAVVDYALRKRPNVKLVDTGLTIGKEGFTSYRGKHFNPKISLTRRYYPHTYNVDGFYVAKFKKIAPSPHDISKAGAKEKENAARAEAEEEGIIHGDFAEFDDEEDKEIMEKSKKHSLRKKGINPNATKK

SEQ ID NO: 7436 - protein, 1470 aa, Candida albicans
MSSRSARRKTLQQLKEARKTGRNVNVVESDTDDYNEIYDEVDEDTYRQHKRNQLMNDDFIVDDNGEGYVDNGADDWDDASRPNYYSDEENESMGSRKRRKKEDKTTKVAKTSQIRNFFKPMSGVSDSKKKLETNIDDILNDFGDDLDKKKNIPKAFSNSINKEVNNHNINKKKLKNTFSFSTSTRKTDKTTPKLDAFNASSDYTMDIDNFEDQPSSPFKLKSEVTPEAETEKENIDPEPTKNVFENPSESLKNQEKVNDNDDEDDSDDDIVYSRKPRAAVVKKNQVDTVSAVKANQLPSSPISKPVYTKFSNHTEKVSKDNIKDTSDSFKMFWFDYAEAENSLLLFGKIMTKEGKLVSGVVKVDGICRELFFLPREYRIVDDEEDKSKKLTAIDVLEEIQPLLLANYNLEELRAKPEVKKYAFELADIPKEAEYLKVLLPFNNETNRNIMPANIEGSTFRHVFGTNANMFESFIMQRNIMGPCWLEIRGGDFDAMQNASHCQVEVVVDRPSQISTIDKDAPSSPNLTVTAISMQTMLNAKTNKQEVVSVSLATYFDLPQDAPISEDIKPDDVFTLARPVGSVSFPPRLQQLAEKGGFQLRTCPSEKVLLNALAAKIKSLDPDVFIGHRLENISLDVLVHRMNDNNVVTWSALGRRNRRQWPYMINKSNSSYNNSLLIRDVFQGRLLCDIANEMGQSLTMKCQSWDLHEMYDVVCHKKHSPVEINYQNLKYAEDAHLFLMALKENELNVKQTAEIAFATQILSLSKQLTNIAGNAWSHTLSGTRAGRNEYILLHEFKRNNYIVPDKEDKTHKNTSYQQEARVENAEEDATTATSNKKPKYQGGLVFEPEKGLHKNYVLVMDFNSLYPSIIQEFNICFTTVNRDRFNITHDENKDMPILPERDTESGVLPRLLNTLVSRRREVKKLLKDPKNTPFQKAQYDIKQQALKLTANSMYGCLGYVNSRFYAKPLAMLVTNKGREILMDTRQLAESSSLRVVYGDTDSVMIDTGASSYQEAIKIGEQFKVQVNERYRLLEIDIDNVFKRLLLHAKKKYAAMNASINKATNEETATLEVKGLDMRRREYCQLSKDISTFVLTKILSDSDPETALLEVYDYLDDMKGKIQNNEIPIDKYKINTKLSKDPKSYPNGKSMPQVQVALRLREEGKVIKAGSVITYVITAAKDDGDNSTVAERARAIQELLSKKDPDLKPDANYYLEKQIFAPVERLLERIEGIDMVRVATSLGIDTKRYILRVKNSDANGEILPIESNISDKERFRATSYLVLHCKCGSSFRFGGIMAAETYKVTFNGVCCTKCNYTFPAIKLTSQLESMIRKHIALYYAGWLVCDDPACGITTRQISVYGKRCIGNSGRAMDCKGVMRYRYNDKQLYNQLLYFQSIFDVDKTKRGELRPLVDALEESKDKQLPKLPSGQVEALAEQNRELFGICQEVVQKYLGECGRRYVNMGSIFDFIRN

SEQ ID NO: 7437 - protein, 131 aa, Candida albicans
MSAEDIQMEDASNNSEQEQIQEQEYDINKIKILPGSSEDGTSASFQIIDEDHTLGNALRYIIMKNPEVEFCGYSIPHPSENKLNIRIQTYGNISAVEALHQGLDNLSELCGAIEDKFDDAIKAGGYSTKEP

SEQ ID NO: 7438 - protein, 251 aa, Candida albicans
MVNAILSKKKKLVADGVFYAELNEFFTRELAEQGYAGVEVRKTPSKLEVIVKASNTQGVLGEQGRRIHELTSLIVKRFKLSPEGIAIYAERVEERGLSAAVQAEALKAKLLSGLPIRRAAYGVLRFAMGAGAKGVEVVISGKLRAARAKSQKYADGFMIHSGQPTRDFIDIAIRHVLMRQGVLGIKVKIMKDPAANRFGPRALPDAVKIAEAKDEDEVIPAPTVKSYKQTAEDETETEAPVEAEAEVEATA

SEQ ID NO: 7439 - protein, 543 aa, Candida albicans
MDSDATNRFVPEYRRTNFKNKGRFQSDELRRRRETHQVDLRKQKREEVLAKRRNYANQGNESEDEEEYNPNANNDENQFYNKLKQDLPKMLEMIQAPDFDSQLAATVKFRQILSREHNPPIDLVIQSGVIPTLVEFMKEDHPDMLQLEAAWALTNIASGDSSQTRVVVEANAVPLFVQLLYSQSLEVKEQAIWALGNVAGDSSDNRDYVLSCNAMEPVLQLFNCTKMSLIRTATWTLSNLCRGKSPQPDWNIVSQAIPTLGKLIYSVDAETLVDACWAVSYLSDGTSEAIQAVIDARIPHRLVELLGHESTLVQTPALRAIGNIVTGSDYQTQIVINAGVLPALAPLLNSTKDTIRKEACWTISNITAGTTDQIQAVIDANLIPQVIRLLIHGDYKTKKEACWAISNASSGGLTKPDQIRYLVSQGCIKPLCDLLSVADSKIIEVTLDSLENILKMGEMDKEARNASVNEYALFIEEAGGMEKIFECQNNPNEKIYQKAFGIIEKYFSDDDGQIDDENIVPESYGNSFGFGMDSNQQQQNFQF

SEQ ID NO: 7440 - protein, 109 aa, Candida albicans
MSTIQNLNAFDPFADTGDSEAQPTNYIHIRIQQRNGRKTLTTVQGVPNEYDLKKILKVLKKDFACNGNIVKDDELGEVIQLQGDQRVKVSEFLTAQLQLPKKNIKIHGF

SEQ ID NO: 7441 - protein, 781 aa, Candida albicans
MNLRFFLPKRIIRMSSTTTTSAAKKPTVKQPQWYQPENKNNSKPTLKIYNSLTRSKNEFYPNKPGHITWYSCGPTVYDHSHMGHARNYVSTDICRRILQDYFGYNIKFVQNVTDIDDKIIIAARQQYLFEEKLVKNYKEINDELKTKAKEYLQFYVSKNLPEFEGDLAKDFITWSNDIKNLSEIVKDKPKFPMYVKAAKLAHESIYETKDISLEKFLDSIKDVAMPHLDKEFGATVTDPQVFRKLPSYWEKRYNEDMARLNVLPPSVTTRVSEYMPDIIEFVDKIVTNGYAYKTDDGSVYFDTVKYEHSQHDYAKLQPWSKGDMSLINDGEGSLSVSNTKRNASDFALWKASKPGEPAWDSKWGKGRPGWHIECSVMASDITGENMDIHSGGIDLCFPHHDNELAQSEAYFDNKQWVNYFMHNGHLHIQGQKMSKSLKNFITIDEALNDFSARQLRLVFALNAWEKPLDFKDSLISEVKSIESTFSKFFTNVRALNSDYKHKTENGGYVSRKITDIEKQLFNDLEQAQDEVDAAFNDNLSSGQAIRVLQDLISKSNNYIQLTSTGQTELRIEVLIQVTNWIVKILEILGFEARSDRLGWIDESEQTSVNGSSTEDVALPYVKALAQFRDSVRSLAINKAELNEFLKASDAIRSSLIGLGVSLDDRPDGTSLVKFLNAQEKQNLLDQQEAKLRLAAEKEKKKQEQAALNAKKEAEKLAKMKINPSDLFKDTSLYSEWDEQGLPTKDAKGEEISKSMKKKLTKQYQQQEKLYKEYLKTVEEAK

SEQ ID NO: 7442 - protein, 936 aa, Candida albicans
MSTSSYKKQDAYSSNVGIPDKMAVFQECLQQCNASPVNAKKCRQLLAKLLRWMYNGESFPAQESTTLFFSISKLCQHKDQSLRQLVYLTIKELSSISDDILMVTSSIMKDIQGNDAVYKPNAIRTLSKVLDPTTVNAAERLFKNAIVDKNPVISSAALISSYNLLPHAKEVVKRFTNETLETIQSYKSFPPTQFQLHEYYGSSTSNLPSTSYMYQYHALGLIYQLRNHDKMALMKLISSLSEGSSLKNSLSIIQLIRYINKILNDDQSLISHLYPILAGFLKHKSDMVELEACKTLINLQHLIKDDQFMAIVNTLQKLLGVPRTATRFAAIRLINKISIKHPEKIIVVNLELEGLINDTNRSISTLAITTLLKTMGAGTVDTGSVGGESVDRLITKMTSLMDEITEDFKIVIIEAIENLALKFPAKHKKLVSFLTDLLRDDGTLELKSSIVDALFDLIKFLPDANAKQLILMNLCEFIEDCEFTELSVRILHLLGDEGPHTSNPSYYIRHIYNRLVLENSIVRSSAVIALAKFAAVCGGEVSKNIVILLERCLNDVDDEVRDRAAISLNFINNGKKNLIVSDSKYDLNALESKLVHYLNNEENFSVKFDISEIKVISSEELKSIEYDRKISKLENSNVENNDTPEVEEQKGGAKVESAGDNVANDLLRQQEYAQELAAIAEFESYGKLTKSTSVPIYLTDKENEIVVSVVKHLFAESQKLVLQYNINNTLPHTVLQDISVIAQPDNELYQEDFIVPLAELKPDQTGIVYVSFSAPAIEDEELLSAFGNTVAYTNKDLDDEGNVDPTDDGWSDEYQIDDLELLAGDFIIPLYNSNFTSIFDQLPNQDSGVVNISNVDTIENAVNKVKTALNMMPLDGSDYVPSDITSHTLKLLGKDVWGGKVGASIRLASTGGKIVAKVEAKTETENFANVIISSVY

SEQ ID NO: 7443 - protein, 362 aa, Candida albicans
MYSASVTAPVNIATLKYWGKRDKSLNLPTNSSISVTLSQDDLRTLTTASASESFEKDQLWLNGKLESLDTPRTQACLADLRKLRASIEQSPDTPKLSQMKLHIVSENNFPTAAGLASSAAGFAALVSAIAKLYELPQDMSELSKIARKGSGSACRSLFGGFVAWEMGTLPDGQDSKAVEIAPLEHWPSLRAVILVVSDDKKDTPSTTGMQSTVATSDLFAHRIAEVVPQRFEAMKKAILDKDFPKFAELTMKDSNSFHAVCLDSYPPIFYLNDTSKKIIKMVETINQQEVVAAYTFDAGPNAVIYYDEANQDKVLSLLYKHFGHVPGWKTHYTAETPVAGVSRIIQTSIGPGPQETSESLTK

SEQ ID NO: 7444 - protein, 124 aa, Candida albicans
MNAPDRFELFILPDGVDKIKIIPDTKVPNAAIVKIEREDHTLANLLRAQLLKDDRVLFAAYKVEHPLFANFVLRIQTEDDYSPREALQNACSGLISELDVIKSKFNDEWALKALLNNTEDDFEY

SEQ ID NO: 7445 - protein, 371 aa, Candida albicans
MSSVASKKIITFEGHRNFRLRLVLATLSGKPIKITKIRSQDLNPGLKDHEVSFLRLLEAVTNGSHIEISYTGTTIIYRPGIIIGGDLTHNCPDTKSIGYFIEPMLMLAPFSKKKFSIIFKGLTNIAGNDTGVDAIKWGLLPVMEKFGVREVSLHILKRGSAPLGGGEVHLLCSSLIPQPLTIHALDIPKFSAIRGVAYCTRVSPSIVNRMIDSARAVLKPTGCEVNITADVWRGENSGKSPGFGITLVAESKRGWRIVTENVGSAGSLPEDSGELTAYQLLEEISNSGVVGRYQLPLALVYMTIGKEDIGRLKLQKSEIDENLVSVLRDIQEVFGTEAFFKDDAEELDSDDKFMTVSIKGVGFTNVSKKIA

SEQ ID NO: 7446 - protein, 323 aa, Candida albicans
MSKPVTLELPWVEKYRPKKLEDIVGNEETVERLKLIVQDGNMPNMIISGLPGIGKTTSIHCLAYELLGDEHYHQATMELNASDDRGIDVVRNKIKQFAQTKISLPPGRQKIIILDEADSMTPGAQQALRRTIEIYSNTTRFAFACNQSSKIIEPLQSRCAILRYNRLSDEEVLARLLEIIKMEDVKYNTEGLQALIFTAEGDMRQAINNLQSTVAGFGFVNDVNVFKIVDQPHPLVIQSILLSCLKDKDIDKALGLLDGLWYKGYSAIDIVTSTFKVAKTIPNISEQKRLDVIKEIGFAHMRVLEGVATYLQLCGLYAKICDL

SEQ ID NO: 7447 - protein, 209 aa, Candida albicans
MSEELAQKTEELSLDSKTVFDSKEEFNAKHPLNSRWTLWYTKPQTNKSENWHDLLKPVITFSSVEEFWGIYNSIPPANQLPLKSDYHLFKEGIRPEWEDEANSKGGKWQFSFNKKSEVNPIINDLWLRGLLAVIGETIEDEENEVNGIVLNIRKQAYRVGIWTKDCDESKLKTVGERLKKVLQLNDEQKVEFMSHDASNTRGAEPQIVL

SEQ ID NO: 7448 - protein, 968 aa, Candida albicans
MGVPALFRWLSRKYPKIISPVVEEEDHEIGGAKYENPNPNGEIDNLYLDMNGIVHPCSHPEHKKPPETEDEMFLDIFKYTDRVLMMARPRKVLMIAVDGVAPRAKMNQQRARRFRAAKDAELKAKQLEIEVQERELRGEIINDAIKGKKQWDSNAITPGTPFMDRLAEALRYWVAYKLSSDPGWANLQVIISDATVPGEGEHKLMSFIRSQRSDPQYDPNTKHCIYGLDADLIFLGLATHEPHFRVLREDVFASQDKKFTIKDQIADANSNGDTVAKEDKKPFLWLHVNVLREYLQVELFTPRMSFPFELERAIDDWVFLCFFAGNDFLPHLPSLDVRDNGIDTLVQCWKRSLPILKDYVTCDGKLNLKSVEVLMSNLAYKESEIFKNKHAAEQRREENNKRRKLAQEQERALKRVYSSQVSKGKDKAPLTADVNMPLMDTSGQNVEGYANLTNSDIVQNRAILTKANLANSDAAAELKKLIDSKKTQVTVVQDQIATDSSANSETTTSESELEEIQSDNSLKRKLEPEEDKQTQSDDIKLWEPGYNKRYYEAKFHYQSDEEIEQTKRDVVRHYVEGIAWVALYYYQGCPSWNWYFPYHYAPFAADFTNLEELFPEGVKFKLGEPFRPFEQLMSVLPAASGHTLPQVFRDLMSNPDSEIIDFYPEEFEIDMNGKKMSWQGIPLLPFIDEKRLLDAVQKKYELLTPDEKSRNTNKEAELFISPANKNFSKFSEKLYKENENEVTFKYAKSGLSGKIFKLGTFNPEGVFNFPLNEGYMPNVNNSDYFQAIYHFPKTKTGKSMILNGHIAPLPALTTADKNDLLYQLDKFNNRRNGGRFNSTLDNSDYINKGPAGKELYKTYSMRRGGYRSYLQYLTNGHHPDHQSQNSQYLSYGQQKPYGGQGSYNQQGYYNQQGRYNQQGNNYNQQGRYSQQSQYNQYRSNTQRFNNNQNYNQSSNNSRSGYLPPRPQR

SEQ ID NO: 7449 - protein, 466 aa, Candida albicans
MSETKNIESLILDAGPLITQPATTLQQYATAYYTTPGVHSELKDEYARQQLAIWGDSLKIKQPKQEYIDRVVKFAKLTGDYSVLSVNDLHIVALAYELECLNNGEDNLRSFPGEVLKNQQAENENGSNKMSNIIGDDDGFVVATKRRGGRRQREKAELRKKGLLPTFSPKPKGGSETEEPNESSNDKTIDETPQTDLIKGVDVQEQESQEEPVSESNTVGLDEITEEYNEDDDDGEWITPENLQEEIIKDKNEQVQESNTNGPLIKVALATGDFACQNVAMQIGIKLLNAMSGKQITRVRNYMYRCHACFRLTPMSKDGRPKHFCPKCGGNTLLRCAVSVDNKTGKITPHLKQNFQWIRRGERYSLPSPLSKNQKKLQGNGGYQHNKENRHKSLQTPLILNEDQKEYQRALKNDEWERKQQDKMLQEWIGGGSADNFVSPFGNTIRNSGVKVGRGRYANSSKKKRK

SEQ ID NO: 7450 - protein, 389 aa, Candida albicans
MSHRKYEAPRHGSLGFLPRKRAAKQRGRVKSFPKDVKSKPVALTAFLGYKAGMTTIVRDLDRPGSKMHKREVVEAATVVDTPPMVVVGVVGYVETPRGLRSLTTVWAEHLSEEVRRRFYKNWYKSKKKAFTKYSGKYATDAKQVETELARIKKYASVVRVLAHTQIKKTPLSQKKAHLAEIQINGGSVSDKVDWAKEHFEKEVSVDSVFEQDEMIDVIAVTKGHGFEGVTHRWGTKKLPRKTHRGLRKVACIGAWHPANVNWTVARAGQNGYHHRTSINHKVYRVGKGTDEANGATEFDRTKKTINPMGGFVRYGNVNNDFVLLKGSIPGVKKRVVTLRKSLYVDTSRRAVEKVNLKWIDTASRFGKGRFQTPAEKHAFMGTLKKDLEN

SEQ ID NO: 7451 - protein, 171 aa, Candida albicans
MAKSASNKKSIPTTSSSSTTTSAASSSVVLKEVKSTLTTTINNYFDTISAQPRLKLIDLFLIFLVLLGILQFIYVLIIGNFPFNSFLGGFISCVGQFVLLVSLRLQINDSTTTTTNKESDDQLELDEDKIENGTTGGGNGRLFKEITPERSFGDFIFASLILHFIVIHFIN

SEQ ID NO: 7452 - protein, 1448 aa, Candida albicans
MKEVVVDIAPKCIKGLEFGALSAKDIVAQSEVEIQTRDLYDLEKGRVPKEHGALDTKMGISSNAQECSTCHGNLASCHGHFGHIRLALPVFHVGYFKSIISVLQCICKSCAAVLLDEQSKRQYLNDLRKPHIDNLRRMKIIKKIIEQCKKQRRCLKCNHINGVVKKAASGAGPAALKIVHDTFRWIGKKETLEKTIWDEELDQVFIRNPELEKFAKRIHDDLNPLKTLNLFKQITPQDCELFGLDPAKGGRPEMYIWRYLPAPPVCIRPSVMMDSQSNEDDLTVKLTEIVWTSSMIRAGIVKGISINNLMEQWDYLQLSVAMYINSDSANPALSTGGGGAKSSKPIRAFCQRLKGKQGRFRGNLSGKRVDFSGRTVISPDPNLKIDEVAVPDRVAKVLTYPEKCTRYNKKKLQKLVVNGPDIHPGANYVMKQNEPGKRNLRFGDRVKLAKTLQIGDVVERHIEDGDVVLFNRQPSLHRLSILSHYAKIRPWRTFRLNECVCTPYNADFDGDEMNLHVPQTEEARAEAINLMGVKNNLLTPKSGEPIIAATQDFITGSYLISHKDSFFDRATLVQLLSMMSDADIQFDIPPPTIFKPVMLWTGKQVFSLLIKPNKKSNVVINLDAKNKTFHPPKKGLPNEMSPNDGFVVIRGSKILSGLMDKSTLGDGKKHSVFYTILRDYGPQEAAAAMNRMAKLCARFLGNRGFSIGINDVTPADELKQKKELMVEQAYLKCDQLIDLYNRGKLETQPGCNEEQTLEAKIGGLLSKVREEVGDVCIRELDSLNAPLIMATCGSKGSTLNVSQMVAVVGQQIISGHRVPDGFQDRSLPHFTKNSKTPQSKGFVRNSFFSGLTPPEFLFHAISGREGLVDTAVKTAETGYMSRRLMKSLEDLSSQYDNTVRNSSNGIVQFTYGGDGLDPYDMEGDAKPVNFNRQWDHAYNLTYNVDDASLLPYQIEELVDSVLAPLENKLIRYDNLGNALNDKEKEQKIEYIDQNDGERDFYKSIRDFLTKKSIRLALLREERGLKAYFTAPTEDEIVMDEDAVKVKAIDQLSKISSKAVKTFLEQCLYKYSRARVEPGTAVGAIGAQSIGEPGTQMTLKTFHFAGVASMNVTLGVPRIKEIINASKVISTPIINAVLVNDDDEIAARVAKGRIEKTLLEDVAFYIEDVYKDNLAYLSIKIDLETIDKLQLELNLENIAVAIANAPKLKIAQSDVSVTGKDRINVLVNIKETKTESLRNTVDPKNALFFRMQYLKRALPGVCIKGLPNIFRAVINIKDDGKKELLVEGYGLKDVMNTEGIVGTKTTTNHVLEVNQILGIEAARGSIIKEIDYTMSNHGMSVDPRHIQLLGDVMTYKGEVLGITRFGLSKMRDSVLQLASFEKTTDHLFDAAFFMKNDKIEGVSECIILGQTMSIGTGSFKLVKSSNCEKKALKKKPTLFESCCEVAASA

SEQ ID NO: 7453 - protein, 430 aa, Candida albicans
MVTLEDLENNQQQEENVIDQEILNSSTSDIINRTKLLDNDIKVMRSESQRLNHEKTVMLERIKDNQEKINNNKQLPYLVGNVVELLNLDADKEASEQGANIDIDAARAGKSAVIKTSTRQTIFLPMIGLVDPSKLKPNDLIGVNKDSYLVLDTLPSEYDSRVKAMEVDEKPTEDYSDIGGLDKQIEELIEAVVLPMKQADKFKNLGIKPPKGALMYGPPGTGKTLLARACAAQSGATFLKLAAPQLVQMFIGDGAKLVRDAFALAKEKAPTIIFIDELDAIGTKRFDSDKSGDREVQRTMLELLNQLDGFGSDDRVKVLAATNRVDTLDPALLRSGRLDRKIEFPLPSEEARESVLKIHARKLHCDNNSVNWRELARSTDEFNGAQLKAVTVEAGMIALRNGKSIIKHEDFVEAISEVQARKSKSVNFYA

SEQ ID NO: 7454 - protein, 1234 aa, Candida albicans
MSADESMADPYQYDSIDEPITQEDCWTVITSFFQEKGLVSQQLDSFDEFVETSIQELVWEDSHLILDQPAQHTSEKDHENKRYEITFGKIYISKPSQTEGDGSTHAVFPQEARLRNLTYSSPLYVDMTSKVFKSDDNKRKDNELEWIQEEPDKDTETKVFLGKVPIMLRSKFCMLRDLAEHEFYELKECPYDMGGYFVINGSEKVLIAQERSAANIVQVFKKAAPSPISHVAEIRSAIEKGSRLISSMQIKLYGRDEKGVSGRTIKATLPYIKEDIPIVIVFRALGVVPDGDILEHICYDANDWQMLEMLKPCVEEGFVIQEREVALDFIGRRGVLGIRREKRIQYAKDILQKELLPNITQEEGFETRKAFFLGYMVNRLLLCALERKEPDDRDHFGKKRLDLAGPLLANLFRILFKKLTKDIYNYMQRCVENGGDFNVTLAVKSQTITDGLRYSLATGNWGEQRKAMSSRAGVSQVLNRYTYSSTLSHLRRTNTPIGRDGKIAKPRQLHNTHWGLVCPAETPEGQACGLVKNLSLMTCISVGTPSEPILGFLRDYGLEVLEDYVPSNAPDSTRVFVNGVWVGVHRDPAALVDFMRELRRSGDLSPEVSIIRDIREKEFKIFTDAGRVYRPLFIVDDNPDSETKGELKITKEHVKQLLRSDELDEDDEDYENSRYTWSSLVADGIVEYVDAEEEETIMIAMTPDDVKASKNSVSESEQQKIQLEEQELDPGKRIKPTTSGNTHTYTHCEIHPSMILGVAASIIPFPDHNQSPRNTYQSAMGKQAMGVFLTNYSVRMDTMANILYYPQKPLGTTRSMEYLKFRELPAGQNAIVAIACYSGYNQEDSMIMNQSSIDRGLFRSLFFRSYMDIEKRQGMKALETFEKPTRSDTLRLKHGTYEKLDEDGLIAPGVRVSGEDIIIGKTTPIPADAEELGQRTQYHTKRDASTPLRSTESGIVDQVLLTTNGDGSKFVKVRMRTTKVPQIGDKFASRHGQKGTIGVTYRHEDMPFTAEGIVPDLIINPHAIPSRMTVAHLIECLLSKVSSLSGFEGDASPFTDVTTEQISTLLRDHGYQSRGFEVMYNGHTGKKLMAQVFFGPTYYQRLRHMVDDKIHARARGPVQVLTRQPVEGRSRDGGLRFGEMERDCMIAHGAAGFLKERLMEASDAFRVHVCGMCGLMSVIANLKKNQFECRSCKNKTNIYQIHIPYAAKLLFQELMAMNISPRLYTERSVSGIRV

SEQ ID NO: 7455 - protein, 272 aa, Candida albicans
MPGLNFDNYQRNAFLTSKGFATPKATSTGTTIVGCKFKDGVVIAADTRATSGPIVADKNCEKLHRLAPKIWCAGAGTAADTEMVTQLIASNLELHALSQNRQPRVIAALTMLKQHLFKYQGHLGAYLIVAGVDPTGAHLMSVQAHGSTDIGKYQSLGSGSLNAMAVLETNFKEDMTRDEAIKLCSDAILAGVWNDLGSGSNVDVCVMEVGKDAELYRNYITPNVRIKKCKDYKFPRGTTAVLKQSIRDICDVEETVVNFNDNGDNMEVDTQA

SEQ ID NO: 7456 - protein, 86 aa, Candida albicans
MSSKQTKQTNLPPINLIFKFLQQQSVVTIWLYEQTQSRIQGKIRGFDEFMNIVIDDAVELSNGKKSELGRILLKGDNITLISSLDV

SEQ ID NO: 7457 - protein, 799 aa, Candida albicans
MSTKTDISTEELVSLFSKAGFEEKKSAEIVKNKKVASALYNILGSNFPKTDDKKLSLLHQLAIHESKNGKVPNHDFIIDGIQKGDLKTALQVTEGIKYLQNNATVDKEKFDEASGVGIEITPEEAKVEISKYLDSIKTDLESKRYSILPKVLGEVKTQPSLKWAPPNLFKPILDEEFLARLGPKDERDVKKKEKKAKTPANAAATKKQDTGSEPERSMFSEGFLGDLHKPGEEPQMYPELLEEHKKFICDKVYTRFPPEPNGFLHIGHSKAIMVNFGYAQFNKGNCYLRFDDTNPEAEEEVYFNSIKEMVSWLGYKPWKITYSSDYFDELYELAIKLIKSDKAYICHCTPEEVKASRGLKEDGTLGGERVACKHRFQTVEHNLREFENMKNGKYNVGEATLRMKQDLNSPSPQMWDLVAYRVLNTPHHRTGDKWKIYPTYDFTHCLVDSFENITHSLCTTEFVLSRESYEWLCDALHVYRPAQREYGRLNLTGTIMSKRKIAKLVNEGYVRGWDDPRLYTLEGIKRRGVPPGAILSFINTLGVTTSTTNIQTVRFESAVRNYLDQTTPRLMMVLHPIEVVIDNLDESFSLDVEIPYKPGKDEKSMGYRKLTFSKHIYIDENDVRAEPADKEFYRLAPGQPVGLMRVPFNISFKSIEEKDGKKIVHVNYDEGVKAKPKTYIQWIPKDTAVHIKEVRIYNQLFKSENPSAHPEGYLKDINPDSEEVLRNAVVEENLKDIVAKSPMNIEIPGSAFNIKENKGNNTVRFQALREGYFCLDKDSKEDGLILNRIVSLKEDAAKK

SEQ ID NO: 7458 - protein, 275 aa, Candida albicans
MSNTETSKLYESVIEDVINDSRQDFENNGIDESTLQELRRIWCEKLTQSGVAKFSWDEEEEEEEPVEQVDVDVEVGQSAQQAAEQPQAAINDTGATESNTSATTETTVKKEATASNSGLPDAQLSYNTTDSLGIEIPSISREKANGTEGTDKNGDGDGGDNHGLIVPKIEQADGPIFFDNKQFKSNKKLSQVDGESEFDEFESDGDLSDDINSELDSDSDKEEEDDDEEETNFALCLFDKVQRIKNKWKSTLVAGIANINGKDYVFHKANGESEW

SEQ ID NO: 7459 - protein, 1157 aa, Candida albicans
MPPKRRRTLSTGAHDAAFNELLKPEYKGKKLTDEINTAKDKWNLLPAFLKVKGLVKQHLDSYNYFVDVDLKKIIKANELVLSDVDPEFYVKYLDIRVGHKSTSKPGVKEVILPPHECRLRDLTYSAPIYVDVEYTRGRKIIRHNDLEIGRMPVMLRSNKCMLEGMSEATMAQVEECPLDPGGYFVVNGTEKVILVQEQLSKNRIIVEADEKKGIVQASVTSSTHERKSKTYVITKNDKIYLKHNSISEDIPIVIILKAAGIVSDLEILQLVCGSDSNYQDLFVVNFEEAARLEVFTQQQALYYVGKRVKTIRRAGAPKLSQLQEGIEAIATTIIAHLTVSDLQFREKALYIATMARRVVMAMHNPKMVDDRDYVGNKRLELAGQLMSLLFEDLFKKFNSDFKANIDKVLKKPSRTSEFDALLSINIHSNNITMGLNRAISTGNWSLKRFKMERAGVTHVLSRLSYISALGMMTRISSQFEKSRKVSGPRALQPSQFGMLCTADTPEGEACGLVKNLALMTHITTDDEEAPVKKLCIALGCEPIFALDSATLHVDGNFGVYLNGTLIGTTRFPVKFVHDFRHLRRVGKVSAFISIYTNTHHQAVHIATDGGRICRPLIIVENGKSKVTAEHLAKLINQEWSFDDFLTHGLVEYLDVNEENDSLIALYEDDITANPGAIVTHLEIEPFTVLGAVAGLIPYPHHNQSPRNTYQCAMGKQAIGAIAYNQFRRIDTLLYFMVYPQQPMVKTKTIELIEYDKLPAGQNATVAVMSYSGYDIEDALVLNKASLDRGFGRCQVVRKNTVQLKKYPNHTQDILAGMRVDENNKPIFQHQALGPDGLGEVGSRIFNGQVFANKCVPTNSGDSTLGAQQEQRAAESHREAPAFYKGPEPSYIDQVMMSVSDNDQALIKVLLRQTRRPELGDKFSSRHGQKGVCGIIVQQEDLPFNDSGISPDIIMNPHGFPSRMTVGKMIELISGKAGVLNGSLEYGTCFGGSKLEDMSKILIEKGFSYSGKDMLYSGITGECLQAYIFFGPIYYQKLKHMVLDKMHARARGPRAVLTRQPTEGRSRDGGLRLGEMERDCVIAYGASQLLLERLMISSDAFEVDVCNKCGLMGYNSWCTTCKSSENVIKMTIPYAAKLLFQELLSMNIAPRLRLGDVF

SEQ ID NO: 7460 - protein, 72 aa, Candida albicans
MIIPIRCFSCGKVVGDKWQTYLDYLQDETLSEGDALDKLKLKRYCCRRMVLTHVDLIEKFLRYNPLEKKDIN

SEQ ID NO: 7461 - protein, 888 aa, Candida albicans
MVNISDFFKNNSQSGSKRKAQSATSSNPTKKAKPAAPQAEREVIVLDDEDDDDDDVQVISKPAKKETDRRLTKRKASAINDEDDDDDDTRNKSHVQRSPKKETASSVPKASPKKKTSSTLKSTAATKKSKVPAGGDSTADTAQEILATIPDAELPEVDPTKKVNFFALNAARNETTQTSVELPEAQPNCLTGLTIVFTGQMPNLDRGTAEQTAKQYGAKVTKSISGKTSLVVLGADAGPSKVQKIKQHKIKAIDEAGFIKLLESMPADGGSGAAAEAAKLKREQEEAKIIEQAKEEERKEREAEKARVAERVKATVNPKGETFGFQKKEVAPQDKLWTDRHAPTDLNQLCGNKGQIQKLKSWLENWFDNQARGFKGNASDPDSFRAVLISGPPGIGKTSAAHLVAKSLGFDIIERNASDVRSKSLLNANVKSILNNTSVVGYFKHRGDTEKNSNNKRFCIIMDEVDGMSSGDHGGAGALSQFCKITSMPMILICNDKSLPKMRTFDRTTYDLPFRRPSENEVKSRLMTIAFREKVKLDPSVIGQLVQATSNDIRQMINLLSTVSKTQKQIGANSMKEVKESWQKQVVLKPFDIAGRLLNSGIWSDPRSSLNDKLNLYFNDFDFSPLMIQENYLITNPRLPGKQIELVAKAAEDISISDTVNSLIRSGEQQWSLLPFHGIMSTVKPSYEIAGQITGRLNFSSWLGQNSKQMKYQRMLQELQYHTRVRTSTTKQELRLDYLDALWQKIVKPLCDSGEDGFDEAIETMDEYYLTKEDFDNIGDMIKQDLKLPTQSKSAFTRKYNSMMHPTIIFKTGNSLNVGGKRAAAPKVDFEDVIDDDMEDVPDDDEDQDSDKIDTKKDKLIKVVPVGKSKSKSKSKASTGPAKKKQKR

SEQ ID NO: 7462 - protein, 148 aa, Candida albicans
MSGILFEDMFIVDSTDPGRYNKVCRITGHSSTSKDITITLDINKELFPVQNHDSLTITLASSLGNESSMITSNGSWRPPKPDERSLADDYDYVMYGTVYKFEENADNDKMAVYISFGGLLMRLEGGYRSLSNLKQENAYILIRHYKDN

SEQ ID NO: 7463 - protein, 242 aa, Candida albicans
MHRALYNSLTKTANACCVSRSVRFVAPQVSVCNPQRLAFRFNSTNASKEAAKEEAPKEEVKSEEEQSSGAESEAQEADPLAELKDKLEKKDKELASMKNHYARAIADFRHLQETTKTEVQKAKDFALQKFAKDLLDSLDNFNLALGHVKEDTLKLNDEVRSLYEGVDMTKTVFEKTLNKYGIEKIDPIDQVFDPNLHEATFQMANPGKEPGTVFHVQQVGYTLNERVLRPAKVGVVKSEDDN

SEQ ID NO: 7464 - protein, 428 aa, Candida albicans
MSADENDPLLQALNADTNNNQDSNNANAGSTTTSAPAEPIDPERERALSKFKDKLLEHRKWDARLKDLRLSIRDLDKDYEKTENDIKALQSVGQIIGEVLKQLDDERYIVKTSSGPRYIVGCRNTIKKENLKNGVRVSLDMTTLTIMRILPREVDPLVYNMTTFEPGEISFNGIGGLTEQIRELREVIELPLKNPELFTRVGIKPPKGVLLYGPPGTGKTLLAKAVAATIGANFIFSPASAIVDKYIGESARLIREMFAYAKEHEPCIIFMDEVDAIGGRRFSEGTSADREIQRTLMELLNQMDGFDTLGQTKIIMATNRPDTLDPALLRAGRLDRKIEIGLPNEAGRLEIFKIHTSKVAKQGEFDFEAAVKMSDGFNGADIRNVVTEAGFFAIRDDRDYILQNDLMKAVRKVADVKKLEGKLDYEKL

SEQ ID NO: 7465 - protein, 330 aa, Candida albicans
MSTTATSTNELALLDKSVVVSPLVLLSVVDHYNRVAKDSKKRVVGVILGDNSTDTIKVTNSYAIPFEEDEKNPGVWFLDHNFIDSMGEMFKKINAKEKLIGWYHSGPKLKPSDLKINEVFRRYTDNPLLLIVDVQPREVGIPTDAYFAVDDIKNDGSAAEKTFIHVPSLIEAEEAEEIGVEHLLRDIRDQAAGNLSLRVSETHQSLLGLHQKLGEIANYLDKVYQKKLPMNHTILGKLQNVFNLLPNLMQQSGSDLDGGSDSSHALATAFTVKTNDELMIIYISTLVRAIIAFHDLIENKLENKKLNENKAQASVAESSLNSEKKDSIEE

SEQ ID NO: 7466 - protein, 466 aa, Candida albicans
MSSTGENKNQIKIKFFTNEEDESLQVADTPLYVPVTLKRFGLSEVVNHLLGNFKGEDETKAPIPFDFLIDGVLLRTSIEDYLTKNGLSNEAFLTLEYTRAILPPSFLASFNNDDWISSIDSINPTTKIVTSSQLSISQPKILSGSYDGIVRTYNMSGKVEKQYVGHSAPVKAVKWISPTRIVSAGNDRQVRLWKTSYEEIIDEDEEEIEDGKTLALLEGHKAPVVDLAVDTQTNRILSAGYDQNIGFWSTNYKEMTSIQPLEYDSNVVSSSSKKRRKMAVQDATIRRRAPLSLLQGHSEPVEGVIFDAKDSTVGYSVSQDHTIKTWDLVTSRCVDTRTTGYSLLSVLQLPQVNLIASGSSARHINLHDPRVTTTSDQTISKLVGHTNFVVGLTASPHNQNMFASSSHDGTVKVWDVRAEKSLYTITRQDGSTNAKIFDVCWDDRIGIISGGEDKKLQINKGSDIAK

SEQ ID NO: 7467 - protein, 205 aa, Candida albicans
MSSEKEYKPVTVDKPIPNTYDLGNLATFDPNPLDNEKLLSKDESIKEDHLQSVTRDNVQLLINQILSLPVKITTETHGSSTGQNSTMTLIQLPEPTTILPREKPIPKAKPLTKWQQFAARKGIKPKAKDGKMVYDEDTGEWVPKWGYKGKNKSIDDQWLVEVDDKVKNTEDELIDPRTLKRAERKKLIKKNELQHKRNLRNQGAV

SEQ ID NO: 7468 - protein, 516 aa, Candida albicans
MAYVLTETAAGYALLKAADKKIHKSSSLVEDLNTAEKVAEQFKIHRFEKFQSAANALEEANAIIEGKVSENLQKLLEDAKSDKKATLIVSEAKLGNAINKLGLNFQVVSDAASLDLQRAIKQFLPELLPGLDDSALKQMSLGLAHSMGRHKLKFSADKVDTMIIQAIALLDDLDKELNTYAMRCKEWYGWHFPELAKMITDSAAYARIILTMGVRSNASETDLSEILPEEVEEQVKAAAEVSMGTEITEDDLNNIKALAEQIVDFAAYREQLSNYLSSRMKAIAPNLTAMVGELVGARLIAHAGSLTSLAKAPASTVQILGAEKALFRALKTKHDTPKYGIIYHASLVGQASGKNKGRIARTLAAKAAVSLRYDCFDEERDESDDFGLENRAKVEGRLSQLEGRDMRTTSKVVREQPKVEITEARAYNADADSTAAAAAAAPTADSDDEESETEEVEEKKSKKDKKKDKKEKKDKKKDKKRKRDDDKEDKESSKKSKKDKKEKKEKKEKKAKKEKK

SEQ ID NO: 7469 - protein, 969 aa, Candida albicans
MIKTLLRRMSSNTTIPTPNGSNHWTASKVRSTFLDYFKKQQHTYVPSSSVVPHNDPTLLFANAGMNQYKPIFLGTVDPASDFASLKRAANSQKCIRAGGKHNDLEDVGRDSYHHTFFEMLGNWSFGDYFKKEAIDYSWELLTKVYGLQEDRLYVTYFGGDEKQGLEPDLEAKNFWLKVGVPEDHILPGSVEDNFWEMGDQGPCGPCSEIHYDRIGGRNASALVNMDDPNVLEVWNVVFIQYNREADGNLRTLPNKHIDTGMGFERLVSILQNKYSNYDTDVFLPIFDKIREITGVRPYTGKFGNEDKDGIDTAYRVIADHVRTLTFAICDGGVPNNEGRGYVLRRILRRGSRYVRKYMNYPIGGFFQQLVDVVIEQNKEIFPEISSGAQDLKEILNEEELSFAKTLDRGEKLFEQYAIIASKTPEQTLSGKDVWRLYDTYGFPVDLTRLMAEEAGLKIDEEGFERAKEESREASKGSGTKDGKTLVKLDVHALSELDQNDAIPKTNDEFKYGLENVKAKVVGIYDGSKFVDSIEDPSIQYGILLDKTPFYAEQGGQEYDTGKLVIDGKSEFNVANVQVYAGYVLHTGNIVDGKLNVGDEIIATYDELRRWPIRNNHTGTHILNFALREVLGDGVDQKGSLVAPEKLRFDFSHKQAVTAKELEKIEAISNKYIKNNDKVYYKDVSLTKAKEINGLRAVFGETYPDPVRVVSIGVSVDDLLADPTNTKWHEISIEFCGGTHVAKTGDIKDLVIIEESGIAKGIRRIVAVTGHDAHHVQKVANEFEQEIDNASSLPFGVAKESKSKELGVALKKLSISVLDKQRLTEKFNKLDKSIKDNLKAKQKEETKKTLDVVNNWLNDKENASSFLVAHVPITANAKAITEAINLIKKQDKTKSIYLLTGETDKVAHGCYVSDEAIAKGINANELAKAVSENIGGKAGGKGNIVQGMGDKPQGINTAIEEVTKLFKEKL

SEQ ID NO: 7470 - protein, 1665 aa, Candida albicans
MDISKPVGSEITSVDFGVLSDEEIRKLSAKQITNPIVFDNLGHPINGGLYDLSLGAFLRNVCTTCGLDEKFCPGHLGHIELPVPVYNPMFFNQLYIFLRSACLYCHKFKLNQLEVHNFECKLHLIQYGLLLECVELDNIMAKSSKSSSVIDVDGEDNDDEEGGGSVDEKSKKDLMKRRELFVKNAIESALKDGRTNHKGVVTASVSEERKATIHEFYKRLLSRPKCTNCGMYSPGFRKDGFTKIFENSLTDKQITNNRVKGLQRPDMIKKNAGNGNGNSSSTGAASDLPNIKHKGGSKYVLSTEVRNILRSLFHKEQAILQKVFHSRPYQHDPISGDLFFKQSVLVPPTRFRLPSKLGDEIHENAQNELLSNIIKTSVLIRDLNERITNMYKEKISGEDKKIIFNRLMNAFVTLQNDVNAFIDSTKNQNAPAGKIPNPGIKQALEKKEGLFRKHMMGKRVNYAARSVISPDPNLETNEIGVPPVFAKKLTYPEPVTSYNASELRQAVINGPDTWPGAIQVQNEDGSLISLIGMTLEQRKAIANQLLTPNGGNSVVGKKVYRHIKNNDVVIMNRQPTLHKASMMGHKVRVLPGEKTLRLHYANTGAYNADFDGDEMNMHFPQNENARAEALNLANTDNQYLTPTSGSPLRGLIQDHISAGVWLTNKDTFFNRETYQQLIYGCIRPEDGHTSKNRIVTVPPAIYKPEMLWTGKQVITTVLLNIKPDNVPGVNLISKNKIKSDYWSESSTENEVIFKNGELLSGILDKSQYGASQFGIVHSLHEVYGPTVAGKALSVLGRLFTNYIMMTAFTCGMDDLRLTDEGNTWRKDILKQSVDIGRVAATEVTNLDEDTKNNNKELLRRLEEILRDDNKLGILDALTQSKVNAITSQVVSKCVPDGTMKRFPYNSMQAMALSGAKGSNVNVSQIMCLLGQQALEGRRVPVMVSGKTLPSFKPFETDARAGGYIKQRFYSGIRPQEYYFHCMAGREGLIDTAVKTSRSGYLQRCLTKQLEGVHVSYDNSVRDADGTLIQFLYGGDAVDTTKQSHMNQFKFCVDNYDALLTKYNPGDMTENIDTDLALSYSKKVRKSLKKQKDVPHYDQVIKYDPVLNVYNPAKYLGSVSEKFQEKLDTYVSKNPTIFAQSKEEAKSTGKITEKKFRALMQLKYMRSLINPGEAVGIIASQSIGEPSTQMTLNTFHFAGHGAANVTLGIPRMREIIMTASASIKTPQMTLPILADVNDEQADAFCKSVARVVMSEFVDKVVVTETTSQDVDGSNSRSYVIGLKFYTKEEYETEYDISQEQLEDVITSKFLHALEGQIVKEVKKQKKPDYMPTVGKSAGKTDMETVSGKIKEIDNDDDDEDNEVDEDHDEEQAKQNVKQQVSYEGPDDDEIETMKKAEETSDEEMDGDNSSSSDDSDSDSDNEEDADADVDMDKPSKSELSRSAKDRQSEVIASHNMVTQFNFDDELGEWCEFKLELNGNETQKLLMVNIVEDLLRKVVVREIPHIGRCIRPEPDAKTGKRILTTEGVNFRAMWDQDDFINVNGITSNDVYAVLKTYGVEAARNTIVNEIYRVFDTYGISVSSRHLDLIADMMTREGTYLAFNRQGIDSSTSAFMKMSYETTCQFLTKAVLDGDREELESPSAKIVMGKLSNVGTGSFDVFAQMPRL

SEQ ID NO: 7471 - protein, 200 aa, Candida albicans
MSLNISLYTISAVLILDNEGNRLFAKYYKSSLGEDSANPSSKFPHQFDTQQQQLNFEKSLFSKTYKVNQDILLYDNHLIAYKQTNDLLLYLVAPLNENESLIYSTMNNLFEALTILLDNTVDKQTILDKYDMVCLAIDETIDDGIIIEYDPATIVSRVTNPPSAVYENVNLKNIDISEKGLFNALSFASKKLGERLQQGL

SEQ ID NO: 7472 - protein, 304 aa, Candida albicans
MEEIHISSSILQDSDSAPPNHFQHAQQQEQPSWKKLLYLQQPFPDNYTDQSFLSQLKRNTTVAKYSYKNLVQAFSFIVFYISCILLVILMFIGIYEKQWDPIIPTLISTGISLVGFFSLKNLSMNMRSLMVITFILLIVSPILKSLTKSTSSDSIWAISCVLCLANSIFHDYSMKVSYRPIVSTNISLSNAIVLASRLSTTLDVFLFVLFAIEVNILLPLFDAKIRLSGLETIHWPIAFLTFNLTSYLMYILLNYKFLVYWILSVFVMVVIMPIYFLSLQRYKNEIQGPWDVAKPKLMKSSIQS

SEQ ID NO: 7473 - protein, 293 aa, Candida albicans
MSAPTPPQTGQFQVATSAQRSPVAVNIVNYLFQNPILKQRTGLLDNTNDIEFFRFKRLQRALLSDDYKQKQQNPKNGLIPVANNEDVQKVFVLLIQNQLLLPLQKLHYAEVKAVKGWKPNKEKPTLKRADKAVMDPDVYYGWLYQKPNPYILLYSFLAIAGVFAVILFPLWPNFMKRGVWYLSMGALGLIALFFATAIVRLIIYIISLVAFPKPFWLFPNLFEDCGVIESFQPVYAWEEPKKKKGKKKKEPKLEVVEEKVGSSSGDVKVTGSELSNGSSTTGKRKVTLEEVEE

SEQ ID NO: 7474 - protein, 284 aa, Candida albicans
MSSEYAKLVASLSNQDILTKWPEVTPLKKISGIPRSAGSDSSDSDLFDGHDEEQIRLMEELCIVLDYDDKPVGAGTKKLCHIMDNINAGLLHRAFSVFLFNEDGKLLLQQRADEKITFANMWTNTCCSHPLCVPSELGVDSSLEGSKDVNNLTNAVKGAKVAAQRKLEHELGIPFEDAPIENFTYLTRIHYKSPSGDESSKWGEHEIDYILILKTKNDITVNANYNEVKDFKYVSADELKVMFEDDSLVFTPWFKLICQSFLFKWWDNLDNLDQFKDEEIHRLL

SEQ ID NO: 7475 - protein, 494 aa, Candida albicans
MSSHLFKATVNEYLEGLPKTVQSKLYEAPATCLSIFRLLSPMAKFYIMSMIFNEKPIALRDLDKWCKPSARKLEFEALKRLESLHLIEYDSKGSHVRLHSIFRKNFRDCLTGSQNPNAFGSISTTVDKHKVDIPFLDLFASQKWETILHFMVGTESTATPSDSVLSLLKLGGLMEGPNNDLRITNSGFQFLLQDVNAQIWTLLLQYLNLTQELNMDPVDVLNFIFVLGSLELGKSYSVLSLSETQVSMLADLKDYGLVYQRSDTSGRFYPTRLATTLTSDSAALKTPSMAMDEEEQQVATKESIITETNFKIYAYTKSPLEIAILNLFVHFKTRFANMVCGQITRESIRNALYNGITADQIIKFLETHAHPQMRILAKEKLDKKIEFDTSHNINTAGGAPQSKTDGMVSQHKLEILPPNVVDQIKLWQLELDRIQTFDGYLFKDFSNQQEYDILSNYASELGVLIWADKVKKKFFVTKDGMTQVADFANRKLKR

SEQ ID NO: 7476 - protein, 298 aa, Candida albicans
MPMQKEFRTSAYHSRFQTPFRRRQEGKTDYYQRKRLVTQHKAKYNSPKYRLVVRFTNKDIIAQIVSAHITGDVVFTAAYAHELPRYGIKYGLTNWSAAYAVGLLVARRALQKLGLDETYTGVEEVEGEFELTEAVEDGPRPFKVFLDIGLQRTTTGARVFGVLKGASDGGLYVPHSPNRFPGWDIEAEELDAELLRKYIFGGHVAEYMEELLDDDEEKYKSIFKNYIEEEIESEDVEEIYANAHEAIRADPSFKPTEKKFTKEQYKAESKKYRQQKLTRAERQAKVAKKIAEFKAQQE

SEQ ID NO: 7477 - protein, 181 aa, Candida albicans
MRPLTEEETKVVFEKLANYIGRNISFLIDNPENPHVFRLQKDRVYYVQESIAKFATSVSRQQLMSLGTCFGKFTKTGKFRLHITSLPYLAQYAKFKIWIKQNGEMPFLYGNHVLKAHIGRMSDDIPEHAGVIIYSMNDIPLGFGASAKSTAEARNLPPTGIVAFRQGDIGEYLREEDTLFT

SEQ ID NO: 7478 - protein, 498 aa, Candida albicans
MATNTITTTKVTTTTTDVTGLSLIAAHSHISGLGLDDNLQPKENAQGMVGQLSARKAAGVILKMVEAGKIAGRAVLIAGPPSTGKTAIAMGLSQSLGNQVPFTALAASEVFSLELSKTEALTQAFRKSIGIKIKEETEIIEGEVVEIQIDRTITGGHKQGKLTIKTTDMETIYELGNKMIEGLTKEKVLAGDVISIDKASGKITKLGRSFTRARDYDAMGPETKFVQCPEGELQKRKEVVHTISLHEIDVINSRQQGFLALFSGDTGEIRPEVRDQINTKVAEWKEEGKAEIVPGVLFIDEVHMLDIECFSFINRALEDEFSPIVIMATNRGVSRIRGTDYKSPHGMPMDLLDRSITIHTTSYTADEIRTILSIRATEEEVELSGDALALLTKIGQETSLRYAANLISVSQQIALKKKNNTVDLQDIKRAYMLFLDSDRSVQYLEENADQYIDDYGRVTIGQESTDGSTQPQAKQQEVAQPEATQPQSQPEDDKMETD

SEQ ID NO: 7479 - protein, 203 aa, Candida albicans
MTEKSSQFQFPISLSSPKSKTVNTPRISKLRSSIMFRLIPRLKPIIPSINRISLSVKPQPSTSQHCHTLRAFHTSPISLHGHLKKPNPGEELHITFITKDGKQLTYEVAEGDNILDIAQAHNLDMEGACGGSCACSTCHVIVDPEYYDRLEEPDDDENDMLDLAFGLTETSRLGCQVKMTKELDGIRVALPAMTRNLQSRDFN

SEQ ID NO: 7480 - protein, 910 aa, Candida albicans
MSSPPQSTNQNNSNPAQDSLERESGSISQSQQPPIVSSPLFFNSSNPGSDIGNFNSQSQSQSQRRNDISSPLHYTSSAQPTSDIGGFDSQRSARVQDVGRIMRRAQRSDVTDSVSSPQRSRRYFTQGRGNGPSNLNSSTSAQFSTDPAEPNDEPVRVIWGTNVSIQECSNIFRDFLLSFKYKYRRELEEQAIEPEDHELYYVNQLNNIIELGLTNLNLDAKNLLSYPSTRKLYYQLINYPQEIIPIMDHTIKDCLIQIINDANATTSPAQSKLDEIETNVYTIRPYNVNLVEKGIRELNPNDIDKLVSVKGLTLRSTSIIPDMKVAFFRCNACGHTVGVEIDRGVISEPTKCPREVCGQTNSMVLIHNRSSFSDKQVIKLQETPDLVPDGQTPHSINLCVYDELVDSCRAGDRVEVCGIFRSTPVRANPRQRALKNLYKTYLDIVHVKKIDKRRLGGDVTTLEHELAEKDQEVEQVRKITAEEEAKIKEISERDDLYEILARSLAPSIYEMDDVKKGILLQLFGGTNKTFTKGGRYRGDINILLCGDPSTSKSQILQYVHKIAPRGVYTSGKGSSAVGLTAYITRDIDTKQLVLESGALVLSDGGVCCIDEFDKMSDATRSVLHEVMEQQTISIAKAGIITTLNARTSILASANPINSRYDPNLPVTGNIDLPPPLLSRFDLVYLILDKVDESIDRQLARHLTDMYLEDAPETVNANSVLPVELLTLYIQYAKENFNPVMTEEGKNELVRSYVEMRKLGEDARSSEKRITATTRQLESMIRLSEAHAKMRLSERVELIDVKEAVRLIKSAIKDYATDPVTGRIDMDMIQTGTTAQQRRVQEDLVSEIMKIIEENNNLIRFNDLSVKLNERSSFRVENSVINEGLRRLQQEGKIMETGDSHRRTIRKIAIV

SEQ ID NO: 7481 - protein, 395 aa, Candida albicans
MSEVKNELETETTPAPAKKQRLSNDDLYRNSTQYELWSFTQETLQDAKREANEKGVKISKERFKSAFENAKKEHPDAFEQFPDELNENMVSLLTLEEESTYLDFYIQNITTTCNFFKMPTQVRLTAASFFKKFYLVNSVMEFHPKNVLYTCIFLAAKSENYFISIESYVKALKGTDTSHILDLEFIVLQSLKFTLLVHHPIRALYGFFLDFQAVLLHPEQVMYDVSVDTLGNMYNQAKEWLNKYFMVSDVAFLFTPPQIALAAMYDTDKRITDKYLRRKYLGNEEKLDPIKEQENENEKQNGEDKSVVASEEASKDVSKEKTKSSNRQQYETLVTLLRKCVKLAKQSRVADREASKEIDKKCFFALNPKKLIDKRIKRLTLGNQDVAKESTVEPS

SEQ ID NO: 7482 - protein, 428 aa, Candida albicans
MTYTAPAVVIDNGSYTTKAGFSSEDLPSLVFNSNYMKHDKTQQVIIGDESMENNSEQQVMKLLDDGLIYDFDNIVYNWQYVFDNVDNNNPINSSEFPLVVTEQPWNTSKNKVNSCQVAFETLQVPIFSLVKTPLAQLYRCGKSTGLVIDIGSSVTSVTPILDGVIQSKCSYHSKYAGDFVNLHVLNYLESKTAINSLLPSKFANSSESFKQYYISRNILQEYKNLSLNYQIKDYQLYNHEFINVSDQQNYLENLFDPTLNKLPNIHIPEPSIDKPGSHGLTNLVFLALKNLESTLLPQNTNDNTSQNRYQKFIEIFKLLLSNVLITGGTSAANGLPDHIINDLRALTQKYFPNYPFSYAVQQIRPSNTENAEIWDRQFGAWFGACNLASMLNDNDEKSNSAKIALDNWFITKADYEELGEDLVAEKFK

SEQ ID NO: 7483 - protein, 1107 aa, Candida albicans
MSIRRYSGNSPRINDYDSRTVDESLYSLKEVYNTIKYDWPQMLREDANPIEMAVALLDDTSVGLAHRLQEFNMLKESSEQALRSVVNEHYDLFNKSMGSYNTLLSTMKNSQEDSLEIKNFLEYSNKEVHDRSAVLGELSSASAKYSEMIEVLDAMPEMNEIPGKIDQLVIDKKIHEVYDVISEGYKTAEKYNLWSLPAMNGIKTYLEEQSNKLFDMIIDELQNEIYLKYNRNPQEGAIAWQNIIHSSNPQLTSFVTLLDSKNLEQFIFNSANLDISEVVDFLTSPVKNFIVNQLPDLHAHNSKNDGVIDYKILLDSTSNPNTESFYYIYMLLLTASKLNRLNQAVEVLLDTNQSELHGLINRTTEAVKSRNGHALSKLSKMQHLDHGSLFDVIVHGSFSDSAVVLLQDLFGSIFIRCLATFQRHKVITQIVTLLQEGKAPSTPKAVAESTPTFDSPQMGRPDTFHARNLFTIWKTIQKELKALMLNYIYDDHNYKLHSLADTTGATNRNKISNALGKKELFKFEDVTYNPSNKTTKEILDVLADVFPGYSISDDNNNGAIIETATPYVKHESFNATVEVLVPKNLFNMRIILEFFLIFIDGSQRIFFDFEDEKTRGVHARTSFHFFEDFMKISFLSYLRNTIEFNFGEQVGGAYSMKIEQAMPVNSGLKLDLISLSQDSNFKILGNAVSNVESNLIIYENAYNFKKMFLELCLILNTSLSYRENFSGAVLKTLENFSNEYNKLYQELLSTGEGTNIVRPPSRVSKWMKIPVLTEISGKILQRGVQGETANELQELIESESKVVLHDETVTHQEDLLDHEAYAQIVYLLLTTTWILSWLPLVKKESNYSIYDDEQNKTIKVSTVDKLRYNWSFLENGRQAINFTPDGTDIVQYNIYLALNSEKIGEFNNIIHNFESIRDKTLLALRYELRCKAVYFVTMSFKHVDWCPVTEPGDADHFIVNLNQEIFAMDNKLSKTVSDIERESIFLGFSQFLNDLIITRSKAVRKINSNGIKRILLNISTVQQMLRNLSSNPETIDFTKASEYFEMFTMNEFNLLKFIKSKRDNYTKDAYHTLARLIYSEKLADGNGSSFNKGKYNDLIKKIDGIFD

SEQ ID NO: 7484 - protein, 363 aa, Candida albicans
MEAISDRLFNENANTIESGNDDPSLLTIILDLSMKGWYNIKEMISIQDITKSLLVFLNGHLSLNNSNQVAFLVSSTMGSKFLYPDLTMVGNPNVSEHSEHFPDMYRSFKMVDQSVLQQLNEYIEEIIKFETRNEKKGFNCLTGAISMALTYTNRMLTLDQSITTTTAAAMTASTLESTSNNNNTSGTSGSSSTSSSTSMKSRVLIVSANDDDDLRYIPLMNCIFAAQKMKVSIDVAKLGHNNSSYLQQASDATKGVYLHIEDPKGIIQVLSTAFFIEPNLRPYIILPTNSNVNYRASCFITGKSVDLGYVCSVCLCIMSQLPQSGKCPACDSEFDKKIIQDLNREPPVISKKKRKLENGSSTK

SEQ ID NO: 7485 - protein, 148 aa, Candida albicans
MGSVFLPHLKTAWHVDQAILSEDDRVVVIRFGREEETQCMIMDEILFSISEKIKNFAVVYLVNLDKVPDFNQMYELDQNPLEPFTIMFFYRNKHMMCDFGTGNNNKLNFMIYDKQEMIDIIETVYRGARKGKGLVMSPKDYSRSAKDI

SEQ ID NO: 7486 - protein, 285 aa, Candida albicans
MNSIAQRYSHASQNDIVKEINSVHESLSSSSNIPQLELAPSIAIPPISQPTDFLRAHTDDSVNPDCKIKIAHGTTTLAFRFQGGIIVAVDSRATAGNWIASQTVNKVIRINPFLLGTMAGGAADCQFWETWLGTQCRLHELREKERISVAAASKILSNLVYQYKGMGLSMGTMVCGHTAKEGPTIYYVDSDGTRLKGDVFCVGSGQTFAYGVLDSEYKWDLSVEDALYLGKRSILAATHRDAYSGGSVNLYHVTEQGWTYHGNFNVGDLFWEVKEKEQSFVNVDG

SEQ ID NO: 7487 - protein, 215 aa, Candida albicans
MLQSNPVIHPNTSNRHFKFEPFLRQEYNFGLDPDRPVCQFYNPLNPDNSCPQGNNCPNKHVSAMYSNKIVCKHWLRGLCKKGDHCEFLHEYNLRKMPECLFYSKNGYCTQTSECLYLHVDPQSKIPECLNYNQGFCSEGPNCKNRHVRRVLCPLYLYGFCPKGPECEFTHPKFDFHNLNLRIRPDNLIQMTSKHVDNSKEESDKKEDSEPKEESI

SEQ ID NO: 7488 - protein, 400 aa, Candida albicans
MEIESDIPKIPDFQLSEKQFLLQHTDLEEKDRQHIIEEILQAIKKDHLAPYYHYLHTEISDFPYDESLYRELASENEKVIEELKSKIKEAEDEEDTELDVASTTTKLAEYYTKIIDRKNATETFKKVLELTPNTGSKIDHLLTLTRIDFFFNDLPSVQKHLEQIGQLSEKGGDWERRNRFKAYNGIYMLATRNFAEAAKLLIDSLATFTSTELCSYEAIAHCAIVAGVLSLERVDLKNKIIDSPEILSIASTTPNLEPLLNLTNSLYTCEYNCFFQYLLESYEKLLLPNKYLYKHANFFLREMRCKAYNQLLESYKSLSLKSMATNFNISEEFLDQDLCKFIPNKKLNCTIDKVNGIIETNRPDNKNNQYHALIKQGDNLLTKLQKYGAAVKLSGAERVA

SEQ ID NO: 7489 - protein, 336 aa, Candida albicans
MSDNNIVGIEYNRVTNTTSTDFPGHQQNGDYSWDIEKFKNKFEIKITNLSERTGTFDLIHIDTSIANAFRRIMIAEVPSVAAETVYMFMNTSVIQDEVLAQRIGLIPWKIDPDKLTWVDETVDINDRFTEDNTIVLSLDVACSKNPHAPKNSTDPRELYKNSHVYAKDFKFEPHGNQEEKFKDTPVVPCDPDILLAKLRPGQEISLRAHCVLGIGSDHAKFSPVATASYRLLPVIDIKEPITGELAKKFQKCFPPGVIGIDANGKAYVKDARKDTVSREVLRHPEFDGKVQLGRQRDHFIFNVESTGAMPPAEIFFKSVRLLKNKAEYLRNCPIGQ

SEQ ID NO: 7490 - protein, 230 aa, Candida albicans
MPSAKSSDLSPTKTNFESTTKQKVSVQDIFLYIPNLIGYLRIITAIISFLCMANHPVATLIFYGISGFLDAFDGYAARKFNQGTRFGAVLDMVTDRCATSSLIVYLGVLYPQYTVFWQILVSLDLSSHYMHMYAMLSAGSTSHKNVDETQSKLLSLYYNNRLVLFFVCLINELFYMAVYLHYYKFFWLGTVMLVASTPIWLFKQIANIIQLKNASLILARMDAHDHSKRD

SEQ ID NO: 7491 - protein, 341 aa, Candida albicans
MSNLPPDEKVILFDKSKHVQYIVEQESHRSFEYWLSEHLRMNGLYWGVTALITMNELSALAQQDVIDYIMLCWDDKTGAFGSFPKHDGHILSTLSALQVLKIYDQELTVLNNNNESLNGNKRERLIKFITGLQLPDGSFQGDKYGEVDTRFVYTAVSSLSLLNALTDSIADTASAFIMQCFNFDGGFGLIPGSESHAAQVFTCVGALAIMNKLDLLDVENKKVKLIDWLTERQVLPSGGFNGRPEKLPDVCYSWWVLSSLSILKRKNWVDLKILENFILTCQDLENGGFSDRPGNQTDVYHTCFAIAGLSLIDYKKYGFKEIDPVYCMPVEVTSKFVRRSA

SEQ ID NO: 7492 - protein, 239 aa, Candida albicans
MTQNKYSVILPTYNEKRNLPILIYLLNKTFTANKLDWEVIIVDDNSPDGTQEIAKKLIDIFGPEHIQLRPRAGKLGLGTAYVHGLQFVTGNFVIIMDADFSHHPEAIPEFIAKQKSQDYDIVTGTRYAGDGGVFGWDFKRKLISRGANFLASVVLRPHVSDLTGSFRLYKTDVLKKIIDVTQSKGYVFQMEMMVRAKAMGFTVGEVPISFVDRLYGESKLGGDEIVQYAKGVWTLFTSV

SEQ ID NO: 7493 - protein, 412 aa, Candida albicans
MSESDETKSISSLISSSSSSRPKKYICTYEGCDKAYNRPSLLEQHLRTHSNDRPYKCTVEDCDKAFFRKSHLETHIVSHSEKKPFHCSVCGKGVNSRQHLKRHEITHTKSFKCTFENCQEAFYKHQSLRHHILSVHEKTLTCKQCNKVFTRPSKLAQHKLKHHGGSPAYQCDHPGCFKNFQTWSVLQFHIKQSHPKLKCPKCGKGCVGKKGLSSHMLSHDDSTMIKIWTCDYCDVGKFAKKNELVEHYNIFHDGNIPDDLLKETEVKKLENLLDQGSKLNNLHELETEKLKVEEDEEDEEDSLDEKRSDVRSDSMSAQRSIKSFTASLEGSKSVSKLISNSGKKINCPKNNCDRMFSREYDLRRHLKWHDDNLQRIESFLNSIEKEETPEGEPLVKKARMDLLPNETSVISR

SEQ ID NO: 7494 - protein, 157 aa, Candida albicans
MSDYEDNAFNEVAENFEDFDAPDHFSDNEYDDPSANGGDAALKTTDGRTIINGGFGPDDAQAAGQPRKKTTKELAIPKEKRTTTPYMTKYERARILGTRALQISLNAPVLVDIEGETDPLQIAMKELAQRKIPLVIRRYLPDGSYEDWGCDELIVDQ

SEQ ID NO: 7495 - protein, 249 aa, Candida albicans
MSAEAPKRQFGDRRRGGRRGGRRDGEEKGWTPVTKLGRLVKAGKITSVEQIYLHSLPVKEYQIIDLLLPDLKDDVMKIRSVQKQTRAGQRTRMKAVVVIGDSNGHVGLGIKTAKEVASAIKAAIVIAKLSIIPIRRGYWGSNLGQPHSLPCKVTGKCGSVAVRLIPAPRGKGIVASPVVKRLMQLAGVEDVYTSSSGSTRTTENTLKAAFAAIGNTYSFLTPNLWAETPLAASPLEVYAEEASAGKKRY

SEQ ID NO: 7496 - protein, 680 aa, Candida albicans
MALDKLDLYVIVTLVVAVAAYFAKNQFLSKPQDTGFLSNDGAGGSSRNILETLKKNNKNTLLLFGSQTGTAEDYANKLSRELHSRFGLNTMVADFADYDFDNFGDITDDILVFFIVATYGEGEPTDNADEFHTWLTDEADTLSTLRFTVFGLGNSTYEFYNAIGRKFDQLLEEKGGERFAEYGEGDDGTGTLDEDFLSWKDGVFDSLKNNLNYEEKELKYEPNVKLTERDDLTVDDSHVSLGEPNKKYINSQGVDLSKGPFDHTHPYLAKITKTKELFNSKDRNCVHVEFDISDSNLKYSTGDHLAVWPSNSDENIKQFLKCFGLEDKENTVIELKALDSTYSIPFPSPITYGAVIRHHLEISGPISRQLFLSIAGFAPNEETKATLTRIGNDKQEFASTITRRKFNIADALLFASKGKAWVDVPFEFIIENVQHLTPRYYSISSSSLSEKQLINITAVVEAEVESDGRAVTGVVTNLLKNIEIEQNNTNETPVVHYDLNGPRNKFSKFKLPVHVRRSNFKLPKNTTTPVILIGPGTGVAPLRGFVRERVQQVKNGVNVGKTILFYGCRNEHDDFLYKQEWSEYASVLGDKFEMFNAFSRQDPSKKVYVQDKIVENYKIVNELLNNGATIYVCGDASRMARDVQAAIAKIVAKDRDISQESATELVKSWKVQNRYQEDVW

SEQ ID NO: 7497 - protein, 158 aa, Candida albicans
MVSEDWRSIDIDALEPDAHLTKEDLLPTDIPPTTNEQVQQVANQIRSNLSSGQFQQALSLALDNVPYVADSSTKELHSKTVFEVLCSIRNNNNLNDLTGFVKSLSSEQQDVLVKYLYNNMSSPYGQKQGGLLLNWFEKTIEVTGVGSIARYLTDRRTV

SEQ ID NO: 7498 - protein, 773 aa, Candida albicans
MPEYTNFESKFDDIDMLEIPEDDDGENSIDNSISSETEGISDSSDSSKSSYDQWSPVAIFKSDKEYIDLSDWLNTQKSLEFKFDVQKYRKGIEKSRPFDEKYILYVNNMFKIIQKLTEDDITRFDLEEDDSPIGLVMDSMGSKAKQVRKFKKIDEALREIIDYLQDLVNSIPKEEQESYDSQCLQHVLYILECFEANNFYFDIQQKPELIIKWVNTFDPKPDPELLNDVIVNTPQPYLHPRFWNTCISQLLTRGLFTQIHEVIEHSQYQELKEKCPELYAVIGDMDTLLSNYTSYSSKGQFTAWKLLACEFRDSLSSVRNESITETKHKLIIDQIYDLACIFTGLPKTISSYCDTWYEVYLALSLYQVRDSNEVYIDYFKTAVSEKPPSDIFDDENENLDGLTEACFLNILENNFLKVLETLHELDPPTTAYLAELMELRFLLRGYYFDVTVTSSASFEDLLNRRIVSEYFLTRHAYDCLNIHELVPVGIGLLLNNVVCTSNNAVSANRKVIATFLPNYICNTNDDLEWALTICANLNLVSTARQLYYQAGLKSLEEGYMYEALNNFVNCYDPTLLSGENHSEGMKKVHYIVWDLIFANCLVHNRPIKDELINNIVDKKVDLNFKIHPVIQQCLAPYAVLKEFYETLPQRDIKLSNKLSKLIHLLKFNYLPKKFVPLLLSQSIPFLSEPNTAFQLPDLVIIIELLDNYESDRNEKELKEGADLYLYSINNIESDADENDWRKLVGKDNLPKDIDSFTRLLRNLIAAKVGKVFI

SEQ ID NO: 7499 - protein, 123 aa, Candida albicans
MSVVGSLIFCNYCGNLLDSHSSSSEIKCTVCSAAYPKSRFANLKVVTKSSDDAFPSKLKSARSVVKTSLKKDELDEGATIKEKCPKCGNEEMQYHTLQLRSADEGATVFYTCTNCGYRFRTNN

SEQ ID NO: 7500 - protein, 402 aa, Candida albicans
MNYSTENVSSAALRKRKTLKKSINFSIMIIGESGSGRSTLINTLCGGNSIVPTSSTATQDPFTKKLTLRHENVELEDNEGHKISLNIIDTPNFANSINCDDDFKIIVDFIRHQFDEVLLEESRVKRNPRFKDGRIHVLIYMINPTGHGLSDIDVKFLQHVNNLVNIIPIISKADSLTPKELKLNKELILEDLNNYGINFYKFNEYDYEQDYIDEEIIEYNKYLNSLIPFAIIGANEYRSNPNGSEDEDDILKLRILNKDFKPIDIDNAEINDFTILKNVLLVTHLNEFKDITHDSIYENYRTEALSGKQFQYVNKDSAKQEISESDYLMKEEQIKLEEERLRKFEERVHQDLINKRKELLERENELKEIEKRLLAEGLKFDENGDVVKVHEEESSENEVKVI

SEQ ID NO: 7501 - protein, 173 aa, Candida albicans
MSQSLKPYLTAVRASLTAAICLEDFSSQLIERHNRPEIEVDSKSCHNPELILNPMIIARNENEKILIESSINSIRISIKIKQADEIENILVHKFTRFLTSRAENFFILRRTPIKGYDISFLITNFHTEQMVKDKLVDFIIEFMEDVDKEISEMKLFLNARARIVAESFLIPFD

SEQ ID NO: 7502 - protein, 612 aa, Candida albicans
MISSSAWVPRGFAAEFPEKYELDDEEMERINAMANLELNDAKEQLAEAEGEEETEDNDSGNAPKTSKLVEQIEIDDDLKEYDLENYDNDEDQDDGNNLGNTKISMFPGLSNTDAKLLQDESGEGDKYLSLPTELDEQEEKKENQIYPTDNLVLATRTEDDISWLDIYIYDDGAGAPIGAEEEEEDKLDIDVANGMIRESNLYVHHDIMLPAFPLCVEWINYKPGQESSNIGNFAAIGTFDPQIEVWNLDFVDKAFPDVILGEPNKNSFIAKKNKKSKKKKKGGQHITTHHVDAVLSLSHNKIHRSILASTSADKTVKLWDLNSATAVCSFDKIHHNKTVSSSQWHSQEASILLTGGYDSTAAVTDVRISASESSSSSDSSKHYSVVAGEEVENVRWDLSKPELFYAGTDNGNVYSFDIRQDSKPLWTLHAHDAGISSLDVNNYVPGMLITSAMGEKVVKLWKCPSSSDENNTTKKQGPSMVLSRDFGVGNVLTTSYAPDIEVAGNVVIGGITGGLKMWDAFSNSSVRNGFREELKVLQNNARQEAKKNGRASRIARKYNSNSNKEEIMTVEAGGLKDESDSDSDEGEDVPIEMQEEEEDDDDDDDMSDDDEN

SEQ ID NO: 7503 - protein, 1172 aa, Candida albicans
MDFSLSSYFNAFDVDKDYQIEFSDVDSKLESITDSLANNPESLNFNQELLEDLIELTHGFRELEEKKRHQLAYLVTSSLNAVGQSYGNMFQSGDFHDNVDTIKSTLERYGYLMFVLLKYLGKEDFSQVGNARSQKSVPREVSARWKSNCTEVENGLTAVITVLSLDLSKVFVTTPERDSFVELFSRPIINLMESPERMKLVPIKLLIFRALCIAVTKHKHGSMLQHSIIQCLTYYAHLPQYMAGLLHTLTEKYDYMVLTEEILREISQTHFNSNDTNGPKAVSEFLIKLSELSPRLILRQMTSISQLLDNSNQTLRCSVVEACGNIVVDILKNSTRDQGEDEDADYYRHQVAKLLNLLEERFLDQNPYVRTKAFQALSKVADLKVKLTERRQKMMMLAVRSLEDRSTLVRRNAIKLMSKLILNHQFQGSHGTQLALTFWKQKLKDAEAELMKYIPADVQAGPEQQSDTSDVEDDGDESDKVEQENNLNGQAEATKKDEPTMDIDKEDVSEEGDREGESDIVANTSSFNDNLPDATVLARVKLTANYYKDAVDFVEAVQHGTDVISGLLFSKNRNEAIDAMDFLVLADAYGVENSHVGIRKMLHLVWMKGSSDEGKSVPAHLIDCYKSLSLIAPNSASKIEKATYIAKNLIGLTLKASVADLASLEKLLGLMYAAMMINFEVINVLWQIYNLSDRSEEVRRQKRGAIIILGMLSLEDNQIAIKGFDSLLNIGLGDEGKDDLILGRYTCIALQRVIPADAKKNSTMVKIPREEEAITKFKQILIDYNENPEWYSISEETIDAIFQLSSEPDRVCSDVIKTKAVAVFGDNRASVENPDVALSQLLFIVGHVAIKTIVFLEKLEGQFKKKKHEAESKKGTANSNNSSTAADAQEEAEGENELEMIGGTSEDDFADAVVHVKERELLYGDYSLLGRFGPLVKEICAHPKQFSNLRLQRSAVLCLTKLMCVSSIYCEENLPLLLQIMEKSDDPVTRCNCVLGLGDVAVCFNNIVDENTEYIYSRLTDENIMVQRTCLMTVTFLILAGQVKVKGQLSSMAKCLENPDQSISDMCRLFFAELATKDNAIYNGFIDIFSGLSNDETLAKDEMKRIIRFLVGFIDKEKHQKQLAEKLLARLPKCQSENQWQDVAFVLQTIPYKNDAITAALEEGFTLVSAKH

SEQ ID NO: 7504 - protein, 346 aa, Candida albicans
MLHIEQNNLLIEKTLTERLFPNPSESSLKSLDRIVSDFDFTTFHLSTLPGEKHLLLISLSLRCWPDLVKHDVVKYLNDKYQPFNEVLTILSTNDVEQGYDYSLVLDTSTATTSSNYDEDFKLQLIKELSNLKRNAMAAPFEQAFNRYDELSKKYANANTYSEEIQQELFNEPVSVIKYRGIDECIYLKPSFDRVTVIFSTVFQDETDKIFGKVFLQEFVDARKRSVQTAPQVLYSHIEPPLDIQSVTTTTNTTNKKDNYGYVTFVLFPRHLVLNKRENCISHIELFRSYFHYHIKCSKAYMHSRMRFRVKEYLKILNRAKPENLDDEGKVIENRKTASGRRFDIRA

SEQ ID NO: 7505 - protein, 556 aa, Candida albicans
MVLADLGSRLRGALSSVESGSDDEIQQMIKDICSALLESDVNVKLVAKLRGNIKNKIDESNVSKETSAMNKRKKLQKIIFDELCALVDSNVEPPKPKKLSTSTKTINGKKVRLSKESSHVIMFVGLQGAGKTTSCTKLAVYYKKRGFKVGLVCADTFRAGAFDQLKQNAIKANIPYYGSYLEPDPVKIAFEGVQKFKQEKFDIIIVDTSGRHRQEEQLFTEMVQIGEAVQPTQTIMVMDGSIGQAAESQARAFKESSNFGSIILTKMDGHAKGGGAISAVAATKTPIVFIGTGEHVGDLEIFKPTTFISKLLGIGDIQGLIEHVQSLNLHQDEGHKQTIEHIKEGKFTLRDFQNQMNNFLKMGPLTNIASMIPGLSNIMSQVGDEETSKKIKNMIYIMDSMTIKELESDGRIFIKEPSRIVRVARGSGCAVVEVEMILQQHRMMSTMAKSAMAAQGGQPGQPGNPMANNPQMQRMMQQAQSNPNFMQQAMNMLGGAGGGAGGAGGLAGMMNNPAMMQQAQQMMRSNPQMMQQAQQMMKNPGMMQKMMQQFGGMGGM

SEQ ID NO: 7506 - protein, 149 aa, Candida albicans
MSEYSGSNSEDLSLPKATVQKIINEILPKDIGIAKEAREAITECSIEFIMMLSTQSNDIAEKEAKKTIASDHVVKALEELDFKIYLDIINKILDEHKELLKGKEKRNNKFQNSGLTEEELLRQQEELFKKSRARLQNQSGSLTAKPEPN

SEQ ID NO: 7507 - protein, 286 aa, Candida albicans
MASCNLLVIQTTSIIMFSSLLSRPVNSSYDPSYHFSPVTREIKNDPTSNGVVSTTKNATPLAPSKYDTTIPLKKRYPNLVHNFPKPELDENVILETKKIIDSILNPSDEPTNDINYIKYENPNPNPNPNPNPNQEQQQQSSSSSSKIIQIKQFQEDPMLPPKFKLRKNRHERIIEDVTFVKDLKTKKLTKEDREFWNIPAAVSNWKNSQGFTIGLDKRMIGREHVPIEMNIEKFNDLSTALSDADLQAREDLKQRNEIRQQKQLQEKRLRDEKIKEIANRSKRRRY

SEQ ID NO: 7508 - protein, 688 aa, Candida albicans
MSHSNALPNSPFRSPKKQRMEVIGPLNASRFSFSPVKTPPHGRAGLSSPEKRLVKDLDKSARKRANNSLYNRLMDEYSDTDDYLDEQDRILADRIIKQSRGEPDEVNYGSDVELEIDLTQQRRTRRREKKVVYSSDSSNEYEDTGMPEESSSEEEEADDDDGNVEFVYGPPKERKTSLSSSPPTVKPTVRRTKRGRPSKSELVSGQIKSIFHQDDVLFSTDRKTFTPTKPTAAKKPVSNYLTSIFDQNFDRSKVPSLSGIPKSTNTHEEKKTFVPLPIPTLDADGNITDKEYISKYFDGVDPAKFKEGRFVDEKVFYLEGPEGYFEQQTTRVKQSGNSLTALAPQIEYKDFARLVKLGDNLSFQRKRHLFELHKYIYHQWCFEMSQGFNLNFYGVGSKIDLLRDFATNYFGIWWENVVHADLPKVLVVNGFNPSINIKKLILEIASILLPNESYPKHIAGTVPFVVDYLNNHRSPCGSIGFHKPKILLIIHNLDGEVFRVDKTQTLLSQLMTLPEVWAMSSTDHINASLLWDSSKVKNLNFIWHNLTTYATYQRETSFRDVISLGKSKKFVGGLGAKYVLRSLTDNHRNLYRELLIAQLDKMEKAVPSASGRVGLKGNAKVAVDLKSLYNTCLDEFITSNEMNFRTFLKEYVEHKMCQLVKDPSGVEKVFIPFTYEEIQNIYKQEFDV

SEQ ID NO: 7509 - protein, 214 aa, Candida albicans
MDDTDRAVSRLFRSFKTVKEMVRDRGYYISQEELDMTLEEFRSKICDSMGTPQRKQMCFQATPTAETLEKFPETGSLWVEFCDEASVGIKTMRNFCIHITEKNFSTGIFIYQNSMTPSANKLIPTVSPATIEIFQENDLIVNITHHELVPKHLKLNREEKKELLTRYRLKESQLPRIQREDPVARYLGLKRGEIVKIIRRSETSGRYASYRICL

SEQ ID NO: 7510 - protein, 690 aa, Candida albicans
MPHDLLSHVATSFSSHRSSPSSNNSTKRRLALEDDPTVLPPALSSYSIQCLNERTKTSTLPSQITGKYELDFPDSSSKRDNTLRNKLAAHFTNESTRSREISNSFTNLSEDRSSINTAATTTPGSKTFEDLRSKRKRRFGKSLGPPKRGTDFVQESTPIGDELSPKIESKFNITPQHKSLSEIIPKAPSLERFSPLLKKNHSSIDAEDTITKRIEARRREQMEQEFVKKEKENELAELKIKKLEQIAALQSPYEEHKSKEFQEPKQSRMPLREIPVNSAVDVFRKPKAPKSAISPSPNVQSNSMIPPAQPVFRNTLQDFPKPPQQPQASSQNQQQVLPSAPIPPKAHYDRPQHSGNKRALIINDKSYEKLELIGKGGSSKVYRVRSLNNNCVYALKKVELGQFEDVSGFKGEIDLLTKLKSCERVVTLVDYATTESSLYLIMEKGDLDLAEVLQYRLKLDAPLDLNFVKYHTIEMFKCIKDVHDAGIVHSDLKPANFLFVRGMLKIIDFGIANAVPDHTINVYRENQIGTPNYMAPEAICESNYTSARIWKVGKPSDIWSIGCILYQFIYGKAPFAGYSGNQKLMAITNPHIKISFPSSGIGNTPVPVSAIELMKNCLHRDPNDRWTIEQCLTCDFLSPKIVSENFIREVVHQSINYGYNSRISGDGMTSDRYDALVDSVMKQIQNLNYS

SEQ ID NO: 7511 - protein, 254 aa, Candida albicans
MPKYQPKNGELNPYIPRYILETPRYQQDIINKSPEQEDAQDQTTTAHDPLAHQRKTGEIIDNSIAQSGTGIKDEFKGTIRVEENESYDSKRDRWYGYSTEEWLTHLKNWNDKKQSRKHASAQDNDDSDDTDYELELIELELDKKDMKKNIKKDPMEKMLRDRQDIPAYIYNITSNPNNKIRIEYDPKSRLAKDSAKGFLNKRNQFVKKLTGDGDELMKLQKMAQELDNEHEKDRKLAKLKQDFMVKKSENRSTN

SEQ ID NO: 7512 - protein, 393 aa, Candida albicans
MSLINKQWSSISTELVQDPQNFELWQSLIEAAEWNEKRGINKSTSEEELNVLRTSYNSFLEKFPFQFKYWIRYAEWEFKLGNTSTAEQIYLRGLNTQLSHCIELWISYLNFKINTINDNISEILQKFEAARDLIGFHFFGFEFYELYLSFLDNYKNDNNEFEKKYYILLRIILEIPIYHYGIFYKKWFDLIDNLSKDEKLAKQIAPYIAPANEIATLASKKNTSIFNELKKRFTDAYIATQYHSFELYEFEKKLIPKNNKNPQQDNDLRSRQELDAWMSYIDYLEIKQYPIKFIELVYYRFLYNARNYPQTWSKFADYYIYHAKFNKARKILTDGVKYVDDYKLLIKLVDLEIFLKNYQRAINLLISYIQYNSNVPIPIRDKVHQVKQLIDQK

SEQ ID NO: 7513 - protein, 383 aa, Candida albicans
MVQLLHSIKAHNDKVWSVSVHPTLPIIATASTDKSTKLYKLSARQKFPLVAKLEDTHKRSIRSVAFKPPLGGADTPKSDFLDLPALAAGSFDSTISVWGIDEPDVEYDIEEVIANQKEILTSPNNEWNLMAIIEGHENEVKAVDWNFQGQYLASCSRDKSVWIWETDPETLEEFECVAVLNDHSQDVKNVSWHPSMNILASSSYDDTIRIYQQDIAGDEWSCVGILNGHEGTVWCSKFESLKSPIADSSVLRLVSASDDLSVRIWVAKREQEDEEQAKLELPSSIRHTNEMVWEVESVLPSVHKYPVYSVAWSALTGKIASAGSDGKIVVYSETEKGKWVIDSIHEGAHGVHEINCVIWAQLDDENEILVSAGDDGYVNLWKI

SEQ ID NO: 7514 - protein, 380 aa, Candida albicans
MLQTAEGMSTVYPLLASYNSSTNHIIDDQLKDMCPICKTDKYLSPNMKFLINPECYHKICESCVDRIFSLGPAPCPYPKCGKILRKNKFKQQIFEDLIIEKEIDIRKKVSAIYNKTEEDFPGDLQGYNRYLENIEDIIFKLSYSDDKQEIETVETELNNNEQEHKLEILERNMRESQRNDDLMKYKEARERLKQEKLKIQKQMELEDLEYQREQQQELLDKLTNSSTTSEELIKQQQNQMLKRSNLRRKQLQTINNQLDQQFNKINPFAKNNGVDSDDEQNGGGGGVNGSSKIPFTPFQGDRDLNKGYTMLPVPTDVESIMNIEQNISDSYYDPFINKLAKNKQYLGGGWRLQNVFQQALDEAFIGLGCNIELEKATTIT

SEQ ID NO: 7515 - protein, 878 aa, Candida albicans
MDERFLNPPPTADQDDTNQPLDAIFGDRVRRFQEFLDRIDSNTGIDYRSIIKDMLIKSKFRLSVSIDEIREFDREFWLGLLNQPADYLPACERALRDTVLAIYDPQDPSFPHDSYDPNQQYYLSFKGAFGGHSLTPRSIDSSYLSKMVSIEGIVTRASLVRPKVIRSVHYAEKTGRFYAREYRDQTTSFDAIATPAIYPTEDMEGNKLTTEYGYSTYRDYQKISVQEMPETAPPGQLPRSVDVILDDDLVDLTKPGDRVQIVGVYRALGGAANNSSSFKTVILSNSVYLLHARSTGVASQEKLTDQDIRNINKLAKDRKIFDILSRSLAPSIYGFDYIKKAVLLMMMGGVEKNLDNGTHLRGDINILMVGDPSTAKSQVLRFVLNTASLAIATTGRGSSGVGLTAAVTTDKETGERRLEAGAMVLADRGIVCIDEFDKMSDIDRVAIHEVMEQQTVTIAKAGIHTSLNARCSVIAAANPVFGQYDVHKDPHKNIALPDSLLSRFDLLFVVTDDVNPTRDRVISEHVLRMHRFVPPGLMEGEPIREKSAVTLAVGDDETNEQELLEQPMFEKFNTLLHAGIQNKKSNNILSIPFLKKYVQYAKQRVQPVLTKGASDYIVTTYSSLRNDLIGNNQRNTAPITARTLETLIRLATAHAKVRLSKTVDVKDAKVAEELLRYALFKEVAKKTKKRQKTTSIVDSEEEEEDESDAEMENSDNEIMPRESTRRTRATAQTQPPQQQQASPSLTPEPPLGHRDDGDDDGVGEELEQFHLSSSQQQQQQQYLQPLTERSSSNIVSSTATNAISVERLNIFKRILAQVSRSALFANDQAAANYHDVTRAINEQMEQEDIFSEQELSAGFEVMSSENKFYLESDKIWKI

SEQ ID NO: 7516 - protein, 996 aa, Candida albicans
MAQPTTQLLSIVQKHLDLPQDDENVVLIAKFLVNLHGNSTLEEFKKVVKENGGDEFEDEFIKEVYNEISPPPPQVGKIYSGVVQSVTNYGAFIKIEGTSGLCHISQMSFDGSRVESTNVLAPNQKVFVKVIDIQTHANRISLSMRGINQNTGHEEPIPQRGRYQERQPRPKRKLTSPERWEIRQLISSGAVSADDYPELDQEEDTQTESEKTDNLHIELNDKKPDFLKGVKVTKDFPETTPIPVNQSGPLTKSAQRGSKFARDFKEEKFKQKKQREKEEKMQSELSDPLFQTSEPVKNSDLDPDTESFISKWKKSNKTETFGKRTSLPIQEQRRMLPVYAMRSQLLEAIRDNQFVVIVGETGSGKTTQIVQYIYEEGMNKVGGQTKLIGCTQPRRVAAESVAKRVSEEVGCKLGDTVGYTIRFEDVTSENTVIKYMTDGMLEREALNDPNMNRYSVIMLDEAHERTIATDVLFALLKNAAKQNPNLKVIVTSATLDSNKFSRYFNNCPIITIPGRTFPVEVLYTKAPEMDYLAAALESVIQIHVSEPAGDILVFLTGQEEIETSCEALHERMKLLGENIPELIILPVYSALPSEMQTRIFEPTPPGSRKVILATNIAETSITIDGIYYVVDPGFVKINMYDSKLGMDSLRVTPISKAQANQRSGRAGRTGPGKCYRLYTEQAYEKEMIPNTIPEIQRQNLSHTILMLKAMGIHDLVNFEFMDPPSTTTMLTALEDLYILDALDDDGNLTTLGRKMADLPMEPALAKTLIQSVEYECTEEILSIVAMLSVQTIFYRPKDKQALADQRKSRFHHSLGDHLTLLNVFQSWCRNNYSKTWCRDNFIQERSMRRAMEVRKQLKSIMQRFGYKTMSCGNDVDRVRRTFCSGYFKNSAKRQEGEGYKTLNENTLVYLHPSSSLYGKKPQYVIYHTLLLTSKEYMHCVSIIDPNWLYELAPKYFRPADAKTVQEIKKKQKIVPLFSRQKKDNWRLSSHRPAKRR

SEQ ID NO: 7517 - protein, 88 aa, Candida albicans
MANSKQILSLYKQLLEKAYKFDNYNFKEYSKRKIVETFKANKSLTNENEINQFYNEGINQLALLHRQTTISQLYTFDKLVVEPLKKHQ

SEQ ID NO: 7518 - protein, 1987 aa, Candida albicans
MSNNVIRQQRDRNHEEEIPASSMTGRISKSDMRSNYKSSPAPAQLNKPPRKEPESEPVDDQLYELFVTKIRSYLPDSSHEVIQSASEVASEQLSNRDISVPEKRKELEELLNASISDDDLHELINLSNSIESAKQNHQQGNGDDEFVAIDFNSSDDEEQAIEAEIEVEDESDKETDTEEPTSNEHPKAYDWHWLQQISEFKHYGSQVFDLLADKDLDSLQLDSKLNELLDSKGMDFIVKCIEHRWRIVFSKRLQTENKEPVIKEMEELGLHSLINELHRKRSLDDETSNPLKRQKKVKRVPQKISLDRIVFSTSVENARVTLPEGTIHEVKKSYDTITVPAPAQSLSDNDELLPISTLPDWAQEAFPKTETTTFNRIQSKIYNQAFETDNNLLICAPTGAGKTNVAMLTILRTIENFRNNGHIQLKNFKIVYIAPLKALVQEQMREFQRRLTSVYGVVVNELTGDSSLSKQQIAETQIIVTTPEKWDIITRKDPSYVKLVKLMIIDEIHLLHDERGPVLESLVSRAIRKSETTGSDIRIVGLSATLPNYADVAKFIRAKPEGLFYFDASYRPCPLEQVYIGVKEQKAIKRIAAMNEACYDRMHQSLQDRHQLIIFVHSRKETFTTAKYLMEKLDIDIVEQEGVKEILKQEGESMSNPKLKEVIPRGFGIHHAGLTKKDRGVVEDLFAQGYLRVLVSTATLAWGVNLPAHTVIIKGTETYSPESGAWVQLSPQDILQMLGRAGRPRYDKNGEGIIITSQDEVQYYLAILNQQLPIESQLIHKLVDNINAEIVAGSITTIEEGIEWLTYTYFFVRMLQSPALYGVEATYDFTNDPTLYNRRADLIYTAFCILHENKLVVYNAALGSVASTELGKIASHFYINFETINLYGKMLKPWHSETDILSVFSNSGEFKYVPVRQEERLEISKLMEKCPIPIKEQPNEPLAKINILLQTFISRLSLEGYALIADMIYITQSAGRLLRALYEIALLQKWSSLAKSILNLCKMVDKRLWLNNSPLRQFGDVVPHQIIRASEMSHLPWIRYFHLNPDELAVALNLKGNAQIAKQYIDSFPKVSIQYMVQPITEQFLRIQVEVIPEWSWISAIHGSQEIFNVFLEGCDGNKLLHSEQFIVKRKNINKPHILEFFVPFVAPPLPNYILSFVSEKWVHCTWKSSILLSDVISPKVSPHYLDNNVDLVPTETVGDLFPFTHFNKLQSSTFDTVYNSENNVFIGSSKGDGKTVLAELAILNHWNNKKGRIVYINPCQELVDKLFKKWSTFFSSYEKEINVLSGNLREDSASVNQSHLILATPEQFNCLSKRWKTRKAFRSIDLFIWDDLHLVGSDVHYEMLVTRVRMLTSQWDDYKLRIVALSSPVLNSRDIAEWIGVAKSETFNFAPHSRENRITEIKLSVESSDNTVKIYKDLAKVNSGLRNTLIFAPSYIHAFEMAHSMVENNQAQEWRSVDLLKLEKYISKIQNPLLKNLLPKGIAVFYSGMARVDRLIVERLFESKSIGVLFCTMDTSKFAPTANNVFVAGTRVYDGHEHRFLDYPLNDLYEMVGCCQDGGVVHIYTTSQMVEFYSSFLNSGLAVESLLSNSLHEFFMDAVANGIIKQRQNCIDVLTFTFFYRRLLKNPSFYDLKEVSNSGISTYLSELIESVFDDFNKEEFIEEEDEGDTISPLNKIVIASHYNSTFETVSNLSKLSNKSKLKDIFHALTNATEFSDLPVREGEDALLIKLQTKLPIKYSQDDYESPFFKAFILLQAHISRISIPFDLRQDQKSVLTRVLQILNAAIDILSSDGSLNVLLAMDLSQMIVQAVWSSDNPLRQVPRFTNEILARCTQHNVETVYDIMSLEDEERNEILQLPDQELNEVASFVNSYPNIELSYEMKGGVTSNESKFVTVTIDRDEEIESLEVVKNENFPVTKQENWWIVVGDSKTRHLYGIKKVNIQKISQSFEIEFTIPNKGKHELTIYLICDSYLDADKEMEFVIDVV

SEQ ID NO: 7519 - protein, 1171 aa, Candida albicans
MKVDELIIDGFKSYAVRTVISNWDAQFNAITGLNGSGKSNILDAICFVLGIASMSTVRASNLQDLIYKRGQAGVTKASVTIVFNNSEVSKSPIGFENCPTISVTRQIILGGTSKYLINGHKAQQQTVLNLFQSVQLNINNPNFLIMQGKITKVLNMKPSEILSLIEEAAGTRTFEERKDKAQKTMAKKEAKLTEIRNLLSEEIEPKLEKLRNEKRNFLEFQQTQIDLEKLSRIIAACDYTLLSKNFTHHSKFLNDHETKMNNLHLEVDKLNHEIKNLNEDLDQVKSRKEENLKTDGSMKELEIKENQLSNDLTRLNTARDIAMDNLTEEKNKHTKLIEQLEQIKQQLASNQTVFDNQENEYKQSNQELVQLKEEYANKQELLSTLSTGISSTGNVTSGYITQLNDVKSKLNASENFIKTSTLKINHLQQQMESDQMKLTKAKTENETLLSAIELHRQFIKTKQLEIDSKLGFEPTKIHQLRDQESELISQQNKFNQQLNHMRREIGNLDFQYNRPSQDFNDQLVRGVVAQLFNLPETSHDKALALQVCAGGRLYNVVVDTSDVASQLLEKGQLKRRVTIIPLDKISSRKLDHQVIDYAKQVAPGKVDLALNLIDFEDELYKAMEYIFGTTFICNDPNSAKAVTFDPKIKSRSITLEGDIYDPEGNLSGGSRRNNSTILLKLQQYNKLTIQLNKIEFELQNVKQELSRMDSLISSTRTIQNEINLKRHELSLLEKKLENNPAALILKQNDLNQQEIIRLTEEIEITKEKCRQYKQEIAIIEKDIAEFNNDKGSKINCLKKEVAHLKQQVISKEKQLENQTDKFQAAQIDSEQLKIELQNKQEALISTKNQIDELTHKIKQQDQTKEQLIEQLTLVKSELDDARANLLGLDEEITELTNIVKLKIEKMTMTKLDIQKLTHELEKSQNVTKNLKTRLDEIISEHEWVMDNQMVNNIMDQYPNIDIEETREQWELLQEKFSSMRRKVNVNIMSMIENVEKKETSLKTMVKTIEKDKNKIVNTINKLNGYKRDTLNTTYQKVSKDFGAIFADLLPGSFAKLVPIDMMDVTKGLEVKVKLGQVWKESLVELSGGQRSLIALSLIMALLQFKPAPMYILDEVDAALDLSHTQNIGHLIKTRFKGSQFIVVSLKEGMSTNANRVFRTRFQDGTSIVSVM

SEQ ID NO: 7520 - protein, 428 aa, Candida albicans
MSKRQENKKIAFIHPDLGIGGAERLVVDAAVGLQDFGHDIIIYTSHCDLTHCFEEVSSGQLKVSVHGDSLPTNLFGKLHIFFAILRQFYLVCWLIFTGTIKNYDYFIVDQLSFCIPLLKMFCNSNCQVLFYCHFPDQLLVRRTSFLKKLYRVPFDAIEEYTTGSSDQIVVNSNFTKQIFHDTFKKLNHIDPQVVYPCVDTETIVDTNTSSNSEVSKFFKDSPFFLSINRFERSKNIELAIKSFARMNKLMVTNKKPRLVIAGGYDSRVAENVEYLAELSTLCDELNLINFTIRGKLIMMPPSVDVLFLPSISTQLKNSLIQQTELLLYTPPREHFGIVPLEAMLAKTPVLAINFGGPLETVVNYNGNNLDEATGYTETGDFTKWSKIIMKHYNLDESTKIKLGENGRNRVINKFSRKKLAQSLDNILN

SEQ ID NO: 7521 - protein, 761 aa, Candida albicans
MIMNMTTDYRDPLLDLFGTESNSGNETSSPSDIPVINRSGTFNQQQFSPLLTQQSLYNTPNSGSTPNIFDPNYTQMQEEQTSPSSNKLQPEDPPRKKRNTRSQTKIHQQSEGDEYNSNDYKDSIDLDKPPVVEPSPPFFVESDTTPEFVIPTPTSEQQQQQHHELIAQDYQRSNNSNQFGNLTHYEPNLPPLPPLSESILPQTNTFHPLVLPHDPRHAITAGPANNSQQQQQRQQQDSSIPSDGISSKIQQLHAPSLSNNQSASQRKKKESSGPKTRPAFVMKIWSMVNDPANHEYIRWNDDGKTFQVFHREDFMKVILPKYFKHNNFASFVRQLNMYGWHKVQDVANGTLNQNSDKNGQDEIWQFENPNFIKDREDLLDKIVRNKSSSNQDDVSGVSFNGINNSANLSLILQELETIKMNQYVISEDLRRVRQDNKMLWQENYLNRERNQVQGRTLDKILKFLSVVYGNNANKILNGHGFADFSDSNNIMTQYRPSPMGSPLLSRPQTQPPPSNSRFARDNNQTAQPTYESPLSTSDTNNNNNNSTFEYQQAVNRPRLMLTNRAHSRRPSMSRTKSTPEGSIEEIIRSYSNDKAAESNVNRMYEQLVGHQPGATTNNNNHSSSTAISAPSPRHSFLQELNLPGTPRNLDDLEKHINNEGQSIQQVQDWIDKLAQEQHEKQQQQQGNEDDDDFDVNEFLKDATTTPGSNVPNGGHYNNGNINFVDSPIAMTPGSNVSSNINDSNGNEKKSKKRSIEEVSDH

SEQ ID NO: 7522 - protein, 331 aa, Candida albicans
MSPSQTQIEKSQLAAPEPEHCPGPESELAGQGDACKGCANQEICSSQTVKGPDPDLPIITERLSAIDHKILVLSGKGGVGKSTFTSMLAWAIAADEEIEVGAMDLDICGPSLPRMLGAEGESVHQSNSGWSPVYVADNLGLMSISFMLPDPDSAIIWRGAKKNGLIKQFLKDVNWGEKLDYLVVDTPPGTSDEHLSVTTYMKEVGIDGALIVTTPQEVALLDVRKEIDFCRKANIKILGLVENMSGFVCPNCKGESQIFKATTGGGKKLCEELGIPFLGSVPLDPRIGKACDMGECFFDSYPDSPAATAILDVVDALRDQVELSLENLAIK

SEQ ID NO: 7523 - protein, 149 aa, Candida albicans
MPTRLTKTRKHRGNVSAGKGRIGKHRKHPGGRGKAGGQHHHRTNLDKYHPGYFGKVGMRYFHKQQNHFWRPEINLDKLWTLVDSEKKDEYLSKSSASAAPVIDTLAHGYGKVLGKGRLPEVPVIVKARFVSKLAEEKIRAVGGVVELVA

SEQ ID NO: 7524 - protein, 634 aa, Candida albicans
MSPNISNRTVHLPNDTPLKQQSLKRPSISSSSTSGTGTGSGAAVEVAADSTSTTNLKPISKPISKFQRPQLPPSLRPPINSRSKTAVLPSLSKSTSSLATTHSSTQSLSNPFILRRANSLISQGGSSSLSDLHQQQQSSTTSSDRFIPSRYNSVTGKLDTTNEVPLPSAAPEIHIKAQTSKIYQHHVAEACGLEMNSRILLYQPLPPERKKPVNLVRQLSNQSSSGSSSIPNSQLFRTSFLTKSGTLTPSAAAARANKIPNAPERVLDAPGLIDDFYLNLLAWSSTNLLAIGLEDAVYVWNASTGSVGLLCELADKTLVTSLRWSQDGSYISIGKDDGLIEIWDIESNTKLRTLNCDNHLTRIASQSWNQHVLTSGSRMGHIYFSDVRVANHLVNKNQEAHSAEVCGIEYRPVGNGTSSTTSINDSLQFATGGNDNLVCIWDARNVTTPVFSKSNHKAAVKALSWCPYQSSLLATGGGSTDKTINFWNTTTGAKVNTIETGSQISSLNWGYAHGTGLEIVATHGFPSNSISLFNYPTLQKTGEIINAHDTRILNGCLSPDNLTLATVAGDENLKFWSLFDLYKNNKRDYSHLRHGQDRDNQYNDYDDSDVNGLNNDDKDGGHDSKRIKKMMNLR

SEQ ID NO: 7525 - protein, 880 aa, Candida albicans
MSNFVSSPGRIPSDAAQLLNSQTSSSFGRDNSTPAQPILYSEDLPPHLQLQKQQQQRAIAGRRRQIAVPKVVDVTGEKVRESFETFIEEFVDPEQTDDDWDGKIYLAQIEAMKTYEYSTLYVDYQHLLSRENGVLATAISEQYYRFSPFLLKGLHRLLKKYAPSLLHTSLLHNTEETVSETSTSSQANERVFQISFFNLPTVQRIRDIRSNKIGSLMSISGTVTRTSEVRPELYRACFTCDLCSAVIEGVEQVFKYTEPTACPSCENQSYFTLNVSKSQFIDWQRIRIQENSNEIPTGSMPRTLDVILRGETVERAKPGDKCKFTGCEIVIPDVSQLGLPGVKPQSVKESARGSELSSGVTGLKSLGVRDLTYKLAFGACHVASMVNKAGGNEQLEVDLNDQEVFLTSLSDAEVLQLKEMVKDEHIYDKLVNSIAPAVFGHEVIKKGILLQLLGGVHKQTVDGINLRGDINICIVGDPSTSKSQFLKYVCGFSPRAVYTSGKASSAAGLTAAVVKDEESGEYTIEAGALMLADNGICAIDEFDKMDIADQVAIHEAMEQQTISIAKAGIHATLNARTSILAAANPIGGRYNRKLGLRSNLNMTAPIMSRFDLFFVVLDDCNERIDTQLASHIVDLHMLRDDAIDPPYSAEQLARYIKYAKTFKPRMTKEARDFLVTRYKELREDDAQGLGRSSYRITVRQLESMIRLSEAIARANCTEEITPSFVAEAYDLLKQSIIRVEMDDIEMDDEERPTGEPGQAQEQDQPQDQDTQQSQPSERVPPVSISYDKYVSIMNMLVKKITEDEKNGGDGLSADTLVEWYLLQKEDEISSEQEYLQERKLAYKVIKRLVRDKILMSVTEGTNVVYIIHPNCAILDFFERE

SEQ ID NO: 7526 - protein, 725 aa, Candida albicans
MSFKLSVAGKAQNVPYPVLIAVNFINSSDVDVSIPIEFVDDKTVDSKDSIKLVTPGGETFIDQLDALDYLSQTLPELLPERSKSQEWIKFALTKLYVKNFKELAVDLEKLDQHLNFRSFIVGYQYSLADIAIWGVLRANALMGSVIKNGVYANISRWYNLLADDKRFEGSVELMTKSLAEVRKAAKSAKTAAAGGKKEAHKASFEIDLPGAEMGKVVTRFPPEPSGYLHIGHAKAAVLNEYFAHKFKGKLIIRFDDTNPTKEKVEFQDSIIEDLELLGIKGDQITYSSDYFQTMYDLAVKMIKDGNAYCDDTPVDTMREQRMVGDASARRERSVEENLRIFTEEMKNGTEEGLKNCLRAKIDYKAPNKALRDPVIYRCNLTPHHRTGTEWKMYPIYDFCVPVVDSIEGVTHALRTNEYRDRNPQYEWMQKTLGLRPVAIWDFGRVNFVRTLLSKRKLQWFVDKNYVSNWDDPRFPTVRGVRRRGMTVEGLRNFIISQGPSRNIINLEWSVIWAMNKKIIDPVAPRFTAVDAKNVVSVKLLNGPKEPYTESKPKHKKNPEVGNKDVIFADQVLIDQEDADLTEGEEVTFMDWGNIIVSKVNKEGDIVKSVEANLHLEGDFRKTSKKITWLAYTKDKVEIDMVDFDHLITKDKLDENDNFEDFITPETEFHTKGFADLNVGKLKAGDIIQFERKGYFRVDKPSEEGKPAVLYTIPDGKAVSRYGAKK

SEQ ID NO: 7527 - protein, 212 aa, Candida albicans
MFTPQKQQNPEIILTPSNKPLQQQESKDKDLTTTSTQQVQNILLNPMTPYTLTLYFQLFSNMIMASIVIYMAYLAYTTIRQDINFKIQRMTLDLLDEISQCSKQYTLNKCHLSTRPPAIEQECNYLDKCQNQDPSLISRSNLTSEILAEITNSFFNKLNYKSISIVLIFLVINLVSNYYIIGNFQYNEINRLKKLEFNSNPESKLDTKIDLD

SEQ ID NO: 7528 - protein, 1057 aa, Candida albicans
MEEDNTGSHIRRSTRQQLKQQQRQQLELQQQQLAEEEEEEEQQIQLQQQKQKQLDQNQRTTKNQETPEYHDLKEEDFERLMEEMQIDKNDDGDDGSSDEYIFSDESDDYDDYDNINNNNNGNNKIGGPILSDEPEEDDYDEDYNFKDALKGASNFRVRNRREKISKNSRSYYKRKMMRADNRELDPEVRSNLSQANEAFVRKDLQVAQQLYLEVIKKDPKNFSAYKALGEISKAQGQLNECCNYWLLAANIHPWDTEFWGQVAQLSAELGHIDQAVYCYGRAITPDIAKSCEFILQRAILYQERKQYGKALDGFQKVRQLYPKDSNIIKYLASVYSEQKRLNDAINLYMKVLDSNIHPERESNELYPKFDWAELNILLELHLQNHSWRMGLNVLKLASRWIQNRSQETWWDENEDLEFDSRQRFEVISTLSSQDQIDLAENKPFDLPIDIRFKLGCLRLGLQQKDVAVQHFDYLLEEQDVSDLHFEAGKLLEEHGHYEDALKFLSKASEDEEFTISLELVQLLAKCYFEVGDYHESKQAYETLLQHDPDNLDFKLSLAENLYYLEDSAGAQSLIRQVRQSKPKVHHKNGASIEEEEEEEEEEEDLNLDTAQLGNIRSLIPNEFKVHGKRKLTEQEKEEIENNAKRKVLEKFGRMERLQESIDSGDRIAIGAWLQLASQLIEIFTNVKSFFPRDKNRTFNGIVRYRRRKDMGLDEKLARAYNLLEGIVQDEHYTRHTLTNKTEYRGLSYDQWFDIFAQYAVLISRYENNIDYADEIVDIALAVNVFIQDKRKETILRALKLAFGVRRNRVVDSLFIYLRHFLNLNQFSPFIYKLFMCCYGSGIEYWEQFASYNHQKYFLRQLKSYDSCYTGKNVSGMAHITTDLSGFKLGPHHLDLIYVYGNLLGGNKSYVSSLFYLNRAYKQYNQDPMLCLILGLGHLHRSMQRLSANRHIQLLQGISYILEYKKLRQLNATIYELQEIEYNLGRLFHTLGLFTLAVRHYEQVLAMKDDIVNSSKDNNDNYEYDMSWEAAYNLSLIYNIDGNPKLAKEIIDKYLTIV

SEQ ID NO: 7529 - protein, 116 aa, Candida albicans
MKLVRFLMNIPNSTNQPITVELKNGNIISGTLLSCNPSMNLHLKNVRLQQPLQDPILLQYINIRGNQVRQILLPDELNIESVLAKSETKIKGSGAGPGAKAVARGGFRGRGKGRAV

SEQ ID NO: 7530 - protein, 500 aa, Candida albicans
MADVEKKPEAVSSDPAEKKLSNKELKELKKKEKAAKRAAQKEAIGITPEQQKKIAEQKIEKKKQQQTTSASNVKKQLNQTIVKDERKVPALFGHLETREQRNAASPTISNVVHPTILSLTLKYSSYKVVGSSSRLSNMLQAFKQVIQDYSTPENTTLTRHLTAHLSHQIEFLKTGRPLSVSMGNAIRWLKQEISVISIDTLEAKAKEILCTKIDDFIKEKIVLSDRLIVDSASRHICNGSTILTYGHSQVLEELFKYCVVEQGKKFNLIIVDSRPLFEGKKLLKNLVSTSLEEKVETNSVSSLTMEKVPITQSHISVQYVLINALSSTLLEDVDCVFLGAHAMLSNGRLYSRVGTALIAMMSHTRNIPVLACCESVKFSDKVQLDSVTTNELADSEDLIQGIDSKKPPQKQSFALEQFLKESEQENKQPKQVKGKSEADATADQSDDSEPLKNWQDVKNLNIINIMYDLTPPEYINKVITELGALPPSSVPVILREYKNA

SEQ ID NO: 7531 - protein, 639 aa, Candida albicans
  MISC_FEATURE (639)..(639): X=any amino acid
MSKPELYDQYMITTLPRTPDLELSDKVVVSTIKSIDTSIIDIGVSKSTISSHITKPTPKLLWSYSLNPTTIVECMDVLAKEDKKYYVCGLSDRKKFRLLLVETTRSITEDGNANYTTTNELELKLDRKPIGIKFMSPEIITVLYVNGSVEEVGFSENILQFSGVKYTGTKSKDTVVYSAFVNDLEDNLLLTVSTNSKSTIYRLIAINSKNSILEVNSHSVPGVSNTKFCYFTGSLYQYANKAIETLSITNFKITNTVSVDGIINDEEITSIVAPAPDRVLIGNSNMIYLINVKFASLLSSFKSSSSSSHPIPDKVFLNQVVPVKGNSTNSYISMAVYLNLKNKDNNVYLNVIDINVGMNKLSECLGKSLNKQKPGFHEIPELFNIQDALPSSDEIQEVYSYLKDAKEAQDLNKWESILIPYLKNKKTWAEIKSLSRASKKDKVYEFKEFDVDNDRVIDIGFIDSVLQLIFTEDPLAFANEQFVPEYTLMYLLTNPLFPIRFTSGLIELFSVTGNTTLLRQAINTCPNIPCRDLLDQLVNEENKETLLDLINRIIGEFSRKEITNTFKQLIQGNAVDVVELISKLIGLPGNNNWYLVEILVDVNGLFNWDMGDIKALDEIISQKVEALTVNSYNLTLSHX

SEQ ID NO: 7532 - protein, 714 aa, Candida albicans
MGNYITVATCNLNQWALDFEGNRDRIFESIKEAKRQGAKLRVGPELEVCGYGCLDHFAENDLYRHSWEVYGEILSNPETHGILLDIGIPIIHKSIKYNCRIISYNGKILLIRPKIYLANDGNYREMRYFTGWNRPKYHEEYQLPKFISKITGQARVPFGDCIVQTLETRLGCETCEELFTPESPHIAMALDGVEIFTNSSGSHHELRKLDTRLKLITEATKKCGGIYLYANQKGCDGDRLYYDGCASIIVNGNVLAQASQFSLKDVEVISATVDLDDVRAYRNQKSASVQAVNQSEKFKVIYTDVELSPSDYVFDHSIIPSKPQPIKYHTPEEEIALGPACWLWDYLRRSKCGGYFLPLSGGIDSCATAVIVHSMCRLVVEAIPNDEQVLKDIQAITHDEGFVPKTPQDIAQRIFYTSFMGTENSSKETRSRSKELASKIGSYHVDLNMDNLVTSVVSLFEVATGKKPIFKIFGGSNTENLALQNIQARLRMVLSYLFAQLLPWTRGKNVPGLLVLGSANVDECLRGYLTKYDCSSADINPIGGISKTDLKRFIAWAEKNFDLPILHEFLTATPTAELEPITKDYVQSDEIDMGMTYDELSRFGTLRKVDKCGPLAMFIKLYHEWSQPPYNLSAKQIAEKVKRFWFFYAINRHKMTTMTPAYHAEQYSPDDNRFDLRPFLINPRFPHASKKIDELVEEIEKRQHEIDSSNKSVD

SEQ ID NO: 7533 - protein, 397 aa, Candida albicans
MPEPVGIANLPNQRYKIISKEGATFTIMVAGESGLGKTTFINTLFQTSLKPHQEPSHRHNKFTSPHQTVEIDIVRAILEEKNFEIRLNIIDTPGFGNNVDNHDSWVPIIDFIDDQHESYMKQEQQPSRTAKKDLRVHACLYFIRPTGHSLKPLDIEIMKRLSTRVNLIPVIAKADTLSPQELDIFKTRIREIIEAQDISIYTPPLELDDPASAEHAKQLIESMPFAIIGSEEEVEVGPGQFVRGRKYPWGVVEVENDQHCDFKKLRSLLLRTNMLDLVLSTNELHFETFRSVKLGGDEQENGEENGTEELTNEKGEVIKKPSGSKKPRRLHNPKFKEEEDALKKFFTEQVKAEEHRFRQWETNIINERNRLNQDLEEMQSKLKSLEEQVKRLQIAKR

SEQ ID NO: 7534 - protein, 1302 aa, Candida albicans
MNGSAIANGNGSVGVTPALSQVQLQPGSANLTTQSNDSVVPKNKEELNELLSKYYKLLFDSNKLKKEFEKSEDKSEGKFEDVNAQAKLDIESVLAQVSKEHEEYIKDESEFMQELFSENLKGTIKSEGFDNELFEKQVAGLLLLSRDYDLPEKFQKEFTTISDQTKKDDLVNEILEKLTELETDFETRAQNLGIKVPSPSSSSSSKTDKDTLHSPLGTIHAEKIISNKISQRLKELENLPANIGTFGDTDGIDKFKIQALIELKALRLLGKQKLLRHNILVHEAQQVKYADPNLKSLPLALSEKRSFNVRPKIEQRNPQLLAVQLEELKKLEAREAKRKQHIEKVDLVVEKSTSRSEAKYVRDHYRSHYLVRQINNFHQTTEKEESKKLERTAKQRLQALRSNDEEAYLKLLDKTKDHRITHLLKQTNQFLDSLTEKVRAQQEEASGGSMGTPRHGSPEVAVENKSDDKAELREKTDYYEVAHRIKEKITEQPTILVGGKLKEYQMKGLEWMVSLYNNHLNGILADEMGLGKTIQSISLVTYLIEKKHENKFLIIVPLSTITNWTLEFEKWAPSIKVIVYKGSQQQRRSLQPDIRYGNFQVLLTTYEYVIRERPMLAKFHYSHMIIDEGHRMKNAQSKLSQTLRTYYKTKNRLILTGTPLQNNLPELWALLNFVLPGIFNSVKSFDDWFNTPFANTGAQEKIELTEEESLLVIRRLHKVLRPFLLRRLKKDVEKDLPDKVEKVLKCNLSGLQYVLYQQMLKHNALFVGADVGGAKSGIKGLNNKIMQLRKICNHPFVFEEVESVLNSSRLTNDLIWRVSGKFELLDRVLPKFKKSGHRVLMFFQMTQIMDIMEDFLRWKDMKYLRLDGSTKAEERQDMLKVFNAPDSDYFCFLLSTRAGGLGLNLQTADTVIIFDTDWNPHQDLQAQDRAHRIGQKNEVRILRLITNDSVEEVILERAHQKLDIDGKVIQAGKFDNKSTAEEQEAFLKRLLEADANGADNEENDSLDDDELNEILARSEEEKVLFASMDEERKSEKVPYKSRLIEKDELPAVFTEDISHHFEKKEKELSKMRDKKRVRYDDGLSEEQWLKAMDDDNDTVEEAIKRKEERIAKRKRNKAIREGLLEEDIKDDEVGEEDDEDFEEAAQPRKRQRRARTPLPHIDNDDINGDSGNGGGGAAIELDDDNDDNEPETDGFTSKCLSVIDEITALTDETDGHNLSDIFIKLPSRKLYPDYYSIIKKPVSINQVKKQLDQEKFASFEDFIAELKQMCLNAKTYNQEGSFVHTDATVIEKLLDEKLANQE

SEQ ID NO: 7535 - protein, 720 aa, Candida albicans
MGKTKSRGRRAEKKNKKNEPGFNEDVSNLDSDVTITNQEPLSSSMSSTSGIPNTFFGLVDNNELDYFKQAESTLNINAFETDEERQGFINSVLEEAQGKELKLVTNQICSKLMERLILFANHNQLKKIFKQFQNHFVSLAFHKYASHVLETLLVRSAALIEKELTQTDEEKLEEAEEEEAEEEEAEEDSLNNDVPMEDLFISMLNEFKPHLTTMIDHSYASHVLRLLILILAGKELPSSVTSNSTLRSKKSKIARKMIEIKDNEDFDRAFQTPQSFKNELREYCQTIIVGLDTKSARELSIHKIGSPVLQLLIQVEGLVDRERSFWHLIFAKDSEGKDSVEESFVEYLLSESVGSHFLESIIKNDGARPKYIERLYKLYMKDRVLKLAKRSTTGVYIIQALLFKLKPVEVEYILDQIIPELAELISIAENQNLDLANKLIDASISRGNYRRDEIINQLFIKFAPNYDIENPSDNTSTEFIENILQLTGSTLGNTRDDWPTAEERKRALFLEKLMEYDYKFVICTWFNFMALPIERFVQMCFHGVFCHVVEKALIVEPEEPKPIQILRKRLLNIFQGQIVGLACNSYGSHIVDSLWNFTVLLPMYKDRIASELLGDSHKVKESTYGRLVWKNWGMELFVRKKYDWKALIKQQEQEYYGETEDSTEKRTKKPIELKMERLAEEKRRQEEMAERAQSGYTKRKLEEATGTASEKKQKLRGRRR

SEQ ID NO: 7536 - protein, 159 aa, Candida albicans
MKVLTERDSFLSNYEVLQHLQNIKKKYNWSFNPNDEKFMKNKKNKHHFTGCGINLEIITRDVLSCLENNESSLIQSTKSFKQLMEFLNQFELMKVEKLQIVNSLPRSLVVLYALVEECEDRFGEETSESIIEKINELFPIQEEEEEEAGEGEEDAEINE

SEQ ID NO: 7537 - protein, 413 aa, Candida albicans
MSVQETPTKGLTGKISDLDMSNMKGKSLTDKLAADAKLKDEAQTIHEVKQAVASTDKATEEKDDSLKKHQDFLAKHKVHRHKLKQLEAEEPLLVENKRRYVMFPIRYHEIWNFYKKAEASFWTAEEIDLSKDLDDWNNKLNENERYFISRVLAFFAASDGIVGENLIENFSTEVQLPEAKSFYGFQIMMENIHSETYSLLIETYIKDPQEADYLFNAIANIPCIQKKADWAIKWIQDDEALYGERLVAFAAVEGIFFSGSFASIFWLKKRGLMPGLTFSNELICRDEGLHTDFACLLFAHLQNRPSPEIVERIITEAVDVEKEYFTDALPVSLLGMNCNLMCQYIEFVADRLLLALGNKKVYNVTNPFDFMENISLAGKTNFFEKRVSDYQKAGVMAKTENKEADAFTFDEDF

SEQ ID NO: 7538 - protein, 1847 aa, Candida albicans
MSGIFNWSSDVFADIYNTLKFESNIDLDTIDFTSIKNDLANVLITPVPSDQSRSKLGDASKPVALPSGDEVKLNQASIEITGVLSNELDLDELNTAELLYNASDLSYKKGTSIGDSARLAYYLRAHYILNIVGYLVSHKRLDIITNNNQVLFDNILKSFSKIYTLSGKLNDMIDKQKVTGDINNLAFINCINYSRSQLFNAHELLGQVVFGLADNYYESYGTLNNYKSLVEFISKNISDEDVFVIHFLPSTLQLFKKLLQLGEESLVDQFYKTITSSILKDYEANNFSKSEDIDLSKSKLSGFEIVTSFIFLTEFIPWCKQSSSRTAKYDFKDDILKYMEFLISYGVMERLLSYCSETANAKTQQVYDWSNMYDFRALLQKNFPRLTPAKFHYPGNQELLNAVRPGYENVSKLIDISFLTLDPSLNETLVSPFFQSFFSVFISNAAVVMTSLRDSEEDFVLSSLNESDEEEEEEESDSDEDSSTPKNKEKSTGLDLDKIAQRAELERFYLAFAYTYNNRPELCALFWGNEQVTHDIIGFISWGLANNTSPLITATFCLLLGSLASAGAEATSRIWEILVHNNNNASTRKNDFSKISVDSLYDSLKYYIDSLNESFEQDLNAQLMLNQKKQDFLFSTTTSKQDLDDSGENRIVIELAEDSLVFISGFIQLLSAIVKNLNTKNERSKEIKSVVYTRFSPIIKGFLKFDNLINGSRFLQVDASIQSTNNPKFIDLPNVFVSDDSRIILTNLILTFLGDFVTNDSDPYIRYEIWRLVDRWMYQGLHSLPEDKKDDAFRHIKRKYISKKNVPINQAFSTNLTHLSQIGNFTVLVKKLLTPYADSNEAFTKYSLLYPCDLGSGYRFNNQLGIWPYIEFLMQNVFANSATIANKRDRVNLQLNLLELFSNALQEVDWKFLIDVAPKIIRDLKNFNGIFDSLIPGVQLDFEVFVKLHHSVAVINYLFENKTFSALFKLVNIGVDSVNESGESAALVSHALGLINSLLRVQNSFINKLLPILRNKDTQQQLHCGTAIGIGTSMSLSLATPRTIFDCIYYPKNLGTHGVADFYEVILFHLSAVVQFALYVSCENTISNKAISILKGVSQSKFFVTRVSSSADPLLNNDRLITTFENIDESIKIKFAFIDKFEELEDSLNMKYEILDFVLGNLNQFDGKVATTAHFLLGYKVKGDTLDLVQTNDQNTLLKSFLNTLSISLDLISEIDYNNGNNHIIDVGPAKLSSLILQILIKLCQDPISSSITLNQLREYEELFEKLVNCQPKLDLNTVWCGNQFDGDLQIDASNVFVDNQASTQAFFSFINQRNLILQYLSLEFHSVKSRTKREYYSKVLTNDKEFVNRTPKVLTFLNILNYSFKNFEVQKYEWLDQKFNMSLLLAEVNAQKNGTLDFSVLTKVFRLLCQTSNLITPESKQLFAEEIMVEGSKISDFVTKYSVSTDLKDVQLKCLHSWCQLIEILVTDSGINSSNFILEVLQVIIPKINDYFDVDISFSEEMVSLCVLLFDLYDQSTLADRKGEDFALGIERLIPLFQTCIAGILNSNSTPSLRSDLYVVGNKFLLKCFERESFLKQVMHIIKSVDKKFFQVICNDAIYSEGPSRITSTLFLESLVHLGTLVKVDFILNALIKNNALSLLVRSVKRTDAMIKLCQEKNSGVTLDHFIFDLMAFKATLYFFVRVAKSKNGALQLIQNELFSILHQSKFLQIDPDIGLSLRIEEVQDHKTVNVNVLLDTPLSITDLVDPYKLRSENTISYFEFLVPIFQLLTTVLLSMGPNYQPAIIQTRELMKSVNRLVVGVMKRDFLVETKQIGQGLYKEESHELVSLKELVKLFILIDSLAHYSV

SEQ ID NO: 7539 - protein, 714 aa, Candida albicans
MFGGQQNNSGTNAFSGFTANNNTNSNTSSQQGGTSVFGASKSAESNAFGASNSTSKPLFSSGAQQQSSSTPAFGAPKSSSPFGNASTNQPNAFGSAFGAAPKTGGLFGANTANSTAQSGSIFGQKKDDATSGSTGTTSTGLFGANPASNNQSTGVTFGAPTSTTSNEKTEEPKSTGPFGSKPADSTTSTGTTGVSFGTQNQTTSATSGGGLFGAKKDQSPAPTGGLFGSTTTSQDAKPANDTATSSESKPAINMFGSSSTTADNKLGSGSSFGSNNNPLFGGKKDDNKSSAFTLGSKPENNEGPKAPFFAANNDTSKPATSGFLFGAKKDEDKPASGGFLLSVKKDDDKDKPTTSGLSFGAKKDDNKPASGGFSFGAKKDEDKAASGGGFTFGAKKDDDKDKPASGGFSFGQKSDDKKEDKSGSGNATSATTASTATTTTTTAQPNLKPTKIEPIPVSIDNKTLDDLIVKWSKQLTTTTKVFDSYTTKVKEWDQKLVESGDDITKLNQESLEAETLQSKINQQLLFVENQQDELEKILDNYEQQADILLNNMELNNNEVVNAPSSLIHAVDGSNKDTNSKDASASVSSSNPAASGGSSSSLSITDKLRENAYHNAELLDERLDNLGANLGTLINEINSVSDVFNKNLINELANKADARDSTSKKDDIKPDENNPFEEIVRLLNLHLENLKYIENAEEELKSKLEKLNKTKKLNH

SEQ ID NO: 7540 - protein, 648 aa, Candida albicans
MLSARNSLKNISRQFPKALTRAQSTAAAPTGPVIGIDLGTTNSAVAVMEGKTPKILENSEGGRTTPSIVAFTKDGERLVGIPAKRQAVVNPSDTLFATKRLIGRRYEDPEVQRDINQVPYKIVKHGNGDAWLEARGEQYSPQQIGGFILNKMKETAEAALSKKVNSAVVTCPAYFNDAQRQATKDAGKIVGLNVLRVINEPTAAALAYGLEKKDGEVVAVFDLGGGTFDVSILDIGAGVFEVKSTNGDTHLGGEDFDIALVRYIVDAFKKESGIDLEKDKMAIQRIREAAEKAKIELSSTVSTEINLPFITADASGPKHINQKISRAQFEQLVEPLIKKTIEPCKKALKDAGLSTSDVSEVILVGGMSRMPKVVETVKSIFGKEPSKGINPDEAVAMGAAIQGGILAGEVKDVVLLDVTPLSLGIETMGGVFARLISRNTTIPAKKSQIFSTAAAGQTSVEIRVFQGERELTRDNKLIGNFTLSGIPPAPKGVPQIEVTFDIDTDGIIKVSARDKATNKDASITVAGSSGLSDAEIEKMVNDAEKFAESDKARREAIEFANRADQLCNDTENSLNEHKEKLSSESVQKVQDQIQQLREIVLKAQAGEEVSPEELKQKTEELQNEAINLFKDLYKDGGESSGSSEQPKN

SEQ ID NO: 7541 - protein, 211 aa, Candida albicans
MARLSGQSSGRQTGQGTSAEAIRQQREELRRQRELRLQQQQQAERQQQRQQYRTEQSPIVPAATSSSRYSQFGIYRNQPGDVVDTLASSLPRRTTTTRPEVNRTVPRVKKRYRPGTKALREIRQYQKSTDLLIRKLPFARLVREISLDFVGPSYGLRWQSNAILALQEASESFLIHLLEDTNLCAIHAKRVTIMQKDIQLARRIRGQSWIL

SEQ ID NO: 7542 - protein, 248 aa, Candida albicans
MPKLVLVRHGQSEWNEKNLFTGWVDVRLSETGQKEAKRAGELLKEAGINVDVLHTSKLSRAIQTANIALDAADQLYVPVKRSWRLNERHYGALQGKDKAQTLEAYGQEKFQIWRRSFDVPPPKIDPKDEYSQVGDRRYADVDPAVVPLTESLALVIDRLLPYWQDEIAGDLLAGKVVLIAAHGNSLRALVKHLDNISDEDIAGLNIPTGIPLVYELDENLKPTKPSYYLDPEAAAAGAAAVAAQGQKK

SEQ ID NO: 7543 - protein, 404 aa, Candida albicans
MRKCKIFVGSSHPELGQLVCDRLGVEPAPCTLKKFSNGETSVQIGVSVRDEDVYIIQSGSPHINDHIMELLILISACRGGSANKITAVIPQFPYSKQSKMKKHRGAITARMLANLLVMAGADHVVSMDLHASQMQGFFSKPVDNLFGAPTLARWIRHHIPDWENAVVVSKNPGGTKRVTALADSLKINFAMIHTDRRRTQDEYAKKKELKQAQIIEEGEDNIVSELQTARVVQGHVVDDDYQANGTSEHLAKEGILDSDVLGGTYDATGSDDEDETTTSSEEKLITLVGDVKDKVAIILDDMIDKPNSFIAAAEHLRLNCGAKAVYVVGTHGVFNDKCLKDLTDSKCIDKIVVTNTYPISKEQIEKHKDKLVVIDVSPIFAECIRRDHFGESISVLFDSLSSIE

SEQ ID NO: 7544 - protein, 1368 aa, Candida albicans
MKRKRNTIPESDDDASFVNNSDYSVLDKSHTQQTLDGPFDVHKSESEHSIGETNESKMISHNTLETSTNTQLVSPKDTNDLKSQTDLNIENETDRPVVDGSDPVPSKKLDAPTSEAKMYSSPLSLNTHDSIAQDTKITQEKRNEPRLVIDRLVLSISKSLCGKKVIGPFHSSFSAVVGPNGSGKSNVIDSMLFVFGFRASKMRQGKLSELIHNSGDQRPDYCQVDIHFQMVVDDLVVPQKADVVPDSELIISRKAFRNNQSSYYINGKTSSYSEVTTLLKNKGIDLDHKRFLILQGEVESIAQMKPKAEKENDDGLLEYLEDIVGTSKYKKLIEDSIVRIDELNDICLEKANRFDLVEKDKDLLEEKKVEALRFLELEKKLINCKSVQFQIEISAHQKRIAAKQAEADAIEKELEENKESNKEILEGIESELSTQKEIERDIKVLSAEIDSLGKNRKDISKKNVSLEEKSKNNANKLKKIQKSLENSKHTVSSSNQKLSNYAVTTEKFKSDIDRLNKELETEEARLNDIRSSLTEKTSEFTKEIQSLQKSLDPWDSKLKEKENEIKLAESAIEILRSQLNSTTNQLEEHKERLIQIKKLGKDKEVEYRENESKLGKIEEQIALGEEQCQTAKSALNNFKSQLMSFRQKTQDSAAIVHNTQNKNKVLTALLRLANSGRIQGFYGRLGDLGTIDQKYDVAISTAAPGLDSMVVETVETAQACIEYLRKNKLGYANFICLNKLRKFNLAPIQTPGDPSSIKRLFDLIQPSSSKFAPAFYSKVFNTLVAPNLNEAKKVAYGAKRWKVVTLDGKVVDTSGTMSGGGNYVSRGAMRLSDSSNSNDQAITADELEKMNTKLQEMENEFEQMNSDYNEKIAMLNKLQVLKPETEFAISRLKLDIQSLVSEKKEVTQICKNLIAEQQKLEENNPFEQQLLSKEKELEELVNAKTQIKEQMSGFEQKISVLEQKIMDVGGVELKVQSSKVDSIKQQISIIHEKTSGDRMTVKKLENEINRHTKLIESLTTEQEEAEAELEKINEQQRSLLSKLEEVNSKLKELEDERNDKEDNLEKMKHDLEEKQDQINKFKSVEIELLNKLEKCKGTLKGLKQAIEQNKEELDALVIRDVEPYISWLDETEQKKYNGALIDTLSEEDIADVDLEAVTSEIEELENYMANVKVDIEILKEYGAKIVEYNDKKSDLNQAVAERDSKKNYCDDLKRKRLDEFMVGFNTISMTLKDMYRMITMGGNAELELVDSLDPFSEGILFSVMPPKKSWKNISNLSGGEKTLSSLALVFALHKYKPTPLYVMDEIDAALDFRNVSIVANYIKERTKNAQFIVISLRNNMFELAQQLVGIYKVNNKTSSVSLANIEMH

SEQ ID NO: 7545 - protein, 931 aa, Candida albicans
MFGFSLLTPGDNDHSFKAALLEFDNEFKLIADPSWNGVDVNAAMFMEEHLKETNAILLSHSTAEFISGFILLCIKFPILMSSIPVYSTLPVNQLGRVSTVEYYRAMGFLGPVDSAILELDEVDNWFDKVNLLKYQQSLNLFDNKVVVTPYNAGHSLGGTFWLITKRIDRVIYAPAWNHSKDSFLNSASFISPSTGNPHLSLLRPTAFITATDMGSVMSHRKRTEKFLQLVDATLANGGAAVLPTSLSGRFLELFHLIDEHLKGAPIPVYFLSYSGTKILTYASNLLDWMSKSFTKEWEELSSVPFNPSKVDLLLDPSELLKLSGPKIVFCSGIDLRSGDISAEAFQYLCNDEHTTIILTEKTTMNFASSLSSVLYTEWDSLAKKRGGGESEDGIAVPIDKNISLKNWTKEVELTGTELTEFQEKVAQKRKEKLLAKVRDQKNQNILSADTVDSEDSSDDDDEGDNEAEKQKGNTSSNLLIKQYQNINVADSNVAPNEVNPLATHEAFITDHIKQSLEKNLPIDLKITHKLRPRQATFPYFATAHKQKFDDYGEVIKIEDYQRHDEVSHSKIIMEGKRKFDEKRTANNRRNKNQNKQQANKLTPQEQVNRKLLQKYLDTLSNPKKRVGLNYGTKKKSETQKLKVRCGLSFVDLSGQVDLRSLGIIVQALKPYNLILLPDYTPSQNLTRVQEFFANQQNEQLQEQTKKNLAQSSRYLSLVSIRDGLSSAMSPYSSGNMNVMVVHDNESVKIGAESESGSIGINNFEVNLDDSIVKDLKWQKIGDDYKVAKLYGELELQNQFPAAKKTRTLQDYINSNTHFSLRKLDGTTAVKRQETIANQVQDPKIRALITNGPKLAIGNIRLPDLKKKLQNLNMTAEFKSEGTLVVNDILAVRKIAYGLVESDESGDIVIDGNVGPLYYKVKECIREMLAYV

SEQ ID NO: 7546 - protein, 732 aa, Candida albicans
MGYKNSDNTNNKFSRKSMSPSLTGGKGRKTVGKKVKKTIPRKTVNWSSYDVNSDSNEDSDEESENENENENDSDNDDEDDDETEHHHLDGLYSLMGKRPHDSSSNGDDDDDDDDDNDNKNIFSSTSSDGDSDEAMFSSSDDDSDVDFVKLQAQQKAHALKIAKARKGLKSKPKNESNDNAIASSSESQSNSESHNEHDDDDVDSIKKLIPRQKRFLKYGRRRSDAEEEKYLVNEFETNGFDENEEDEDEDDLHTFDSDFSTTNRIVNSFKGIGEDRSKPIVKYESSVSGGSDYDEDDYIDLINFDVPLFDDKNGHLDGGKKNSHHKGNTDKLKKDKVKQRANSNHNSDEDDDSYLWNYFFSSDNDSSSEETDDKNNSKTVNKSRKNKKNKKALTNNAITGADELFEQIENDNTFKSKSKSNHHGNSLYKAYSDSPMTIQDLEAEIRAGADDDDDDDYDYDSSESTDVDESLPKSSSNNNLVGSSKKATEVLSSKTADYRPPKLGSWVTVDCKPFGVIDGLSTRTLQLNKSQEPRSAAQSGTSHSTSIVNSSNGSGLGLPTTSIASSLAANPRKSIVVGPTNVPSSMISSDDSALGLDELLNVSELDNDDENDVKIWRDFNNNQNKKKIPLGAFRNKSVLYNNHIYQDDQHHHLHRRNSNADKKFNGSGHIKKQQPIRRQSQSKIERRRASIVEAVSQGYRPTKSGLFSETALADVEELLGDDRDLMELIQGL

SEQ ID NO: 7547 - protein, 728 aa, Candida albicans
  MISC_FEATURE (723)..(723): X=any amino acid
  MISC_FEATURE (728)..(728): X=any amino acid
MSFERPEVFSAHVLPGEEPAENSYNEITKAFRSFILEYRIDSQFIYRDQLRENLLIKNYFLKVEADHLIAFNEELNKKLSDDPAEMIPLFENAITDIAKRIAYLSNDEIPQDFPTCQLILYSKANETSIRHLDSDHIAKIVRVSGIIISASVLSSRATQVQLICRACKHTMKITVKHGFGQIQLPPRCLAPHNSDPNSTEEKCPNDSYVIVHDKSTFVDQQVLKLQEAPDMVPVGEMPRHILLQADRYLTNQVVPGTRVTIVGIYAIYQSKQSARNNSTSNVAIRNPYLRVLGYQTDIDNGANGQGIIFSEEEEEEFLRMSRMPNLYETFVNSIAPSIYGNEDIKKAITCLLMGGSKKILPDGMRLRGDINVLLLGDPGTAKSQLLKFVEKIAPISVYTSGKGSSAAGLTASVQRDPQTRDFYLEGGAMVLADGGVVCIDEFDKMRDEDRVAIHEAMEQQTISIAKAGITTVLNSRTSVLAAANPVFGKYDEFKSPGENIDFQSTILSRFDMIFIVKDEHNEGRDISIAQHVMNVHTGGRAQDLLQEGEIPIEKMKRYIQYVKLRCAPRLTAEASERLSSHFVSIRRRLQLNEAEMNERSSIPITVRQLEAIIRITESLAKLRLSPVATEEHVEEAIRLFTASTMDAVDQGLGSSNDVTLNAEIKKVEQELRRRLPIGWSTAYKTLRKEFVDSGKASASALEKALYIMERHEVINSDTRDRTXESVVX

SEQ ID NO: 7548 - protein, 1011 aa, Candida albicans
MARFNNEEILNSVGLPSQLLQQIKNKENKGDYDDDESEDRFTKFENIRGTKRKSKPISRKDKRKQERELKKQKRIKKDTHPQKVQPKKQNEKTADPLALLAAKKNKSKSKKAEEDNPLMALRKLKENKNSKKTSKAKEDFKIVKEDELLVDEVSDLGYSEDDLGSENKEDFDEDENIDIDPMEALRALKEKKKGVNKASSDIRIVKEDDLEQEDDDISDFEELEEENDPLEALRLLKSKKNKPTKTPIIRIVKEDDLEQEIDDDVSDLDSDENVDDQNEEGEDFEGFEEENFDESDFHLSEEEDPLAKLKAIKEAKKNGKSEKTKKKQEKEVYPIDPHLQEQFRKDDEDIEYYAKKLGLKNGKKAKLSKTDDNDIIGGLLDGLDLDFESEMENISDTADEHISEEDEEDDEYFSDDVDDSEKMKENPYVAPGSEEIKSSEESGLAPQRYIPPALRKKMALEAGESVSEETLKLRKSIKGPLNKLSEANISSIVSEINALYLSHPRQTLNEEITNIILDSIVQQGRLLDTFVYLHATVVVALYRLQGVEFGAHFIQTIVEKFETSKTESSKTKEASNIISLLSSVYLFQLVSSKLLYDLIKELINNLDENNADLLLRLIRNSGNQMRSDDPSALKEIVLLINGKASTLPKDAVNTRTQFLIETISSLKNNKLKIVNEANHQLSIKLKKFLGGINENKSGDPIQVSLEDIQNVATRGKWWLVGSAWKGHETDKPKDVDVVAMSDILDNAEPNWMELAKSQRMNTDIRRAIFVSIMSANDYIDAVTKLDKLALKRNQEREIPKVLIHCATMEPSWNPYYGVLGNKLCDSHSFRKTFQFMLWDLIKRLDGGSADDEEEEDNFIGFDTFDEENKMIRILNLGRCYGFLLAEGSMPLHNLRTVNFLTASSDTVLFLEVLLVSFFDQVGKKSRKNSVGGGLQNKAKGMYEQKYDDRLLVERVLKAKDQTTMLRGLQYFVQEKVKTSEVVSGKKQSKRVAWGVDALFDIIDEFLKDSED

SEQ ID NO: 7549 - protein, 808 aa, Candida albicans
MNKLPKGWNFTIVDDNADSTNSENIQGKRPRRSRTSVQRSDGASPIIRDNIVLIRTDDNEEFKVGDTIEITQGKGPEDPTTEYGLITEIKFGNSEFIEVIVDWFIRSSEIVGMPNDFFADNELLLTPFRSEVKFIDFIRPINVLSESQFADVVIDESNSHSTFLVKRATDNEGNFSDIFDYKDFSGKVLENPKKCAIQVKELISTTVQKELLKEFSKEQRKKKANKVSTTGRVTRFNKRKESVSTKAIKPENKQVKIEIDNDVLSDQSEEKQEESDYNEAEDANSALESDEENISQESEDSEVEYSTKKKLKNKKLSRRSKAAATPSPKRKLQKKDIEDIYSVVTPTKRMKLGKDDRDSLPVFLSPTKSVPSEFTDPKSVAFKEVKQRLHTSQKLNALPGREDEFAMIYMNLESAVNEKTGCCVYVCGVPGMGKTATIKDVVEQMTYSSERGEMEQFSYLELNGLKLLSPTVAYEALWHHISGDKVSASNAALLLEEYFKREDHKRKPLVILMDEFDQIATKKQNVMYNFFNWPTYSTSKLIVIAVANTMDLPERMLTNKIASRLGLRRIQFRGYTFQQLGDIITHRLEMITKNNRRKVVITSDAIGFASRKVASVSGDARRALTICRRAVEIAEKEYLENKKGEDDSEPYQVLISHISTAINETVNSPLSKYIASLPFASKLVLASLLRRSRRTGLAENSLGDIIDEMRNSFAMATHSEEQGSDELNMQDVLYSDKTFTATNETAPILNLRIHFFKQIVTSLVEAGIIIQQNSPGERSRLVKLDVPEEEVVSVFKKDNAIFTVFIDK

SEQ ID NO: 7550 - protein, 166 aa, Candida albicans
MSSTKHPPLPSVTNQKRKRKRQRLFAKDIENLLYAMGDRPVSTEATVNALEDVLVEYISQISYSMVNFAKSQNRTRVKLNDLAFTLRNDPMKLARFRYILEQSYKIEKAKKMFDDDKYDNKNHEDDDDDDDEEDEDNHENGRNMKDKSSTKNDSKQSKKKKKKNHT

SEQ ID NO: 7551 - protein, 262 aa, Candida albicans
MAIKEETNEFSQGNEGNSHSTNNNNNSNNSNSNNNADVSAPVDDDDDDDGTSQGKTQKERRKIEIKFIQEKSRRHITFSKRKAGIMKKAYELSVLTGTQVLLLVVSETGLVYTFTTPKLQPLVTKSEGKNLIQACLNAPEEGLGDDQENQSDGNTGDSPDQSPAPATNPNVMGAAGHAHHIQQQQQQQQQAQQQAQQQMAPMPSHGLPTHYSNPQGAGNPGVPPQQQGQHQPGIPLQGGYSDQYSYFGNIQNNNIPNQQQYQ

SEQ ID NO: 7552 - protein, 168 aa, Candida albicans
MSSLDNDKTENFIQERLDSLHEIDCKVVTLLDQFSSIFQSFYTKSKEDFSQQTSDIYSTLSKVAIDLRKEIKIMDDNIGAYDKNDDNVMILPISNVDQKNTKLGRKRLDLELAELKRLISDEKQVETLENESNNEIQPKTESDTNQVETNENGNDINNKESEDIEMKE

SEQ ID NO: 7553 - protein, 353 aa, Candida albicans
MIFKLPLILLRLYITSFIIWIFQTTILPQTLTKLTNVSIKTQTFQHYYPYTSLVNTPKNSNSINIITNSNITYIIAHPDDEVMFFAPSIIELKKPKYNNQINLICFSKGNYIKSMDEIRQSELIQSSRILGIDQVSILDYQDGMNETWQLNDIVQSLHENLSPTSSGSDTNSNNKPSVLITFDDQGVSNHPNHISLFHGTKKYIQELRRKSENKNKTRIKTTTTTINYIDIDSSSSTKFYVLKSLNFFEKYSFTILGNIEILFNFISLLIKKFINININVSFFSNQIIKSKFDNNNNNLQLQNLNDIRFYSDLNMLSLSYAAMAYGHFSQMVWFRYAWLLLSRYLTYNHLIEQ

SEQ ID NO: 7554 - protein, 1094 aa, Candida albicans
MKRIMAPIEQKRNLAGNYSIPDSLNKELQKEFAEDVSTPMDKLQDDIINQNNYNKKRFQRSIVLDLDEQKSYKQIMNERNLEREELLVEKLIKEKDDGTTQTVENPQERLLPRKRKKRWDMTPEEYKKQKECENNKELVKKSTSSLIAELVEGKVPVVRGIPLTDSILEKILPPGYVKVNPPAHFKQNEETLPPDLSDAVVSSDYYLPPTNESVGISTTEIPTDVPGVKGLEFFKEEDMKYFGKLVHSKPESLNDEEKKELNAMKLVLKIKNGSPVTRKRAMRQLTNNAAKFGPKVLLNQILPILLEPNLTPQERHLLIKMIGRIIYQLDELIRPYTSKVLTVISPFLIDEDPTVRLETREIISGLTKAAGLANIISTLRPDLDHVDEYVRNLTARIFAIVANTLGLKSFLPFLKAVIKSKKNWTARHTGIKVIQQLCIMLGRGNGTAILPYLANIVEILKPPINDESLQVRTITALTLAQLAENVSPYGIDSFEPILEPIWFGIRKHRGKGLASFLKCIGAMIPLMSYDPNYEDYTNYYTTELMHIITREFRSPDEDMRKTILRIIMGLPLSRKLIPDYEKSIIGPFVNAFWNRRTASDSVQITRLVVEATNHLAIKFDFLDMLEHIVYFTKDDNEQLRKLAIEAINKLISNNSQELIGMDSQLDRKLVDGALFAFQKQTIHQKIYLTCFGTLADALNVRLKPHLNSILSTILYRMKNKLAEIRQQASDLIAIIAPVIKQCSEHDDELLMKLILILYESLGEVYPEVLGSILNALYSCLDSIDKSTLYTMSNPSINQILPTLTPILKNRHEKVQEACIKLVGLIARKNSETINAKEWMRICFDLLEMLKAQRKRIRIAANNTFGYIAKTIGPQDVIVMLLNNLRVQERQLRVCTAVAMGIVAETCLPFTVLPAIMNEYRIPEKNVQNGVLKAMSFMFEYLDGKITKDYLFAITPLLEDALTDRDLVHRQTAATVIFHIAMNCIGLTDKDYSDVFIHYLNLIMPNIFETSPHVISRILESIDALRLVIGNGVFTNYIWSGLFHPARKVRAPYWKIFNNAYVQCSDALVPCYPRIESLPDEDEISYKLEELDLFL

SEQ ID NO: 7555 - protein, 569 aa, Candida albicans
MAKTTKVKGNKKKSDTSKVVSKVVSKLSRKRSHEDSESEVEDNEKVVEELDADFDEVAGLLGDDIEDPESKSQSKKEKQKAKDEAKLEQLTKPQVSNEVPDNDNDDDSSEDVLFENADFSEPTMKAIKEMGFTKMTKVQAKTIPPLLAGRDVLGAAKTGSGKTLAFLIPAIELLYSLKIKPRNGTAVIIITPTRELALQIFGVARELMQFHSQTCGIVIGGADRRQEATKLAKGVNLLVATPGRLLDHLKNTQFVFSNLKALVIDEADRILEIGFEDEMKQIIKVLPNENRQSMLFSATQTTKVEDLARISLRPGPLYINVVPEKDVSTADGLEQGYVVCDSDKRFLLLFSFLKRNVKKKIIVFLSSCNSVKFYSELLNYIDLPVLDLHGKQKQQKRTNTFFEFCNAKQGILVCTDVAARGLDIPAVDWIVQFDPPDDPRDYIHRVGRTARGTQGKGKSLMFLTPSELGFLRYLKAAKVPLNEYEFPANKIANIQSQLTKLIKTNYLLNQSAKDGYRAYLQAYASHGLKTVYQIDKLDLKKVSASFGLDQVPRVNLSIGGTKTKKQKRS

SEQ ID NO: 7556 - protein, 874 aa, Candida albicans
MSRFFVSGYTSDSSSEEEDLLSTSEEELLSSSDEGEDNESDSSFFGEDDDESEESSSDDEDGRPSGPAYFLKKSFLKGAGGDDSDSDSDDEGRKVVKSAKDKLLDDMKSSIEIINSNKYNNNWSIVLGEFDKFGRFLIRCNQTNLGTPKFYIKLLTSLDNSITETSNNERDDKTLKADEARAFNTLRQRIKKQIREFQVYYDLYKENPEEFDENEDEPLESVQAGLNDNVKNEADNSNVGALASNRVLSPIFHTLKTISESRGKKNIDKLEQIATLEKLLEANVSKSSPFELISIYQMLLSVRFDASSNQAFMPLEQWQKNEHDLGKLLDLLEANVDTYQVSELGSTTDDIDIEPVANAQGVKVIFGSITSSIDRLDDELTKSLQHTDPHSIEYVERLKDESTIYNLIVRGQAYVESITPEDVKYNSEQLARIVLRRLEHIYYKPKQLIKANEEEAWRNIEYNSSIVSKGSSVDEVIDQLTEFLQKQQKNKTYGKHAILFSIYYYAVNSQYEKAKELFLRSQFYSNINSAESSLQVQYNRALVQLGLSAFRAGSIEESHKILNEIVNSQRSKELLGQGFNSKFPNQATVLERQKLLPFHQHINLELLECVFMTCSLLIEIPTLAAIANNHKDSKRKNASLKSFKSKLDFHDRQFFTGPPESIKDHIVHASIALQKGDWLKSYNLLSSIKIWKLFPDNDKLLAMMKNQLQIEGLRTYIFTYKSVFKKLSIEKLQQIFQLSKDEVVSILEKMITTGNVSGGEIIDNKFISFTSTTEPQRSKLQELAIVLNEKIQLLTEKNEKTQSNGYGKKQQNKDQQNQQQQNQNQNQQQQQNQQQQQQQQSSQQQSNNILSEESANKFRYANVNSNNDEFQATA

SEQ ID NO: 7557 - protein, 662 aa, Candida albicans
MSSLVKKGGTSFTPKLKKVVRKKPVTAAKPPATPPATQVKEGDDDTSTVIFDTKNTSGVLAAGIETSTADVETSIATPASTQLPDSPKSKPAFRIGLTKTSSSDKSQKDNDIDPKDSSKQYANENENENENAIASSSEEDDDEDIFKPPVDPSKSRRQSITQRRLSNITASGLRSRSASISLHTADSNHVPAKIGIPVSKPTKRRRSSAQARSSKRVSTTQPAKPKAVVVPTVSTEPTSSSMDKSESSTREEKKPPKKSDIKGISDDFIVGIDPKTQKLTKFRRKGATKVKKESDSVKTENESVKPEGDEVKVEVLSDTDSIPEEPDNLITTVTHIHQIPKNINDEDADLFGEVDIDLEEVTMADLCKPTLRIGKVSTNFELVREAEQQLKQKKAQRRRDRELARLEGISLEDAIQKNEEQRRGNGDDVEKQDEEPKPDSLFDEEPQQAATSLQLTFTDGKIGFNEESAIVAKPRADITSRSVEKSNPFANPITSTTYSRRVFTDKWTSQELNQFYQALSMFGTDFSLISQLFPHRSRKQIKSKFNLEERRFPEVVELALRRKLPVDFEEYCANTKNDIKSLEYYNEELRKVRIEHEQSMNAIALEREKALKEDAEASRRREIEIRTGSKPMSRAEKLKELRKNETVVGSIDDVRKKRETNV

SEQ ID NO: 7558 - protein, 267 aa, Candida albicans
MARKQVKSKVAEKVEKKQNITTPSEKSVEDIEHDLQLPSSSDEEEDIEQEELSEEESSGDEEEEEVEKEDNINGLSDEEQEEVQQQQQNKANKSGHSVNKIIKTSEATTTNTSANNKSTKSKSGVIYIGRLPSGFQESELKTYFSQFGDVINVKLARNKKTGNTKHYGFIEFDSIEVAKVAAETMNNYLLFGHLIKCEVVENPHEDTFKHGNRKFKVIPWKKIAKEKHEKSRTEEEWKVLIAKFEESKQKKQEELKSKGIDFDVSAI

SEQ ID NO: 7559 - protein, 779 aa, Candida albicans
MSTNSKQLNKKKTRLYNSRTIKSQINDQAYDKKQRVLDVNSFIHSRNFEIRSFEQSQLNSKNASSTRVFQDLPRALRRRAASHNVKRIPKRLRKRAKHEMSSNLPVKKMPRGRRLYKLLVRNRLLKVASKMKQNKYDPLENLVNKKNLRKQFKAIRDEIKKIDQEKPKSSTVEGFTKLNNSVGSRDNTGINELAPRPKGSIKYYKRQREFVWIPTHIWHVKRFHMSKKYGYQIPYTPTQKCFKLMNRWNRQKAVCFDTSYFPTFILYVSDGTMFGDIAKQLCGKKVGKKFLNGEKSYYGWIHIDGVTKVCPGFAYMNQSLNTIMVRVVPSMYEQLFQSYKAKIESIPNSTINDCRYALGSIELSGPLSIKCLSKIFHFQNISPDSKSIWASLSKIKDSDLVPVGTTFTFNLQDPRIWQRPTKLRHNHKEDQDIYDIIIALNSSPHIDQDIVKSLTTSEGRYASYKDQLSIKELGKFHANLNKKPSDISHSQIPVLLSKTDSQKWLLILPWHWILPFWIQITKVTDIKPGGSKQMHQFQFENHKPYYPQDFPWSYDGWQYNKLVGEANQIKAAKLPKSQVSVQQSEKNYSVIFNANKCDWTDLRNMVLLMKYSKMDRNTVKKGSGQPDFAQYDGPERIINSVHDLLQTTKSLENDVTDVNETTVELYTNNQSQVDFYNNTYKIANLAEIVHTKLPIVQVSLTVVNDGTIEDNARLYSDPSGTDIHCVGFVTTGAMNLNLGKYSGIGTIIAQKWLIEENGHKLYVRNPGKSKVYSVFFRVI

SEQ ID NO: 7560 - protein, 543 aa, Candida albicans
MYRSHNNNNNYHSRNDGSNGRINKPRDPKSQDKYVAYQQNIEQQLASQEKKQAYRRITDHGNNMGRWYIEKSLGLTNRSQQAIGTIRPESSYLIDLLPSLAYSSSFNLNRRNNKNNLAVLDLQTKFVHLSSNKVKHTINTVKWTPEGRRLLVASHSGEFTLWNGMTFNFETIMQAHESPILTMKYSNHDEWLLSGDQNGTVKYWQPNFNNVNNISAHANGVRDIAFSPNDSKFLTCGDDSAIKIWNFNNGKEERTLSGHHWEVKSADWHPNLGLIVSGSKDNLVKLWDPRSANCVSTLHGFKHTVNKTRFQPNGTARLLASVSRDRSCRIFDLRTMKDMLVIRDSETDLSCVAWHPIHASMVTTAAYNGSISNFLLDSYIPDSNESVPKRSNNNSNLSTNTNNTIDAVQKIPYAHEKAIHAVEYHPLGHLLCTAGSDKTARFWSRARPNDPMAWKDAVYTDSKAGAWYYSVNNNVNAVMEDPNAVKNEDDETANNDDPLSNSGRRRGVGASASGGDTGSVPGLRSRNETPNNGSYAIPGLRGF

SEQ ID NO: 7561 - protein, 297 aa, Candida albicans
MGTQKKEKQRRVRENDTRDGNLRVKGENFYRDAKKVKHLNMYKQGRAIRNKKGEIIKAADLQSTDIPNARVDPNRKWFGNTRVIAQDALTHFREAMGEKSKDSYQVLLKRNKLPMSLLDEKDTTESPTAKIVETESYSSTFGPKQQRKKPRVAASSLEDLMNAAEADSTQFQEKQELDSTLGLMGGSILDKDDFTQEAKEAIFHKGQSKRIWNELYKVIDSSDVVIHVLDARDPIGTRCESVEKYIKDECPHKHLIYVLNKCDLVPTWVAVCFENVNFWTNVFPFFFLLLTFAIPGN

SEQ ID NO: 7562 - protein, 240 aa, Candida albicans
MSGYDSALSIFSFYFNLEVEYASEAVKRGTCAVGVKGKNTVVLGCEKRTALKLQDPRITPSKICKVDHHILLAFAGLNADARILVDKARVEAQSHKLTLEDPVSVEYLTKYVAGVQQKYTQSGGVRPFGIATLIAGFDVRDDVPKLFQTEPSGVFNAWKAHAIGRSSKTVKEFLEKHYEEDLSEEETIKLTVKSLLEVVQTGAKNIEVSVLKPGAVIKKLDVDEIKKYVDAIEAEKAAGA

SEQ ID NO: 7563 - protein, 263 aa, Candida albicans
MFIRSLYHRISNTKTITNLIIRNMSSTSKVESAKKLAAYKAVDENFPKDAKVIGIGSGSTVIYAAERIGQLDNKDSFICIPTGFQSKQLIIDNGLRLGTIEQYPDIDIAFDGADEVDPQLNLIKGGGACLFQEKLVAASAKKFVVVADYRKKSDKLGQSWRQGVPIEIVPNSYSKIIQELSKKLGAKNVDLRQGGKAKAGPIITDNNNFLLDADFGEIEIDNVGKLHEQIKLLVGVVETGLFTNMANKAYFGEEDGSVSVWSK

SEQ ID NO: 7564 - protein, 672 aa, Candida albicans
MSDISKQMNNLSVNDGANTVNNNNSFRGGRSQYVPPHLRNRQGGGNQSGSSSESSDVPFGGSQRGGFNSNGFNNNRGGFNNGGYNNNRGGFNNGGFNNRGNYNQSFGGRGGRGGFNNGGGRYQRPTPGVGKWQDGKHEPAPRNEKLEVELFGTADDSHFQSSGINFDNYDDIPVEASGDKVPEPITSFTAPPLDELLVENIQLSRFTKPTPVQKYSVPIVAAGRDLMACAQTGSGKTGGFLFPVLSESYMKGPAPVPESNGAFSSHKVYPTILVMAPTRELVSQIYEESKKFSYRSWVRACVVYGGADIGQQMRNMDRGCDLLVATPGRLKDLLDRGKVSLANIRYLVLDEADRMLDMGFEPQIRYIVEECDMPAVKDRQTLMFSATFPRDIQMLARDFLKDYVFLSVGRVGSTSENITQKILYVEDDEKKSVILDLLSANENGLTIVFTETKRMADNLADYLYDQGFPATAIHGDRSQYEREKALAAFKNGAAPILVATAVAARGLDIPNVSHVINYDLPSDIDDYVHRIGRTGRAGNVGIATAFFNRNNKNVVKGLIELLSEANQEVPDFLTKIAREGAFGKMTRGGGRGGSSRGPSRDFRRSGNSGWGNSGNSGWGNSGNASSSGWGGNSSSSYSNTNSNYGGGYNNNQRSNFSSGGSYGNQTGSNSWW

SEQ ID NO: 7565 - protein, 798 aa, Candida albicans
MTKDDIKLLLSEDLSPYKLTLLIVIHLYLCNELPIPQLITLTQLIENKQQPRPHNLLSTHNIIHSLSQLCELFNDMNVTKQLLKCIWRINSIEQLENDYINNLIKRVKSVDLITLNITPGSTNSGKVLSSKSLFGSFILKICTSFNSLKFDESFLLFQAFQQFREPTRQRYVELGGDIINENNNLGDDPDRDLFTRLNNNLIELGINNSISLSSLSSPTLTSTPTSTKIISVPKYDFQQLLDRQISLLETYGTPTPQYLKDIMMMMISPNSNVGRIQNIQFNNLPSYYYLRYLECLQISNYNEAFASLHQYFDYMVSNNSKYFYHFALISRASLHQYFGEDNKAMDAIEEAISVARENKDNSTLTYILSWLFNFMKNKPELWKNRQIFYNNNNNNNNNNNNNNNNNESQLLDFLIKKSKQISLSLYSMSYNFKTLYLLNNGDYQSCINSLIKSIFIAINDDVKSTFIKSAELAAIVWSKLGEPILSEVYNEIAIELTDNTIDQFSLFIRSNFLKFLQGNNNINETYNQLQNMKNKVMITTDHSLYNAIQIRMLIISIKINLQKGKYNTSKEIINLLLDTDLKDLELKHEVLMLQVQLEMYLQNYSHALELLASMHTTTTTTTTSSSQIYLTIRLNLLKCKIFISSGNPYRVFSLLIQQIKIATKCGFGMIIIEAKLLLWKLLNDLKSFTDARKLGEEIMPQIFSLNQSEFIAIAYFELARSWSNDNDDDLVKSGEYIKIAIDRFKQNSDLVMLKQCLQYQVYLMNKYNQPQEMELANRLLNEITQELQNEVEQGYIYN

SEQ ID NO: 7566 - protein, 489 aa, Candida albicans
MSIPGFGSAEKVNHTASSVTLTIPQSYEWRIEVPFNRILKFKVLTGIVEINGTELANNTEIQLSGTKTYLYSPVTDAVIEYVLVENKDDLSLVSASDEGFVEYLSDESNMDSILNLHMYLESKRQYTKDYNFSSSIDQQQSGPKVLIIGSKYSGKTTVSKILSAYANKMNNTPVLVNLQPRDGVFALPGSLTATPISDSFDVESCNGYGLTTTSGTLVHNPKQPIVKNFGMADFNDNVDFYKLLIEKLGIAVLSRLDQDLNIKNSGVIIDTPALTSKNFDIVESMVSNFLIDNIIVIGNERLAIELTKKFAYKSTQLNIIKLNKSSGCIEVEDRFIRLQQEQTIKEYFNGNFKTRLSPFKTDIELSGLKIYKNVLTKDLLSQMAFLPGGDDFEKDETNPEEDPEKKQLEKYYQAIEDPNSSNLENSIVAITHLPNNDKKLGKDLLNTSVLGYIHVSKFDDQKKRLKVLFPFPGVFPKNVLISTNIGYNE

SEQ ID NO: 7567 - protein, 221 aa, Candida albicans
MSGFSRLNNNSNINSTNNGVSPNKRNLFGSATAANTSTNINNNNNNSNINSSIIKQELLEEQKLEIREAFQLFDMNGDGCLDYHELKVAFRALGFDLTKRQVLDIIHEYDTDDTNLITYDNFYKTVGEMIIKRDPLEEIRRAFRLFDIDGTGKISVRNLRKISRDLGENLSDEELQAMIDEFDLDEDGESMYYIYKANSFRILVLAMFEWKITNFILFFSQ

SEQ ID NO: 7568 - protein, 670 aa, Candida albicans
MNFARTERRKSMAERRPSTVYTPPVIPHLAGLEKPQDQYLKMDNCDVLIIGTGLQESILAAALSWQGTQVLHIDSNTYYGDSCSTLTIEQLKKWCGDVNSGKIHQFQDAQIYIPGGKQSNQYTSKDYGIDLTPKIMFCQSDLLSLLIKSRVYRYLEFQSLSNFHVFENDDFQQKVNATTKQDIFTDKSLSLMTKRYLMKFLKFLLLDPDYKQRVKPYADTPIQVFLQQEFKLEEPQINELVYSIGLSYKEQTSTKQALIRMKRFLSSFDVYGKFPCMVSKFGGPGELSQGFCRSAAVAGTTYKLNTNLTDFDPISKIAHFNDGSHIKINEKIIISPTQLPKFLQSSYNKVVENLQPYYVTRLVTVVRRDCKEWMSGNESSAIVVFPPHSLPTDNQHSVQVIIQNGNSGVCPDGQAIWFSSTVEQDLSRAKVDLESAFEKMETSLLRESSEEIVNDILGDNNNNNNNDFVMNAQGTTTPVLVNSFKLGSSLINFVPKDKLEIVCKLGYVEKTFINPDLSNIFKPTKTNNIVYKDVEDANNEIIFTNMPSSELSYDGIITDVKSIYQRITGTTDDFFDVDFEDEEDEYDRNNQPVVQPKRSSVVGGIVGGGSITSLTALREQHNENNHSDNAIDSDEDEDEDINDMNDMNDNEEEDDHGRGPEPFGADEMEL

SEQ ID NO: 7569 - protein, 389 aa, Candida albicans
MSVTATSHDILKSIDDSILPPEDTLSEAMYNNVKLDHYFNKLPKSSEENNINDQTNQLIVSAAPESEDSPAAEWKLLRTLAGAHQGWIRAIALDEITNKWYVTGSADSTIKIWDFENNSLKAVLTGHVLGIRSLCISKRHPYLFSGGEDKSLRCWDLERSNSDAGCQIRSYHGHLGGVYSIGLHPELDVLFSGGKDCVVRVWDIRSRVEAMTLLGHTNDITSIETDYNDPQVITSSMDGTIRLWDLRKSKTELLITNHSKSIRSMKSHPKEATFVSGDSNGEIKQWLLPKGELLNEFGTSQLSPNQRDNSRIINTLAINPVTNTLFSGYDDGKLEFYNYTTGNLQQSGQSPSLAGPEQSAIYASTFDMSGLRLLTCHGDKSIRIWGTSY

SEQ ID NO: 7570 - protein, 433 aa, Candida albicans
MDLRVGKKYRIGRKIGSGSFGDIYLGTNIISGEEVAIKLENTKAKHPQLEYEAKVYKALSGGVGIPFVRWYGTECDYNAMVIDLLGPSLEDLFNYCNRKFTYKTVLLLADQLICRIEYIHARCFIHRDIKPDNFLMGIGRRGSQVNVIDFGLAKKYRDPRTHLHIPYRENKNLTGTARYASVNTHLGIEQSRRDDLESLGYVLIYFCRGSLPWQGLKAATKRQKYDRIMEKKMTTPNNILCKGLPSEFLEYMNYVKTLRFDDKPDYPYLRKLFRDLFKKENYRYDYVFDWTLYKFQQEKQRAQQGKVADGDNQDQQQQQNNQNQTQTQNQQGQITAPQPPVPVSQQQQQQQQIPQHIPTPQQISQQQQQQQQQQQQLPPQQQKTSVTPQLQQYTDQRLQNQRAVYQSNQNYSGTKSAQPQAQQPPQQGNPAWL

SEQ ID NO: 7571 - protein, 528 aa, Candida albicans
MMLPRNSPHRTESTLAYNNNNSNNNNNNNGSSLFQRKPLAPINSEFKISKPQHIKPNTHSHTFTTPTPKTRNTATTTTTNNNNRNNHQYRNPNLNTSLVFTPTKNSSSSSSSSHSSSLLSSSPFVEEPENQPESNHTRATSHYRTTSTSQYKSSANKDASHSLITSSKRKTSTKQTSESTNPKRRTTTTATQNTNNNKILNPSLSSSTIRFSTVSSSTSSSTTSSSSHTSPKPQQQLTLDDFEFGKILGKGKLGRVYCVKHKQSGLIFALKVMSKSEIMNLKLEKSLRREIEIQSNLYHINITRLYSWFHDSINIYLLLEYSIEGELYTHLKKLKRFDNIMASNYIFQITQALIFLHQRGIIHRDLKPENIMISLDNQLKLSDFGWSVQINQNQNQNQIHNQTQTQKTPHQKKQKQKRLTICGTLDYLPPEMIESKSHDFSVDIWALGILCYELLVGKPPFEAINRNITYEKIAKVDIKYPSNLDVDAIDLISKLVVKDPNKRLSLKEVLNHNWIIKNKPKWPKNIYK

SEQ ID NO: 7572 - protein, 1647 aa, Candida albicans
MAIGNIAARYLSSLEETDTTATTTTTTTSNVLQPSNRLNSPTKFNRKSLDNNSQDLDALARALNITPSKPETPTSISKGSATSLLRTKFESPSATVSSFKSTSSSNGVSPTKKNHFVEITSDETPSWANKNYKDILNKSPTKFNTQSNVHTPLKQLNQPIGTPSSSSLSPAKNASKSSPGYEYLCRIEAIKQWLESVLQEQITQSASQLISYIRNGIHLAKLANVVLPTSKPVFLNDSKLQFKHTENINRFFQLLDFFNMPDLFRFELTDLYDAKNVPKVWFCLHALSYILHKQDPSYPAMNNLVGKVDFSADDIRTANRALVNSPLPNFSSADTGEGKSDTSNNNSSTTSATAAFMDKVTSPVKKTPSPLKRPQQLQKKQLELVEDNKPELTQDSSGLSKISRDDPFTDRVDLAPPSTSNAKLELHTPPSKSLEFKIKSPIIDLSHRDSDYYTPELESHLPNIIKFQSLARGAVFRYLMFVDRILLKSYQDEFTNLFAIIRGNKARRKTVHKHRDELRLYSFEIIELQSIIRKNFVINKKPNFTSITNDVETVELQSLIRGKLTRDWKKYVTNGLEKFTPQIIDFQSLVRMKSIYSKSNKVISYKDEILPSLIELQSIARSQLYHRFSRSNAIDETEIIKIQSIIRRNAVIEDLYTKLSKVRSNKRRLIELQSIARGGVARTKLCNSVLVTLIYEDGILNQLFAKIRGDNYRKKFNSQKSELLKYEKSSIIPVQTLFRGVLSRYTKEVTLSDIFDQIDSVITLQSVARGKLMRGSIYEFSDYYQKHIKQVVKAQAILQRVFAQNAYKQLITSKNPPLKVIRRFAPLLSNNDRDFQDEMTLSDLKDLIIEKCKANEEYENQIEQLDMKLGLLDKNKISIEEFLKPTKGKTFKPIVENVKNLERLNKSLKKKIELWQTLFYFIQTNPIYLTKLFNSIPYTKNQTKSGQDLFQSVIQLFPVRDSSITYHSREEYFLVKLMIQLMQNDTANSNNLGDITKLHLTNWIDFFTNFNNHTFQRQHLKALLGKFVIRIVDNEQVDFESDPIRIYNQIIDHEMKVYGRSEKSRDISPQAAIQLPEVSNKFVGNLMSLRETCSDLLSMLQKNASGNKALLQIPDHVKLICRQGYLCAQRKFPDKSDQQHLAVAGVIFVKHYLGSILQVPENYGILTGNNDTQKAKSKDNLRYLYRVMLQLFSMKPFNDNFLKPLNEYIMASTDTVKSIISQAIINVGEIETVYELHDYDDLVTHQRPKLTISVNSLIQLEKSILQNVDIITTGNDDQLYKTCVEVEKLLISPQDMLTLTDLSSVTLNLNPTTQEESIVDSKTKTLFTQAKRCLLYIIRVQEEDDSDDLLELLISGIKPSHEQRFKEIVQYEKAEQDISLNNSKSVTANTVNKKKSTRPYSGTSLGDLSNLTYHELKKMCLEIILKLESMGELTRKNSFQTLLNQIAMDIKTKDSQRQCRWQQLQVSQKTIKKLSEKENYLKTQLHNYNKHVESVLLELQSKSKSNDKNWKRRLFNIMVIPVFSKQYFYHRELRKHNRLPKFGSYKYSAKKLIDQKVLIDFSTANNVATASKLDFMFSCHQVGKFTIEVASGTVNIPGATNTITLDELLALQYENKTKFELFDGMATFDSNNFMGLIFRKFYDLKKE

SEQ ID NO: 7573 - protein, 589 aa, Candida albicans
MTGEITILYGSETGNAEEYAKYLKQRLRSYNLKPINLASLDDYPLKRLVTHTSYLIIICSTTGQGEIPRNGKKFMKFILKKKLPSDLFQHLQLTTFGVGDSSYVKYNYAIKKIHTRLMQLGCQLLSPRCEADEISPEGVDGYYIEWEAELIAALLNKFPSASKISSEAVPMPEYRISVSKSDTAIDPEEVIDNPIVSRLGKDGLKLGTVLENNRLTSSNHFQDVRDFKFSSNGLNYLPGDTVSLFPCNFDEDVDALLQSQPQWLKIADKPLNLKNFPHLEGGFADILTLRTLFKYHLDIMSIPRRSFFALLWHFVDPSTEDGEREQAKLKEFGSLDEPEELYDYANRPRRSILETLLEFENNLTIPVSYILDLFPLIRPRMFSIASCPSSKEVELVVAIVEYKTIIRKIRRGVCTRWLKTLKPGDQFLFSIQRSSFKYKDDNSPIIMVAPGTGIAPMKSLIDEVIQNNSKQELYLFFGCRFKEKDNLIESFWHGNENQNLHLVSAYSRDSNSNIGTFKMRCLPIQNLLGKLLIEQNAKVFVCGSSGKMPREVKITFVEIVKKFTGMDEGDAQKYIIGLEDNGRYKEDAW

SEQ ID NO: 7574 - protein, 344 aa, Candida albicans
MSPSTSTAVQEYIGPNLNVTLTCPECKIFPPDLVERFSEGDIVCGSCGLVLSDRVVDTRSEWRTFSNDDQNGDDPSRVGDAGNPLLDTEDLSTMISYAPDSTKAGRELSRAQSKSLVDKKDNALAAAYIKISQMCDGYQLPKIVSDGAKEVYKMVYDEKPLRGKSQESIMAASIFIGCRKANVARSFKEIWALTNVPRKEIGKVFKIMDKIIREKNAANPNAAYYGQDSIQTTQTSAEDLIRRFCSHLGVNTQVTNGAEYIARRCKEVGVLAGRSPTTIAATVIYMASLVFGFDLPPSKISDKTGVSDGTIKTSYKYMYEEKEQLIDPSWIESGKVKLEKIPKN

SEQ ID NO: 7575 - protein, 458 aa, Candida albicans
MEVAKLDHEIRVKEQEEEEEEEEEEVFYTPGPKELYDVRLEVLNYSLKQSAIRLQKLRQLKQSTTTTTPTTTLRTGIPSQDEINILKSRRQLNSNLSKYEIYGSQFIPGTTRTISNIKISNNDKYIACGSWDGSINLLNSQDLSIFKKTPSGFHNEKISGLSWNNNDNQLVSGGNEGTINIWNVNENNNNNNNNNNNNNNEKDQNGLLLSSPIVSIKQAHNDRITKTLFHPINNLIISTSFDQTWKLWDLNKLSGQRDDLQCLVEQEGHSKPIFTGEIHPDGGLFMSGGLDGIVHIWDLRSGRSIVTLQKHMAGVYCLDWSPNGYQFVTGSGDCSLKIWDLRKLENNNSNNELYSIPAHTKLITDVKFYHQSRDIMQKQQQQQDQQQDQDHLLGSEFNDGKFLVSCSYDGDVNIWSSDNWIKIKSLRGHTDKVMSCDINSTGKWIVSSGWDRSIKLWK

SEQ ID NO: 7576 - protein, 928 aa, Candida albicans
MSGRRRAYPQPQYATGPAEMATPPAPNQFQQQQPVQQPVQQYGVDQMQGQFQQMNVGGVGPTGVPPAPQYSYQQPGQPQQSPQLSYDPYQPQPQANTGVYGQGMGGVPPSAVPAGGAGYGGYGQQNNIGLGAQLNALYTTDLSRDLPPPIAELSFQPPPITLPDNATLIPASKTANATPEYFRSTLNVVPTNSSLLKKSKLPLAIVVNPYNALTIDNENVPVTCDTVISRCRRCRGYINPFVTLAENGRRWRCNFCNLLNDIPSAFDYDEISGQVKNKFDRVELNHSVVEFIAPKEYMARAPQPIVYTFIIDVSVHAIQSGLTGTITRTILESLDRIPNENKTARVSFIGVDSNLHYIRFNEGLEGTEILVVADIDEPFLPSPGGLLVNLDENREAIEKLLLDFPSYFENNANQGFALGPALKAGHKMISNIGGKLVCFAATLPNIGEGKLSVRDEASVAGKAKEAKALLAPADSFYKSFAVTCNSSQVTVDLFLTLPAYQDVAPLSNLARYIAGQTHFYPAWTSNKYEDVAKLSKEVSDHLSQDIALEAVLRVRGSTGFRMSSFYGNFFNRSSDLCSFPTFPRDQSYLIEMSIEETINKPVVYFQAAVLHSTCFGERRIRVMNLALPTSSKLVDIYASADQLAIANYFTHKAIEKALSSSLPEAREYLIARVVDILNVYRKELVAGNVSGASPLQISTNLRMLPLLLFCLTKHLAFRGERVPSDHRAAALNNLGSSPIPQLIKSIYPTVYSLHNMPDTCGLPGVKEDEDDEEGAGAEIDVVLPDPINDSKASWENYGLYLIDNGSELFLWVSGNVVPGLVQDLFGTENLYEIPTGKTELPEFSLEESEFNYRVRQIIGKIREQNDSIIWKNLYVVVGASSNEPIEISQQRDLMALRMWASSCLVEDKTGSEPSYRDFLTSLKSKVSQ

SEQ ID NO: 7577 - protein, 543 aa, Candida albicans
MFRQVKRRTAGRRNFEDSTSTATTTTTTTTYTNGEKDSPKYLTPSALYASRLSFYDLPPTQEITLEEFETWAIDRLKILIEIESCLARSKTLKEIETSIKPLLLKYLPLNPTSGGGTVNYEKERMKDHYSHFILRLVFCRSEELRKNFIKNESTLFKVRYNLLQPKEQQEFIELNHHRLIWEYITPEEKTNLHQQLFNSSGNLIKNQFMLQGENLTNDQLKQFIMYKENFIKLPFEKITGNLISNRSIFLFKGYGYLPASLQLNLLSIEFINILNDNLIKTFQTIPRLEEDDRLLPLLNNLSKNFSNFQYESEINKLDEEFISDINSKSIITPKITKHYPLCAQHLQRNLIANSHLKYNGRQQLGIFLKGIGLNVDEALKFWSSQFIKNNSMSLETFNKDYKYNIRHQYGLEGARINYKPWDCSTILSEPRPNIKSEYHGCPYRDFNLDVLINNLNNMGITDQQDLNSIVDDVNKHDYTIACTRVFELTHQKQLMGKENMNMHINHPNLYFDRSRQLERSETKDKEVVNTGSSSSSSSSSTDS

SEQ ID NO: 7578 - protein, 163 aa, Candida albicans
MINTLLDSLADAAVSQDSTFNFSGTLIASKEDDRIEIHTICIASDINNDPQGHSVMEAISKIAEREVMNRKSNQSERGYLCNDMLVYTTHEPCVMCCMALVHSRIGRIIYLKPEKSSGGLESHYQLGDRDGLNWKFEIWRWLGVDELARLDRINENRCPCIEY

SEQ ID NO: 7579 - protein, 362 aa, Candida albicans
MSLWVDKYRPRTLDQLTYHDSITNSLRALAKSGDFPHLLVYGPSGSGKKTRIYCTLNEIFGPQVEKLKIDVKNFVTSSNRKLEFNVLSSSNHLEITPSDMGNNDRVVIQDLLKDVASTEQVDFANQSRAKHRFKIVIINEADSLSRDAQAALRRTMEKYSSNIRLILVCNSISNIIAPIKSRTLLVRIPSPSVDNINHILGHVAEKESLKFSTHNDSEINHFYSKIAETSNRNLRRCLLSFETISMQNETINVRSDVAKIALDWEAIIRNMAISIQKNQNVATLAKTRVVLYELLSHCIPARIILKTLLFDLIDIFSNNNELVSELINQASIFDERLSLGSKSIFHLEGFVAKSMVSISNLK

SEQ ID NO: 7580 - protein, 363 aa, Candida albicans
MFSGFGSSIYGSGFGSSGFPSNKFEEYFRCYPIAMMPDLIRKDDANYGGKIFLPPSALNKLTMLHIRYPMLFEIKNEQNEKLTHSGVLEFIAEEGRTYLPQWMMNTLELTPGSLIKITNCDLNLGKFVKIEPQSVDFLDISDPKAVLENVLRKFSTLTVNDIIEVNYNDAIYGIRVLEVKPDSTSKGICVVETDLETDFAPLVGYVEPEYKPKTVEPSSKPIDPSKVNKSAGAATMAKSINYAKLVAEAGKTTKFSGSGQKLSGKSIDMDKNQSTKNYRIDDLDPDAPPVPLSLPENQLFFGFPVVLPTQEEIDEESKEELKKQQAFSGSGQSLRQSKKRKDKNTNYPSLKNHTRSPDAIEID

SEQ ID NO: 7581 - protein, 617 aa, Candida albicans
MSYRGRGGGYNNNRGQFSSGPHQHQQNVDSFVAANQYPIEIMGWNGASSGECINFISRKCKVIVSNYSVDSNSGVLKGYVKNESQANTLLNWSGVKFAGQSLRFSKGVSNISNQMGGGASTGSQSTIETISQFLKARYQPEIKMLNLSNVKQDPTLTAQGFFGSLSVSSKFFPALMKVASDLKLDVDSIDLSNNELQDLQTLTSMAQTFPKLQNLSLQNNNFTKIKVFETWRHKLNFLRELILFNNPIVQTNDPAEIQTIKLELMKSFPRLVVLSGEILRNEQVLIANLSFPFESPETMFFQDEDSRNLATNFIANYLKLWDANRSELMILYQNESQFSMQVDSSHPHLIESGNSGYSGSTDFGYYLNNSRNLTRVSSIKARMAKLSIGQEQIYKSFQQLPKTRHDIIATPDLFSMGVFRFPPLNGIMITLHGSFDEVAQPEVDGSASSAPSGPRGGSRYHSGPKHKRIPLSKKSFDRTFVVIPGPNGSMIVASDTLLIRPYTSDFPWKVQKLPSNPTAATPGVSATSTPSPLPPTTITTPQLAPPGTGPTTADLPADIKARLNQIQQELLVKILLETKLNINYGIMLCEQSNWDYQQASVNFKNSAASLPSDAFVQ

SEQ ID NO: 7582 - protein, 608 aa, Candida albicans
MSQSDVPIKKEVTVKKEDGSTPTSPSKQQEWQTIPLKSCTEEDVKDIRFHIMKFATKQDVNITKDFTRPVRLHRKDPRNMQFHLTREELDQRKREKQQMEKLKQEEKEATAKPTEESEEKEEKDKPTADAAKVAPEKPTLNKNQADMSQVAPDGGARKNRKNLFKRKTRQINLMNEEKRKLRYEEHYPWVIEDYDGKNVFVGNYEAGSTEQQHVLFVFDKDGFKMIPAEKVYRFTPRNRYATLTLEEAEAKMERNSSVPRWLMKHMEDRSISEGTPDQRFRYNSPAANGSVIANVGNGSAGRRMRTVLGGSGSGNDRDSDHDDLDYDEEFADDEEAPIMDGDEEENKLSEKKIKKEMLKAAHFDGQSEAEAEDDLDDLFETEKTRKVDKEGKKLRKVLNKREGGVYDSDEEDGLMPYISKSDLESDEESDDEVQVKKEPSSDSQTDNNTNKTSRAREVGVKSIGDGFVVIKAPPSFLGTMPPGDWNPQARKRPTPEIASPRKKIKLDETIKVKKERTLSPPPVSPTTNAATNTSSPGNGMDLNDAGPDNLLVTVKDVLDIVKDQPLTTKELLMGLKSRVSAHKDNKLRIISIVKQNLRLVDGKLVLKD

SEQ ID NO: 7583 - protein, 150 aa, Candida albicans
MVKLTQIDDETQQQFENQSVAKNNHIIDEASSEEESDDDDESDLDDFDFENETLLERIVALKDIVPPEQRESIYNLSSTIGDLFKSSVQNGGKFLWTLTSSSLLLGVPLALAILSETQLQEMERGMSLEKSAQDVLAPGSEAAFGNENKK

SEQ ID NO: 7584 - protein, 547 aa, Candida albicans
MALAETVIRKVKKLGLVPKAIAILPRLSLLVAALSVLWLVTLPQDGNYRNVYISENALMPAQANSYFRESEWNIVRGYREEIGKMEEWSVADRNEVIASWLVDSGLQISYHENGFANNTLYAIMHAPRGENTEAMALVVPWTNSDNEYNEGAMSLAVALARYFTKMSIWSKNIIFVFPETGHRPLRSWVEAYHTVLDDTAGSIEAAIIMEYGKNGDYFEYYDMFYEGLNGQLPNLDLLNTANVMTYHEQIPCAMQGMSDRVINYSTRLQTLFRGILKLTLVGLTDEVHGCEAFSGWQIQAFTIKVRGTEGKDVTQFGRIVDSTFRSVNNLLEKFHQSFFFYLMLSPKHFVSIGTYLPSAILLAVSYALSSVSAVVVAGFDFRKLYFVVVVEIACAILAFVPVNQVMLVAISAVVLLPRQAIFSKQAAFSLISIALLAVALLITALLIVHFALAFSIGILALPLTFVPTLMKNKSRLTAFCLAVSNPFFVIFVAGKVLGHPELFDRLVTAWSDIQCWTWFIVVLGWFPAWVIITLSYCGYKPVKEKSE

SEQ ID NO: 7585 - protein, 374 aa, Candida albicans
MPIQETNKELVEKPVGILQEEEKEEPILSHTEDEDDDDDDDEDEDDKNQQGNSAVQYPGTVLPDNHPQEIEADQDLTTGYDLDTDYIDLVHLKISSLEDLHLERFKKLESLCLRQNLITSMVGVKDLPDTLEELDLYDNRINHISSSIKHLVHLTNLDLSFNRIKNIKNIETLVELENLYFVQNKIREIKNLDTLTKVTNLELGGNKIEVIENLDKLVNIKQLWLGKNRIYKLQNMDNLVNLRVLSIQSNRITKIEGLENLKNLEELYLSHNGISEIENLENNINLQVLDVTANKISNLKGLSHLVKLTDFWCSYNQVSSFEEIGKELGKLPDLECVYFEGNPVQLQNPSAYRRKMKLYLGPSLNKIDATYVHS

SEQ ID NO: 7586 - protein, 300 aa, Candida albicans
MSTTNCRFYENKYPEVDEVVMVNVQEIAEMGAYVKLLEYDNIEGMVLLSELSRRRIRSIQKLIRVGKNEVAVVLRVDKEKGYIDLSKKVVSAEDIVKCDERYNKSKAVHSILRHCAEKFNIPLERLYETIGWPLSRKYGHAYDAFKISITDPSVFDSVDVPSKDVLEELKLYISRRLTPQAINIRADVDVSCFSYEGIDAIKEALKAAESVSTSQMQVKAKLVAAPLYFITVQALDKNEGVKLLEKAIEKITESIEASGGNCKVSMPPKAVSANEDAELERMLQRREAEDKDSSDEEDDA

SEQ ID NO: 7587 - protein, 687 aa, Candida albicans
MRSSQSSWLPRIGLLYVALVILIPFLVSPKHAFAVAAVSDDESSTDNYGTVIGIDLGTTYSCVGVMKNGKVEILANDQGNRITPSYVSFNGDERLVGDAAKNQASSNVNNTVFDIKRLIGLKYNDDTVQKELKHLPYKIENKGNKPVVKVEYQGEEKTFSPEEISSMVLGKMKSIAEDYLGKKVTHAVVTVPAYFNDAQRQATKDAGTIAGLNVLRIVNEPTAAAIAYGLDKGDQEKQIIVYDLGGGTFDVSLLSIEGGVFEVLATAGDTHLGGEDFDFKIVRYLAKQFKKKHNIDITANAKAISKLKREAEKAKRTLSSQMSTRVEIDSFVDGIDFSETLSRAKFEELNIAAFRKTLKPVEQVLKDGGVKKSDIDDIVLVGGSTRIPKVQELLEGFFDGKKASKGINPDEAVAYGAAVQAGVLSGEEGVDDIVLLDVNPLTLGIETSGGVMTTLIKRNTAIPTKKSQIFSTAADNQPTVLIQVYEGERTMAKDNNRLGKFELTGIPPAPRGVPQIEVTFSLDANGILKVEAADKGTGKSESITITNEKGRLSKDEIDRMVEEAEKYAQQDQELKEKIEARNSLENYAHVLRGQLSDTSETGLGSKLDDDDKETLDDAIKETLEFIEDNFDTATAEEFEEQKQKLIDVANPITAKLYGGAAGEGAGGAGDAKFGDDDSDDEFDHDEL

SEQ ID NO: 7588 - protein, 500 aa, Candida albicans
MKFGLPDNFEVVVDVSSKPANQITLSLIKPSRPKNTFNDVFKKTYNDIDENTLDFIKSKQNEINERVDTLQSKMKSREAQADINITHLIQDFNSQLRIQNEQVEELIRKEKERIRLELERKRREEEERRRREEEERRRQEEEERRRKEEEERKRKEEAKRLEEEERKRKEEEEARKKREAELKRQQELKIQREKELLEQKKKERESRFTTDYNQIEKTLYKYKQDIQDIKNNVKLKLNEDPDLKKQVNQYKRKINPKFGQLSNSLSQFNKISTEVIGMIKAVETNALVFKWVLNFTAKAIIDQAETEVIVRPNSAVPLAKLAYAILQAIPDFEYYLNARFIKKCPYIIGYNCSIDSEEGRERMGWKRPDGSKWEEETKYDERMGGIVSVWAAMTTITNHGSQKSLYSFEASWQFLARTANLQTSMLVNTHFTILGNWWEAAGASFLGVYGNQSQKLMYIVVVQLTDVVASKKFPSAARLRIMGEEWVTRRQIQSLKAMEY

SEQ ID NO: 7589 - protein, 498 aa, Candida albicans
MQKLETNFPILATDYRLIDKIGEGTFSTVYKAESLTGKIRLGSDIWKSPPLKRNKRNILNFQQSRKKNPIVALKQIYVTSSPNRIFNELHLLYMLSGNSRVAPLLDVLRFQDQIVAILPYYNHCDFREFYRDLPVKGIKKYLWELFQALDYIHGKGVIHRDLKPTNFLYDPFRGKGVLVDFGLAERENISKNTKPETSTTSSSGTATTTTTATTTTTTTTTTTTNSSTASSSAISTACPCLNKDQKLINRTHTKRLNVKGAYPKNDNRPPRRANRAGTRGFRAPEVLFKCTNQSTKIDIWSAGIIGFSILLRKFPIFNSPTDTDAILELAWIFGYDKMAKCAELHGCGLEISMPEIHKSNGNLIKIMYDFLMQEHINGCFPSDSVVYDTLELINESGEKFVKPVYTIREGISDIEKMKINEDFTKRHDDYKDHKYLMELLYGCFKMDPSKRLSAREILQLPFFHEILQISEDDTQDEFMQQNQTQTQEEEEEDEVILS

SEQ ID NO: 7590 - protein, 1017 aa, Candida albicans
MAKKGKKAAQAGGDFWDDEDMAQDQPQAEEFGTPAEPESQEASAEDVSGDLLSSIRKNKQKKAEKQENEKANVNNGDAPKLLSKKEKEKLKKEAEKQKKKELAQKKKAQQATKKEQIKEANKQNAGSAVTASSASATPEPEENESSAASEQNEAPKAKPAKKGKKAPAGLAALKKQLELKKQLEEEQRRLEEEEEQRRLEEERLAAEEEAKKEAARAAKKERERLKKEQLKAEGKLLTKKQKEEKKLQERRRQQLLQAGNVSVAGLSKTEEGDAPKPKKVVYTKKKSTKPKTFIQKPVPSKAPVKKDDGEDEALVDDWEKMALDDDAPVADDWEAALADEGDEEVGEAEEEDEEVGEDEDTIVEDEQEKKAKEEAARKAKEESARKAKEEAARKAQEEEKSKQLAAQKKAASPSEKDLRSPICCILGHVDTGKTKLLDKIRQTNVQGGEAGGITQQIGATYFPVDAIKQKTAVMAKYEKQTFDVPGLLIIDTPGHESFTNLRSRGSSLCNIAILVIDIMHGLEQQTLESIRLLRDRKAPFVVALNKIDRLYDWKEIPNNSFRDSFAKQTKSVQAEFENRYEQIKLALAEQGLNSELYFQNKNMSKYVSIVPTSAVTGEGVPDLLWLLLELTQKRMSKQLMYLSKVAATILEVKVVEGFGYTIDVVLSNGILREGDRVVLCGLNGPIATNIRALLTPPPSRELRIKSEYVHHKEVKAALGVKIAANDLEKAVAGSRLLVVGEDDDEDELMDEVMDDLTGLLDSVDTSGKGVVVQASTLGSLEALLDFLKDMKIPVMSIGLGPVYKRDVMKASTMLERAPELAVMLCFDVKVDKEAEQYADEQNIKIFNADIIYHLFDSFTAYQAKLLEARRKEFMEYAVFPCVLKTIQIINKRNPMIIGVDVVEGAVRVGTPICAVRTDPTTKQPNIMVLGKVVSLEVNHKPLESVKKGQTAAGVAMRLDNPSSAQPTWGRHVDETDNLYSLISRKSIDTLKDPAFRDSVSRDDWLLIKKLKPVFDIK

SEQ ID NO: 7591 - protein, 1026 aa, Candida albicans
MKNPFDSGSDDEDPFLSNPQSAPSMPYAAYTSDRTSPRKTYQPLNFDSEDEDAKESEFMAFPSSTSGSPFHQQQSPRQSPNIFSRSTARAATSKSNMSIYDNTPNLQFNKSGAATPRAQFTSKESPKRQKTTEVTIDFDNDDDNNHTLEFENGSPRRSFRSSAISSERFLPPPQPIFSRETFAEANSREEEKSADQETLDEKYDYDSYQKGYEEVETLHSEGTAYSGSSYLSDDASPETTDYFGASIDGNIMHNINNGYVPNREKTITKRKVRLVGGKAGNLVLENPVPTELRKVLTRTESPFGEFTNMTYTACTSQPDTFSAEGFTLRAAKYGRETEIVICITMYNEDEVAFARTMHGVMKNIAHLCSRHKSKIWGKDSWKKVQVIIVADGRNKVQQSVLELLTATGCYQENLARPYVNNSKVNAHLFEYTTQISIDENLKFKGDEKNLAPVQVLFCLKESNQKKINSHRWLFNAFCPVLDPNVIVLLDVGTKPDNHAIYNLWKAFDRDSNVAGAAGEIKAMKGKGWINLTNPLVASQNFEYKLSNILDKPLESLFGYISVLPGALSAYRYIALKNHDDGTGPLASYFKGEDLLCSHDKDKENTKANFFEANMYLAEDRILCWELVSKRNDNWVLKFVKSATGETDVPETIAEFLSQRRRWINGAFFAALYSLYHFRKIWTTDHSYARKFWLHVEFIYQLVSLLFSFFSLSNFYLTFYFLTGSLVSYKSLGKKGGFWIFTLFNYLCIGVLTSLFIVSIGNRPHASKNIFKTLIILLTICALYALVVGFVFVINTIATFGTGGTSTYVLVSIVVSLLSTYGLYTLMSILYLDPWHMLTCSVQYFLMIPSYTCTLQIFAFCNTHDVSWGTKGDNNPKEDLSNQYIIEKNASGEFEAVIVDTNIDEDYLETLYNIRSKRSNKKVALGHSEKTPLDGDDYAKDVRTRVVLFWMIANLVFIMTMVQVYEPGDTGRNIYLAFILWAVAVLALVRAIGSLGYLIQTYARFFVESKSKWMKRGYTAPSHNPLN

SEQ ID NO: 7592 - protein, 349 aa, Candida albicans
MPFTQFLDKYSDNLAIQYAIIFALLLGVFKLTVFSLKFASLIYDIFLAPATDFSKYGAASGKWAVVTGASDGIGKEYAFQLAKKGFSIVLVSRTQSKLELIATEIESKYKVNTKIVAFDASTDDEENYLKLEKAVFDLPVTILINNVGQSHSIPVPFLKTEKKELKDIITINTTATLRITQIVAPIIVSTVENPHPKQLRGLILTMGSFGGLLPTPYLATYSGSKSFLQAWSAALAGELQADHVDVELVISYLVASAMSKIKRTSLSIPNPKQFVTSTLNGVGRRNGAQERFATSTPYWTHALMHFAIDNTVGVYSKIANKLNLQMHQSIRQRALKKAARLAAAAEKKD

SEQ ID NO: 7593 - protein, 556 aa, Candida albicans
MIKRLVKLLSKMSIPPSSTSAMETTTTNIVQPNSTISQEFNTVQEGKATILTPKQDEVFYNPIQQFNRDLSIMAIKAYDEIRHEKIQAIKKKSKNKRTKLNGLKILESLAASGLRSCRYGLEIPEAGKIVANDMLAEAVKSINKNVEYNKLTDKVVANQGDAIKFMGSTDEKFHIVDLDPYGTAAPFIDSAIQCLEDDGMLLVTCTDAGVLAGSGYPEKCFALYGGNNFGNAYVNGESNHEVGIRLILNLIASTAAKYKKTIEPMLSLSIDYYFRVFVKVKTSPINVKNHASETMLTYGCNGCGHKIVQPLGMKNNTKFQYPKLQGPISSNCQYCGTSYNVAGPMYAGNLHNREFIDKVLKINESSDKEIYVTNERIKGMLTLASNELDDAPFFFNLNQLCSIFKSPPISIEQYTKAVGNLGYKVSLTHAKKNCVKTNLPWNLNLLINRAWQIDQNEKYVKEMESKNVDELNEKIKEKLIKLKDNIGINPSLAESSPGWKILNYFKTNMNEEEKSVSIDFETGNEEFEKIAKLRKVKMVRYQENPRKNWGPMARPK

SEQ ID NO: 7594 - protein, 854 aa, Candida albicans
MYVYKRDGRKEPVRFDKITARVQRLCYGLNPNHVEPVAITQKVISGVYQGVTTIELDNLAAEIAATMTTIHPDYAVLAARIAVSNLHKQTTKQYSKVSKDLYEYINPKTGLHSPMISKETYDIIMEHEDELNSAIVYDRDFNYNYFGFKTLERSYLLRINGKVAERPQHLIMRVAVGIHGNDIPRVIETYNLMSQRFFTHGSPCLFNAGTPRPQMSSCFLLAMKDDSIEGIYDTLKSCALISKSAGGIGLHIHNIRSTGAYIAGTNGTSNGIIPMVRVFNNTARYVDQGGNKRPGAFALYLEPWHSDIFDFIDIRKNHGKEEIRARDLFPALWIPDLFMKRVEQNGDWTLFSPNEAPGLADVYGDEFEELYTKYEKENRGRQTIKAQKLWYAILGAQTETGTPFMLYKDSCNNKSNQKNLGIIKSSNLCCEIVEYSAPDEVAVCNLASIALPSFVENDEKSTWYNFDKLHQVTKVVTRNLNRVIDRNHYPVPEAERSNMRHRPIALGVQGLADAFMELRLPFDSQEARELNIQIFETIYHAAVEASIELAKEEGAYETYPGSPASQGLLQFDLWNRKPTELWDWDTLKQDLAKHGMRNSLLVAPMPTASTSQILGNNECFEPYTSNIYSRRVLAGEFQIVNPYLLKDLVDLGVWNDAMKSSIIANNGSIQALPNIPDEIKALYKTVWEISQKHIIDMAADRAAFIDQSQSLNIHIKDPTMGKLTSMHFYGWKKGLKTGMYYLRTQAASAAIQFTIDQKIAETAGHTVANLDKLNIKKYVNKGRVESENTSDAPYKSPSTEPTSLESSVADLKIKDEGEKPAEDKTIEELENDIYSAKVIACAIDNPESCTMCSG

SEQ ID NO: 7595 - protein, 597 aa, Candida albicans
MDKRDSNRPSKDNAIRNPFVSFETPRSPSRSTRSLNPPKLNEMGAIQSSPPRRRNNNTIFSDRYIPNRTGVDLQAAFSLTNEEILPDLRNTRNADNEIEIRREEEANRTFSTVLKAELFGDNVPMATANLSSATANSNLANNRSKTGRTNTGIVNGASVSGAATSTSSLSTTPPRSSNSGQNFPGSTGSSLPGNNNAIGNNDSHNIISANANNNISSDIDDITSTPRRKTNLFTYQSPQKSKPISRDLQQELYSLSPVRQDSQKLLLSPQKKPRTISKVPYRVLDAPELSDDFYLNLVDWGQQDVLAVGLGDSVYLWDGATQSVDRLCNLTNKDKVTSLNWIGTGTHLAIGTSKGLVEIWDATRIKCIRTMTGHSLRVSSLAWNEHILSSGSRDRTILNRDVRIEDHFVNKFDNHKQEVCGLKWNVEENKLASGGNDNNLFVWDGLNPKPLHQFTDHTAAVKAIAWSPHQRGILASGGGTADKTIKTWNTLTGNLVHDVNTGSQVCNLIWSKNSNELVSTHGYSRNQIIVWKYPSMQQIAQLTGHTYRVLYLSLSPDGETIVTGAGDETLRFWNVFEKNRHNESPASVLLGAFSQLR

SEQ ID NO: 7596 - protein, 1671 aa, Candida albicans
  MISC_FEATURE (97)..(97): X=any amino acid
MSNDIPIDFTELTQLIELGIPQTSLDFKSTTLESDHYICVRESGAQGNTVAIVDLKTNNEVTRKNMTADNAIMHLKEFVISLRANGTTLQIFNLGSXQRLKAFTMDQPVIFWKWLDDTYLGLVTQSSIYYWNVFDGTNNGPTKLTDRHHTLNNCQIINFVAEPDLNWFAVTGIAQEDGRIAGHIQLYSKSRNVSQAIEGHVCKFASISLSGGVQPTKVFCVGNKNAQGQGNMHIIEIDHVDGNPQFQKKVVDIFFPPDASNDFPISLQASNKYGIVYVLTKYGFIHLYDMETGANLFVNRITADPVFTASSYNDGTGLITINKAGQVLSVEVSRDKIIPYVLDKLSNVPLALALSSRGGFPGAENLFQQQFQTYLNQGDYSNAAKVAASSEQLRTQDTINKLKNITPQPGQISPILQYFSTLLDRGTLNKFESIELAKPVLQQDRKPLFEKWLKEDKLTSSEELGDIVKSYNDTTLALAVYIRANVNIKVVSCLAELGQFDKILPYCQKVGYNPDYTNLIQNLVRVNPDKASEFATSLLSSPDANLNVEQIADLFFSQNYIQQGTAFLLDALKNDTPAEGHLQTKVLEINLLHAPQVADAILGNQMFSHYDKPTIGKLCEKSGLFQRALEHYDDLKDIKRVIVHTNVLPSDWLVSYFGQLNVDQSVACIKELLSNNMQQNLQVVIQVATKYSDLIGAAKLIKIFEEYKCTEGLYYYLSSIVNLTQDPDVVFKYIQAAARMNQTKEIERVVRDNNVYNGEKVKNFLKEFKLDDQLPLIIVCDRFNFVHDLILYLYKNQYFKFIEVYVQSVNPANTPQVVAGLLDVDCDENIIKGLLMSVLGRVPIKELVEEVEKRNRLKILLPFLEKTLEGGSNDQEVYNTLAKIYIDSNNSPEKFLQENNNYDTLVVGKYCEKRDPYLAYISYSKGGNDDQLISITNENKMYKYQARYLLSKSDIELWNKVLSSDNIHRRQLVDQVISTGIPELDDPEPISITVKAFMENDLPEELMELLEKIILEPSPFSENASLQGLMILTAIKADSSKVSSYIEKLDKFDPNEIAPLCIDNGLNEEAFEVYDKFELRSEAMKVLVEDIVSLDRAEQYAEKYDTPELWYQLGTAQLDGLRIPEAIDSYVKSKNPENFAQVIEIAEHAGKEEELITFLDMARETLREPVVDGALINAYATLDRLSDMEKFVGGSNVADLEAIGDKLFEAKNYKGAKILYSNVSKYSKLATTLVYLGDYQGAVDCARKASNTQVWKQVNSACIENKEFRLAQICGLNLIIDAEELPELVKTYEYNGYFNELIALFENGLSLERAHMGMFTELAILYAKYSPEKVMEHLKLFWSRINIPKVLTACEDAHLYPELIFLYCHYEEWDNAALTMIEKSEVAFDHSSFKEIIVKAPNLEIHYKAIQFYMNENPSLLVDLLKVLTPKLDLPRVVRMFVQSDNLPMIKPFLISVLDKNNSVVNSAYHDLLIEEEDYKSLRSSIENESNNRFNKLDLAERLEKHDLIFFRQIAATLYTKEKKFNRAISILKTDKLWPDLLRTVAISKSKKIAHELLDYFVETGNHECFVALLYTSYEFIANDYVMELSWLHNLSNFIKPYEISIAFENQKKLNEVYQDLQKRKEADRKQEEEPGVGQPLMLTNGPMSYQGTGATGIGYQPTGTGFGNAF

SEQ ID NO: 7597 - protein, 764 aa, Candida albicans
MSSNQTPTTDNVLLTLKEARKLALNEPQNYPNVLRSMFNLITKEPETQQQTSEIQQLIVDFMYETFINNSILQQSVKIELAIDSLDALTILTNIHDIATLRKVIDISCVIYRLLFQYVALNDNSNQIWSKITELKNVLVNKFQSNFPLPPSDNTEHDLLRNIATKLDLLKFMMTIIDVSSKTRIIGDPIQNTNSMQFSLNDVPPNHSLIKYDQMEYESQVIFKSMVLRVFNYDIIIAPLITATLNHCILIMKRKPQFVPLLLKTIEEYDTNNKLQSNYQSLEQFKLARKYVDRNLRNFISHCQKYKLIPPEFNMPLGRMANTLTERGTNIRKKNIFAIDEPNIKKRKFEGFYNSSKKMKQMSYSHLYTLNDVNDGLNNFDLSTLPQDYVTNMVVNALQRAPVSKLVKALEIISERYIDAFQKPRPIATPVSQINNNSATTTTATPVAKQEDPEVNDEDEEDERYQVDLNGDFYDPSKVFSLPPPKELSFQEKKQHINIIIKNFLELAKKGGPENDNINNNNNNNNSSQNGEDESELSPGDKGDISKALKKVAIKGWKKGNWLILLSRLATRGMRTNPKSGNNTIVKQEDGSEEPKMSPDQKNNQQLSDLIRLAILEYFSENVHGRIDMVIEWLNEEWYSERVFQSNEYLNEGKDPDKEVITTPIYDIWSRKVVDATVSYIEPNDKKIFLRLLSDLPELNEDLIGRIKSLCIDPGRSAIGFLALQFLIMYRPPVKQMCLKVLQELSESDQEDISIEAKKRLEKFK

SEQ ID NO: 7598 - protein, 656 aa, Candida albicans
MSNFEEWIKMATDNKITVKNSWNFDLIDYFHDLNVIKDGESINFQRASATLDGCVKIYSNRVESAATETGKLLSGLSKKDDGHHGNQEAGNGDGDENGENGDDDRDGNDEDSRKKRKFNRIVESTLVEFDAIKVKKLEQELAIDPLFKKALAEFDEGGAKSLLLNTLNIDVSGRVVFDATSNPIQETEDANQIETDSQQVQELQTSDTKQSDISSLKSFLFKDNENFDDLTLCPSLVEFQSALADVNKAKSILNDFNSKITNAAQEPLAFKESEENNDFDLGDFNDFGGNDDFNDDINTHDNSSHNDPYNNIDNTIMKALFNDKTDSSIYSRTQSTAIMDQDLMAYFDDRMKSNWRGPDNWKVAAFKKANNIDQKQSDSSVKQESSAQTSTARRKPENIIIDFFNDDDDVDEDILFEPPKSLNSISKKGNFKSSDYILPDDIKYNSARLTNLFTKPQIAIMYYGNKRLQGIDGQLLTDQNYFAEQYRQHEEEERDRLANSFHQAECEDFDNDFGDNNDFGGVDFNDALEADVPEVATSETQSVMGKRRPEYVNFSRVAKRVDVKLLKDNLWVVMKNQLADQKEDSPDKEEEEEVAEKQTTIDFKSVVQNVLRTYRPEQAKDLSTSFCFICVLHLANEHGLAIQSNEAHNNLTIIGS

SEQ ID NO: 7599 - protein, 1097 aa, Candida albicans
MSTSQPSQQQNPEQVVNDIRQKIEKERKIIQGFNDVKRNTNNPEVIQKCKSKIIESQSMIDYYQETMNKLTRQMSRLNTNSSSRTASRSSVISEYKPSYSNFDLIKYECPSLGNKIQFMLQYLEFKLQVENKYSEANKKLSHLYLMDGDKSSSNAAEGGRAESDQRIQLLEKALKKYQKFSINDHEFDRDYEIMDSTKHSRKLLTGRLTVSITCIRDVDHIATALAKKRETVVVIKVDDLEKARTKPSKNDNWNEEMVIDVDKSHEIELAVMDKQNGIYVPVAVNWFSLFDLAEEIRKKKVAKDQGSSGWLPAANLPQTGGSGAGTGSSMTGGASYGATSPLPAHNDLRPSVSPSSDAKENKVSVSTWLSLEPGGQMLINLNFEKSITNGKQFRGPLGRHGAIRQKKEEVFEKHGHQFVQKQFYNIMSCALCGEFLRYTGYQCQDCKFLCHKKCYQKVVTKCISKSGSDYDAAQLNHRIPHRFEPITNHGTKWCCHCGYILPWGKKNVRKCTECGVMCHAQCTHLVPDFCGMSLQMANEILATIESTKVSPKKAQHQQSHAKPLPPKPPIESKPSMDSEETLHNEPSYKSLRPASVVHQDTNFVSKLPTTVQNKYQEPVELPPQQQNQVVPSTRRRGHGSTDLSFETGYGQQQHQHHRDVPQIVVEDHQHYNSNDNRDVEMEESKDEFDNFDYNNKYTENEILTDVQQDQVRSPFADQIQGVPETSHAKQQNQQVQQVQQQEELGHQRTHSSGKFGKSKRRKRKVGLDDFQFLAVLGKGNFGKVMLAESRHTSKLCAIKVLKKDFIVENDEAESVKSEKRVFLTANKEMHPFLLNLHCCFQTENRIYFVMEYISGGDLMWHIQKNRFTAKRAKFYACEVLLGLKYFHDNGIVYRDLKLDNILLTTKGHIKIGDYGLCKEDMWHKSTTSTFCGTPEFMAPEIVAGKAYDRSVDWWAFGVLLFQMLLCQSPFKGDDEDDIFNAIENDEVKYPINLSRQTVLVLQALLTKDPSQRLGSGPKDAEEIMEHPYFHDVNFDDVLNCRIPAPYIPEVQSEHDYSNFDKEFTSETPRLTPVETVLTSEMQEQFRGFSHISDNATI

SEQ ID NO: 7600 - protein, 931 aa, Candida albicans
MAPPHKNHNFRPENVLKRAEDLIAVGQKEAALDTLYELITSKRIRYLQVQDLEPIASLLIELAVELRKGKLAKDALHQYKKNIQLSENGLESVQTIVRKFIDLAEKKLDAAQTKADIKIDEEENAAAAAAAATSSAGAGGAGGDAGGAGAGGDDDLETAQTPESILLSAVSNTDSADRTERELVTPWLRFLWEAFRAVLDILRNNSKLEITYSAIVNQAFKFCLNFNRKAEFRRLCELLRTHMQSVTTQTTTKTSGHNAIDLSDAETVQRYLDQRFAQLNIAVKLELWQESFRSVDDVHSLITASKKAPKPNMMANYYENLARIFAVSDNTLYHAAAWNKFFNLYSQSPLATDEELKRYASVLVLSTLSIPQRVVQDVDEHKSKNSKLSSLLNLTHVPTREGLIKSILSRSILKYVDEPIQQLFELLEGGDFHPLSIKQEISQLFQIIESDKEFKKYIPTLTEVILIRIFQQVSQVYDAVKLDFLISLGIFPDLEYSLSELQVEDLIVNAVKDDLVSLTIDHESGVVSFKSNPFDEIDQEFANAGTTTTNTITTTTTIGTSRLQISPAELVRTQISKLAATLSESIYLIDPNYEARQQQAKQQALQRCIKDMVNEQQRIADRSKILKDRKVAAEKRKREEEERQARLRQEKLAMEQKLEQERLIAEQERKKLEKLEKERELIKENEKRKIAEEINAKGIIKIDLNNLKELDTTKLQLMQIEQLNKDKKELETKLQATAKKADHLERAYRRYELNLLEADLEIQLDLEKKDYEFLKQSKINKAKKDHDNAIELKKRLQRILPDYSKFKSEIDAKNEVKLKQLQKEAQIKFEKAKQDRIESVKKHRIEELKIRKERERKAAAEEAARQAKAAEMAKLKEELRIQKEKDEALARKRAELEAAAAAAAAPSSSPPPKKTMTFAERMRLKREGKLP

SEQ ID NO: 7601 - protein, 259 aa, Candida albicans
MLEGKFEEAALLKKVVEAIKDCVKKCNFNCSEHGITVQAVDDSRVLLVSLLIGQTSFSEYRCDRDVTLGIDLESFSKIIKSANNEDFLTLLAEDSPDQIMAILEEKQKEKISEYSLKLMDIDSEFLQIDDMEYDAVVNMPSSDFAKLVRDLKNLSESLRVVVTKDSVKFTSEGDSGSGSVILKPYTNLKNERESVTISLDDPVDLTFGLKYLNDIVKAATLSDVITIKLADKTPALFEFKMQSGGYLRFYLAPKFDDDE

SEQ ID NO: 7602 - protein, 1221 aa, Candida albicans
MKMLTKFESKSSRAKGVAFHPKRPWALVSLHSSTIQLWDYRMGTLIDRFEDHVGPVRSVDFHPTQPLFVSGGDDYTIKVWSLNTRKCIFTLNGHLDYIRGVSFHHDLPWIISCSDDQTIRIWNWQNRQEIACLTGHNHYVMSAQFHPSEDLIVSASLDQTVRVWDISGLRKKHSAPTSSVRAFEDQLQRQQLPQQDIFGNINAVVKYVLEGHDKGVNYASFHPTLPLIVSAGDDRVVKLWRMSDTKAWEVDTCRGHTGNVLSAIFHPHQDLILSVSDDKTIRVWDLNKRVPVKQFRREHDRFWLIASHPTISLFAACHDSGIMVFKLERERPAHTIFQNKLYYVNGEKQIQTFDINKQENSLPMLSLKKIGKTWSFMRTLSYNQSDNSVLVVHGEGDNGNYALITLPKHVTGAIEPTDIRQGEANFAAFISRNRFVTFVKSTKTLQVKDLNNNITKTVQLDSSIVDVLPGSPGRILLVKAHSVINYDVQQRKELAEISVNNVKYVSWSSNGQYLALLSKHTITIADKDLKLITSMHETIRIKSAAWDDTGVLLYSTLNHIKYTLLNGDNGIIKTLENTLYITKVQGNLIYCLNRQGQVETITIDPTEYRFKRALVNKNFGEVLRLIKNSTLVGQNIIGYLQKKGFPEVALHFVQDPETRFELALECSNLQVALEQAKILNNNQIWEKLGEEALLQGNIEIVEYIYQQLHHFDKLSFLYLYKGDDERLDKMSTIAQHRDDTSSLVQNTLYNNDIKKRCQVYIQNGMLPLAYTLAKSNGLNELAEQILQEANISEKDVELPELGDVVPLPKPIGEPVGNWPLKDSELSYFETALITGKIENLSINEDNLTTGAEGFESGATNIDENLGFDNNNNDDDDDDGEGGAFGGEDDAEAWDLDDELDIGDDDIVDENVPEFVTTENEIGDWLRNAKTPATYVAAGGFEQAASLLNKQIGVVNFEPLRTRFNQVYGASKLYLPGMDELPAMKTYIRHDNDEDNPRKFKPVVPGYDKLEELLSLGFKKFKANNLEEAITTFRKVIYTITVLNVDDEDDETKCHEILRLCREYILGLSIELERRKLPSSDVKRNLELAAYFTRAQLQPSHKLNALQVAMTQSFKNKNYASASYFAEELLKISNNSGPRAEQAMKLKNKADTIANDTIEINFDPFAEFDICCGSFTPIYKGEPFIKEALVGATYKPEFKGKLCNITDITAVGVPASGLRIKG

SEQ ID NO: 7603 - protein, 248 aa, Candida albicans
MTTMSRRYTPNIIITGTPGCGKSSHSSSLVSQLNQTLGKETTIHFKHFNISEIAKERDCIESYDAKLDTSIVDEDKLLDSLEPDLEKGGVVVDWHCCDIFPERLIDLVVVLRTDNSNLFDRLKTRNYNDLKLQENLDCEIMEVILQEAKDSYIPDIVIELRSDTAEEMDENVDRISSWVETWIEDHPDGVSNELNKQYNPDDSSDEGDDNSDSDEYELEEDEQEEEEEREEYDEETNEEMEHTEDIAQ

SEQ ID NO: 7604 - protein, 515 aa, Candida albicans
MDSSAASSQEKRVGTSTPEAELNPHRAKALLAKFKEEMALAKAATDPQEREKHSELVEKIKRILIRYQEQQKQAKNNSPATKSNLTNQDSTTNTPSPLATNNNSATNVIEPKTETPDSTPMEQKPIQAPTPQHPNNASTSSATMSTTQFQPQPQPQQQTVTVEKYNHVKNTLKDMWKQVKTLEASSINETQTKKEEIDRKITELRNQMQKYHTAALRMKSKLIEQGTIPANSTPIGSPTPVSNTDPTPIANTTNTSNVTPPTEKAEENSKPNVKPPSTTTTTTSKSKPKPLSTTATNSTTKTSTPSKGSGSSKSNNRSSSQNTPGTSTSASATKTASVSTEKDAPLTATTSTSAVAPAAATVAATTAPTAAAAATSLSTASAITTKSTADPKVTPSNIPDNDGRVLTKRKLVEMINNISIDQGDAKIPIDNDVEDIFLDLADEFVRNVVQFSGRLAKHRKLDRIDVRDVQLNLERNWGLRIPGYSTDEIRAARKWQPEGEYAENVKKISKLNKDQ

SEQ ID NO: 7605 - protein, 1839 aa, Candida albicans
MSEQEEETASKSQEIETPSESIEKNGQKENTTTDNTSNGNKKSDDSLQPATEEELHQPENVVQETTNIEYVVEDTVPTSDDTDSPKNTENNKPNTETDNAFNANIEGTPRSINSPESVPDTVITPAEDVSVQSTPRANHNRQSSILSISSNATVDNAQIFKKTFDIILTSKEAKKDDSFKNLIQTALDSLNDPESKNPQIIFNALKACCDTSSTNLKSKAIDLFAKLFDYAQFDDYSEQVKLTDDSVSVISACFEGEGTDPELEVQVVRALMHSILLMPCHGASLLQAVRQIYNVFIFSLTARNQAVAQGILTQVIGTIFQRVEESVKNKSKRNSTPRLTSSSSDDNLEIQASDETENQEKLTLKRLENLNDVINDNDRLNEANFATETDEDLAVKDAFLVFRAMCKLSIKSLDSATIDMKSHSVRSKLLSLHIVHTILKDHIDIFLSHDVIILSSNTNEHVRMVNAVRQYINLALSKNAASALAPVFELSLEIFWLIISNLRAEFKREIPVFWDEIYFPVAEMKTSSAHQKRYLLSIIERLCNDSRCIIEFYLNYDCDSNMPNICEKLIDYLTKLSLQRVEVTPQQKYAYRENRRNGISVYDINKISNLTSKTMSSRPPEPEIYSQFPLEYALKMTSIGCAVAFLRSLYSWAQRGLTNANSKQFTIDNNNKSLSSLRNRSDSTNTSISASRNHSFVNGDSLTDSDNPQQFENQKQRKKAFLEGVRQFNQKAKKGLRYFIDNGFIAADDPKDIAKFLLTTDGLDKATIGEYLGEGDEKNIAIMHAFVDEMEFEETGFVDAMRRFLQSFRLPGEAQKIDRFMLKFAERYVLGNPEVFSNADAAYILSYSVIMLNTDLHSPQIKNRMTIDSFIMNNSGIDDGEDLPREFLEKIYDEIQNNEIKLQSEQHAALLAGDLSIPASGQSIGFFGGRDVTREAYIHASKEMSTKTEKLMRNLGKKSKSDDSEGVFYAASNVLHVKSIFDTLWMSILAALTPPFKEYDEEDVSRTCLEGIKLSIRIACMFDLNYAKTSFISALVQFQNLHNYEEMKQKNIDSIYIMLELAVSEGDHLGRDAWIQILTSISQLERLQLIAQGVDQDSIPDVTIAKLVTRNSLETSRTSGSFFRSFSSSQTPSQTAASKFHNQQLSPEVASLLTKTELEVAIDKVFTNSANLSGESIVQFVRALSEVAQEEIDSSGQSTNPRTYSLQKVVDICYYNMSRIRLEWSQLWAAMGETFNAVGCHTNPAISFFALDSLRQLSMRFLEIEELAHFKFQKEFLKPFEYIILHNDSLEVKDMVLECINNMILARADKIKSGWKTIFGVCTAAAKENKESIVMKAYKMANWINKEYVEEVRLQDSFSDLVVCFTVMAKNEKFQRVSLLSLDVLSRLIHEIAQYTVLNTGEDNKPIVPDIEKNEHLVKLWFPVLYGFHDIIMTGEELEVRSRALTYLFDVLMKYGQYFDFEFWKIICENLLFPIFHVLSNHWEIGLDDINDQLSVWLSTTLIQALKSMMTLFTHYFDALNSFLDGYLELIISCICQENDTIARIGRECLISLLIDNAQNFNNEHWGKVSDALSNLFELTTAKELFTSDPLRNRTVKDSEGSSSDIGGEDVEHTESKNSIIDDAEERLKKSKDKSSIVVKSVLQLLLIQSLSELFESDDFYENVPYDYLFKMAKLLFKSYNFAKKFNDDYDLRVRLWNAGVIERLPNLLKQESSSAAVFINITFRMYCDDDKASPANKQSLLDYLVPLCNTIVERYSELDETNQQRNISTWKPVIVEIYEGYVELDDDDFTKHCPALYHLTLKLFSKSMSSELRLAMKAFLTRVGEEFVSISDNNKERR

SEQ ID NO: 7606 - protein, 1420 aa, Candida albicans
MDAYREFIDPSKVNNCVGCNFISSTKKNLIVGKGSLLQIFETIQLKQSTINKPQYRLKLIDQFKLQGTITDLKSIRTIENPNLDYLMVSTKYAKFSIIKWDHHLNTIATVSLHYYEHCIQNSTFEKLAVSELILEPTYNSVSCLRFKNLLCFLPFEVIEDDEDEEEEEEEDEEDEDEGEENIDDTKEKKDKKQSKTDTIEEDKNSTTTNQEPRLFYDSSFIIDATTLDSSIDTVVDMQFLHNYREPTIAVLSSKQEVWAGNLIKSKDNIQFQVLTLDLNLKSTISVFKIDNLPYEIDRIIPLPSPLNGTLLVGCNELIHVDNGGVLKRIAVNKFTRLITASFKSFQDQSDLNLKLENCSVVPIPDDHRVLLILQTGEFYFINFELDGKSIKRIHIDNVDKKTYDKIQLNHPGEVAILDKNMLFIANSNGNSPLIQVRYRDSSKTSDTKESKLNKIEEKEDNKDDDDNDDDDEDDLYKEEEEEETQKTISKSHIEFLYHDELINNGPSSTFTLGICSKEKFKCNLPNPNYNEVSILSNAGTDSQTKLNIITPTIQPSISSSLTFSQVNRMWNLNQKYLITSDDVNYKSEIFQIEKSYARMKSKHFINNELTINMHELNNGKFILQVTPKQIVLYDNKFKKRFTLNDEIKDDEILSSILRDEFLMIFLASGDVMIFVINTYNESYDKIEIPKLLDDTIITTGYITNSHLLSAVSKNVNLLLDNNTSSNKRKRKHSALSNSEGSKKNTGKSQPSTAAPPPPPKVNKVKTFVLVTGDNRIVAFNRFHGEKCYQLNHVDKFTENLSLGFFDPNQSTVDPFIKQIMLNELGDKFDTKDEYLTILTIGGEIYMYKLYFDGENYFFKKEKDLTITGAPDNAFPYGTSIERRLVYFPNLNGFTSIFVTGVIPYLILKTVHSIPRIFQFSKIAAMSISAFSDSKIKNGLIFLDNQQNARICELPLDFNYEFNLPMKHVDIGESIKSIAYHETSDTVVLSTFKQIPYDCLDEEGKPIAGIIKDIKDTPAMSFKGSIKLVSPYNWTVIETIELGDNEVGMTLKSMILDVGSESGSTLGSDPNSLIKKYNKKKREYIVIGIGKYRMEDLAANGIFKIYEIIDIIPEPGKPETNHKFKEIFKEETRGAITSICELSGRFLVSQGQKVIVRDLQDDGTVPVAFLDTPVYVSESKSFGNLLILGDLLKGCWLVGFDAEPFRMIMLGKDTQHISVECADFIINDDEIFVLVADNNNVLHLLNYDPDDPQSINGTKLLTKASFELNSTISCLRSLPLIDIEESVQTDALTNIAVPPPLPPNTTSNYFQVIGSTQDGSFFNVFPINEAAYRRMYILQQQLIDKEFHYCGLNPRLNRIGSIKLQNNETNTKPILDYDLIRSFTKLSDDRKRNLANKVSGKGIYQDIWKDIIRFEHTLNDL

SEQ ID NO: 7607 - protein, 554 aa, Candida albicans
MPVFEKKDTVHTNVPSPRPSTNSHTSSTYIPRYRLSITTNEDINLQSIDPGTVKIDCSGAFIANDDLLRDTAPDITDEINNSSSSTSGTPPSSNTSSDLEDDTEESEFDTEENGGGLSDSSSTTVEDDENQLQQLQQQPLYGGVITKNNITLPQHNDEIIHISVDIGGTLTKLVYFTKSSSNRKNSSRKTTGGGGGGKLHFQDFQTENFKNEAMKFMIKLIQKSINKSNINPPITYIMATGGGAHKFYNLMKKTFKKHKLPMKIIAKDEMECLIKGLDWLITKIPQEIFTYDLTELTTKFEPIQSKKEIYPYLLVNIGSGVSMVKVTKPGPEGFERIGGSSLGGGTLWGLLSLLTDAKDYNEMLEMAQNGDNENIDLLVGDIYGTNYNKIGLKANHIASSFAKVFKKLRKFNSSTNSNNNNNSDNDSDGKFKKLTAAEKLAQFKQEDIARSLLFSISNNIGQIAYLHALRFNLKRIYFGGSYISGHMQTIHTLSYAVNFWSKGEMQSYFLRHEGYLGSVGAFMMGPAPILEENGNSSNENNHTNNVKIANGVQH

SEQ ID NO: 7608 - protein, 753 aa, Candida albicans
MAAAPPPPAKNQGKAKQHVTGARFRQRKISVKQPLTIYKQRDLPTLDSNELEPSQVHHLNSNASSSSTQQPRDLHAVETGVDKNEEEEVHLQQVINAAQKALLGSKKEEKSSDMYIPTPDASRIWPEAHKYYKDQKFKQPETYIKFSATVEDTVGVEYNMDEVDEKFYRETLCKYYPKKKNKSDENNRKCTELEFETICDKLEKTIEARQPFLSMDPSNILSYEELSSYIVDQFKSAVKTSNPYIVTNGGNLEYISTTALKERLSKEIKYEPFVTIFDKNQMSTSAVRPIPKLFELFGRPVYDHWKERKIERKGKTIQPTLKFEDPNSNEKENDNDPYICFRRREFRQARKTRRADTIGAERIRSMQKSLHRARDLIMSVSEREILKLDNFQAEHELFKARCATKACKRELNIKGDEYLFFPHKKKKIVRTEDEEREKKREKKKQDQELALKQQQALQQQQQQPPQPPQQAPSKQDGTSTSQPYVKLPPAKVPDMDLVTVSLVLKEKNETIKRAVLEKLRKRKEHDKGFINLTDDPYQPFFDISTNRAEELSHIPYSSIAATHYHQFNTSNYMNDQLKKLLEEKKPLPGVKTFLGSNGELVPSKAFPHLSSLLEEKYKATSGYIERLLQSVETQDFSSYTNGFKDVEPKETNEPVMAFPQRIRRRVGRAGRVFLDHQQEYPQPNFQQDTDRVGGIPDVYCKEDAIKRLQSKWKFDTEYKTTEPFSLDPSKLNGISPSTQSIRFGSMLLNRTRK

SEQ ID NO: 7609 - protein, 960 aa, Candida albicans
MFGNKPATSGTGFSFGQTNQTAANGTNQTSQQQQQQPAVTIGSTTQSVINPPNGPTTGTTTNFSLPVSVNTSNSSKLLKELLESANNLPKTNDNIQLGSIHLTLNELERKSQQLRKQSEKDTNFTKAHYLLAGSGISADDIEDELNAIHIPKTGGRIPSHRAIVGAENIENYLSAKKDENILNTIEQSLSLASKDFDNYIDANISIDWKVRRDELRKAVGLKTNTKFNEETLKNSIIWKSNSAASNILTPLNTSSSSIRQISREKFENQAKIIYSLNEARLQNKSFPLCLNFNEVNKLQNDIKAKQIAEIWKILISLTGEKTAKTSQEQKFFNTTKADLNAIIVTNSITYLQQEFFNYIDELYLKDGDKPQSFAPPTNINKVSYFVHQIVLKNDPDLINKTLLVNGTPIWVLIFYLIRAGLYLEADELVQRNREQFNKFDKNFPVYVKSYVENTNHVLPSDLNERLHKEFNQQFQFIINDVDNNVNYDPYKYSVYKTIGKCDLSNKSLPRSVNLSIEDWTWFHLSIINANQPGSESNLIFENYTLSDLQNKIIQLGPKNFMSSPNNPLYLKTLILTGLYEMAVQYSYEYVNESDAVHLAIGLAYYGLLKCSNFNKDNILTVNNNEYEINYGRLVGAYTTTFKISDPKVACEYLIMIALANGGESKSALLVCHEALRELILISCEFGVLLGELNQTNGTKIPGILERQRKLIKLESLDQFYQQIIEVAANKCQEEGRIFDALLLYQLCCDYDTVVSLINKLLAEILATTDLNKPIIKSGNYEVISTGYITKEVDDTIDNNIILLAQHIMKVFNNNSHILGKLSSKVKQTSELLLPIIGIRDLFIKKDWRQVINDINQLGLIPVGVNDDLIKIRTMSESIQNNDLDDNLIKIIPSLLIMVMTSISHINYNILTKKYQSYGNEKQELIHWKKIAKNCMIYAGMVQYKMPRETYSLLINLESSL

SEQ ID NO: 7610 - protein, 748 aa, Candida albicans
MSLEVYGAKGNTLLALTNNLKLSIALAAFEPKVELTLNEVESNLSLKDKKSGFELIEPNAIVKYLAKDFTTTEAIKFEEQVLYSAIKSNKKDELAKITDLPKFAKEELTPSQIIVFASLYPAFKDTKENEWFSKFLQLPEVATGIKNALAITPVEREKETNTGKQNVETGHLVKKQADKILPKSDERNILITSALPYVNNVPHLGNIIGSVLSADIYSRYAKNRNYNTLFICGTDEYGTATETKALEENVTPQQLCDKYHAIHKEVYDWFDIGFDYFGRTTTSLQTEIAQDIFLKLHNKGYLEEKTTEQLYCEHHKSFLADRFVEGTCPKCDYEDARGDQCDKCGNLLDPLELINPRCKVDGNTPVVKESTHIYLKLNDLEEPLKEWVLDSSAKGAWSRNSKNITDSWIKRGLEPRCITRDLIWGTPVPLKGYDNKVLYVWFDATIGYVSITANYFKDSNTDDYLKWWKNPENVDLYQFMGKDNVPFHTVVFPASQIGTGDKWTKLHHLSTTEYLQYENGKFSKSRGVGVFGNNAKETGVSPSVWRYYLASNRPETQDAHFSWDEFVAKNNSELLANLGNFVNRIVKFVIAKYNGVIPKFDTKNIPDYDKFENDINSLLASYIDNMENVNLRKGLELAMAISSRGNQFLQDNKLDNSLYANQPAKSDAVVAVAINLVYLVSAIIYPFMPETTVKIDQILNAPALSITNKFELVLLPGHCIGKAQYLFTRIDDKKIDEWRKLYGGQQKK

SEQ ID NO: 7611 - protein, 1948 aa, Candida albicans
MVTSSTANDNNNEDPIISKNWVWVPNQQDLFTKGYITDYLPDGKCKVNVVKGQESSHDSTIIVDQDKLENCNPVKFNKCEDMAELTHLNEPSVVYNLYLRYLDDLIYTYSGLFLVAINPYKSLPIYNQSILMKYHQYNNVTTNKNDYKSKNASNSNNNNKGQSPPHIFAVAESTFRNLLSNKKDQSILVTGESGAGKTENTKKIIQYLSSITSGSHTNKVDHNNSIDTKILQANPILESFGNAKTIKNNNSSRFGKFIQIYFSNTGEISGANINYYLLEKSRVISQSNQERNYHIFYQFLKGYENLPSLGLNKDMSTYNYLSGGKLTINNVDDFKEFNLLVEAFKIMGFTTNKMNFIYQVLAIILHLGNITFTSWKSEQANFTNDSPIDRICELLAVDKDLFVQNLLRPKVKAGREFITKSKKPNEVKFAIDAFAKYLYEKLFQFIITKINEKLDQSHNGDDNTANNNNDNNFFIGVLDIAGFEIFDINSFEQLCINYTNEKLQQFFNHHSFILEQSEYLRENINWEFIDFGQDLQPTIDLIETKQPMGILKLLDEECLMPKSSDASFMEKLSKNFTNTHKKFSENKFKNGFIIHHYAGKVEYNVENWLQKNTDPISESILNLLPDSQNELIADMFINDPHINRPQTNGGGNSKLKTASQKHKDQLKTLMDQLESTEPHFVRCILPNLEKRANKFDKNLVLGQLRCNGVLEGIRITRAGYPNRMMFDEFIQRYSIICDNELSSPQNKTNCEIILKFVKLNPEDFKVGLTKIFFKNGILGKLEIIRDLALKNIFTDLQKVIRGNLTRLVLKQKIKEIQSAQIISRTMVTLDEIKSNSPWMRLFFHVKPLLEDSAKVLDSKKLQENLQTLTVKLKDSEKLTKGLETDNEKLREQMNNLQDEMINITSIAKEKDDKLSQLRLTENKSKHRIETLEIKLKDFEKQNQDLINEHEKLTRRSLELHDKHNAKVEELNSLNKLHDSAQSELSNLKQQLKEITKLNQAHSKELLKFKQMHDKSIEDLNEKVSRLENLNKKLQADLNSSKDVISSEHGKLQNEIMKLKELCSDYERKQKDSQRTIDSLQIQLKKDEDYKSRYESKIEEAREKVTLLKGKVEKKSQEIDQYKSEIKKLKAELASSNTKITQLDQSTKELSSLKSNESKYVAEIESAKQQLSKKIEEYSSIEADYNRLQTELKQMKQTNTEYSTRITELSTKLNQVTEEAKSKEIEKENQPPNPQFMEEFTHMKLKVNEQTASLRKEKFENKKLSEELQMLKERIMNGSLTSMDLTPKRRSLAIGDKSMITNTVDSFNKEIENLKFQLQQEQGNFQRAENYAIELQKKLNKLLTTRGLNTNTDYEKKYNDSQKRITQLETKIGRLLANSGGDYEDHHLDDNDDDWESRSSNGGSGGGSTSSSARNSLVKSESITAFHNMRGVSQDYIQIYQDITKTLKSTREELNGSKTEILRLKALLRESEDELYQVKQENYKTSVHDYEQDLAQLKVKHETLLSRNKDINESLEIYKKRSDEYYKKLELAESAIAISKRHEEQATKEMKESRSQLLLVREELRTTQILIKDFRIKVENLEATIEEKNHQLDANKEEIKQIQDKLNYHLKNFENKELNEKLKEEIKNLNRDLDFKTDIETKLIKENKKLQLDYEDVLLVKNNLQNEVEELILQEEKLQNKIDELTNNNRQLENEKLINERKIVNCTKQISGLKELVDEISIERDKLLKDKETLQNDLQTMTNKFDATTTELKQAHGELDFLKKHLENQREDSEAIKTELNQSKMSTSFDIRDQQKLRNELLVTKEENFSLVKTNKELNLKVSDLEEKLYSNEQLKYWESKVDTLSKALDGALNEKHEADKTIKNLQRSIKQLEIRVENESQLSKRYNDENFDYQNKINHYKSTIDIIHNENIEKDLQLKSIQRENIEMKESMLMLQKEVLELRERLQV

SEQ ID NO: 7612 - protein, 994 aa, Candida albicans
MAPSQEQSKEQIQSQTSKDQQPTKSDKSKVQKEEELSEEDQHLKDELELLVERLNEPNQDRALYNKYLDALKTFIKESTTSMTAVPKPLKFLRPHYPSLTELYTNWSNQFSAKDVIVIKLADILSVLATTYSDEGNRDSLKYRLLASDDTISDWGHEYMRHLALEIGESFQENLGVDEELVNKLVKLALQIVPFFLKHNAEADAVDLLLEIECIDKLPQFVDENTFARVCLYVTSCVPYLAPPDDVSFLNTAYSIYLSHNQLTQALTLAIKLDDNELIKQVFDSTTDESLHKQLGFILSQQNSNFKYPGENPEVQECISNVKLAEYFQYLVKELNLLDPKVPEDVYKSHLENSKFGLGTSGSIDSAKQNLAASFVNGFLNLGFGNDKLVQTEEDNKSWIYRTKGSGMASTTASLGSIHQWNINEGLQVLDKYTYSEDSEVKAGALLGTGVVSANVHDEVDAAFALLQEYVHEPNKLYQTAAINGLGIAFAGSANEDVLNLLLPLVSDLDISLEISCLAALALGHIFVGTCHGDVTSTILQTLLERDYTQLTNKFIKFMSLGLGLLYMGRTEQAEDVLETIDAIEHPISKTLKVLVNICAFAGTGNVLQIQALLQMCTAKPKDQLEEEKKLEQSEEEQQQQQQNKDTKSNGEGGEEEEDVEMEDAESKNETSENTTASATSTTSSSKEKGDSSSSAAAAAAAGDEKAQEGGDDKEDEEEIDEEEELYQGIAVLGLACIAMGEDIGQDMSLRHFGHLMHYGNSLIRRAVPLAMGLVSTSNPQMKVFETLSRYSHDPDLEVAQNSIYSMGLVGAGTNNARLAQLLRQLASYYIKSPDTLFMVRIAQGILHLGKGTLTLTPYNSERTILSKVSLASLLTIAIALLDPRSFILNDSTTETTHQLLYYLTPAVKPRMLVTVDEELKPIKVNVRVGQAVDVVGQAGKPKTITGWVTQSTPVLLNYGERAELENTDEWISLSSSLEGVVILKKNPEYMEIDS

SEQ ID NO: 7613 - protein, 540 aa, Candida albicans
MSLKLPQAPNSGLFKQGYSSFSNADGAIIRNVEAVREIASILLTSMGPSGRNKIIVNKLGKKFITNDAATMLNELEIVHPVVKILIQASKQQEFEMGDNTNLVIILAGEFLNVAEKLLTLGLNVSEIIQGFNLANKFVMKTLDELVVEKVESFETDLLKAVKPVIAAKQYGVEDTIAKLVVDAVALVMKNGSFNVDNIRVVKVMGASLSQSQVVKGMVFPREPEGTVKNAAKSKVVVFTNPIDISTTETKGTVLLHNAQEMLDFTKGEEQQLDQLCKEIHDSGVKVVVAGSSVGELALHYLNKYGILVLRVPSKFDLRRICQVCGATPLPRLGAPTPDEMGEIDIIETKEIGGDRVTIFRQDESSSRTATIVVRGATQNNLDDIERAIDDGVNSIKGLIKDNRLLPGAGAVEIELMKRITAYGESTPGLLQLAIKSFAKAFEVIPRVLAETSGHDSSEILSKLHAAHAEDTGLRAGIDIDSGEVADTAVLDILATKKSAIDLAVDATNTILSIDQIIMAKRAGGPVMPQQPRPGNWDQDD

SEQ ID NO: 7614 - protein, 765 aa, Candida albicans
MAKNLKKGKKVFNKSTRKINRLKEEEELAKLQERINNYDPKTDEASVSQFSDLPITENTLKGLKEATFVSLTDIQKKTIPIALKGEDLMGTARTGSGKTLAFLIPVIESLIRNKITEYDGLAALIVSPTRELAVQIFEVLTKIGKYNTFSAGLVTGGKDVQFEKERVSRMNILVGTPGRISQHLNEAVGMETSNLQVLVLDEADRCLDMGFKKQIDNILGHLPTTRQTLLFSATQSESVNDLARLSLTNPNKIGVSSDQEVSATPESLEQYYVKVPLDEKLDVLWSFIKSHLKSKILVFFSSSKQVQYTYETFRTLQPGISLMKLYGRHKQTSRLETTMKFSQAQHACLFATDIVARGLDFPAIDWVVQVDCPEDAATYVHRVGRSARFGRKGKSLLMLLPSEEEGMLKRLKIHKIEPKLMNIKQKSKKSIRPQLQSLCFKDPVMKNLGQRAFIAYFKSVHIQKDKDVFKVEELPAESYAASLGLPGAPKIKIKGGESNKEKKNASRKLIALAKTDADGEVQTGNEKVRTKYDRMFERKNQTILSDHYLNMTGNKVNSDGESEDEDFMTVKRKDHELKEEELPDLTIPVSKRQAKKALSRKATLASKGNPTKLKFDDDGVAHAIYELEDEDDFIKAGDAKKQKEEFVNKERETMKISDITDKEVERQKRQEKKRKRKEIERRMREEEEEDFDNEQTVVTLGAPDLDRDLQYDNGSDVEEPVSKKPKWFEGGDDDKSKNTNDGFVEYDEPETLEDLESLTARLIGN

SEQ ID NO: 7615 - protein, 400 aa, Candida albicans
  MISC_FEATURE (190)..(190): X=any amino acid
MPDANEVKPKKGWSNPALRMMGIPRISLPSRNWMIFWTVVTTIGGGIAYDKYEQKQMRKKWMDAVKQFGEVSYGADEIPRKLTIFIAPPPNDFLDESLKLFRKFIKPVLNAGVVDFEIFSESRQGDIRASVAEKIRELRRKQLVEETPKKNESNGNQDNDEEELKSRSDLYKAKDVLGLYKVFPADINVXSEDAIDDSSAGGIICVGRGAYKEYLSGVHEGLLGPLEKPQSVIDEETKLAEEKKKEKEENPDKDDDNDEEQSNLKPVPLRYIQPEDYANAQLAPELDLSTVVKDDKGVPVFFEQPVYTFPLPNLVGFTNIPRKIYRYFTKRFLVDDFGERTATIVNNKSRPFVYKDVLMAKEEEMDWPKKWVEKGKERNSEWVQELEHDERVTSRMKVFE

SEQ ID NO: 7616 - protein, 1818 aa, Candida albicans
MSSLASQLQSINEKTASVALDRKQRSKLHSRSLIFDPKQAATQDYEYIYEIATEGLEDLCELDSRFNKFKSTLFSETSVNLDRNLQTKDVISQLDKNIDAFLTLVGPYYGLTSSLKAVEWLVRRFHANIHNAELMILTALPYFQHPVFVKVLNVIPKQNLPQIFEWLVGYKDQLKTPPASSILKAFRNDFHFFNFYSKFLNDQIKNHTVYKEQLVFYLSNTVQLLASFSKNIEELNETHIPVVLETTALMLLPQQKPKYSSSINSDLKLTSYSIISVLSSIFPFSADILKSLTVSILEDEDALKGFTKPTLIVLSQLWKHFQGNLEVIEAFKNFKIGQHELGVLDELKNENYQLSTFIILVFISTFPSNESYKLLPFIDLSNKTVFEIITKLVLQNSTTQEDSIRSNLTKIAQSLTKSDPKLFQTTLESENWKVDELELKLMSVLVESKNDEAEFDAGDEDNAVEDIEIVKTVDFTKLQSTAKSYFNTEYDEEFNLVLKELKSVLSASDAKLHVSVILTFLQKVFSTPEVALTFAFRVALTPAVPLSIRLSAIKSIRIKIKNAANGKTDFYLLIPLILLALFDNSKLIRSGFAQLLRLVIEIKTKLTTGAALFLEREIYGSVSDKKYPTPHDSLFLCSLLSEDNVKDTVLDPSRVINILFDSIFKAKNGKSKPGKYFRSFIFTQWSLCSLPIVLKANAWKIVAQANKAGTDDRFFFLDGDIENYFSKRNVWIDQASIAGIAFFDNAEVSVVGLVGGVASNDKNSNTESEWLCRALENPSGNLQMTANNRVLETFDTFKPIESRLKIVNKLVDILINDDIVEFDPMATLQELNIDRNLFLQALTSVQIGDQIPEQGIAKRRRRSSNSTKQAMVRDEINNMASGHLKKLTFLLEILESSLRKKRNVAGPDLLKVLFKILTDLEYLGNDGNLPVLYAQETLASCMLLNIVNLKSSSKEVKFDSNSIRADLIVNSIRASPSPQVQNRLLLVISELASLAPEVILHSVMPIFTFMGAHTVRQDDEFSSSALQQTVAKVIPALASNGLSPVNNEIEFLLASFATAFPHVPRHRRVKLFVSLTKTLGCAESMHLILFLMGQQYANNVHKNKNGDSQSVVEFVHGYMKSFSAEEQLAGIVAFTKLWNDIPLNQLEPGSEEFEVLNNRPVFGTTIATLGQSGLAVLRNDLLQFLDETLSSENKHELSSLKTKMALVLIDDEDSEVSKKESVLDKFRAITSFALASLDTFTNSHADIKLCSTLYSLLGNLLDLLPLNYFIDSIVASLDVDTLSDSLSIKVARNYAILASRKFETELNVAHCDQVVIESVINNLLPILIKGIKKNVDVELQQAYLDTFSTIVNKFGASGTEFASSDVSKVLIESLGIVTTDRGLLNEQPEVIIASINAITSIVNILGVKTLGLFPKVVPPALKIWESTNSLGDKESAKLLQGSVLVLLSCYIKKIPAFMSTTLEAVLLTILSSDLIDNHIRSSVLDLIVDHMDLAQVLKSLCNVWLTKKFYTNDNSGNIGLFLKTLQATINKMEKKQATTQATLFMRWLISAFEFRQYSEDNDNKFDNNTIHRLESSFHGCAIAFVMKLNDKSFRPLFANLVRWAVDGEGATLKTNEVSRLLAFFRFFNKLQDELKSIITSYFSYLLDPTSALLKRFSEGSLVATNLRRIILIGLTSSFKYDQDDYWSQQGRFDSICSPLLSQLSNIEDSIGKYLVKSVSTFVTDVSSDEYNETLVHELIKYISNANENSAATKIWSIRTLKTIFQKMGEQWLSYLPTLVPYIAELLEDDDEEVEMEVRRGLVRVIENVLGEPLDRYLS

SEQ ID NO: 7617 - protein, 335 aa, Candida albicans
MSFFQYKNYIEEGDLVLAYISRSTIKPINVKKGEIFNTRYGHFEHDKMIGMKYGEQMPGAKGYGFIHLLHPTPELWTLSLPHRTQIVYSPDSSYIIQRLNVKPGSRVIEAGTGSASFTHSFARTVTLSGKVFTYEFHEPRYLEAKKELEEHKLDNTTITHRDVCNDGFSIDNESIEGDVVFLDLPSPWDAIPHLDSVISTSKAAGICCFSPCIEQVDRTVRALEENGWTEIEIVEVAAKRWSARKEMVRSVADAVQRIREIQNGRKTGLEVMKKGPSEEPPAKLQKTDNGYKTPKKSTKVKEGDENYTWLNATKSESEIKSHTSYLTFACKIPKQ

SEQ ID NO: 7618 - protein, 835 aa, Candida albicans
MSMKRFLSRSSNKTTAGQGDDTSASIGSDLPIVPLPSNQSGESHDSIKELGPMFRQQQNKQIADNDDSYDMMHLNLNPTISNLNKTVPSIKGSTIQDSLFSSRQSYSTNQSSYKTGGTNTSGGSSSNSQFGKRKHDLNTSQPLQTLKILEENEHQNLEELIRDNLKQLYQDLAYTMSQFYNSSASLSTTVINIIDCLKKFNVFVEKATIAKPNEQYIFTSYNSSSLRKILKIYLELYDNLLTDQVYIKLKLLLVKNFNDFAMLLNSQEMNQISEEMIKPKNYPIGSSKGKSLPNEEILVRIMEKVSHSNLSMKEQNGSFIAPITRGISNNLNILCLYFGYPEPTEYHHSLTQSLRELYDDVHVVLAKNQIELASATRVDAASTFNKPAAFNDGFPPLQAQSTQKFKLPFRVPTDIHHVPMSMSISIENATRTSGTMGGYIYPIIDLQKQPHLKSYANSKFAISCGHVCLDSDNPENYPNVSSPSSVLISLYKQALTEQYHKSLNRNNSTAGVPSETRVAFGAVLQQLEEMFPLKQIKKSSTRNNNSAYKDDYEVRNLPKYRFGQIIWGERTLIKLNGDTNGNSSNNHQINEMSGIVEKKLSDLAIIKVNKKLKCEHNYLGDDVQFNEYDPSLMFDNLYVRKVINLKRYVPKVINTAIEDVDSDVSNNSEIQTYFGIPVFKYGSTTKYTKGHLNGIKLVYWLDGAIHSSEFIVNSIEANSSFASGGDSGSWILTKLDDIEDNSKGLGVLGMLHSYDGEFKQFGLFTPMTEILSRLEEVTNIKWGVVGCDNKHDEEDDDELHGFDTDDNDDRHSAFSDDDDDGVSENSDAAYPPDIE

SEQ ID NO: 7619 - protein, 567 aa, Candida albicans
MCIAKKKKFCCVTLLPIMTQATLQTIYDRPYEIFKTDGEFFNKLVKSFIDPLAKKYSVLDEIYIDGLDSSQVFGQTKMVLDGVGEELLGSVIPEIQGMVRDEEEEEEDTQEEEDTQEEEESPAEEEEVEEVEEESEQEEQPEDEESQVESEEEQPEEEEDAEPIHKDAFGLNDGFFDIDEFNKQVLAMENDNNDDEIDYFDSLSGDDDEMDYYNDFYDKPGKFKQQVPEKEEFEEDDYDNAVNSAMLDLFAEEEPQPKESLSSFEKQQKSIQAEIARLEAELVADKKWTMKGEITSKDRPQESLLEETEIAFDRTSKPVPVITEESTQTLEDLIRKRIKEDDFNDLPRRIITDISKFHKTPRAEVSEQKSSKSLAELYEDEYNHVDAQQESINEEVKKQHDEISELFTKVTHKLDALCSAHFIPKPHQAKTIDIKVTDSISMEDAQPLHVSNESRLAPQEIYKIGDDEAKGDGVKGKSQVQLKSGLSYSKDELSREDKQRLRRASKRKKAKTFNQRQETKRQRKDGVVDTLAGAKNLTVIGNKGEMRDIKGNLKKASGPQSSNSFKL

SEQ ID NO: 7620 - protein, 110 aa, Candida albicans
MFKLAFRSIRAPVARASFVKPIRFYVAPPISKDEVTSRAIQALKTVAPLQESNITLESSFQKDLGLDSLDTVEALVALEEEFDLEIPDKISDEIKTVGEAVDYIYKEESK

SEQ ID NO: 7621 - protein, 827 aa, Candida albicans
MSKSRTVTGSLDQKIYNLIHDLLQEQTEENKRAATADEEHDPFSCMASSHNLTVSQVLAYVQMKDFQLKRMKKNYLEKSIAASLKVIRQDETEEFGDRENGIGDESEAENDRECENDLMEVKDSNAINKSVVSLWNQEKTDGESDGVNNEEGQQADTTELLKGNKRKAKGSAKTQLKKQKRKIDYSTPNIDLSSLGGVESVTTQLLEIIGLPILHPEIYSSTGVEPPRGVLLYGPPGCGKTTIANALAGELKVPFINISAPSVVSGMSGESEKKLREIFEEAKQIAPCLIFMDEIDAITPKRDGGAQREMEKRIVAQLLTLMDELTLEKTGGKPVVVIGATNRPDSLDSALRRAGRFDREICLNVPNEEQRISILKAMTKNIKLENGEHFNYRELSKLTPGYVGADLKSLVTAAGISAIKRIFETMSELQEESHSVKDDSMDADPVSLDANKEDMIKKFEQKSEAEKLSTIKKFLNMHPDPLNQEQLAPLAITYQDFVNALPSVQPSAKREGFATIPDVTWQNVGALFKIRMELHMCIVQPIKKPELYLKVGIAAPAGVLMWGPPGCGKTLLAKAVANESRANFISIKGPELLNKYVGESEKAVRQVFQRARASTPCIIFFDELDALVPRRDTSMSESSSRVVNTLLTELDGLNDRKGVFVIGATNRPDMIDPAMLRPGRLDKTLYIELPTPEERLEILKTLVRTSNSPLHANVDLNAISRDSRCGNFSGADLSSLVKEAGVWALKKRFFQNQKIQELDSSGFYEDSIGEDDISITAEDFDHALSSIRPSVSDRDRMRYEKLNKKLGWNIISDKEPDDAGSTSDKND

SEQ ID NO: 7622 - protein, 146 aa, Candida albicans
MGAYKYLEELQRKKQSDVMRFLYRVRCWEYRQKNVIHRASRPSRPDKARRLGYKAKQGFVIYRIRVRRGGRKRPVPKGATYGKPTNQGVNQLKYQKSLRSTAEERVGRRASNLRVLNSYWVNQDSTYKYFEVILVDPSHKAIRRDE

SEQ ID NO: 7623 - protein, 151 aa, Candida albicans
MQIFVKTLTGKTITLEVESSDTIDNVKSKIQDKEGIPPDQQRLIFAGKQLEDGRTLSDYNIQKESTLHLVLRLRGGGKKRKKKVYTTPKKIKHKHRKHKLAVLTYYKVDNEGNVERLRRECPAPTCGAGIFMANMKDRQYCGKCHLTLKAN

SEQ ID NO: 7624 - protein, 273 aa, Candida albicans
MSRTGVLVLGPAGVGKSTFCNSMIAYMQSIGRRAHIVNLDPAANPTEYEFTIDVKDLISLQDVMEEMELGPNGGLVYCFEFLLNNLDWLDEEIGDYNDEYLIFDCPGQIELYTHIPVLPTIVRHLQTSLNFNLCATYLLEAPFIIDNSKFFSGALSAMSAMILLELPHINILSKIDLVKDEYSKKQLKKFLNPDPLLLAKQEDYINPKFAKLTQSIANLVDDFGMVQFLPLDCSKDSRSVETILSYIDDVTQWSEAQEPKEPHDEVELPDEVF

SEQ ID NO: 7625 - protein, 1050 aa, Candida albicans
MSAASESKYSTEVLSELLSKLQVADNKDEAASNISTFLNSSIVEHDVPVEFFEDLKKQIQSKDAKVSLAALDAYKHIASTNGLSPSVEPYVVDLVSEVAVKAGDKNKDVQTAASDALLAIASAITPTAVKAILPKLIDNLTNTNKWTEKVAILRAVSQLVDTAKAQIALRMPELIPVLSESMWDTKKEVKEAATATMTKSTETIDNKDIEKFIPQLISCIAKPTEVPETVHLLGATTFVSEVTMATLSIMAPLLSRGLAERDTAIKRKAAVIVDNMCKLVEDPQIVAPFMDKLLPGLKNNFANMADPEAREVTQRALNTLRRVGAVGENDSIPEVSTAGDIDVTLNEFNKLVADKKIAKRFDVALNYIAAIAGDLVDEREIQPEAWLQNVLPFATIFLHEKEAKEIIEEFRKRAIDNIPQPPSFEDEEDEGEDLCNCEFSLAYGAKILLNKTQFRLKRNRRYGLCGPNGAGKSTLMRAIANGQVEGFPTQDECKTVYVEHDIDGTHADTTVVEFVIEDGEVGLTKDVVVDKLREFNFSDEMINMPIQSLSGGWKMKLALARAVLKNADILLLDEPTNHLDTVNVAWLVNYLNTCGITSIIVSHDSGFLDNVTQYIIHYEGFKLRKYKGNLSEFVKKCPSAQSYYELGASDLEFRFPEPGFLEGVKTKQKAIVKVSNMSFQYPGTSKPQIQDINFQCSLSSRIAVIGPNGAGKSTLINVLTGELLPTTGEVYVHENCRIAYIKQHAFAHIDNHLDKTPSEYIQWRFQTGEDRETMDRASRQINEEDEQNMNKIFKIEGTPRRIAGIHARRKFKNSYEYEISWMLGENIGMKNERWVPMMSVDNTWLPRGELMETHAKLVAEVDMKEALASGQFRPLTRKEIEEHCAMLGLDAELVSHSRIRGLSGGQKVKLVLAACTWQRPHLIVLDEPTNYLDRDSLGALSKALKAFEGGIVIITHSAEFTKDLTEEVWAVLDGRMTPSDHNWVQGQGSGPRIEKKDDEEEDKFDAMGNKIAAAKKKKKLSSAELRKKKKERMKKKKELGDAYVSSDEEF

SEQ ID NO: 7626 - protein, 352 aa, Candida albicans
MATSQELTADIQALATSFPKRLANDSDNSLLINVAPTGRQAKRHIQQINYSEEFGDDLDFDEFPSSTPGTRSLNENKAQIEAQRYSLAKNTPTPKRILEKPVLSELVEKPVVLIPIKIMIENLNTNQKLIDSFMWNLNESLITPTEFAEIVCSDLDLPFSMAAQIADSINQQIEEYSYASNLQLPNKGPYNVTIDLSVNLNKQLYQDRFEWDMNQNEVTPEIFAEIVVADLGLSLEFKNAISHALHEIIIRVKKEVIDGTFNNEMHNLHLVKGIMFEQGIRIFTENSVQNGNDRWEPLVEVLTSSEIERRENERVRNLRRLKRENMRRDYDDHSRRRQAGKRRYDELEGAWV

SEQ ID NO: 7627 - protein, 1128 aa, Candida albicans
MTVPYKRKHDADSLFDARNGGEGVSEYMSQLLINSSDQPRKRRTMTQAPSRNGRESASETESISGADSDSDGESDDDEDDEDDDDDDEEEDDDDDVGSDPAKAGVIEKLTLKNFMCHDSFELKLGPQLNFIIGRNGSGKSAILTGISVGLGAKATDTNRGSTIRDLIKDGKSTSRITVVLKNEGSDAYKPDVFGKKIIIERKLQRSGSNTYSIKNEAGKVVSNKKSVLDEILYKFSITIDNPLAFLSQDKAREFLTSSSDKNKYEYFMDGAFITDILENYTSISNNVQVLDNKVRQAEEYTKVAKQEYKAIAKVHNAHRTNDALRNKLEMLNAKIYWFNVQTIEKKIDQENRQKDTCLQEIEQAKNQIDVCEKEIEAKIPRKDAADQQVKEVESQIKDIVEEFEGLRSKRSEMKSELEINKKETKKNIDEMNSLKEDITRTETKIEQERRRIQELQGGNKEKMAEELEKLNSEIDELESQLENLKKQLVEMQDNPDPELRSVSQQREKSRQKIADLQNQKRQLEKESVSKYSPWGSRMAELIKAIKRHPDWVQEPIGPIGSYIHVKNQYNNWKPLLSTILNKTLDSFIVTNEGDRSRLDRLLKQYQIRSNIIVKKTERLNYASGKADSAFTTVLDMLNVENDTILYALIDINSIEKNVIVESASEARDSCRRRNVQNSLVLFRKDSGHRMSYQNNTFRQDPIYYQNGMAKFGVANMSDLISDLQRELDEEHRHQNDLERRARSIKMKLDAKRDNLVSESRAIKRNLDQLKRNRSTLEDQLEVEVDYSNITTLEARIEDNNEQIRRLVALNEALLENLSQMNENYKDLKQQIEDCKSKKVKHETIREKFVKQLVEIETEIETQEDLKKRYLYKITELEDRIKRADDILAEGNRKLEEFVAKAEEHCSRDRVTIYPNDTQETIAQDYQETRFDLERAESALGTSLEEVLDQLEKAKAKCDKAEGELESLSSASRKLNAEVNARFNFLHTIIQSSIQEAKRTFEKAMWLRGFQGTLKFDFAEKTLQLNVQTGNDEKKRTVESLSGGEKSFSQIALLLSIWKVMNSRIRGLDEFDVYMDSVNRSISIKLLLKELKRYPKSQNIFITPQDIAVVGELNDKGVKIHKMSAPREE

SEQ ID NO: 7628 - protein, 552 aa, Candida albicans
MSSNNSSKNHHSSKRSSPAPVPSTVTKKTKITDKYLKELSAYHEPVFDKPPPTTIGILDMNQLEHSTKTMQKCVSSILEKAPNCNQLQYLIESDEIDNGIRLELQDNPLIDTASKLKSLHEIGKLPILDQIINDEVKISDDDLKKLKKIPAKSNSVKVNSPRDVVPEIASTGVHHDMPPLPPINDPKLFERVFIHKSTVNNKQYLEANHLLHSHNERLEFYGDSILNNLATLIIFKEFPDSTEGDLSKIRSKLVSNKTLIKIAFQYGFDKKLRSRISDDVLKTGDKKIFADVFEAYIGALAMERGFDLEDVKEWLAKVYAPLIHELKIEYIEEPIDREAKSKLYGLIGQDDLHPVYNTLQMGDGIHNKFIVQCTINGEELGRGTANNLKEAGLRAAMAGLNNNEVLKKYFVARQQIERPIKLQRLERENAKKREVAERLEQERNNLPSTPSSPIRTSMFPISVNENEPLDIDAKNKLYGILGRKIGDKPAYLTSQINGNLFKVVLCIRGITICETTDPSKKKAMARAAQTLLENESAMREICKDFRTKDSPE

SEQ ID NO: 7629 - protein, 1461 aa, Candida albicans
MSESESDYFTDGSEDDFVPTSKKSTKKNASSKSKQPLGDATNSTVSSSRSSTPKPTNASETYQKLSQLEHILKRPDTYIGSVEKTKTEMWCFDAETESMVFKEVTIVPGLYKIFDEILVNAADNKIRDPSMKNIRVKIDAENNIIEVMNDGKGIPIEMHTKENMYIPELIFGNLLTSSNYDDDQKKVTGGRNGFGAKLCNIFSTQFEVETADLNMGKLYKQSWTNNMSNVSKPKITTLRPKKEYTKITFRPDLSKFDMDCLDNDLLSVLRRRVYDLCGTVKNCNIYLNDKRLNISSFKGYVEMYVKAIKERSPEPEPQDGTIKNFTTIVHEVFNDRWEVAFAVSDGSFNQVSFVNSIATTSGGTHVKYVSDQIINKLVETLSKKEKGKKKLMIKPQEVRDNMFLFINCLIENPAFTSQTKEQLTTKVSQFGGKDKFVANDNLINRILKTSIVDKIRAIANANEDKALQKADGSRKSRIKGQVNLVDANKAGTKDGHNCTLILTEGLSAMNLAVAGLSVVGRDYYGCFPLRGKLLNVREASADQISKNAEINSLKQIIGLQHKKVYTAENIKSLRYGHIMIMTDQDQDGSHIKGLIINFLETSFPGLLDIPGFLLEFITPIVKVTVKARGAGGKRVIPFYTMPEFEHWRDTEGKQCRWTQKYYKGLGTSTPMEAREYFTALDRHLKRFHALQGEDKDYIDLAFSKKKADERKEWLQGFLPGTHLDPEITEIPISDFINKELILFSMSDNVRSIPSVLDGFKPGQRKVLYGCFKKKLRSEIKVAQLAGYVSENTGYHHGEQSLVQTIIGLAQNFVGSNNINVLKPNGSFGSRAAGGKDFSAARYIFTELSEITRKIFNPLDDPLYTYVQDDEQTVEPEWYLPVLPMILVNGAEGIGTGWSTNIPSYNPKDLVTNIRRLMNGEELQEMTPWYKGWGGDLEPMGPQKFKVSGRIEQIDSNTVEITEIPVKTWTNNVKEFLLSGFGNEKTQPWIKDMEEHHTTSIRFVIKLTDAEMQKSLRIGLLERFKLVSSLSLANMVAFDPMGRIKKYNDVLEIIKDFYYVRLEYYQKRKDYMTDNLQNQLLMLSEQARFIKMIIEKQLSVANKKKKQLVALLEEHNFTKFSKDGKPIKSSEELLTGDDADEEEETQEQEGDEDVGNTSVANIQEGEPEQAAHVPETIYSSYDYLLGMAIWSLTYERFMRIMQQRDQKEAELNALLSKSAKDLWNQDLDEFLAEFDKFLLRDEQERESLASNGKKKSTKRRAKATATKDQPNNKKVKVEPKEKKSISAKPVVKKEASNEPQASSSSKPKEKDDILSFFSSSSSSAKKTTKPSGRATSNKEIETITLFSDDDDDEDIFNLNSSSSTKVKKETKSRSATPAAEKSKKPKSSGKQSILDELEDLEILGNFDKPEPKERRTRETASTTKRNTKKKPVIIDSDDEDEDEEDDIVMSDGDDDDDFIVDE

SEQ ID NO: 7630 - protein, 1044 aa, Candida albicans
MKISPETVNKLQSDASCIRNICILAHVDHGKTSLSDSLLATNGIISQRMAGKVRYLDSREDEQLRGITMESSAISLYFKVMRLQQGSQEPEVHEHLINLIDSPGHIDFSSEVSTSSRLCDGAVVLVDVVEGVCSQTVNVLRQCWIDKLKPLLVINKIDRLITEWKLSPLEAYQHISRIIEQVNSVIGSFFAGDRLEDDLNWREAGSVGEFIEKSDEDLYFTPEKNNVIFASAIDGWAFSVNTFAKIYSKKLGFSQQALSKTLWGDFYLDMKNKKIIPGKKLKNNSNSLKPLFVSLILDQVWAVYENCVIERNQDKLEKIIEKLGAKITPRDLRSKDYKNLLNLIMSQWIPLSHAILGSVIEYLPSPIVAQRERIDKILDETIYSAVDSESDKSKLVDPSFVKAMQECDSSHPETHTIAYVSKLLSIPNEDLPKASNAATGGLTADEIQERGRIARELAKKASEAAALAQEGSKNEDEFAIKPKKDPFEWEFEEDDFENEEDESDANAVEESTETIVGFTRIYSGSLSRGQKLTVIGPKYDPSLPRDHQTNFEQITNEVEIKDLFLIMGRELVRMEKVPAGNIVGVVGLDNAVLKNATICSPLPEDKPYINLASTSTLIHNKPIMKIAVEPTNPIKLAKLERGLDLLAKADPVLEWYVDDESGELIVCVAGELHLERCLKDLEERFAKGCEVTVKEPVIPFREGLADDKISTNTNNNNDDNEDHELDENEDELADLEFDISPLPLEVTQFLIENETIIAEIVNNKQDTHEIRNDFIEKFATIIDNSNLATQFPDTKSFINNIICFGPKRVGPNIFIEDYGLNKFRHLLGESATESRFVYENNVFNGVQLVFNGGPLASEPMQGIIVRLKKAEKREVDEDKIVNPGKIITQTRDLIYKRFLQKSPRLFLAMYTCEIQAAAEVLGKVYAVVQRREGSIISEEMKEGTPFFTIVARIPVIEAFGFSEDIRKKTSGAASPQLVFDGYDMLDIDPFWVPHTEEELEELGEFAERENVARRYMNNIRRRKGLFVDEKVVKNAEKQRTLKRD

SEQ ID NO: 7631 - protein, 606 aa, Candida albicans
MFSQRYDPLAEENNGSRPADSGFGVSLKKRKLSDDESSDEEEEEEETDESEHESSQDEDINEEEPEEEDEDTNKVDDNMEIDSQPEVDPDYIHKHQTIFNKFKQSTESEAIEQEKEEVEEEDANIEQHSLVPLPQPALPRDRKLSSVSTHTKNLDWLTKPQYASPSDKKAFTDFKLSSFMIKNLEKMGFTEAFSVQISVLNMMLPEIEAQKLKPDRVGDILVNASTGSGKTLAYSIPIIESLYRRVVPRVRVIILVPTKPLINQVKSTLLQLSSGTNLQIAALKNDVSINDEKDSLTKSVPDIIVSTPGRLVEHLLNDSINLSSLQYLIIDEADRLLNQSFQNWSNVLLDKIDSQINIAEVWKLSVQKLVFSATLTTDAGKLSSLKFYNPRLIIVNDSKQLVNEIFTVPVTLSEFKIHLGVAKNSLKPLILTKFLISTNKLSNVLIFTKSNESSIRLTELLISLFQKLSINLKIAFINSTNNRTSIRSKILKQFSNQEVNILITTDLIARGIDVASITDVINYDLPNSSREYVHRVGRTARANQVGYAYSFCFGKGENSWFKKLAHEVSRSKEVENVDLNVKELISDRDEEIYQQALHELQQQAKK

SEQ ID NO: 7632 - protein, 424 aa, Candida albicans
MSVEEKVSQLKVTEESEQKITPWEVEGAVVDGKSMGIDYDKLISQFGTKHITEETLERFKQVTGEEPHPFLKRGVFFSQRDLDRILDLYEHGEPFFLYTGRGPSSDSMHLGHMVPFIFTKMVQEVFDVPLVIELTDDEKFLFKHQLTIDDVKGFAAENAKDIIAVGFNPENTFIFSDLQYMGGAFYENVVRTSRQITTSTAKAVFGFTDSDCIGKIHFASIQIATAFPSSFPDVLGLPPKTPCLIPCAIDQDPYFRVCRDVADKLRFTKPSLIHAKFFPALQGASTKMSASDTTTSIFMGDTAKQIQKKINKYAFSGGRATAEEHRELGGNPEVDVAFQYLSFFSYDDEKLAQLEQGYRKGEILSGEMKKECITVLQEFVSAYQERRSKVDDQVVEKFMKPHKLVFGNKERKVPAKQREKKAKK

SEQ ID NO: 7633 - protein, 480 aa, Candida albicans
MEFTAVIVCGKGKALTPFSQARSTGIPKPLLPIANKPMVQYVLDWCLQANFSRIIVLFEKEDESSGVLEQTIKRYQEEKEKTNTNKNESHVSIDVIPYNCENNGLILYKLYELYSENKVSNNNFIILPCDLITNLPPQVIIEAYRNKNDSDLGLVIAYKNQLDIEDKKAKIFPQSYTIYSDTDENGNESPMFLDTYSQADIEFHQALSIRTQMCWRYPAATVSNKLLNSGIFLGSCSQIFSVFDEQKDKFTESYFEKRSLMKIVRDLARRSWKHALHQASVGFFIVPKQATFFRCNNLPVLMEANRYFMKKQAIAKSASQNTQAPNKQDKQSGAHVGNDSLVGENTELGEKTNVKRSVIGSNCKIGKKNKITGCLILDNVEIHDDVTLENCIIGHDVIIQGKCKLTNCNVESTNEVAHNTQAKNSNLLCLTLEGLVNEDDQYGDDSDDEEDSEEYDSTDDEDESEFEDEYTGNEDGLFAY

SEQ ID NO: 7634 - protein, 402 aa, Candida albicans
MVPPVYIVSTARTPIGSFQGTLSSLTYSDLGAHAVKAALNKVPQIKPEDVDEIVFGGVLQANVGQAPARQVALKAGLTDKIVASTVNKVCASGLKAIIIGAQNIICGTSDIVVVGGAESMTNTPYYLPTARNGARFGDSTLIDGIQKDGLLDVYEQKLMGVAAEKCAADHGFTREQQDEFAIKSYQKAGNALKQGKFNQEIAPVTIKGVRGKPDVVVEKDEEIEKFNEAKLKSARAVFQKENGTVTGPNASKINDGAAALILVSEAKLKELGLKPLAKINGWGEAARNPIDFTIAPALAVPKAVKHAGLTLDQVDFFELNEAFSVVGLANAEICQIPLEKLNAYGGAVALGHPLGCSGARIVVTLLSVLIQEGGKIGCAGVCNGGGGASSIVIEKVDSDFKL

SEQ ID NO: 7635 - protein, 699 aa, Candida albicans
MEVTQRTQSQTQPTQQSPTTQTQTQSKEDQNRICQLICSTGQFGNYDLNINDKTIVQGKMTWYFGRDPNSDLQVASSSRISNKHFQIWLNFNDKSLWIKDTSTNGTHLNNSRLVKGSNYLLNQGDEIAVGVGRDEDVVRFVVVFGDKYNPAKLPDSTNTIKDEGIYKDFIVKNETIGQGAFATVKKAIERSTGESYAVKIINRRKALNTGGGSAMAGVDRELSILERLNHPNIVALKAFYEDMDNYYIVMELVPGGDLMDFVAANGAIGEDATQVITKQILEGIAYVHNLGISHRDLKPDNILIMQDDPILVKITDFGLAKFSDNSTFMKTFCGTLAYVAPEVITGKYGSSQMESQQKDNYSSLVDIWSLGCLVYVLLTSHLPFNGKNQQQMFAKIKRGEFHEAPLNSYDISEDGRDFLQCCLQVNPKLRMTAAEALKHKWLQDLYEEDSVKSLSLSQSQSQQSRKIDNGIHIESLSKIDEDVMLRPLDSERNRKSSKQQDFKVPKRVIPLSQHPATPLPMSQPKKRPYQIDPRTNKKVDLEEPSTSKKVKLSDSVVAEDYLKLEPLANSLFQETINISKSPFSFGRNDTCDCEIDDDRLSKLHCVITKENDSIWLLDKSTNSCLVNNTSVGKGNKVLLRGGEILHLFFDPLSSQHIGFKVVLVDQSSGEHKSQVEALKQTSEEMNIIPLISGLSSISS

SEQ ID NO: 7636 - protein, 635 aa, Candida albicans
MSTSIADAFKKLNVSPESSTSEHEKIFNVSYEYLSKVKKFNDLKASKNCLVALINLDKYYKAEQIIRKLPSSLVNSLILEVAYVYYKIGKVQELVKLYEATNENILPNAVDIGLKHVLAQSYYKIGSYEKALELYKELIKNNQYDDELDLVINEKAIVSQLNFQKGGKIESSTTTNANNYDLLFNEALIKLSTLNTTQTLALLDKASQVVHAELSGEDLVSELLPIKLTTAYVYQLTGESNKSLEILESIDVEKINDLLIKLIVKNNLYSHSTITNINLVDRDLNYQQNLHKLSQKLTVLQYERVLKNSLVLKFASGTLSKSQLNNQFINNFQQTFPGDLLPLSYKVLSTLNIDHKDLQDLTKSKQIGRKLVKYIPTQTDNDLKIVATLILVSVNAQIGSFDQSLPILEQLTHESLATPKALPGLIGTLIAVYENTHNTKKLTDLLLKVLEKLLYTPKELLSGDINYYNFAKIVAFKALNQGHDKTATQLFEYLYEVNSNDQLIHSILSNTNNDLLPLDELTSKKPIDEILSVDIDTLIPTTKNKPIKPIVKKVSKITKKKQNPKFGPNKVLKPIEDLQLDEERWLPMKLRSYYKPTKKEKKKASGGGGQQGATESSTRTTSSSNNKKKKKKGKK

SEQ ID NO: 7637 - protein, 1209 aa, Candida albicans
MEQQQQSNKAHRGGTKKPGAKKKLHQDGQNKKAFAVSAPRKLERMARRSHDVNEKKLHVPMVDRTPDDDPPPVIIAVVGPPGTGKSTLIKSLIRRLTKTTLTEINGPITVVSGKRRRLTFIEVNNDLNSMIDIAKVADLVLLLIDGNYGLEMETMEFLNIAQHHGMPRVLGVATHLDLFKSQSTLRTSKKRLKHRFWTEVYQGAKLFYLSGVINGRYPDREILNLSRFISVMKFRPLKWRNEHPYLLADRITDLTHPQKIAENSKCDRKVAIYGYLHGTPLPVENAHIHIAGVGDHYVHSVEKLPDPCPTPYYEQKLEELERERVKNAAASGEPLAKTTRRRKRLEDKQKIIYAPMSDVGGVLVDKDAVYIDVGGKEIYKTGTGTSELKGEGEKLVNDLQEISQTMTERLEDGPGLQLFSSSKALNQVDEDDNNEEEDDDDDEEGLLSDEETIVDTGRSSLRKARVYGKSVSEDDEFDELESDEEQDGDQFSDDEDKAENNLKSRGMVEVDFGSNNKYKENDLEYVEDSSLSSDEDYYKKSAAKLTASVRRKWDINKLIYLKDIDAKEVIKKWRNNDVQDDDDDDDEEEEEDIEQDDQDFFVKKKVQDDKEDLDTSLPRFPTLEVLKAKFNPNTIDENNSDDEYENGYKILKSRLLVAPKVTDETEEGKEIKENDDDDELYGDFEDLEATENQDQEEEQNKSTKTAEDEDDFADFDAEEEKEEEEDDDNVDEESMTTEEKRQLNAAKKAKLKMQFEEEEDREFGASDPEDESETWYEYQKNKMAKQLEINKVQYEEMTPEMRIKIEGYRAGSYVKIVFDNIPCEFIDNFDPAYPLVLGGLLTTESRFGIMNARIRRHRWHKKILKSQDPLILSLGWRRFQTLPIYTTSDSRTRNRMLKYTPEHAYCFASFYGPLVAPNTTFVGFNIVDSKSTTGAFRVAASGIIEDINSSVEIVKKLKLVGYPYKIFRNTAFIKDMFSNSLEVAKFEGAQIRTVSGIRGEIKRALSKPDGYFRATFEDKILMSDTIFLKTWYPVKVKKFYNPVTSLLLGQHSEWKGMRLTGQVRADENIATPLNVDSQYKKVERVERRFNPLKVPKSIQAELPFKSQIHTMKPQKKKTYMSKRAVVLGGEEKKARDLMQKINSIRKEKDTKRKAKKDEKFKEKLKKIAKTEELRKEKERERKKDYFSKEGKKRKLGSSDGQAFGKKQRV

SEQ ID NO: 7638 - protein, 1166 aa, Candida albicans
MTLAKFRTLEREKRFQNPPKDMDSYPLLKDAVAPHVGSFNALMDGPDGGLLNLAVKDIGSKTIFDTPETSGRLGNKLKIRVDSVQLAKPSVPANDKLSLNRKTFPSECRERMVTYRSRLMLNVTWSVNDEEEVSEVREAGQIPIMLKSNRCHLEKLSPNQLVEAKEESDELGGYFIVNGIEKLIRMLIVQRRNHPMAIIRPSFGNRGASYTKFGIQIRSVRPDQTSQTNVLHYLNDGNVTFRFSWRKNEFLVPVVMILKALIETNDREIFDGIVGNDTENSFLTDRLELLLRTYKTYNLYSQQETLAYLGDKFRVVFGASPDMSDIEVGKEVLKRIVLVHLPNNADKFRMLLFMIRKLYSLVAGDCAPDNPDATQHQEVLLGGFLYGMIIKEKIEEYLQNIKLQIQSDINRGVGINFDDRKYMTRVFSRINENIGQKLQYFLSTGNLVSQSGLDLQQVSGYTVVAEKINFYRFISHFRMVHRGSFFAELKTTTVRKLLPESWGFLCPVHTPDGSPCGLLNHLSHKCKIATEASDVSQVPKALTQLGVLPADSFAAGPNLCCVQLDGKIVGWTTHEQGRIVADTLRYWKVNGGHGLPLDLEIGYVPPSNKGQYPGLYIFGGHSRMMRPVKYLPLDKEDIVGPFEQVYMNVAVTPEEIENNIHSHVEFTPTNILSILANLTPFSDFNQSPRNMYQCQMGKQTMGTPGTALVHRSDNKLYRLQTGQTPIVKANLYDDYGMDNFPNGMNAIVAVISYTGYDMDDAMIINKSADERGFGYGTVYKTEKVDLSQSRRRGDPITQHFGFGSDEWPEAWKEKLDADGLPLIGVKVEEGDPIVAYYDDTLGKTKVKTYHSSEPAYIEEVKLLGDDSNEQEGQQITIKYRITRQPLIGDKFSSRHGQKGVCSRKWPQIDMPFTESGMQPDVIINPHAFPSRMTIGMFVESLAGKAGALHGIAQDSTPWKFNEQDTPADYFGEQLLKAGYNYHGNEPMYSGATGEELRCDIYIGCVYYQRLRHMVNDKFQVRSTGPVNSLTMQPVKGRKRSGGIRVGEMERDALIGHGTSFLLQDRLLNCSDYTQTPVCRSCGSILTTQTSVPRIGSMASIRCRRCAVGLDKYEGYAADSDIWEDGHGKKFVGGDDTTTVAIPFVLKYLDSELSAMGIKMRYNVEPK

SEQ ID NO: 7639 - protein, 562 aa, Candida albicans
MAPKRKSVKGGVEPKNKKVKTAIHQKEPNTLLSLEELTNLSKEIDESLKFNNLVPLLEQFKLIKTKLIESIDPDVESTARKLSLLLYRNFNKINDEIISNGNGAKSSASEDKKMIIKWLSEKYTTFKDIIYGFIEDKLAGSTSLQLDLLDIILNFIRLESQRKSSTSQVVFFPTQSYKSLTESILNSKNGEISFDGTTDNFIVLEFLDKFQKYWDLQFYFFNNLSEVLNEWKQEKSEKDLQLIFANFLTVLRKGLLFNEKTLEEEPLWIAPNKEGKLPSSLYKHTLFKSQFQKSVIAMLSYPLLQEQYKSVLMILHKRIIPYMSQPQSLMDFLTDCYDLTDDLIVPILALNSLYELMKNYNLEYPDFYSKLYSLLTPELLYTKYRSRFFRLCDLFLSSTHLSANLVASFIKKLARISLAASASGVVIIIPFIYNLLKRHPTCMIMLHKEDTESGYQDPFNSEEKNPLHTEAIKSSLWELDTLMTHYHPNVATLAKIFGEPFRKPSYNMEDFLDWSYNSLLQSEYDRKFKDKNSALEFEEFDKVLDTSNSDSKSSLLEGWTLV

SEQ ID NO: 7640 - protein, 542 aa, Candida albicans
MGKKKSNSSNAAQILESSVSPILEINYNDPLFTAASHPTKPILLSGLATGHVYCNSYDAEKLEELTQSKREEYATLEKQAYTQGKIPHINKSVSQSKKKWWTIVQDNTEIPNDGDLINTNWKTKRHKGSCRHAIFEPLENSVGDFIYTCGTDNIIKKASTETGKVVGKVDVSSDYSNKKDLLTKLCHSVTHPFLLSGTEDGHVLVYDSANLNSNKLKFKVESAHDDSINHILAMPAVSAYHYLTLGSTTLAHIDIRKGIITQSDDQEDELLAMCFPSDEVSQSNDTVLVSHGEGLITIWKNSKNKLMDQLSRVKVNKSASIDTIISTMNADNEDMANSVWCGDSEGLLHRINYKRGRVVETRLHSVAKGKHGAVDEVGILDIDFDYRLVSAGMDTLKIWSNTQDEEQNDEDDDDDNDDSDGDDSESVSGEDSWSDISSSDEELDTNPDDDSDKDDVDVEDDLQLRKKRDDISQLISKPKRKTIDINKLTKATKNTQPEDDEEDQEVPEPSQKKQKVKEKKLTTKQLRNMQKHEHGIRKFEGL

SEQ ID NO: 7641 - protein, 1728 aa, Candida albicans
MSRQFPYSSAPLRSVKEVQFGLLSPEEVRAISVAKIEYPETMDQTTKRPREGGLNDPRLGSIDRNFRCQTCGEDMAECPGHFGHIELAKPVFHIGFIAKIKKACESVCMHCGKLLLDETNPAMAQAIKIRDPKKRFNAVWSLCKTKMVCETDNNEDEMTDQPSRGGCGHPQPTIRRDGLKLWGTWKQNKNYDDNDQPERRLLTPSEILNVFKHISPEDCYKMGFNEDYARPEWMLITVLPVPPPPVRPSIAFNETARGEDDLTFKLADIIKANINVQRLETDGSPQHVISEFEALLQFHVATYMDNDIAGQPQALQKTGRPIKSIRARLKGKEGRLRGNLMGKRVDFSARTVISGDPNLDLDQVGVPISIAKTLTYPEIVTPYNIHKLTELVRNGPNEHPGAKYVIRDTGDRIDLRYNKRAGDIALQYGWKVERHLMDDDPVLFNRQPSLHKMSMMAHRVRVMPYSTFRLNLSVTSPYNADFDGDEMNLHVPQSPETRSELSQICAVPLQIVSPQSNKPVMGIVQDTLCGIRKMTLRDIFIEYDQVMNMCYWIPNWDGVIPPPAVVKPKQLWTGKQLLSLAIPKGIHLQRFDGGRDLLSPKDTGMLIVDGEIMFGVVDKKTVGATGGGLIHTVMREKGPKVCAELFSSIQKVVNYWLLHNGFSIGIGDTIADAQTMRDVNKTIQEAKQKVQEIIIDAQHNKLEPEPGMTLRESFEHNVSRVLNQARDTAGRSAEMSLKDLNNVKQMVTSGSKGSFINISQMSACVGQQIVEGKRIPFGFGDRSLPHFTKDDYSPESKGFVENSYLRGLTPQEFFFHAMAGREGLIDTAVKTAETGYIQRRLVKALEDIMVHYDGTTRNSLGDIIQFIYGEDGIDGTQVEKQSVDTIPGSDESFERRYKIDVLDTENVISESLLESGKEIRGDVQLQKILDEEYNQLLKDRKYLREVCFPNGDFSWPLPVNLRRIIQNAQQIFHNGRYRASDLRLEEIVLGVKELCMKLLVVRGDTPLVKEAQENATLLFQCLLRSRLAARRVIEEFKLNRASFEWVMGEIETQFQKSIVHPGEMVGVVAAQSIGEPATQMTLNTFHYAGVSSKNVTLGVPRLKEILNVAKNIKTPAMTVFLDPEVASDIEKAKIVQSAIEHTTLKNVTSSTEIYYDPDPRTTVIEDDYDTVEAYFAIPDQKVEESIDKQSPWLLRLELDRAKMLDKQLTMAQVAEKISQNFGEDLFVIWSDDTADKLIIRCRVVRDPKSLDEDADAEEDQILKRIEAHMLESISLRGIPGITRVFMMQHKVSHPDETGEFKQGKEWVLETDGVNLADVMAVPGVDSTRTYSNDFIEVLSVLGIEATRSSLYKEILNVIAFDGSYVNYRHMALLVDVMTSRGHLMAITRHGINRSDTGALMRCSFEETVEILLDAAAAAELDDCKGISENVMLGQMAPLGTGSFDLMVDDRMLQKAPSSMAMDDIADGGGATPYKDYENARDENIDIDAGAGFSPIHIAQMNEGNIGGLTSYGGQPTSPAATSPFSYGYNSITSPGYTSPGYGYSPTSPSYSPTSPSYAPTSPAYSPTSPSYAPTSPAYSPTSPSYAPTSPAYSPTSPAYSPTSPSYSPTSPQYSPTSPSYSPTSPSYSPTSPSYSPTSPAYSPTSPSYSPTSPSYSPTSPQYSPTSPSYSPTSPQYSPTSPSYSPTSPQYSPTSPQYSPTSPQYSPTSPQYSPGSPGYEPEPPKKDEN

SEQ ID NO: 7642 - protein, 908 aa, Candida albicans
MSDDEAFDIAGSLALKDEDDYSDSSSNEGEDFQDEIIPSDDEKEPSPPPKKKSKPNPQAFPSLELSDNEGNNDDDDDDDSKINSYFINNNPTAKKAKAGSFASFGLTKFILANIAKKGYKQPTPIQRKTIPLIMEGRDVVGMARTGSGKTAAFVLPLIERLKSRQPGGVRAVILSPSRELALQTYKQVKEFSHGTNLQSIVLIGGDSLEEDFSKMMTKPDIIVCTPGRFLHLKVEMQYDLMTVQYIVFDEADRLFEMGFAEQLNELLASLPSNRQSLLFSATLPRSLVDFAKAGLTNPVLVRLDAESKISDQLQMAYFTTKKNEREANLLYILQEVIKMPLGSEEQIKKLKDMDKRKIDSDSEDDDDDEERKKGKKRYKFKKERLPPANRLPSPHSTIVFVPTKHHVEYVTKLLRDAGYLVSYIYGTLDQHARKNQLYQFRVGLTNVLVVTDVAARGIDIPVLANVINFTLPASSKIFIHRVGRTARAGNKGWAYSIVNEKELPYLLDLELFLGKKILLTSMHEAKVEMLKKSSTGTFIPPVVNYTERLVLGSVPRVDLETFQELYENLLRNNYEIKVLKDVAAKGEKLYHRTRQPASQESLKRSKEIIESSWDDQHLLFGENLEKQKDAFLAKLQDRNSKQTVFELKGSDESLVEFMNRRRRQLAPIQRKAKERKELLAKERLAGLTHGIEDEILRADGENGYGVDEDELQEAFEDADKKKSFRDPQFFLSHYAPASVIQDQQLSLSTSFANEAQAATFDLDNDDKIQTNKQVMRWDKKKGKYINSKSTDKKYIISENGTKIPASFRSGKFDEWRKQRNLKPTSTVEDDSNKRFKHKQQRAPKLPDKFRDDYHKQKKKVEKAIESGVNVKGFHTPQQEIKSTEQIRKARLLKEKRKAKNARPSKKRK

SEQ ID NO: 7643 - protein, 1432 aa, Candida albicans
  MISC_FEATURE (438)..(438): X=any amino acid
  MISC_FEATURE (452)..(452): X=any amino acid
  MISC_FEATURE (485)..(486): X=any amino acid
MSSSQELYTSLSRRPPQQPLNDKMRHGFDIDYNSEKFLNSLANTFYIYFDDKRQNTNGNPLTEEMKQSAEYFKNYQPISDWKVMKERQKTINAILVLCLNLGVAPPDVIKPSPCARFESWCDPTTFNDTKKAIENIGKNLQTQYENISSKTRYRQSLDPCVEDVKRFCNTQRRNAKDERILFHYNGHGVPKPTASGEIWVFNRNYTQYIPISLYDLQTWLGAPVIFVYDCNSAGNIVHNFKKFVQKRIDDDNDGNHDQSAPSPTSAYLDCIQLAACKSNELLPMSPDLPADLFTCCLTSPIDVSIRWFIIQSSLKKGYYDALPRNSIGNIIIPGNLNDRRTPLGELNWIFTAITDTIAWTSLTRPIFKRLFRQDLMVAALFRNFLLAKRIMPHLNCNPISDPPLPDSVRFHPIWDSWDLAIDQVLSRLLKSAKEETVXMPLAGNIQNGSTKXDSVSSAQQQQANGSQSAALFPNLGNVQYTTFFXXQLTAFEIWLKFEGPSSKTPPEQLPIVLQVLLSQVHRLRALILLSQFLDLGPWAVYLSLSIGIFPYVLRLLQSPAQELKPVLIFIWARIMAVDYKGTQQELCKDKGYNYFYSILNSPPINHVGVNGNVATTNTGTMLINDDHKAMSAFILTLFIKDFKNGQRLCFSSEIVTNCLKFIQTSDNPLLRQWCNLLLSQLWNRHPEGKWVIYKNNYITKLLNLIDDPIPEVRTSILVALTTYLSDPPHLAPQQPTNPVAVNTNDLRKDEIRQQDLKLANTVLGLLGDGSPIVRKELVFFINKFVQTYAKFFLVVAFNQLQEEIVLIENPNYLNDFRKRSPAYGSIFSSVWKALLILSEDPHCEVKQLAETLIDYVMVQLNESELSGLVKEMQDYLLSKSTINISESFKPTKPVVNRQLGEKRLVSSASIGNRRNTLLIDGSSLTTRSASANNITSNSNNRNIKGNMDDSDAESITSKIKNLSVSKLFKSFHITEENDLNSFTRILNPGPVQSNYGSEYIPKTAFFKKRDLSKTPELPFESGFFEYSCEYFQEPQMSKNEIDEPGSKEYVKRLWRRNRNESIIQETQPQKEMALRGEWNKDIQILNNITQPKCIKFTQFEKILVASDEKDNMTVWDWGNGQIVKKFSNGNPFGTKITDIKFLNEDDSPLLLTGSSDGVIKIYKNFHNYENSDSNDKDEDGFNEEKRVELVTGWRALTDLLLTSKSTGLVSEWQQSRGSLLVSGDVKIIRIWDAPRELCLSDIPARSSSSITSLTSDQVAGDIFIAGFDDGSIRVYDTRLDSRESMVMTWKPSKQHPGLQQSNYTGLGSIRNVHMQRGGFRELISGSSDGIVNIWDLRLQDPVLTYATQNKSMRTMDVHEHAPILMTGLKTVDIWSTAGECLTTLNNPNGSSGRSLNYLSSTTFHPHRMMLATNYNQNSHINLYTCNDTVVEY

SEQ ID NO: 7644 - protein, 640 aa, Candida albicans
MQLSWKDIPPVPTSNDMLDIVLNRTQRKTPTVIRPGFKITRIRAFYMRKVKFTAEGFTEKFTDLLSGFPNINDVHPFHRDLMDTLYEKNHYKVSLAAVSKAKTLIEQVSRDYNRLLKFGQSLYQCKQLKRAALGRMATIVKKLKDPFVYLEQVRQHLGRLPSIDPNTRTLLICGYPNVGKSSFLKCITKADVEVQPYAFTTKSLYVGHFDYKYLRFQAIDTPGILDRPTEEMNNIEMQSIYAIAHLRSCVLYFMDLSEQCGFSIEAQVKLFHSIKPLFANKSVMVVMNKSDIIQAEDLSEEKQELLKTLTTVPGVEIMHASCHEEENVMQVRNQACEKLLTARIEQKLKGTARVNNVLNKIHVAKPQQRDDVERLPYIPDAVKQLAKYDINDPNRRQLARDIEAENGGAGVFNINLKDKYLLEDEEWKNDVMPEMLDGKNVYDYLDPDIAAKLQALEDEEERLEQEGFYDSDSDIEDEDAEEIREKAQWIRNKQKTMIIEGRNRKSLKNKAIMPRDQIKKTFGDMEKHMYNIGHDTEKLRETVGKKSSDKAMSGVEILKRSQGIKASKLAKKKAAANQSDRLNDGLNDGALRSQAERLAKIQRRERNRMARQGEGDRHSTAALPKHLFSGKRGIGSTDRR

SEQ ID NO: 7645 - protein, 472 aa, Candida albicans
MRNALNNLADTVENPEQTTRFENEMDNFFTLFRRYLTEKASGSTLDWDKIRSPSSDEVVEYGDLNSANNSANLSKLAVLKLNGGLGTSMGCVGPKSVIEVRDGNNFLDLAVRQIEHLNRKYDADVPLLLMNSFNTDADTEKIIKKYQSHRIRVKTFNQSRFPRIYKDSLLPVPESFDDSLEAWYPPGHGDLFEALVQSGELDALLAQGREILFVSNGDNLGATVDSKILDHMIETGAEYIMELTPKTRADVKGGTLINYQGEVRLLEIAQVPKEHVEEFKSIKKFKYFNTNNLWINLRAIKKLVEANAIEVEIIPNQKTISHGKSDINVLQLETAVGAAIRHFKGAHGVVVPRSRFLPVKTCSDLLLVKSDLFYLEHGALVLDPTRDGFSNPLIKLGSHFKKVSGFQSRIPYIPKILELDHLTITGNVTIGKGVQLKGTVIIVCNDGDKIDIPNGAILENVVVTGNLTILEH

SEQ ID NO: 7646 - protein, 1881 aa, Candida albicans
  MISC_FEATURE (1881)..(1881): X=any amino acid
MEYINNILGSSNQVQSVEEAIPTLCNRLQHATMSSDRRSAVLGLKSFSRQYRETVVEHGLRPLISTFRKDIDNPQIVKAILETLLILFIRGESDEDLTRGWISQQSRLQNGKYPSPLLMEDISLDQLSLWIADALIQDEEILRLLIENLSETNDYHAKLYTIQLLESLASSRGSRTKDCLLNIPTSMSVLCSLLQDSNEPVRNEAILLLMAVANDNFNIQKLVAFENTFETLFDIIAEEGGIRGSILVQDCLTLITNLLQFNASNQKFFLETQCVPRLASLLGEPVDETGDPDMLDENGFPEIPPPIVWTEQRIQNMIIALEICRLLVSEDTEYVAQNQDKLFQSGIHYILLKLVFSPLTENSVRSVALLTTGDTICGNPNIQFEFSKVDVPYMDPSLPTQIQPYDRPISVPLSLLNWCLYINSVHAFDIRVASAFCLNSYFKDNKDSKLAFLNDQIKSYTDPTYFTSLHKEEEEEEQQQQQQEINGNSVPTPFGNIFTTLMDYDADLKLNPYTAWFASLIMVNLFLEEPENKEIARNVKTGDEEAGEEVMNSIQAMSGLLVTTLEYKDQRIAMGYLMLLTIWLYEDFDAVNDFLSDQSIVKSILAFLSNNSSDQNVLVHGMATILLGVCYEFSSKDSPLPRSDLHALLVKSLGKDNYSLKVKQFRSNPVFADFEEASTLTFSQDATGLPTVYLTDVYVNLVKDNFLRIKRALFHDPSSEPRGKISYELFEELDTKVLNLTKELQTEKENAESNDKELNEKIEKLTNLSTKLETKLEDKEQELAKIQEDHKSLNEKFLVTANSLCGIKARTKESETISGPDQQELQEALKKGNTSESTLKQLKEKLDSTEQAKKKLEDGINNMTRDLFHLKKSKSEAETQIKQREREFKNLTYEFENTKKDYELQINNLNKSNNEFKQKINELSKKIESLTEDNKFNAKQLEEKLRDTEENNEHLMDKLRSASVAYNDLKKAKSESEEETVKAKEELETLTSKIDNLEKELKEQQSKKNELEGQLQNITDSTNEKFKELEDELKSIKKSNKEISSQNSELIQKLEKTEKDLQAKDEEIDKLKAETKSNIDNLNSEISSLQSKLKEAEESHSSTKDEHSSLSENLKKLKEEYENTKTSMIAKLSAKIEEHKKATDEIETKTKHITDLQEEHAKQKSQFESERNDIKSNLDEANKELSDNREKLSNLEKEKTELNNKLKTQEEKISDLETSVAISEDKSKSLKHDIEDLKREKIKLETTLKENEETMFEKKEQLQVVNDKCKELEACLKKLTETKEKEINDLIRKLEAAKSDHDTERKKLSLLIEDTKSESEKNVIKLNEQIEKLKGEREKEVRDIQSQLAAKTTDWEKIKTTLDKVLKEKSDLEKTNKESVDTLKKEVENLKKEISLLEDQKKDDTTKYKELAAQLETKTSNLDSTTMELEKTELELKKVRNELTEATSELTKLQDNNQSLTEEIEKTKAALTKSSKDLEVCGNQKSELQDSLKSVKSELKNFENKYNQETTSLKDEIEEKQKEIVTLQTELKDRISEVEKERAMLSENSETVIKEYSDKIKSLESKINSIKENHSKEITTHNEQKTSLKQDIAKLSQDHESAQTQLEDKENQLKELKASLEKHNTESATSIEEKNNQIKELSETIKSLKTELKTSGDALKQSQKEYKTLKTKNSDTESKLEKQLEELEKVKSDLQTADEKLKGITEREIALKSELETVKNSGLSTTSELAALTKTVKSLEKEKEELQFLSGNKSKELEDYIQKHSDISEKLKALTDELKEKTKQFDDSKKKLTELENDLTSTKKELETEKTQTSKFKNLEERKDKEIVKLNKELELLKNDNSGAKKELSEKVSKLESEIEILSKKLEDKKSVMKQHDELKX

SEQ ID NO: 7647 - protein, 643 aa, Candida albicans
MKILKKLFSSTIFYSQRRYHSMSVETISDSLKQLGLSQPAAIEGTHPQYNVVDVFRNYIAEELHRISSVDKSIIIQALDTPKVLDQGDIIVPIPKLRLKGINPNEKSKEWAENFNKGKFISEIKPQGVFLQFYFAKTLLYNLVIEDVLKRKSDYGYLPLGVGKKAIVEFSSPNIAKPFHAGHLRSTIIGGFISNLYEKVGWDVTRINYLGDWGKQFGLLAVGFERYGDESKLASDPINHLFEVYVKINQDVTKETSEATGETPAETIDASEQDEKKIQSSTNEEARRFFRRMEDGDESALKIWARFRDLSIEKYVDTYGRLNIKYDVYSGESQVPQEKMKEATKLFEDKGLIDIDRGAKLIDLTKFNKKLGKALVEKSDGTSLYLTRDVGEAIKRYETYKFDKMIYVIAAQQDLHCAQFFEILKQMGFEWAHNLEHVNFGMVQGMSTRKGTVVFLDNILQETKEKMHEVMQKNEEKYAQIEDPDKIADLIGISAVMIQDMQSKRIHNYEFKWDRMTSFEGDTGPYLQYAHSRLCSMQRKSGISIEELEHANFDLLVEPCASALARTLAQYPDVIKKAVKGLEPSTIVTYLFSVTHIVSQCYDILWVSGQEKDVAIARLALYEAARQVINNGMTLLGLTPVNRM

SEQ ID NO: 7648 - protein, 1042 aa, Candida albicans
  MISC_FEATURE (584)..(586): X=any amino acid
  MISC_FEATURE (617)..(617): X=any amino acid
  MISC_FEATURE (625)..(625): X=any amino acid
MSQNNLETIPKILEQSLHPQFSNQADKILKSIENEPGFSINLLHVIASTNLAQSIRLAGALYFKNLIKRKWLDGDGDGNNYLLPIDDVNKIKLEIIDIMIQLPNQLQVQIGEAITLIAESDFPHNWPNLIENLVTKFSLTNFINNKAILLVSHSIFKKWRALFRSDELFLEIKLVLTKFVDPFLKLFIELDQLIDKSSDNEAQLIIYFENLLLLVQIYYDFNCQDIPEFFEDHMNELMAIIHKYLVYENGLLKYHDNDEEVNVLIKVKTSIVELLSLYITRYADVFQPLIQTFITSVWELINNYVTKQPKYDLLVVKSLQFLTSIIKIPDYQSLFQQESSINEIIEKIILPNIYFRENDEETFEDEPILYVRSDLEGSDYDSRRKSATDFLRELKELNSELLTTTVMKYVNQFLNQSTNHSDWRNKDTAIYLFSSLATKGSVTNIGVTSSNVLVDVVKFFSDNIAQCFANNHHNHPPPTNTGATSVHPILQVDAIKYIYIFRNQLTKEQLMMPLPRLIDHLDIKSNPVVYTYSAITIEKLLSMTNFNQDHTPIFNKTDIQPYINELLTNLFNLICINNNNNNNXXXNNSSPEKLAENEFLIKCIMRILNTGEDSLNXNNRFPIIXQLLTILKLTAKNPSNPKFSHYIFESLGLLIKYGINDNDNDNNAANQYIEIIIPALLDILSEDVQEFVPYTFQILAFLLEKYPKQQGLPETYKNLIQPLLSPSVWQFRGNIPGITRLLIAILEHDPNSTFINGGEKTLTPLLGVFQNLLASKINDGYGFDLIQSIMLNIPIQPSLQSFLPNIARLMLTRLQKSRTDKYVKRFVTFLCLLSTISLQGTTTTTNVNKDILNGEFVIQFLESVQSGLFQQILTSFILPTSSILTNLQDKKLVNIGLSQILVTISTTSEQYAHLTPLILETLISNLNSYEGISKSSTNNNNNGISSSSSTIATTISGGQQPLNELDLDLDLNFNFNSFGSQYSKIVSIQNSSFDPLNNLIKNNDFNNIKLIIFNNIKKIDIKYLYGLNSTNQEILKKLGFLS

SEQ ID NO: 7649 - protein, 543 aa, Candida albicans
MHSSSVHVPLIEFLKNRIYLGAYDHHKRDTEDLAYFTVEDALPYNAFYMDFGPLNIGHLYRFAVLLHKKLNEDSTQGKGLVIYSSTSPKERANLACLLCCYMILLQNWAPHQVLQPIAQITPPLQAFRDAGYSSADYEITIQDVVYAMWRAKERGMIDLAKFDLDEYEQYERVDQGDFNVISKDFIAFASPQQSKRGGLNEPFQKVLEYFVENNVQLVVRLNSHLYDAKEFTKRNIKHIDMIFDDGTCPTLEYVQKFIGAAECIINKGGKIAVHCKAGLGRTGCLIGAHLIYTHGFTANECIAYMRMIRPGMVVGPQQHWLYLHHDDFRSWRHTMIVDNRPDPLIGNLFPLCSYEDYKQRLKEAKRKERLQLQQQLTSPLADSSVINTPIRRRKVSGALASKIQTVVPIESPGQPRKYFEDSEDIDEVEMVNNSDDENTMPDIIQSSPARYDSVTPKTKDKFLIGEFLRSISTNSVSSQQSIHIIKTTTTKTVNETLSSPPGTSPTNVLRVSKARSKNRIASGNSQTSRAHSGGVRKLSGKKH

SEQ ID NO: 7650 - protein, 1535 aa, Candida albicans
MTSSQGNDILKFPILNIQEDMDYPVPFQDPYQLALFSQNKQLLIAKRKLVVIKGSIIMKVLTYEEDIVTATYTHFSNSQELEEVLVVSLKKHIHVYYPDGKSYVCSLPFALKNALPFESGLVLQRDQNESLIPHNGALYSNTSHLNSAAILTLVDPMGDFRIVATASTSVISSKEEVMTFPRKDMSKVCSLCVTFNASDGSISIYHVKAPSRTTTFGKTQSARNQKRRYGSITTPNPSRILEEENGTEPLHSISLNMEKKRTSTLLSDISSVGRVSSDCHSLSQDFSGFKKDMILSRIESFGNRLQKDQLRIFNIWFEDQEGVVIFNRIRKECAVLIYRNPSFSRHSSAFKTSCLDCIPLTSTKHEGNLIILTEHQKFSIINPFLGVKSASHTFGNKLKVRSLIDSYDSKLALKLIDGSEMIIKIVLEPSSELVKMCLMCFRYLSGSSINHIMWMLWRSAYVEIKYADEWEAFVAALLSLIFPFSEGAQCVQNEITKLLPVAKRIHETSDVNYNLHDLIPYITISLHLIREEIRLDSTKAKCLNNINLLLCQLTTWMGWPAPWIKYYSIKPENIDPNTRFLSALILEAPPNLLRSLASLFTNNIVRYLTFSQLVEETETVDLLVTPRTFYVLKLFEVLVSSQYGPSAIVSLMLEFGITKDLLETYPLGISIPLKEALSICQESPEFEWTSQTLDLVGRKDLNKLFLDADFSADINTEPHTSTKDLSSLLNEVLEDNENFSPWDGQSEAERMNITKLIFEADRRYFEITTLLHQTKTQTAYLKVDENVTEYDLVLQQRELAVIVALRTLTIPLGRAALVYASRNPLLTEKFPIPKFNLNTLISPTMTNIVYSEDRVSKSFSEWGHFHNGVSSGLSIGPFAKGISGSWIIFNKPPELNAQHAGFLLGLGLNGHLKRLEEWHIYNYLGPKHPLTSIGLLIGMAASLRGTMDNKLTKVLSVHAVALLPQGANDLNVPTMVQTAGLIGIGLLYLESQHRRMSEVLLSQITASVLQNDTEQVHEGYRLAAGIALGFVNLGKGDDLRGLNDTHVIDKLMALAIAMKDYHPVQESGKSCCGAIMALAFIYLKTENVNVANKLKLPETEQMLDYIRPDLLFLRCLAKNLIMWNEISCTDTWVASQMPSSVAHKYMSGNGHEVAFEHLDGDQLTYFNVLGGACLSMALKFASSHNLEARDTILKYLDKVMQLSAKPALNYDQKIAYKGCVNLQNILALCASVIMAASGDLEVFRRLRVLHNDTNKKMGFGCFMAINTALGFLFLGGGQYAFDSSPFAIACLVTSLYPIYPTENSEYEIHLQALRHFWALAIQPRCLIVRDISTGRPCKIPVAINMKDDSVIESISPCLLPDINEILTLKTNSSAHFEVILDFSLNSEVLEKFKQSLTLYVEKSNNHSVLKPNVRSVLQNYSQPVRPEEDTTDILSPQMLDNLDEKVKAAWYRENTNHVESDLRSSSVRSGLSVFNIIDNQLELINNAQTPKSVEDIWNLKLLFEYANHIARNNKLNYISLEFIEGLKHKLWRVRN

SEQ ID NO: 7651 - protein, 458 aa, Candida albicans
  MISC_FEATURE (48)..(48): X=any amino acid
  MISC_FEATURE (154)..(154): X=any amino acid
  MISC_FEATURE (178)..(178): X=any amino acid
  MISC_FEATURE (189)..(189): X=any amino acid
  MISC_FEATURE (200)..(200): X=any amino acid
  MISC_FEATURE (272)..(272): X=any amino acid
  MISC_FEATURE (275)..(275): X=any amino acid
  MISC_FEATURE (415)..(415): X=any amino acid
  MISC_FEATURE (436)..(436): X=any amino acid
  MISC_FEATURE (441)..(441): X=any amino acid
MVQITEVKENQSSRESRTAAHTHIKGLGLNEQGIAKPIEGGFVGQNEXREACGIIVDLIKSKKMSGKAVLIAGPPATGKTALALAISQELGPKVPFCPIVGSELYSAEVKKTSALMENFRRAIGLRIKETKEVYEGEVIELTPEEAENPLGGYXKTISHVIVGLKSAKGTKTLRLDPXIYESIQKERVXIGDVIYIEANXGAVKRVGRSDAYATEFDLEAEEYVPLPKGEVHKKKEIVQDVTLHDLDVANARPQGGQDVLSMMGQLLKPKKXEIXDKLRTEVNKVVSKYIEQGVAELVPGVLFIDEVNMLDMEIFTYLNRALESSIAPIVVLASNRGLTTVRGSDDGVKAPHGCPPDLIDRLLIVRTLPYNQEEIKTIIGKRASLEGLTLTDDALEKLSKQGLTTSLRYAVQLLXPAGVLSTTAGRSEITVQDIEXCEFLXLDSRRSTKVLQETKTFL

SEQ ID NO: 7652 - protein, 1055 aa, Candida albicans
  MISC_FEATURE (564)..(565): X=any amino acid
  MISC_FEATURE (568)..(568): X=any amino acid
  MISC_FEATURE (572)..(572): X=any amino acid
  MISC_FEATURE (574)..(574): X=any amino acid
  MISC_FEATURE (576)..(576): X=any amino acid
  MISC_FEATURE (590)..(590): X=any amino acid
  MISC_FEATURE (593)..(593): X=any amino acid
  MISC_FEATURE (599)..(599): X=any amino acid
  MISC_FEATURE (623)..(623): X=any amino acid
  MISC_FEATURE (647)..(647): X=any amino acid
  MISC_FEATURE (653)..(653): X=any amino acid
  MISC_FEATURE (582)..(582): X=any amino acid
  MISC_FEATURE (701)..(701): X=any amino acid
  MISC_FEATURE (713)..(713): X=any amino acid
  MISC_FEATURE (740)..(740): X=any amino acid
  MISC_FEATURE (752)..(752): X=any amino acid
  MISC_FEATURE (774)..(774): X=any amino acid
  MISC_FEATURE (782)..(782): X=any amino acid
  MISC_FEATURE (820)..(820): X=any amino acid
  MISC_FEATURE (825)..(825): X=any amino acid
  MISC_FEATURE (852)..(853): X=any amino acid
  MISC_FEATURE (873)..(873): X=any amino acid
  MISC_FEATURE (896)..(896): X=any amino acid
  MISC_FEATURE (928)..(928): X=any amino acid
MAVSRDHYFKLGSELPKERLNAATSLISELVAADNEEEWSYALNRLLKGILTTRQSAKFGFSMALTEVVNELNNRGTLTVGKYLDLLVETTKLTSSMKGKEQRAVLFGRLFGLQVLINSQIIILKSEPEDMLQFVEILMELSNFKNWIRETGIFTLIQFIKLLDNSNVEYSKKIYIKILNMVNNLGLNLSTEGLAIYLSIPQSAQLSQNVSNMKANWKNGDPFYKGNLPILAKVLKDVEVISDEETGDDQKKKNQQKSSWNSRLPFVWDLIVAKFNQVADDSNVEDEMQDSLVTSKKRKKTTSPKHNNKRAKIEPEYISLKEFWKVVVDETLFSEKSSNERKYWGFEIFTKFVTSLETTSSVQYLFTPNFMRCLINQHASSTRMLYKIAQQTLKTFVKTIRETKPELGPIVLSCLLDESKGGCWNFDLISKSHTIDEILQIKTNVNQYINILLENFTIKLQTQTTLDDTSNNNKNSNDNILKWYLDKIVSLIKHNNNNQHKLSDTVLESILTKLLQYSFFDTNDIKISKFLQSICKEKFNSILSEIITLKLSHRNYKTWSPFCXXIIXKLSXDXEXKCLVEXDDEISIVXQEXEELLSXIIELNTKSSDKLYIFELMFSMCLXQLYMEDEETIQVINELKLVFENQXTTANKXDNEEDDNKVDDNLVLTEIVLSFISRKSTLFKKLSVLVWENFLCQVDEXGKLRVNEACFKXLFDVLEAKENKQGQEKLFEGDGEFQEXDGDEEDEEEDEXAEEAEDNNENDSSSDIDSDSDXDSDNVSEXDNNEDTITEIDKQTNLKLAQALGIPTKESGEVKFDELXDLSSXDDYESDSMDDEQMMAMDDQLSKIFKQXXDTITNLATGNKRKLEVLEAXENMIFFKNRVLDLLETFNKVAVXSHFNLAFIEPLINLMNLTLDKNLGVKAHKLLXNKISKTKIDSEELKKYYNDDPLEYYHQLINLIEELQTKANTTQPSNQSVVQSYNQSCIIIAKNLLNLDESNMQAIVDIYCNSLKQWCLQSESKLQPSLFFDFINWVNSKKSNASHNQNQNQKQKHKS

SEQ ID NO: 7653 - protein, 420 aa, Candida albicans
MSFINICRDNTDPFYRYKMPPLQSKTEGRGNGIKTAIVNLAEVARALNRPPAYLIKFFGYELGAQTQILNDRYLVNGAHDSNELQDSLDGFINKFVLCGSCKNPETEIVLKGKDSLERDCKACGKISMIDPKHKLYSFIVKNPPDNKKGKKSATATANVVGGGKSISDIASGHNGQGGEPGNNNNNNNNGGGANGENGENGEGYEDDDEDDDLLAKKINAEVAQLKAMEIKDDEWAVDMSQEAIAARARELEGLSLQNNKFDEFGEWLLKESNGSKDDLPSDVEIYKRIVELEIADTPETLQVLGQVLFDDDIINQIEPHVGLLTKLINGDEEFEKALLGGLERFFGLEKPNLIPQIPKILHGFYDRDLISEEVLIKWGSKVSKKYVPKDVSKKVRKAAKPFVKWLQEAEEEEEEESDDE

SEQ ID NO: 7654 - protein, 480 aa, Candida albicans
MISRFVRTLATSAKFQDVVIIGGGPAGLTLLAALKTSPKTKHLQCTLIEGSSLDNVRKFHNDPPADYTNRVISLTPKSIEFMQNKVGSWDFIHEDRVKAYDGIIAYDSQDANSRIEFDISTIGQSTLAAMCEVINIQSSLLAKIESLQDKSTTIKDNTKVVEIVNPIEPDLDNHNLTEIDTNVSDPKLDWPIVKLENGETIQTRLLVGADGYNSPVRKYAHIESRGWQYNTFGVVATVKLQYEDFRAVGWQRFLTTGPLAILPLSEDNATIVWSSTPELADLLLKVNEKIFPHLVTAAMVLEEVDLNYIYSVLQEDPNDFSVLKDIEWRLSKFNPEELEERYPLPVVDVLSGSRARFPLKMSHADTYVAPRVALVGDAAHTIHPLAGQGLNMGQSDVAALVEALEKGIDRGMDIGSTLVLENYVANAWPSNHALLGICDKLHKIFSTDFYPLVWARGFGMKSINSFGAIKELMMKSISGR

SEQ ID NO: 7655 - protein, 911 aa, Candida albicans
MERKSFLDQEAPEGYVAGSARGAVGFRTSTSPDSFNRGIAIVQNEEEEEDEDNNNKTTTQLNENGILSTKKRGKEDEDDEEADRIYNEIEKKLQSKKRKSPNNKNDRAKPTVTTTNDNSSTQFSDLKRQLANLTEDDWLNLPEPGDMTRKNKRTRLLEQQQQRMYSAPDTLISTSSSATGTNTTNFKSLSESRDKLLGSQLDNLLPAYVKTNGQSINNSSSVSEELQQSILNMTGVEQDSKYANLQKNRVILSSLRKSEPYKPSSWISSARLEEQDGKNLKLAKQYILEGCKKCPRNDEIWLENIRLNQSDIKLCKQLITNALNYNPKSEKLWLKATDLETNNINKRKVLMKGLEKIPNNDQLWEKLIELENDPNMVKKLLLKAVQLCSQNWEFWSALLNISNYEESKKILNQARKSIKGVKNILKVWITACQLEEREYGEETIDINKLIKLMDKAMKEISIYQMTKDDWYKLACDSERENFKVTTKAIIISYLKFKGLDQSSIFEDVDKFFNDGYIIVAKSILDYIVTNSSNDINKWKKVFSVIKKFNQELPLLFSYYDKAISLNPQVPLFYLMYAKDKWQLSKDIPQARSILNSGELANPTDLSIKFAIIKLELITGNLLNAEKYIKHIIDTKPMESEKFWYKYIHILRCLNSDITVLKDVIQKALKLFPNCWKLYLQNIQILEDIDELEQARENALVGVKKCPQCIYLWIKLSQIDEKAQIIIRARSILDQAILQNPNNPEIWVYKIQFEKRIGNLSSLQNLTNKALKQFPTDPWLWIINLSLIPKMSQRKTIFLDALKATNNSNLILLISGVFFWFDGKYSKSKNWFERSLQSDNTNGDIWSWMYNYLKKFGTSKELNSFLIDYESKYDSINKGHFFNKINKDIKNYNKSPKEILDIVAIEVLNYIK

SEQ ID NO: 7656 - protein, 565 aa, Candida albicans
MVEKQFNIDLELNDTGHIDPFLQDEDKLKLEELIPRILFERKSFLNVTEDSLRKEIDNSLKISEEDALDTEESREDTVEADQQEVFNKHKFELSKNINNALNETQLSLDFVSLLISSVKPSLAKSTISPHLSKFVKPTSLNSDRLGQDSNDNQESKATDSFGQGWKLESLGKITDLFREASTNLNDQVIKERRYWNMINLVLANDEVLFRMRDPQNNARAIGVKYGYGDSGSNFHDQGLALLRKDNQTGEISFHPISSINNAKIVEKVSRFIRVKILSQIDGDYMLTGQSIFNFDFEKSKQSIINDIEKARFFLFEEDLFHQLIREAKLLVNYNVSIISNKIIIEINNIIIEIESIVYDELNEEELENYYQNVNEYSTLHNKKCQLILNYLKLMLCCYYKYNLKLKQKVPTALTKWKQSNSHPLILRPLVGNMRHELNLLNMKSVLDRLMHAHESELSYSKLDVEKFINLATRSKKQNPFQKSIEKPISKFHLVLCNKTSNMLDVNIQLTTNESFVNLIINMTIIRFETEDDFKNNVNGINVLQLGFSDFNEIEECLDWSIQNFV

SEQ ID NO: 7657 - protein, 1245 aa, Candida albicans
  MISC_FEATURE (666)..(683): X=any amino acid
MSEVKKRKIYSSSSVNVDYGLIEQLNQIISLFVPKGENTTTANDNINPLLISFIESRNLPKILSIWSYYSSTNDFHNLIDISIKLSKITFQIDQIKSYLSIPIKQLINEFYKQILNNSQYMKIIYRALNNMKPSITIANIRILINMIKFDPLIIGQEFLNGFDLTLNVLPKLLIPKKYELETEANSLSANESFQSSTIRSNFIRFWFELCSNVSFIHRQDLLLNHRKILNNIWKYLSIDSIELIEFIIDFIDLKIFQELNFKRSIKCKILNENFIYKISILFTKFSNSTNTSKSKFITFIDKLAIDSKYGLSFPNDKLWEKDSNIGVIIEINNKQFKIANKLLYTLVTSLKPNESNDQLQYIIRVLTHNQELIAPYMNWIVQHGGGYHDPSLTSWWITYTLLYSQILQIPPSTGNNSNTTKFDSKLISENIILAPLGKTVLINGLTIIKKPLIIQLTFQLILYILKKLESFLKIVNVKQDLIDLVFTQLPDLNSIIQVINSPTLLGQQSQQYKIIKLTALTIIEKYESLLPSVETTTTTTSNNNMVQKLVSMGISTFTENVDNNLTNYDLILFDLYMKINNNIDSGQDFKWWNKLTNNSNSFFTVLIKFIITTQTIHNNSNSNNSQVIIVKIYQLLNKLCNDKMLFNNQLLVSPIMALIYSLDDNXXXXXXXXXXXXXXXXXXIDYIKLFQISLNQLNCLNESPNLKNIELKYYSSMILYLLFNFDNHNNSSHNNNNNKLSTFMNLQLLLPKYLGTNRPEDLLIKSILIKIESKISTSWMIKVNNWEFQEEEEEDDDDDSSFNRRLIKVDNGGQLTICLNKKMIKNSLNSIQLSLPNFNDILKSNKSKNNKTTKTMTNLSYDEKWNQIKEFYQISNSILDVNKLAYDHEFLMMVILNNDELLKYHENKSKPEGNNKDENKSTTLKESSINYSFNIKNLIDTGILQVIVISLGDNNNNNESIKKIAQIILGNILQSINCNIEEGDNNNNNNNDINKSFKDKNIYRIYLSTILFTLRNQQTTTIPHLIWYIWSQFIPILSNPGHFLYDKVTRFVLSHPMIKPNQIPLFNSIINHSDKYNELISINSHDNNTNSSGYFYYRELNWLIEIINQGILTQLDLSLICNYDNGIIIEFFINLINLKYLNFKLKSSILKFIYKLQSIDQGSDLLITRFGLLSDLELIIMPQQAQAQSKVDEDIIDKQLKINIDELILRFGISVGSSKRVREWIGGDDELEKTLKRIHQESQMS

SEQ ID NO: 7658 - protein, 735 aa, Candida albicans
MNLLNNCDEVSSSSSKTTNNFNNLINSTTAEPPQPQPQPQGLSTSTTTTSVSTRHHSPDIVYSSHTKSTLISKAPSDFIQTQPSSPEPTSSIQTISNQITDDLPNQEVSVVTPFLVKHISDANMIPKDNFHKYCYRHNPDITCNKHTDEARMKLIQDQLDKLPNGDQQAITHVWSIFSAAPVQHRQLILQGLLSQCCFPQLSFISQEVSSLIKIDFISTLPQEISLKILCYLDCRSLCNAAQVSRKWKSLADDDRVWHYMCQQHIDRKCPNCGWGLPLMHMKRAREMTDDDNIKPIKRNDEQQQQQQQQQQGSSQAQSQVLDGEGQPDRKKVKLDTEDNHQKVVPTSVVVRKRPWKSVYSERFKLEKNWRKGTHTIKTFTGHSDGVTCLQFNRKYLMTGSYDTTIKIWKIDSGECVKTLTGHTKGVRALVFDNQKLISGGLDSTIKVWNYHTGQCIATYRGHEDAVVSVDFTNKSIVSGSADHTVRVWHVDSRTCYTLRGHTDWVNHVKIHSASNTIFSASDDTTIRMWDMNSNECIKVFGGMENNGHIGQVQCIIPFTYKEELIEDESESDSENNQNSTTTTTTTSAAATATATAMGATLGTNNISLPNDTATINRSTFTPSNNNTATTATTPNSYPTHFLTSALDNTIKLWDVATGKCIRTQFGHIEGVWSIAADTFRIISGAHDRLIKVWDLQNGKCLHTFSNNSSVSCVGLSDSRFVAGLENGEVKMYCFD

SEQ ID NO: 7659 - protein, 517 aa, Candida albicans
MNSTEVDNLPFQQQLTSFVELAVAKATGSPITTLFTIIFLILSYDQLSYQINKGSIAGPRFKFYPIIGPFLESLDPKFEEYKAKWDSGELSCVSIFHKFVVIASSRDLARKILSSPKYVKPCVVDVAIKILRPTNWVFLDGKQHTDYRRSLNGLFSSKALEIYIPVQEKYMDIYLERFCKYDGPREFFPEFRELLCALSLRTFCGDYITEDQIALVADNYYRVTAALELVNFPIIIPYTKTWYGKKIADDTMKIFENCAAMAKKHINENNGTPKCVMDEWIHLMKEAREKHSEDPDSKLLVREFSNREISEAIFTFLFASQDASSSLACWLFQIVADRPDIVAKIREEQLRVRNNNPDVRLSLDLINEMTYTNNVVKESLRYRPPVLMVPYVVKKSFPVTESYTAPKGAMIIPTLYPALHDPEVYDEPDSFIPERWENASGDMYKRNWLVFGTGPHVCLGKNYVLMLFTGMLGKFVMNSDMIHHKTDLSEEIKVFATIFPKDDLILEWKKRDPLKSL

SEQ ID NO: 7660 - protein, 448 aa, Candida albicans
MKSSKLNPVTTHKEFNGISGALGITIGLPTLTVLFYLLCNQTYSIQGINVDFAKIKSQLPITQDELWQLVFDKTCWSAYLAWFFILVILDYLLPGKSLNGVKLRDGTVLNYKINGLSMGSLLIVLLLARLFQSNSDSSLEYYLPELQFIYDNQLQLIIICFLFSFMLAVFVYIISFIPLAKPNGIGTKERILSINGNTGNPFYDWFIGRELNPRIGSWDIKLFCELRPGMLLWLLINLSCLHYQYHNLGYVTDSMIVVNLLQAFYIFDGVLNEEGCLTMIDITTDGFGFMLSFGDLAWVPWTYSLQARYLSIKGNEVNLGWTLSLLIVGLQALGFYIFRSANKQKSDFRQGKLPHLKSIQTKTGSKLLVEGWWGLSQHINYLGDWLIGLSWCLPTGFQTPLTYFYVIYFASLLIHRQVRDEMKCRAKYGEDWEKYEKLVPYKIIPYVY

SEQ ID NO: 7661 - protein, 1073 aa, Candida albicans
MLSFLTEVTGAIAQTSARRPIQFMVVPALLASIAYLSIIDDYIPEHIKSSSGSSGISYYHPYTSSHYKSQPDLDKWTAIDKEHINDDIYTQANQISVIPLRFRRFQDVVPNVPNAIHISDNEQILIVPTDQIENSLDQLQEITNNGITWKARNNDKLAKYYDYIRYGLNKVQDAIQHAENFDILLIFVAYLGMWYALIKVFVDMRKIGSKFWLAFSTLTSSTFAFLLALLVSNKFLHTKVSLLSLSEGIPFLVSVIGFKHKVSIATIVANSSTASPEDVPHVVGKAVSSHCLSMLRDHLVVIGGLLSCAIYAHHLTGLRNFCILSSLILSFDLILVYTFFSAILGLKVEINRARRTEDLQNALEEEGISSLVAARVAEQSATIEHPNEHNFFKSNNSSIAYFKVIMSLGFFAFHAFWLGSSWLYSTTDGGESFSRFSFLSNIPTLSQDISQQIPIGKKGTVVTILPTIFFMPSGFMVQLEDFIYLVLSKFSSAIRDSIISKFLVFGFALSIVTNVYFLNAARYQVSATHKLIEKEISRPQDSSVTATTTTTATGTTSSGAATSKAIGNNKGLKSVQEIPDNEDESSDEELEIKAPVKVLPLEECVKVLKEGKVKTLSNDEVSSLVVGGKLPLYALEKQLADNKRAVIVRRKAIAKLANAPVLDTNRLPYAHYDYDRVFGACCENVIGYMPLPVGVAGPLIIDEKPYHIPMATTEGCLVASTMRGCKAINAGGGVETVLTRDGMTRGPCVRFPTLKRAGAAKLWIDSEQGQATIKKAFNSTSRFARLQHIQTALAGTSLFIRFRTTTGDAMGMNMISKGVEYSLKYMVEECGWDDMEIVSVSGNYCTDKKPAAINWIEGRGKSIVAAARIPADVVTKVLKSDVDALVELNISKNLVGSAMAGSVGGFNAHAANLVTAVYLACGQDPAQNVESSNCITLMEKDKETGDLNVSVSMPSIEVGTIGGGTILEPQGAMLDLLGVRGPHPTNPGANAQQLAKIVASAVLAAELSLCSALAAGHLVQSHMQHNRSKAPAAGATTTTTPAITDSKASNGSIASNGKDLKRLEEGSVTCIKS

SEQ ID NO: 7662 - protein, 1414 aa, Candida albicans
MVGGLINTPLARHINAKKVVNPVIQSFKVAHQRVNIDIDLSSNSIDGFTELTVIPTSNKLKVIKLDCREMEIKDVLINGSRSLNYVYDDLLYINNPEYFEHCIDSKVINVMDLYSDTFNVHQHHLIRSKLDYIFKNPKHDEESLDYNTQELKILLPDNMKFELTDINSIQTPSGTSHPGTTTPSHLKSKGTGSEYYYTPIQLKVVYKVKNPQNGVNFVTNEDIEKKLWHAYTTNSNYNVSTSSWVPCIDDLSSRCTWSLEVNIPRTLKDIGNPRMIGSKEALDYQQMRRKRSGEAIQNFAQQNNDSDDDDDDDEDIGNYDMVVPSGDFNNVKETPHPIDLSKKVVSWSIFNPVCAHHVGWAVGCFESFVLSDESAGAKEDDEEDTVLRGDDAENVNNPVTIYSLPEDVEWAKNTSIITNKALDFFSKEYGSFPFSSYAIVFVRYSPCQTSNFAGLSVMSSKLLYPPDMIEPMFTVTDILLKSIATQWAGINISPQTFNDMWCTIGIAGFMAISFIKKLMGANEFRYRLRKQMDKVVAEDVGRHAIASQPFKYPVSEDDLSFVWLKSPIVLFILDNRMTKTDKSFGLSRVLPKLFLQAMSGSLPNGTLNTEHFRYVCEKVNRNKLENFFKQWVFGAGAPVFRISQRFNKKKGMIEMNIRQVQHHERTPKKLDSSSFIGDAVAYLDNEPSPPQQHVFTGPMTIRVHESDGSPYEHIVELKEANTKLDIQYNSKFRKIKKKDDGVDPGIAFNQFGDVLLSHAEMQEWNLRDWDKRDEESLSSEPFEWIRGDVDFEWIARIDIKQPDFMFGSQLVYDRDIEAQLEAVRYFGELEKTNTTYCTALTRTLMDDRYFYGVRIAAAQALADCSNEANNFIGLEYLLKAFGKLYCFDDSFIPKSNDFSDFRSFMLQSAFPRILCGVKDNDGKVPKRIQNLLLNLVKFNDNSMNAFVDSLYVSELVVSLVTSTVSGWRNDIEEYNDTEFAGKVSSELFRLQKLDRWIPSYQNIIEVTCIQQNIRMALVGARKLSFEELLYMTLDKYPMEARVEAFRGILELGGLKNKSILQYFLKVCLLNFERPLYRSKLIEALVKSVSSVATYGGVSTLDDPEFHTKVDTNVKSSSNRIIIDDGSQDNLAMKSKRDDMARASIKGAIEILRRDFSEGQGLRETLWELLHTSLIGLHERRSIFCLCQVLFKEVDSYVVKLPVPSMPVEEYVRKKIVAKVSNYPGQVTIKREGRFKIQLATRKSVIAKVKSETEHKPLKISLKPVIEAKQKAASAVHVDPVIPTKVTFKLPGHRLAGFAKKVELDGTLVTIKLGRDMKSKVDALAHRYVRINTKRRKIEVSKVPFIEKEEGSNTSGVTEVSRNTGEKEDAKSPSPILVKKEKKRPKVYIHFGGNVKKPDQGSSSSSSKEGSTEVE

SEQ ID NO: 7663 - protein, 414 aa, Candida albicans
MASVEVELGVTPETTYSISGKQLKFDSESDIAPYIKELTEKENVKKVDFSGNTIGIEASKALSEALLKHKDTIVEINFSDLYTGRLNTEIPQSLEYLLPALSKLPNLKLINLSDNAFGLQTIDPIEAYLAKAVSIEHLILSNNGMGPFAGSRIGGSLFKLAKAKKAEGKESLKTFICGRNRLENGSVNYLSVGLRNHKDLEVVRLYQNGIRPAGISKLVEQGLSNNKKLKVLDLQDNTITTRGAIHIAESLSNWPLLVELNLNDSLLKNKGSLKLVEAFHAGDEKPQLITLKLQYNELETDSLRVLADAIASKLPQLKFLELNGNRFEEDSEHIDKINGIFEERGYGEIDELDELEELDSEEEEDDEDDEGEDDTLEEDLDLTQLEEELAGVSLEDKDGNVDEIAEELSKTHIK

SEQ ID NO: 7664 - protein, 1089 aa, Candida albicans
MARRSTRRQAANPVSYRESSDSEAEESFEPEEDDYSTRPTKRKANNKSSSASKKRKKSGTKTSKKSLKQLEEELEENYLYKALSSNEVNIQDIALDWIEEYEEDQVDDKYESITGLINFILRSCGSLHLFQPHDLSNLESSADTVDEIGIAFGDQSSHKYPFKAVPVFKKNALQLFKEIIDIAHEKGLLYKYDNNREEEEEESLASPLMWYILTWVTSLSSSPIRSLRYTSTEILFAIQLQLCKIIASVESSLERSQRQLSKIKKSNKSKSTLISKTIESCQLQKRTILEYFNDTGNIVIDRRYRDIDPQIRLACLKNLCEFILIYPDFFCQGIYLRYFGWLLSDPIAQVRIENTRSLLKLYRSISPADLTLGLRQFSEKYKSQIIKMSQIDSDAQVKLNILGICCELLRLGFLEEKDTRQVIENFPFSGPSKLQIEGARFVTILNEENLTGINDKYRLFIETYKPNQFETDLPFCLDIKSLINLLKFVADKPLHLVFQNMSSHYEGNWEMLVKYFLSDISSIKFSKKDEEEEEFVEGEEIEEFRQFIDLNSDERLILLKFIQGFVEYVYTKKNPEEVESQLVRLIEYLPQIQNVCVRSSKMFPVFLNIWTTLLKGRQSVYNISNKLDKLDQYDEISSEIIKYFKDFDTVAEFSSYFTALFDSHGLTTNIKFSIQTVLEELCEEVVKTISDQQSEDDDIDSTNTEVLEQTKLIKTLEVALPILQKIKQMGDFVNIANLSNMVDLLSSLVNRVLRKFDLALIMSQWKHNFLEQLPQFLPALTCLYDLTLVVVSWKFEKLVEIEKDEQRHYAIDLEFDGIVDLVNQTIRLIYECTNSVQFLDLKTLLISRYIDFMLSFKVFYVRFQADNSFDNFQEFFNSNMQLLLIKRDMQFQLLELFLIKEVRLGHLLNVDLDRDDEEDVNYEDYTEKIDESYLQEKSMFDDDDQTSQPSTEDSSTTRNQEVEAKKKEKIWNLEKDLSVFTLKLISLVNVSLVQDELYNRIKLNKDKLGSVFAKIIQQQDEHANTIKNQAVSNKERESEESRISENAQQSSVEDNNGNEVVERDESIAIEVDVPERGSMVDIETPSSVI

SEQ ID NO: 7665 - protein, 2093 aa, Candida albicans
  MISC_FEATURE (1501)..(1501): X=any amino acid
  MISC_FEATURE (1519)..(1519): X=any amino acid
  MISC_FEATURE (1526)..(1526): X=any amino acid
  MISC_FEATURE (1576)..(1576): X=any amino acid
  MISC_FEATURE (1604)..(1604): X=any amino acid
  MISC_FEATURE (1608)..(1608): X=any amino acid
  MISC_FEATURE (1610)..(1612): X=any amino acid
  MISC_FEATURE (1615)..(1616): X=any amino acid
  MISC_FEATURE (1621)..(1621): X=any amino acid
  MISC_FEATURE (1624)..(1624): X=any amino acid
  MISC_FEATURE (1647)..(1647): X=any amino acid
  MISC_FEATURE (1668)..(1668): X=any amino acid
  MISC_FEATURE (1691)..(1691): X=any amino acid
  MISC_FEATURE (1693)..(1693): X=any amino acid
  MISC_FEATURE (1695)..(1695): X=any amino acid
  MISC_FEATURE (1712)..(1712): X=any amino acid
  MISC_FEATURE (1729)..(1729): X=any amino acid
  MISC_FEATURE (1785)..(1785): X=any amino acid
  MISC_FEATURE (1787)..(1787): X=any amino acid
  MISC_FEATURE (1790)..(1790): X=any amino acid
  MISC_FEATURE (1841)..(1841): X=any amino acid
MSELSNDNIVESQELSSPVTREEPVANDSNDLFGGDDQSTSNQQDDFFSNIQQPDQPDQPIIETNEELETVHKSTDVELPQEIPLEQEQIPQQPQQQENVIDDLFGTSNNDDDFFSNHNQDGLNSAEIETEENVEVPLQPDFEQNQDLESEKATISIDKKDEDPVLESLTTESDILDNDHESTSEAPGISTESEVFEEEAVVEEVQSTAEDSPVDATQPSEPGPLSTEQINLVDEPEAGAPNTEESQTESKLDQFFTESNEGDFFENIARDNVEQEVSNPSKTEADQKLEDLFAGADNENGEDLDFLQQPQHNVAEVNSEAAVATESINLDLFGEDDTDFLDELNSKKQQQQEEEVRPSSSSTTNPEDKLAALDLDDDLLLDDDFLEEGSVQPKVESSLPENKPVKHHHSYIPSGPSANQKSVYAPPQVSGVNKNDFIKNLEQSKKKHDAYDFPDTLLVNKSRPAARHAPSSNKYGPPSVSQTSIPSISSTSSLPPARDVKSSSSAPPAAAPPTGTSTSKVAKKSFFEDFPDDEEIPKPKRAGRAAAPVKAVNQIHSPQVLNQQVQQQQQQQQSQQNAPPAPPPSKVNKQPPVNPYMPKSGTSPILQQQTPAVHKSGIAAPNVNVPHANNYAPPLNSFAFPPRQPNQKTNDYSPQLQSSPAPPPPPTSLQPFPSIGQSQSAPVYHNRQPSNSINTNVNKVPSINSPYVPNAGPYAPSTHQRSHSRASSLVGGKGKEVNPYAPALETVASGDINQIQQQQQQQQHLSPATAVLPPARARGFSNAKSNIYKSAPKVVNPEQLVFRQYPIFSFSINSNCSVIIPNTGYNQGTSINIGPISNLLKDKDLYATFPGPLSKSKSKKKDVEKWLESSSGYLRSLGKNDELVLNDILLHLIKHDGDVKNQEFLRSACSILNPNVNFDVNNLPTSGLAIGATNAHKLDNSGINTVFTLIQSGNLEKALEYCVSRGDWALALIISGPENFNKIAAEYARNTFPFAKTNNKVLHIMPIILKVLGGNVSSVIEDLTAVPNEGEYANLHWREIISTIAICGSLKATEFLIEFGKFLNQQGNFIGSEIAYIMAGLPFGHQNFMMLASGHNSMYTEVYEYALNLHKAMHFPHLLSLKLKHALTLADYGLINESQRYIDHINSSIKTLGNKSPFVTPNLLHEFQNLIMRITEVGSGDDQNNWFSGKISRVNLDKIWGQIDKFIVGGDESKNGNNNDGNGTGNGSGSVFNKFSPSVSRNASSVNLHNYAQPSMIRQPSLLPYQPQQQPQPQQQLLDQVHIERKPTTGFAPQPPPLVGHPSTTSVNKYSPSIKSSPRQAQQNKFEKYAPSNNSSHHNLSLVEERSAVTSADGPEYPHHQHQQSINASAVPVPLPPPTPPVSMPQHVSRSPRSHQSHQPPTLPPSHSHHVQQPSRDRSPLATRIYPYSNSVGGQISTTSVGSIPSQIPLGRQTHGKQPSISSVISGDSIAAVGLGEQENVLPPSTGQTGKTATSEVNRNXEGYGFGGHYHHDQPETIXESPELRXLQQPQSSEAEISKDISNDVALDSAKIPEASQEPEEETDESGNVAAAPPPXPVAPVAPPRKTKSSRSNPYAPSTDIGAXSNAXSXXXQTXXGKPSXRKXGSRTNRYGPPPGVGNKQPTIDVXPPSATNNTGNEDSISMFSYGXYQNESSPPLKQPSQFDQTAVASXPXPXPLQPQLAVPERVPTKNXANIDDSFDENSLAADTXTTYNNNMVNKPYGSSPMGPTVATNGPGSVTSTPLILNQGSANMKLSNLSTISVTGXGXGTXTGTGGAFDGFPIPGSPDETTRPNSIFGGHTRGLFSSRLSESQSVLYQQYAXADDTVGDYIPIMEEDDEDDEDEQAKQQKQKEKEAQEQELKRKQEQQQQKAAAKNNNNSGGGGGKFFSLFGGGGNNKKQDNDAKVYKAHLGQKNTFVYDEKLKRWIDKSKPLEEQLQANLPPPPPPSMKKKPNPVSTTTNSNNSSGPPPMVTPNPTPIPGGDLSTTATGGISTPIPASAPPSRMSKDSTKPTPSINRPKSSLATASGLDDLLSLTDNNPPPNGRSRGVGGGATPGGSRRNKPKRRGYVNVMEK

SEQ ID NO: 7666 - protein, 381 aa, Candida albicans
MSSIKTSPTKKTSESTTKQDTPNDQTNIENFDEEPSMLSDPEDYLEENETLDMNLSKGDQKVWLVKLPKYLMDDWSNPDSMNGQQLGNVKIKKDARGKLQVKLLLDNKNDRIPKEYDIKMLNTQVRNSYVFTEENLKKFKQEVTEVSDMPEQPQLKELNPEKKKFQVRRKFKYFRVQKEGENGQPVKKYIPFVKTIPKKTSLMGKVCHDCTVVPARTGSKHGESLMKHQNMTQGKERPKVTLLNEIPGVIQSNAGPSIKGNAASIFLKSTQGKNKSEGRTIRMPKKDLLDLLFRLFEEYEYWSMKGLKERTRQPESYLKESLESIATLIKRGPYTSKYTLKAEYRRLRDAERAVRLGLDEDDQNKENNEDEDEDEEMEDVV

SEQ ID NO: 7667 - protein, 686 aa, Candida albicans
MATIENNKESPTKDFRVYIGNISPKLKENEQSLTTRIAKYGIIKSPLEFHTKPLQLYYFAYVTISTTDSEFNKLKKSLNGVLFMGMKLIISLAKPNYLERWKKSNSKDKDKEGGRSNNNQIKQLEQLRRDKIVESRLEKIQEYKTNYPTNKFTSNLITCYNAGFNQPEISISEHTTNNISANTKNPPPKHRLIGSKSYGALTQPNKFNQNRFLYRSGKGIVIRGVHRKTPRSNLKLKQQTLRILINGELKIFKNYKTKLWGIEKNKTIRDLTWKYINGEWRSGDDHIIEKVTCGISSGQQAENYSKDNIIIDKEDNSGNKLSSIDNDNDNDNDKEEIDKNKSILASMFDSYDFDKPIELEETGNEIHGSGGGKVATAADDDDDEIQVDSKGRKKAKHYDYEIEGKISEDEQEEEEEENDAEKINTVDIKSANQIIENYKQSSSFVPTKETYYDEDDEGNEIELDEFNNKYTTEAIKSNYDKDHNDIEVEREDNDDDEEEEFIPTFGAPKPNTNNTETLRALFNPTTSNTTIQPTSIADNGSFKLGLQDDDEDLDTDKQLDNLKQQELYKKLQKQRQEQQQQQEEETNNQQLLSSNKKFGLFWCHFDSPFLSTQSQFSKLGGGGGNGKIKLPGEEEEEVEGKDDKDQDEDEESLYEKWFWSMRGDISRECKRRKRDLLRTIRKKKKN

SEQ ID NO: 7668 - protein, 429 aa, Candida albicans
MGCGASVPVDDDEIDLFLQDKRINDAIEQSLQLRQQNSKKGVKLLLLGAGESGKSTVLKQLKLLHKGGFTQQERRQYSHVIWCDVIQSMKVLIIQARKLKIKLDCDQPNNSLIPYKQIILRSDPLKQIDADVAGGTDFLNDFVVKYSEENKNKRRLKSTGTTDIWGKDDDSNINSDAINQALESSLNKDSEQFTRLSIAEAIHKLWKLDSGIKKCFDRSNEFQLEGSADYYFDNVFNFADTNYLSTDLDILKGRIKTTGITETDFLIKSFQFKVLDAGGQRSERKKWIHCFEDITAVLFVLAISEYDQNLFEDERVNRMHESIVLFDSLCNSKWFANTPFILFLNKIDIFENKIKKNPLKNYFPDYDGKPDDTNEAIKFFETNFLKINQTNKPIYVHRTCATDSKSMKFVLSAVTDMIVQQNLKKSGII

SEQ ID NO: 7669 - protein, 614 aa, Candida albicans
  MISC_FEATURE (493)..(493): X=any amino acid
MTAGDNSIEYVNPYSLSQTINSDLISILDPNGSTTSIIKPQLNYQIPIFKSIDVSNLIDLNNTKIQTQTNETRINKAKDSSDDHQNNPSSKDYDTSGENIVGGIDDIVEDIKLYVSIDKLKPENFQNQLTTIIINQFPTNLKSNLIEQLLKMLMNLKKFVWSFINHELIDLKLIFIKFDQLKDLKWFLLTYRDHISQLIPNVTIITNDKVNEYLNNNKDSSLAKVEPSKITDNLKAKINLIINNPINYTKGKKNSGTEDLDQVLDSYSNYKVDNNDLIDIPNNMKENIIKDIIRFRSRMLLIEKEQRKKEIEMERIKTKNKLKELFEGIKENSTDSTTRKATNKAAVGVTISPKVSHRDEYEDMNDKEYEEFIAVEERNKLNDQYNKKLKSFQNNQHAEYMKLTNKLKSLQNYESDLIDNKLKYIDNLKNYQTNGLAHLYTHNYSDYLRMRSQKRSLEETKDAEDVKQELEEIKKNGGQVASTNTNTNTKPSXYSSGVSELATTSVETPKSTTTTTTTNDTTDEPVAKKSKLAKEIIIIDLPPTVKQSLQEKIVELVENSLGIKDEFLIQVINENLEASNLDNKQELIDELVQVLDEDAESLVNELWDYIETMV

SEQ ID NO: 7670 - protein, 850 aa, Candida albicans
MSIEEEISEDLGFKLDIKDNGIPLFEPLDLQNLATKHLKLLAIHDDLMVASNSKCIKVVSLKDLDDITTIEGEFSITQLHFVGNELFVLDDSKIKSLTVEQLKNKDYSFRTIREGFVDILPSPSGILALNTNNELYLNADKVASNVSAFCWTSSSYIYASKDKPYHINNKKIKVKDVDELCIVEMFAINEKYLFVAYDTVDAELDYHDVKSYILEETDNDYTALEADIAPAFGSVARAVTYYHAQLSDWYKSNKFVLLTSSLAIDLGILDTTKGQTPKIIAQSEDINRAQFPIDDESGDDCSPVGFGVSLNELTSKVLEPCPGADEVTGVLPRIYTLLHTGNLISWWVFHKSAILKKELSLENAIKASSTQTKEVSNEPAQTKSNPFGNTPSSVFSAPASKSAFGQTGFGGSEASSGFGTTGLGQKPEATSAFGTTGLGQKVESKSGSGNSAVIQNPQATSAFGTTGFGQKPQATSAFGTTGFGQKAQTNSAFGSSGFAQKPQASSAFAQSSGSPFSGFAKSGSTSSGFAKLGSGGPSIFGDKTSSPVSTPLADESKESEEESEISLPEESDYSDEEELATDDANTSKDLEEVEGENVTETQEEKVETEIPPPTDPKPVQFSFFSGFTRISKPSSNEIKNKIINIIESTEGNLQVMDANRNQLGDFIGQHEKIDKGIDSLKFAEARVPLRDTTETLKRELLELTNLSTKIQKCFGEKVKLDRLYSQLALAADQNSANKDVLKSRPLDFKNDLMQTKLREKLNNVRSLEKKVLALLMPIKAKNSMDDQTIDNIERIVFQINEQILDHSVGIDDLATQMGELDIEGDKKVDVLSNCSKLKLRQKLRQKSIMF

SEQ ID NO: 7671 - protein, 248 aa, Candida albicans
MKSTFLSLDKRCIEKAIFYLLATPKTKNFSVSFSSTMFSFKGFGSAIRPLRFVNHGMFRFQSTRAAKPQGIKALMKEYGYPALAVYLGLSCIDLPICYVLVHSMGQEKIEVYENKVKQTFGYGISDEELKKKQEINKIQQDIESQGETTSENSGSMVSYILSQFSWTEFAIAYGIHKSLIFIRLPITAAITPGIVKLLRGWGFRIGTDKLSTTASIAKDLAKSGIKDITASSTKFGVKPGNKKWWWFF

SEQ ID NO: 7672 - protein, 1447 aa, Candida albicans
MSFARYIYYTIAVAVLLNFVKATENNNFKLEVEASWSNIDFLPSFIEAIVGFNDSLYEQTIETIFGLGDTEVELEDDASDQEIYSTVINSLGLTDQDLDFINFDLTNKKHTPRIAAHYDHYSDVLTKFGDRLKSECAKDSFGNAVETKNGQIQTWLLYNDKIYCSANDLFALRTDLSSHSTLLFDRIIGKSKDAPLVILYGSPTEESTKDFLKILYPDAKAGKLKFVWRYIPSGIKKSDSISGYGVSLKMEKYDYSGAEGNPKYDLSRDFTRINDSQELVSVNEKHSYELGVKLTSFILSNRYKSTKYDLLDTILTNFPKFIPYIARLPKLLNHEKVKSKVLGNEDIGLSQDSYGIYINGSPINPLELDIYNLGTRIKEELQTVKDLVKLGFDTVQAKLLIAKFALLSAVKQTQFRNGNTLMGNNENRFKVYENEFKKGSSEKGGVLFFNNIELDNTFKEYTTDREEAYLGVGSHKLKPNQIPLLKENIHDLIFALNFGNKNQLRVFFTLSKVILDSGIPQQVGVLPVIGDDPMDSLLAEKFYWIAEKSSTQEALAILYKYFESNSPDEVDDLLDKVEVPEDYKVDYNHVLNKFSISTASVIFNGVIYDLRAPNWQIAMSKQISQDISLIKTFLRQGPIEGRLKDVLYSNAKSERNLRIIPLEPSDIIYKKIDKELINNSIAFKKLDKAQGVSGTFWLVSDFTKSAIITQLIDLLLLLKKKAIQIRIINTGDTDVFGKLKTKFKLTALTNGQIDEIIEILKKSNASSANNDELKKMLETKQLPAHHSFLLFNSRYFRLDGNFGYEELDQIIEFEVSQRLNLIPDIMEAYPDEFRSKKVSDFNSVLSGLDNMDWFDLVTSIVTKSFHVDEKRFIVDVNRFDFSSLDFSNSIDVTTYEENSPVDVLIILNPMDEYSQKLISLVNSITDFSFLNIRILLQPRVDSKEEIKIHKFYRGVYPQPTPKFDSNGKWIQHYSAQFESIPSNVTYSTELDVPHKWIVVPQSSSMDLNTINFSESHSVDAKYSLKNILIEGYARDIHTGKAPDGLIFRAFNKNYSTDTLVMTSLDYFQIKAYPSIFNFSTTSNDTLLSASENKYQANTEELESIEVPVFKIDGSTIYPRVMKSGNNKPMSTRKHADINIFTIASGQLYEKLTSIMIASVRKHNPSSTIKFWILEDFVTPQFKHLVELISIKYNVEYEFISYKWPNFLRKQKTKERMIWGYKILFLDVLFPQDLNKIIFIDADQICRADLTELVNMDLEGAPYGFTPMCDSREEMEGFRFWKEGYWSDVLKDDLKYHISALFVVDLQKFRSIKAGDRLRAHYQKLSSDPNSLSNLDQDLPNNMQRSIKIFSLPQNWLWCETWCSDKSLEDAKMIDLCNNPLTRENKLDAAKRLIPEWIEYEQEIEPLVSLVQNNTAKEVVQEIEIDTDGEQEEQKQESNDDDFIHDEL

SEQ ID NO: 7673 - protein, 740 aa, Candida albicans
MASQRDLTSNNPHFHISSSRNNTNDDFNSDHNPRNPFGDEPEEEEELDSASFSSSSQNNQPHHPFATSNQTSSTNNLHSTNSIRNEAEYGKPFQAYSGYYSNGGSSSYLNQEGVISDESRLLSSGNNNNNNNNNRDVSSVGGGGGSGDNRLNPTSPAEFDRYPSMAGSRVVSSTSLVSFNNPSNMMRNHHQHQPHLGSSSSPTSSSMNNDSISDKSTSPFPNDFSPFGGYPASSFPLSIDEKEPDDYLHNPDPVQDAEYEKNRFMHDLKNMDKRSLGGLIGFIILFIAALAVFIILPALTYSGATNPYHPESYEVLTKYSYPMLSAIRMNLVDPDTPESAYKKKAKDGSEWVLVFSDEFDAEGRTFYEGDDQFFTAPDIHYDATKDLEWYDPDAVTTANGTLNLRMDAYKNHNLFYRSGMVQSWNQLCYTQGHLEISARLPNYGNVTGLWPGLWSMGNLGRPGYLGSTDGVWPYSYDSCDAGITPNQSSPDGISYLPGQRLNKCTCPGELHPNRGVGRGAPEIDVIEGEVMTDSSGKKENCGVASQSLQLAPMDIWYIPDYNWVEIYNFSVSTMNTYTGGPFQQALSATTMLNVTWYEFGDNAHNFQTYGYEYLNDPETGYLRWFVGDDPTLTVYSQALHPDGNIGWRPLSKEPMSLILNLGISNNWAYIDCPSISFPVTFRIDYVRVYQPPDQINVGCDPTDFPTYDYIQQHLNLYENANITSFEDGGYKFPKNSLIGC

SEQ ID NO: 7674 - protein, 271 aa, Candida albicans
MRQFQIILISLVVSIIRCVVADVDITSPKSGETFSGSSGSASIKITWDDSDDSDSPKSLDNAKGYTISLCTGPTSDGDIQCLDPLVKNEAISGKSKTVSIAQNSVPNGYYYFQIYVTFTNGGTTIHYSPRFKLTGMSGPTATLDVTETGSVPADQASGFDTATTADSKSFTVPYTLQTGKTRYAPMQMQPGTKVTATTWSMKFPTSAVTYYSTKAGTPNVASTITPGWSYTAESAVNYASVAPYPTYWYPASERVSKATISAATKKKKRVD

SEQ ID NO: 7675 - protein, 922 aa, Candida albicans
MSDSESYYQNSTTNQPIPRSDEVLDDHRNQITNDCAISDSEDELELKSELESEVVKSEKQQQHHQEITSDNAKPLTRKSGSSIKKKSNLTDKDRITNPMSLSGGDDTINSGHKNRNYNMSSLRKDFYLKDNTDDNSTNNHTHLAIPIPIPIPTPIITNANKSRRKSQLENLPPLIKKKTIGRNNSNNFENDLVSPMTKMKTNDSEDITNTSTTANHMKLGIGATTLGVGTGTTATATATAAAGRRPSRSSIDSEADSHASRSSQETEEDVCFPMVGDHIRVNGIDFDEIDEFIREEREEAYLQKQMIAKNISRIDEFQNLSKNNTTSGASRHPYHHHSNNNKKNNGGDGGGSSMAALKYTPKNILKKTLSRFEFTHENSSSSEEIYELKTKQQPPYKYDDQLSLTSSTSSTSGSGSGQVKFGGARISDGINGGSLPDRFSLFHSESEETIHAPDIPSLVSPGQSVRDLFRNGEETWWLDCTCPTDSEMKMLAKAFGIHPLTAEDIRMQETREKVELFKSYYFVCFHTFEADKESEDYLEPINVYIVVFHDGILTFHFSPISHPANVRRRVRQLRDYVDVSADWLCYALIDEITDGFAPVIHGIEYEADAIEDAVFTARDTDFSSMLQRIGESRRKVMTLMRLLSGKADVIKMFAKRCQEEANSSSGYYQRQYNLQQQQQQAPPPPPNPIITSPINSTLNLNSLGTSTGGGVGVGGINFGPNPTGNNTNTNTNTTGSPSPPQQQQQHGITNKSFPIPDARPRADIALYLGDIQDHIITMFQNLLAYEKIFSRSHSNYLAQLQVESFNSNNKITEMFSKITLIGTMLVPLNLVTGLFGMNVRVPGEGGTNLGWFFGIVGVLIFIIIGSFIFAQWWLKKLNNSIEGQNNGNRPIFNHSSRRSIRSLGLKKHGGNKSIISFPNKYE

SEQ ID NO: 7676 - protein, 609 aa, Candida albicans
MYLILLVVLAVYVTYKLITTVLPHHLLIPSQNWREKISYVVKYPKPIYLKVGTKRSSYRRRLILASENPAFYTNFINNKLKISPNDCENGDGFLNEMSRRDIDDPKRRIIYGFFHPYANNGGGGERVLWQAVKATLLADDKNICVIYTTNIEAQPLDILNKANKKFQIDGLDHSRVVFIYLRKFNNLIDGNYWKHFTLIGQLFGGILLSLEAMYELSPDVWIDTMGLPSSYLLVSLSLKIPILAYTHFPILQEDMFGKLKFQKLKDLWKFNIIKFNDYFALGKFIYWSILYYFYVYLGSKVNIALANGSWTFNHLSKIWVFNTALGNVLDVLYPPCGTEFLIKQANLNQPRSNKLLYLAQFRPEKRHALLLKEYSNFLSNNFPNVTQITNKFPTLVFAGSCRTADDTATLKFLQEQVAKLDLSRFVEFRIDISYDEVVELLSSCKFGLNAMWNEHFGIGVVEYMARGCIPIVHASAGPLLDMIGRNDQQENCLNNWKTDGGFFFKSYDDPDLDPNLQKNTETGYIKFELFDQFIDYPTFETLLKELYVNDPTIIEDSKLLKMRQIDQNRVAEKFSNKAFNKKWIEYINDLNTLEKQYREEKRTKVEQVY

SEQ ID NO: 7677 - protein, 502 aa, Candida albicans
MINKYSLNDRVSTIDNYLGTIRYIGNLPVWGTNTVALGIEWDDPSRGKNNGDLNGIQYFTPKVTGSGTFIKSSNRSLNHIRKSFVQIIHENYLDTEYKTKNIQFGIKTVEELGWDKLNKFHSNLRNLDSLTLDYCLINIAYHDNEDKQLFDELVNLTNLELSCNLFTDVNEICKIIDNIPSLTSLNINGNRFSQFSQEQRTHNGIVSLKLSSTMMSTSMLEKLIKKFPNLKELYISGNNYCNADIENMNLNMPLTILDLSYNRLEHMPILPLVSALNLSHNYLSLQIIKGTFPNLKSLDLRANQIKDWTEIDKISIHLPDLKELRINHNPLFQELSVDDMTMQLIGRIKCSPEHLRKLNGSFLTNEEIENSELYFISKVEQGKYHIDNEQQWSYLLSKYNKSVESRVSYTYTLKDWMPLTIVLPDSKEISKKFTKNTSILQFKGLLSSWMNDLSILKFSAYYYTNENSTFAEKHELTNYLSTLDSYSLSYDQRIYISIEASI

SEQ ID NO: 7678 - protein, 143 aa, Candida albicans
MSQNTKTYRDAFALFDKKGTGKIPVEHLGDLLRSVGQNPTLAEIADLQKTIKGSEFDFDTYQEIINRPDGFKPLGLPEDYIKGFQVFDKDHTGYIGVGELRYILTSIGEKLTDSEVDELLKGVNVTSDGNVDYVEFVKSILDQ

SEQ ID NO: 7679 - protein, 925 aa, Candida albicans
  MISC_FEATURE (680)..(701): X=any amino acid
MSHSIPITSSPPPALKKLKLPNGSEEPSEFERELLDITQAVHDSTDQTWDRPPLPSSFEDISFQQLDAEEYHDRGNTYARFFGITQEGHSVLCNVTGFIHYFYCPVPKGFEENLTEFTNYLKATFDGIERVEITSKESIWGYSNNIKTSFFKIFAKNNISKIRSAFQNGQVHNIDPCITYDNINYLLRLMIDCKITGMSWITLPRDKYKIVNNKISTCQIECSIDYRDLISHPPEGEWLKMAPLRILSFDIECAGRKGVFPEAEHDPVIQIANVVQKSGESKPFVRNVFTVNTCSSIIGSQIFEHQREEDMLMHWKEFITKVDPDVIIGYNTANFDIPYVLNRAKALGLNDFPFFGRLKRVKQEIKDAVFSSRAYGTRENKVVNIDGRMQLDLLQFIQREYKLRSYTLNSVSAHFLGEQKEDVQHSIITDLQNGTKETRRRLAVYCLKDAFLPLRLLDKLMCLVNYTEMARVTGVPFSYLLSRGQQIKVISQLFRKCLQEDIVIPNLKSEGSNEEYEGATVIEPERGYYDVPIATLDFSSLYPSIMMAHNLCYTTLLNKNSIKAFGLTEDDYTKTPNGDYFVHSNLRKGILPTILDELLTARKKAKADLKKETDPFKKDVLNGRQLALKISANSVYGFTGATVGKLPCLAISSSVTAFGREMIEKTKNEVQEYYSKKNDXXXXXXXXXXXXXXXXXXXXXXLVITKAYSKHDYSAKQAHVELAERMRKRDPGSAPTLGDRVAYVIIKTGGDKNYEKSEDPLYVLENSLPIDVKYYLDQQLTKPLERIFIPILGETKTKELLTGSHTRTIKVAAPKTGGLLRFAKKSEVCVSCRTPLKKDNLGALCPNCIKDGKGPDLYGNALSQMNYLENKFSRLWTECQRCQGSLHQEVLCSNKDCPIFYMRTKAQKDVHQQALELVKWDNTNW

SEQ ID NO: 7680 - protein, 465 aa, Candida albicans
MGQGPSGIPGGDNLNKKKDDKKKEKPKYEPPVESKFGKKKRRGPDTAVKLPSVYPNTRCKLKLLKLERIKDHLLLEEEFVTNQEAFQPTEARQAEEREKVDELRGYPMAIGTLEEIIDDDHAIVSSTASSEYYVSIMSFVDKGLLEPGCSVLLHHKTVAVVGVLQDDADPMVSVMKLDKSPTESYADIGGLESQIQEIKESVELPLTHPELYEEMGIKPPKGVILYGAPGTGKTLLAKAVANQTSATFLRIVGSELIQKYLGDGPRLCRQIFQIAADHAPSIVFIDEIDAIGTKRYESTSGGEREIQRTMLELLNQLDGFDDRGDIKVIMATNKIESLDPALIRPGRIDRKILFENPDANTKKKILTIHTSKMSLADDVNLDEIVTGKDDLSGADIKAICTEAGLLALRERRMQVKAEDFKSAKERVLKNKVEENLEGLNLQVHRNTIIVQQIFFFVSFFFLSIT

SEQ ID NO: 7681 - protein, 222 aa, Candida albicans
MADNSDDYSYDYEYLYKIVLIGDSGVGKSNLLSRFTRDEFNLESRSTIGVEFATRTLEIDGKRVKAQIWDTAGQERYRAITSAYYRGAVGALIVYDIAKTESYESVSRWLKELKEHADANIIIELVGNKSDLDHLRAVPTEEAKNFAMENNLLFTEASALSSDNVDLSFHQLLKNIYEMISKHQLENNDSKQTNTAGGPTISLTPAPQEKKNKNNGWLLLRH

SEQ ID NO: 7682 - protein, 249 aa, Candida albicans
MSIEDLKNTVTKLQERIQELEKKAGIIPDVPKSVRMVLIGPPGSGKGTQAPNLKEKFCACHLATGDMLRAQVAAKTALGVEAKKIMDQGGLVSDEIMVNMIKSELENNQECSKGFILDGFPRTIPQAEKLDSMLESRKTPLEKAVELKIDDELLVARITGRLVHPASGRSYHKLFNPPKKDMTDDVTGEPLVQRSDDNEDALKKRLVTYHKQTEPIVAYYQKTGIWSGVDASQKPTKVWSDILKCLGQN

SEQ ID NO: 7683 - protein, 409 aa, Candida albicans
MDDFENEQILTKKSVQLHNDIDSLISKLESLVEAVDIASQDKQRLIQITTTKINLIINEFETNPKLLDSHLQNYITRLCDLYLNQLSVRSHCGEIVYNLAKIRQMKNIILYFPSDLYLINKILSIVTTTTKANEFITFFALLWICNLSLLPFPLNSIDKNLSITIYKLGIENLHKYHNGSKNQIASSILLSKLLTRNDCSHLLQQFFQNIDINNWVILDANSKLSYYLTVNKLLKSQNIVGEDELLKINQCINNDLLQSKSLNPSNLNVLYSVKIFSKLALNYISRGDFSQVQSIINNLINDILLEAGNLDYNLRYCIAKALSNIVDKLSNYAINYQQQLIEFILSNLDITDDVSISKNHTILLTLGYLCLNKTMSKQYIGKLLNIVHATMFIKIRTHSQKADLGNCIQ

SEQ ID NO: 7684 - protein, 282 aa, Candida albicans
MSDLNIFITSNLTSSERRISPQWNLKYLKQKLESITGISPQNQILHYYPNNHSNEYKLIPPINGSTTTDDDDDDEQILLSSLNLQSYSRIHVIDSDPNSDVNKLQQQHQQHQEEEEEKSEIEEGDVAGFTEFQLSEEDYKTRQNSVLNWKKINKLGRFDPQFQSLQEKLHHETEMKLKTMSIGSRCRLINIENNERRGIIRFIGKIMPLDNGENDWVGIEFDEPVGKNNGSIDGVKIFECKPNHGSFVRPRLVEVGDFPELDPFADDDDDDNDEDMDDDEEL

SEQ ID NO: 7685 - protein, 492 aa, Candida albicans
MPQVTKTNNENEFRLTRSKVQHQESISTIKNTTISNSQHKQQTQQQISSPPQVSVTSSEGVSHVNTRQYLGDVSNQYITNAKPTNKRKPLGGDNAPLQKQQHRPSRPIPIASDNNNNGSTSSSSNSSNNNNNDANRLASLAVPSRLPQKRQATESSTNLVEKLRVPQPEVGERSQSYHKKSRLIDYEWQDLDEEDSDDQLMVSEYVNEIFSYYYELETRMLPDPQYLFKQTLLKPRMRSILVDWLVEMHLKFKLLPESLFLAVNVMDRFMSVEVVQIDKLQLLATAALFTAAKYEEVFSPSVKNYAYFTDGSYTPEEVVQAEKYMLTILNFDLNYPNPMNFLRRISKADDYDVQSRTLGKYLLEITIVDYKFIGMRPSLCCASAMYLARLILGKLPVWNGNLIHYSGGYRISDMRECIELMFQYLIAPIEHDEFFKKYAMRKFMRASTLCRNWAKKFQASGRDLFDERLSTHRLTLEDDDEEEEIVVAEAEE

SEQ ID NO: 7686 - protein, 314 aa, Candida albicans
MEQELLLKGRKKDSIEQFISGSQLFLENGLSQLRYMVLVEGLSTPEGYDQCPYRSYVWSILCRVPPSPTEQYLQLLETSSQTLPDELLIKIKNDTFRTLMNDKKFHSKVNEESLIRILSCIGITTEVGYVQGLNVLLAPIAYVCHKSEPQAFAILHNLITKQIPLYITPNMEGVHTGLQLVDAVLKIIDPVLSDYLDSKFLKAKIYAFPSILTLCACTPPLKSVLKLWDFLFAYGTHINVLFVVAQLIICRSSILESEQPMKILRTWPNLEENEIIKLSLSFIPELPEKLYDLIARHGYDRKVPKELARFLEEK

SEQ ID NO: 7687 - protein, 491 aa, Candida albicans
MLRSFKSIPANGKLAQFVRYASTKKYDVVVIGGGPGGYVAAIKAAQLGLNTACIEKRGALGGTCLNVGCIPSKSLLNNSHLLHQIQHEAKERGISIQGEVGVDFPKLMAAKEKAVKQLTGGIEMLFKKNKVDYLKGAGSFVNEKTVKVTPIDGSEAQEVEADHIIVATGSEPTPFPGIEIDEERIVTSTGILSLKEVPERLAIIGGGIIGLEMASVYARLGSKVTVIEFQNAIGAGMDAEVAKQSQKLLAKQGLDFKLGTKVVKGERDGEVVKIEVEDVKSGKKSDLEADVLLVAIGRRPFTEGLNFEAIGLEKDNKGRLIIDDQFKTKHDHIRVIGDVTFGPMLAHKAEEEGIAAAEYIKKGHGHVNYANIPSVMYTHPEVAWVGLNEEQLKEQGIKYKVGKFPFIANSRAKTNMDTDGFVKFIADAETQRVLGVHIIGPNAGEMIAEAGLALEYGASTEDISRTCHAHPTLSEAFKEAALATFDKPINF

SEQ ID NO: 7688 - protein, 936 aa, Candida albicans
MLPIKLLIFILGYLLSPTLQQYQQIPPRDYENKNYFLVELNTTNSQKPLIDFISHYRGHYNFEHQLSSLDNHYVFSIDKSHPHNSFLGNHNSNEYNLMKRQLGHEQDYDELISHVESIHLLPMKKLSKRIPVPIEMEDVVFDNRDDTGSDNHEATDEAHQKLIEIAKKLDIHDPEFTTQWHLINLKYPGHDVNVTGLWLENILGQGIVTALVDDGVDAESDDIKQNFNSEGSWDFNNKGKSPLPRLFDDYHGTRCAGEIAAVKNDVCGIGVAWKSQVSGIRILSGPITSSDEAEAMVYGLDTNDIYSCSWGPTDNGKVLSEPDVIVKKAMIKGIQEGRDKKGAIYVFASGNGGRFGDSCNFDGYTNSIYSITVGAIDYKGLHPQYSEACSAVMVVTYSSGSGEHIHTTDIKKKCSATHGGTSAAAPLASGIYSLILSANPNLTWRDVQYISVLSATPINEEDGNYQTTALNRKYSHKYGYGKTDAYKMVHFAKTWVNVKPQAWYYSDVIQVNQTITTTPEQKAPSKRDSPQKIIHSSVNVSEKDLKIMNVERVEHITVKVNIDSTYRGRVGMRIISPTGVISDLATFRVNDASTRGFQNWTFMSVAHWGETGIGEWKVEVFVDDSKGDQVEINFKDWQFRIFGESIDGDKAEVYDITKDYAAIRRELLEKEKQNSKSTTTTSSTTTATTTSGGEGDQKTTTSAENKESTTKVDNSASITTSQTASLTSSNEQHQPTESNSDSDSDTDDENKQEGEEDNDNDNGNKKANSDNTGFYLMSIAVVGFIAVLLVMKFHKTPGSGRRRRRRDGYEFDIIPGEDYSDSDDDEDDSDTRRADEDSFDLGHRNDQRVVSASQQQRQYDRQQDEARDRLFDDFNAESLPDYENDMFKIGDEEEEEEEGQQSAKAPSNSEGNSGTSTKKYKDNEADEDHKDVVGTQ

SEQ ID NO: 7689 - protein, 1884 aa, Candida albicans
MKPEIEQELSHTLLTELLAYQFASPVRWIETQDVFLKQHNTERIIEIGPSPTLAGMANRTIKAKYESYDAALSLQRQVLCYSKDAKEIYYKPDPADLAPKETPKQEESTPSAPAAATPTPAAAAAAAPTPAPASAGPVESIPDEPVKANLLIHVLVAQKLKKPLDAVPMTKAIKDLVNGKSTVQNEILGDLGKEFGSTPEKPEDTPLEELAEQFQDSFSGQLGKTSTSLIGRLMSSKMPGGFSITTARKYLESRFGLGAGRQDSVLLMALTNEPANRLGSEADAKAFFDGIAQKYASSAGISLSSGAASGAGAANSGGAVVDSAALDALTAENKKLAKQQLEVLARYLQVDLNKGAKSFIKEKEASAVLQKELDLWEAEHGEFYAKGIQPTFSALKSRTYDSYWNWARQDVLSMYFDIIFGKLTSVDRETINQCIQIMNRANPTLIKFMQYHIDHCPEYKGETYKLAKRLGQQLIDNCKQVLTEDPVYKDVSRITGPKTKVSAKGNIEYEETQKDSVRKFEQYVYEMAQGGAMTKVSQPTIQEDLARVYKAISKQASKDSKLELQRVYEDLLKVVESSKEIETEQLTKDILQAATVPTTPTEEVDDPCTPSSDDEIASLPDKTSIIQPVSSTIPSQTIPFLHIQKKTKDGWEYNKKLSSLYLDGLESAAINGLTFKDKYVLVTGAGAGSIGAEILQGLISGGAKVIVTTSRFSKKVTEYYQNMYARYGAAGSTLIVVPFNQGSKQDVDALVQYIYDEPKKGGLGWDLDAIIPFAAIPENGNGLDNIDSKSEFAHRIMLTNLLRLLGAVKSKKTTDTRPAQCILPLSPNHGTFGFDGLYSESKISLETLFNRWYSEDWGSKLTVCGAVIGWTRGTGLMSANNIIAEGIEKLGVRTFSQKEMAFNILGLLTPEIVQLCQEEPVSADLNGGLQFIDNLKDFTSKLRTDLLETADIRRAVSIESAIEQKVVNGDNVDANYSKVMVEPRATMKFDFLTLKSYDEIKQIAPELEGMLDLENVVVVTGFAEVGPWGNSRTRWEMEAYGEFSLEGAIEMAWIMGFIKYHNGNLKGKPYSGWVDAKTQTPIDEKDIKSKYEEEILEHSGIRLIEPELFNGYDPKKKQMIQEVVVQHDLEPFECSKETAEQYKHEHGEKCEIFEIEESGEYTVRILKGATLYVPKALRFDRLVAGQIPTGWDARTYGIPEDTISQVDPITLYVLVATVEALLSAGITDPYEFYKYVHVSEVGNCSGSGMGGVSALRGMFKDRYADKPVQNDILQESFINTMSAWVNMLLLSSSGPIKTPVGACATAVESVDIGIETILSGKAKVVLVGGYDDFQEEGSYEFANMNATSNSIEEFKHGRTPKEMSRPTTTTRNGFMEAQGSGIQVIMTADLALKMGVPIHAVLAMTATATDKIGRSVPAPGKGILTTAREHHGNLKYPSPLLNIEYRKRQLNKRLEQIKSWEETELSYLQEEAELAKEEFGDEFSMHEFLKERTEEVYRESKRQVSDAKKQWGNSFYKSDPRIAPLRGALAAFNLTIDDIGVASFHGTSTVANDKNESATINNMMKHLGRSEGNPVFGVFQKYLTGHPKGAAGAWMLNGAIQILESGLVPGNRNADNVDKLLEQYEYVLYPSRSIQTDGIKAVSVTSFGFGQKGAQAVVVHPDYLFAVLDRSTYEEYATKVSARNKKTYRYMHNAITRNTMFVAKDKAPYSDELEQPVYLDPLARVEENKKKLVFSDKTIQSSQSYVGEVAQKTAKALSSLNKSSKGVGVDVELLSAINIDNETFIERNFTGNEVEYCLNTAHPQASFTGTWSAKEAVFKALGVESKGAGASLIDIEITRDVNGAPKVILHGEAKKAAAKAGVKNVNISISHDDFQATAVALSEF

SEQ ID NO: 7690 - protein, 434 aa, Candida albicans
MSADYWNSSQRNQWQLTRFSLLEARRRVLLLERKMIQNGLIKDYPNIIYDYNMRIYLHNLLIKLGRRLNIRQIALATAEIYLTRFLTRVSLKEINVYLLITTCIYVACKIEECPQHIRLILSEARNIWPEYIPHDVTKLAEFEFYLIEEMDSYLLLHHPYKSLMQINEFLSNNYNVFGFKLTVEELQNAWSLINDSYITDLHLLLPPHTIAVAAIYITVVLKKNLSRVRQGNNNDNNININTMHISTGSSTNPININNNNNTNTSNNNGTTSTTTTTTAQETQVLGQDDNTEMNIDDLMNLTKSSNNSQDKSDDKMDIDNPLQSQVNLSQIQNQTQHQHQESTHNNTSSTNTGRNGINGQISQSNQELNNFDLDILDEDTIKINKFMNFLEHSHINLDEVVEAVQDMMNMYVLWNRYNEQGVKKALQVMLLNRI

SEQ ID NO: 7691 - protein, 809 aa, Candida albicans
MAYNSNNNSSNYNYNFNRHNSIGGNWHLPPPPPPPTQLTSSGAYHHHQQQQHPQQHLSPNHPNGQDILSSSDSQFSSQLKQNQIPGFRNPWFSQQQNSTPNMLSSSSSASSSLSQSPTKSHQIPLLQQHQPPLLNKRLSFTNNLPITYEHESSSNSSSNNNSSSNGNGNNNNNDNNTNVPPYIHPPTRADNPFNHYFATQEVTLGSNDRRMSAAVDGTHYNPYGFNQQLNAYPSGPAGIAGTQYLNNPNLGPSVNANRRSSVGVLPNYYRQQQQQQVQDQSTAAAAAAAAAAAYYLPPARLGRSASIVQYQQYQQALQNQRITKHKNPAPKARKIYNKLDLTPKFHQQPKYRRCSINSIHISPVNALSIYLTESYSLCQPRKFQYSKSTNPKRVLTKPSEPKYNNGYDNEDSDYILYVNDVLGSEEGKKYMVLDLLGSGTFGQVVKCQNLNNQTVCAVKVIKSKPAYMNQSLTEVRLLEFLNANSDGKNFIRLLDTFMHKEHLCLVFEILASNLYELIKQNQFQGLNMKLVKLLTKQLLDSMAQLKNFQMIHCDLKPENILLCQPDKPNIKVIDFGSACFTRNTIYTYIQSRFYRSPEVILGLPYTESIDMWSLGCIVGELFLGLPMFPGTSEYNQIFKIVDMLGPPPRHMIEVGKNSFNFFKKKVNTTTTTINNNNNNTSETKPIYELKSFDEYCQFLEYKRQKQEGATSTTNNNTNSSSSSNHHNNNHKKEQPNKNYFKHKLLKDIIINYKLPSKKMTNSMIEKEYHDRLLLIDFLTKVLNLNPLERLTPQEALKHPFIIDVNTTDL

SEQ ID NO: 7692 - protein, 194 aa, Candida albicans
MLKIRQLQKKKQEEAERLAKSQSTTPTPGDSTSTSHQRVSPAQIRVQKDISELDLPSSIRVTFPNPNDLFNFNLQLIPQAGYYKNGKFEFKIEINSNFPIDPPKIKCLQKIYHPNIDLQGNICLNILREDWSPVLSLTGVFMGLNFLFLDPNATDPLNKDAANVLVKNRKQFEINVFNSMRGGYLDSVYYDRVI

SEQ ID NO: 7693 - protein, 438 aa, Candida albicans
MQLSFILTSSVFILLLEFVKASVISNPFKPNGNLKFKRGGGHNVAWDYDNNVIRGVNLGGWFVLEPYMTPSLFEPFQNGNDQSGVPVDEYHWTQTLGKEAASRILQKHWSTWITEQDFKQISNLGLNFVRIPIGYWAFQLLDNDPYVQGQVQYLEKALGWARKNNIRVWIDLHGAPGSQNGFDNSGLRDSYNFQNGDNTQVTLNVLNTIFKKYGGNEYSDVVIGIELLNEPLGPVLNMDKLKQFFLDGYNSLRQTGSVTPVIIHDAFQVFGYWNNFLTVAEGQWNVVVDHHHYQVFSGGELSRNINDHISVACNWGWDAKKESHWNVAGEWSAALTDCAKWLNGVNRGARYEGAYDNAPYIGSCQPLLDISQWSDEHKTDTRRYIEAQLDAFEYTGGWVFWSWKTENAPEWSFQTLTYNGLFPQPVTDRQFPNQCGFH

SEQ ID NO: 7694 - protein, 452 aa, Candida albicans
MKFSIYLIISLFSSFSHAIWLDTNNETTIREDCNIIAKGLLDYYEGTKYGGVIGMFSWPYYWWEAGGAWGSLIDYTFYFDNDTLVPLITDALLYQTGDDDNYIPLNQSTTEGNDDQAFWGIAVMAAAERNFTNPKDPTKAWLTLAQAVFNTMQARWDTETCNGGLRWQIFQWNSGYDYKNSVSNGALFHLAARLARYTGNDSYVVWAERVWDWMYGVGLLTEQNWWFVYDGVKIANNCSNITKYQWSYNQGLMLAGCAYLYNYTEEEKWYNYTIKLLESAQVFFKNISGSMVMYEAACQPSNSCNNDQRSFKAYFSRFLGLTSVLVPQTEPVITKWLVDSANGAAGSCSGGSDGVTCGLSWTDWSQGWDGKWGLGEQMSALEVMQNLMVHKRPAPYTADTGGSSIGNPAAGYGKLTSDATPLSIDGGDKAGAGIITAIIGASLVGSCVWLIL

SEQ ID NO: 7695 - protein, 630 aa, Candida albicans
MILKIVFKLTSGPPNTNADGTDNGGGGGEEKSFKLTFTNRPTMNTIKDSLQTIVARSRTRVEGTSTPTPAPAPASTFGSAPQADSTRDSTSSSTPIPPTTSGTSTSSSLLSLAASQSLSDANLLKNFELQQKLLLEDRQLRDVFTKSVMQFKLSPQVFWSSRLNQLRTFALTISQHKGPYNVLSTIKPVATSDNQVNVNVTRDTINEIFTIYPIIKKAFDDLVPNKFNEGEFWSRFFNSKLFRRLRGDKISISNSRGDVVLDKYLYIDQNYQEKLQKSSTLENNGSGSGGGGGGGGSGNSEQGIQTLESPHVKKFLDLMGNQQDNSQKLGNRPDFTMRYDEDTNLDDDNKKPTLGNENEMIILMKNMNRLSSKMMSMSSTNGPEKPSETTIDGLSAAELNEYEEELDLHDLNDSENLQYIKLNINTDIAKGTKLDSYEGSNTNNKISQDELHKYLQSQTFQGQIELTETYTCKSEEIEKTSMEIAMLIKQNFRTFKLINKENDIAGTNIVPNSLIQEIITYNITIVEFLSHFWKIFLHGNNPGQLKKIFTSLKNCQSGLIELENKAIDQFKSMDILQKNQKLQDKVLKDFASCLQPMKIALDKACNEYVEAVKKAKPELNENGKRPLPEE

SEQ ID NO: 7696 - protein, 431 aa, Candida albicans
MAEKIRYYLEQSVPELEDLKIKGLFDKNEITMVMRRRTDFEHRITGRGCKPKDFLRYTEFETNLEKLRKKRYNRLSKVGMIETKPSISDWAGTRRIMFIFDRATRRYPGETELWSQYLKFAKSNGAIKVIYKVYSRLLQLQPRNINAWLSAAKYEFETNGNAKGARVLFQRGLRLNSESLELWLNYAQFELTYISKLLARRKVLGLITEKQQREAMETEEAKLEQEIKKSDDNGDELTGDKIELPSTEEIKDQLNLLPEADMNMLGNPETNPALKGDVVLTIFDLCIPALLESIPKYSTAIKPDDKVFEIVEKFLALFDKFPDLNRDYLYLHVLNYIQREYANDLRTLLTDITLPIRAVTVNSDNLAEALQLAVNKFIAYKRKLQDGAERDMLTNMFINQLNTQFFNDKEHPSQKIDALLKAIIKKCRTVN

SEQ ID NO: 7697 - protein, 274 aa, Candida albicans
MKDYTITVLGCGVMGTAVTSAILKSKFDPYPKKIIACTIPSQEQSLKETFADQPLVHVSAGVENNNKAVTEADVIILGCKPYMYEGIYEEVKESLTGKQLLISLLAGTTIKELSIFTPYVAKVMTNTPARFGCGTAAIAFAPEVGEESQELVMKLIDTVGMTVKIPEKNMDIATSLIGSGPAFCLLMMESMIDGAVRMGMPYDVASVAAAKVMEGTARMVLETGEHPAALKSKVCTPGGTTIGGLLTMEDRGLRSAIARGVEEAANISASFAKK

SEQ ID NO: 7698 - protein, 341 aa, Candida albicans
MVHQAEFLPSTGNSISSVLQGGYNHPLSREWQQERQLTKNMFIFPLFITDSPDEETAIPTLPNIKRFGVNKLIPYVKNLVEKGLRAVILFGVPLKPGVKDALGTAADDPEGPVITAIKKLRENFPDLFIMCDVCLCEYTDHGHCGILNEDGSLIREESVQRIAAVAVNYAKAGANSVAPSDMMDGRIKDIKTGLMNAGLANKCLVMSYAAKFSGNLYGPFRDAAGSAPSHGDRKAYQLPPGGAGLARRALMRDMSEGADAVIVKPSTFYLDIVSDAAKLCRDYPICAYHVSGEYAMLHAAADKGVVDLKGIAFEAHQGFLRAGARLIISYFTPEFLEWLQV

SEQ ID NO: 7699 - protein, 530 aa, Candida albicans
MGIKKMFQKKEPTEQEIREELSRVGISTRSNNTRQEKFGAFKNYAQERANMKPQLGPVGGNPYANINPGTNNNNNNPYANDNGNNSNGNPNNNSNSNNGGNPYGGGATNNNPYGGSGGNGRGSSPSPYASTTSTTTRSSNPYGNNNGSRSSQNTSSPYAKSTNNSSYSNSPYSGSTVNNGNRGGHSNNSNSSAGGNPYATGGRSSQSQNSRDNVYTVPATRTSTRQTQGYGGGDTDSTLDLNAIPSHQMFDNKKPIKRNQQSSQQPANDYNLDLNDEYGEEEDLNLDISEVPEEQQQINSEDEEVEAIKQDIKFVKQESVQSTRNTLRMAQEADASGTNTLGMLGSQSERLYNAEQNLLLAETQTQIADEKVKELKRLNRSIFIPANGNPFNKKSRLRQQEERIKNQKLQEKYIRENNRQEMFASEQRIKQGITNNSTNNDVYNKYQDEKNLSAAKRYQFENDSEDDDMEKEIASNLNQIDQYAKKLKGLANTMGTEVDNQNTRLKKIEESADKLDINVHMNTTRLNNIR

SEQ ID NO: 7700 - protein, 330 aa, Candida albicans
MSEMLVSDKARHLYTKMREYPTSKLFDQDELQTLFDIKKGSELMEYLQELVNGKYVKISKMGDQLKFQTVAEEEAKKVSSMSDDEAMIYSYIEASGREGIWTKTIKAKTNLHQHIVQKCLKNLENNRYIKSIKSVKHPTRKIYMLYNLQPSIDVTGGPWFTDSELDTEFIETLLEVCWRFIVGKTMYIKDEEADNEDINPLQTTYHNHHPGVNLDQLVEFINNSNITSVELGINDIRSLCDVLIYDDRIEEVGGNQENSGIFKATWQSIIDKGNTILQNNYQDLKNVVSEDCFNYLQQNQSDFSVFQYKSTIQDLQDESDLVYLDSWINE

SEQ ID NO: 7701 - protein, 589 aa, Candida albicans
MSIYKSGWVSPLKALETLSLTLSRGMKRAASPRAEQPPHSKKVVDAKGFRVRQQNIDKHKITSESTATQKSIHEEETEGANYVIEGRLRRVTPYFYTYLTYCKLRWQDRKLIDVFIDEFRDRTPDAYRMAVEEGLVKVNSQVANLETILRNGDLISHRSYRREPPVSSRDIKIVFEDDDLLVIDKPGGIPVHPTGRYRYNTVTKIFEHEKGKIVHPCNRLDRLTSGLMFLGKSSKGANNMMSQIRDRNVTKEYIARVKGEFPLDRIIVDKPLSTKSPKLTLNVVDMENGKEAKTEFQRVSYDPITNTSVVKCHPLTGRTHQIRVHLQFLGYPIANDPIYSSEFVWGKNLGENGEADLDQVMERLDLIGKSRAATSWIHPEGDGEVALDEICPITGLPLYSDPGSNDLDLWLHAYKYEADDKSWSYKTEYPEWALEPSRKFMEMAIEEAEKCGETQTQFNVGCVLVHNGQVISTGHSRELPGNTHAEQCALEKYFSKNGGEREVPAGTEIFTSMEPCSLRLSGNLPCVDRILQTKNIKTCFVGVLEPDIFVKNNSSYKKLLDHGVEYIHIPGYEETCLEIAKRGHEHIQE

SEQ ID NO: 7702 - protein, 493 aa, Candida albicans
MSSEEILQGVEDIHLNTSSDSDSEYELEEETTTKSLPSSSRTITEKEDIVTKYADKIKTDPIKKGPKITKDRANRATVEQVLDPRTLRFLAKIINKGIISRINGCISTGKEANVYHGTSDDPDNDREYAVKIYKTSILVFKDRERYVDGEFRFRNTKNQSNPRKMVKVWAEKEFRNLKRIYQNGIPCPEPIELKSHVLVMEYLTKGDGQPSPKLKDYSFKDVQDIVNYYHKMLFYMRRLYQECRLVHADLSEYNSIVHKDNLYIIDVSQSVEPEHPMALDFLRMDIKNVNDFFSRSKINVYPERLIFRFITSEGHLLGIADNSDQELEKYLETLPLKTEDDQEVEDEIFRSLHLVRSLNNLDETDFQKFSEGKVDTMKDLVAMKEGEVASPGLQTANGNEVDSSEDEDNEGVSEEEEESSSEDDDDEEEEVDGISEKEWVEREQNAPRGKKYEDKDEKKARKEAAKLAKQEKRKTKMKKHIKKKIINKRKTGK

SEQ ID NO: 7703 - protein, 849 aa, Candida albicans
MARNSIKKSPVVKKKDTPIVRKRKPIQQEAEEDSNDEESEDELNVEGLIDASDDEDEEEEQEQEEQPQEEENNSDDDDDDDDDDDDNNSEADSEEELNQLLGEEEEEDPSDYNSDEFSDEPKDDDLSRINIKSLSVSDPSIQKNSISKFSDGSIRILKPEIEPKYDSDDSDAENFNTIGNIPISAYDEMPHIGYDINGKRIMRPAKGSALDQLLESIDLPEGWTGLLDQNTGTSLKLTDEELELIRKIQQQENTDENINPYEPLIDWFTKDEEIMPVTAVPEPKRRFVPSKHEAKRVMKIVKAIREGRIIPPNKVKQQLTEEEEEDQFNFDLWQDEIEISDHIMNLRAPKLPPPTNEESYNPPEEYLLTEEEKSKWLQESPIDRERNFLPQKYNSLRQVPGYQDSVRERFERSLDLYLAPRVRHNKLNIDPDSLIPDLPSPKDLRPFPIRCSTIYEGHTGKIRTISIDPQGLWLATGSDDGSVRIWEILTGRQVYKIQLINKEINNEDHIECLEWNPDSSCGILAVCVGENIYLIVPPIFGFDIENSGKLRIESGWGYDTFGNKKKDLKISSQKEEDNKESDNEDEDEEEDNDDDDDDDEPETSSTVEPKKEVAKWYPPNTEQASMGISAIIQCRKTIKKLSWHRKGDYFVTVSPDSKNTAVLIHQISKHLSQSPFKKSKGIIMDAKFHPFKPQLFVASQRQIKIYDLAQQVLLKKLMPGVRLLSTIDIHPRGDNLIAGSYDKRVLWHDLNLSATPYKTLRYHEKAVRSIKFHKGNLPLFASASDDGNIHIFHGTVYDDLMTNPLLVPLKKLNGHKIINQIGILDLIWHPKEPWLFSAGADGTARLWTT

SEQ ID NO: 7704 - protein, 444 aa, Candida albicans
MVKKVLLLGSGFVAKPTVDILSEQPDIEVTVACRTLSKAKELAGDKAQAISLDVTDAAQLDEQVAKHDLVISLIPYTFHVNVVKSAIKNKKNVVTTSYINPQLKALEKEIEEAGITVMNEIGLDPGIDHLYAVKTIEEVHKAGGKIVSFLSYCGGLPAPENSDNPLGYKFSWSSRGVLLALRNQAKYWLDGKVIDISSEDLMASAKPYFIYPGYALVCYPNRDSTTYKELYNIPEAQTVIRGTLRFQGFPEFIKVFVDLGFLKDEPMEIFSKPGPWNKALAELVGAKSSSEQDIIDKINQLTKFKSPEDQERILAGFRWLGLFSENQITPRGNPLDTLCATLEELMQYEKGERDLVILQHKFGIEWANGTKETRTSTLVDYGDPNGYSSMAKLVGVPCAVATKQILSGELSKKGLLAPMSSDINDSIMKELKDKYDIYLVEKTI

SEQ ID NO: 7705 - protein, 405 aa, Candida albicans
MTSMEPADTSIRSLNDINLQELANKQHQRNIYAQGSPTLEDSITSNGNDINNPNNNINKTNNNSNSSLSLTKKTSRHINKDTTTKGKYTLNDFQILRTLGTGSFGRVHLTRSIHNGRFYAMKVLKKQRVVQMKQIEHTNDERRMLKLAQHPFIIRMWGTFQDCHNLFMIMDYIEGGELFSLLRKSQRFPTPVAKFYAAEVFLAIEYLHSLDIIYRDLKPENILLDKNGHIKLTDFGFAKEVQDVTYTLCGTPDYIAPEVVATKPYNKSVDWWSFGILIFEMLTGYTPFYDPTPMKTYENILNGSITYPDYLPPDILDLLQKLIVKDLTQRLGNLQGGSDDVKNHPWFKEVIWERLLSRDIETPYEPPITSGVGDTSQFDRYPEDKDLDYGISGVEDPYRDQFQDF

SEQ ID NO: 7706 - protein, 731 aa, Candida albicans
MLNSISWIYIFYLFITSILAFDFGLGPTYYKHGDKVDLLVNKIESDTTQLPFAYHSLPFVCRPINGAKPVHLSLGELLKGDRIWQSGYQLEFGVDVPCNRLCDMVLSTHAIKRASDLIKDGYVVHWTVDGLPEATTFESTNHRNKYYAAGFPLGFVSPSDDEQLSYIYNHVMLVIRYHREKETASKNGGDPKYTIVGFEVYPKSVNDEHCPGSSKNYQNLPLFYSVDDKNQLIESKTTIAYTYSVYWREDNSIDYDSRWELYYENETNGAHVHIHWISFINSIILIFLASLIVMIVLIKVLKKDIANNGNNDNISGNTVLPLIKNDISIDIDGDSSSSSVTNNIGSGWKNLINQVNQIPQYPIFLITLVSAGIQIVIAIMGVISILMINSIGTKNNFFNSHQGAFFSISIFCISISGSISSYFGILLHKYFYHPHPHLHQTSGNNNNHNNNNNNLGKTYDQLTIIKLSLLFSAALPAFLFLIIFILNFFVWAKESSAALPFGTIVVFLLIFILIQCPLGIIGGNYANYANYANYANYQKSLSMPQKLFFASMKTPPSSPLYEKQFQFHSKNKPSNDSLLTKFISYGKTILIYGLIPFGIVYVELLFIFNSIWLEKTTFYYMYGFLFITTLMLFIIIIESAIVAIYISLVVYNKSNWIWLSFQVGSSIGWYIYGYSIYYFLRILNVDDFVSGLLYFVYMALASLMIGIASGSIGVLTGLIFIRKIYGAIKVD

SEQ ID NO: 7707 - protein, 283 aa, Candida albicans
MPPKKNVTYKGKILFLHGYTQSASLFYAKTSALRKKLIKLGYKCVYLNGPYVLTPADLPTTDSLSKFGSATTDTDDVTYRAWWVKKDKTNDAINLDESIATIKNYIQKGEIIADNDLKVEEETEEEKKLPIVGILGFSQGAAFGGVVAHKFHELFETDPLKFVVLYSGFKLDTSKKAGNDKYDEYYPHTEEEVKSGGFKYLHVLGELDTVVAEDRGYSLYEHTKSSSDILKHPGGHFVPNSKMYVDNVANWIEAHQNGSQSKSEAPEDDIDSLLDMMDNFGKA

SEQ ID NO: 7708 - protein, 270 aa, Candida albicans
MDFSNLLSNEINKKRKKVAANGRKRSKVSTTAKEPAVVVEHASETINPQPTTTNDEPSEEQLDTKLSQFGELDTSLSKSEKARKLQLLLQQQIKNTKYKAWLDQEAPLYQDPEKQLITLDLITDITNKQDEVYLKLRVYIKQLIKQWQECDNDDQELLMETKKSIVKLLYKLRSHKLSLDMLISLSTIVYYIQQNEFNKANESYMKLSIGNVCWPIGVVNVGIHARSAASKITGASNVSNIMLSESTRRWIISIKRLISFKERVYNNARD

SEQ ID NO: 7709 - protein, 153 aa, Candida albicans
MAGRNAINKPKIKLHAQSHAKSLGRKRAARRTTATRSSTSRYAAKGTTAPRPTDSKAVALYTGNAPQPTSTMTTQTLSNKRAKKIARNQRYLAANKLKENETAMEVDNTSEQEKQTKLDQIKKALWSVIENHQKNGYSVVSDPEGTTLGIQSF

SEQ ID NO: 7710 - protein, 488 aa, Candida albicans
MSDKQINQFKSMNINFRDKLREAYLNNKHEFDDQDNKIIQPILNDVLYSNDNGVNGNNNLRELIKKKWDGLSKDIKDINNSRFDIPSTNGNDVEDGINNKVHELDGEEGENEMNGKYENRNIHHQNKTTTNNNSIKSRIPTIQSNGNKSQVRFQQQQPSKNDDDDEINKLKKIIESLNKKIKHQIIERKDIIEEFQTKEIRMMKNHQNEINKLIKKYETKLKNEQQERQTSNNNDDDDGIVNELRISIDKLNNEIDNKNLQILQFTNQLTNLKDENFHLKQENNRLRYDRNNNNNNNDNNVSPSKETNQSAHSESQELRKMIDNLTKENIELRSQFNQLKNTNAGAGNGSFQYGSVQGDDSDDSDDSDDDEVEEEEQANEARSRYNENGVTRVSKSPDRLQYDTQQILKKEYDKVSRIPSSLSPPPQLQTVDNNDIPTPTPTTSDVMRTAANDEAELEKSNSMTIDLLKVKKEEEIDTTQKMLRKHWH

SEQ ID NO: 7711 - protein, 313 aa, Candida albicans
MSSSQPQMSFAQTYILASKVRSKLTREAQSPKSSLRNLVVQANMLDNIMDYISDETKRRTSEKLTSKTNTQKSSSGYLSPESSMVQFAPTPVRQAYKTSITEYEIDSDSSDDDEEEEEEDHEDDNEDDYFYEDGQNDYDDLDDYEDSVVMEQDELAAIKGVYYEEDQEEEEEDNLSETSSIYSNSSDSDLDSDSDEYYIYSDSDEIIEENNIAIEATIPRNFKSLSIVPPPSSTTSSTTSTTQSPLPSIVRSNSTPITITSLHTIDEQQEIEEEKQPELLLHENNQTIDWKLKNHNHPQSLYKNQNISLDQFF

SEQ ID NO: 7712 - protein, 126 aa, Candida albicans
MDNMVSISENFTNSFPRNITALNSQKRGMPLQETSPNIINKSPIKQQPVSVISSKKRLAGSPVSLQRESVRLKVNKPESTPTDFDSTFGTTEAEIELNYRNWLLERRLQQANEMKDFLILEQEVSI

SEQ ID NO: 7713 - protein, 100 aa, Candida albicans
MIRLFPKQIRLLSYLTKTTINPVDFQLKIPEQFTPKSLLVLSTPTNLPQVIEDSIKLSQKQDLQLVVAGVDTVVPYSHRNGVSELWLDEPINIGDSALSE

SEQ ID NO: 7714 - protein, 213 aa, Candida albicans
MPIHNDPENDNELINQSIPVTTIARLFKELSFKDPQTRITLSTLELSSEYIKLFINEAIIRANEERIDEGDTLVQIDGIDNVTSTAKNNQETQYPTIDEIEDSMRIDDDDDSNNINIGTVNEDDDDELIDDDYFQDESDTQRQLRQAMDAVNDTTRNNNHNNNRNRTTTTTTNNNNNNNNNNNNNNNTDNNHADNILDSRHLAKIAGILTLDF

SEQ ID NO: 7715 - protein, 520 aa, Candida albicans
MSTPIEFKSSNSVTKDDHLYTKFTYENSVVEKDANGKFIVTPTASDYEFKVDLKVPKVGLLLVGIGGNNGTTLLGATLANKHNISFENKEGVVKPNYYGSVTQASTVKIGVDKETGEDVYVPFNSIVPMVNPNDLVVDGWDISGLPLDQAMKRAKVLDVTLQKQLYPYLENKKPLESIYYPDFIALNQSERANNVFNQVNGEVKTDNKWADVEKIRKDIRDFKAKNELDKVIILWTANTERYADVLPNVNDTADNLIKSIKESHEEIAPSTVFAVASILEKVPYINGSPQNTFVPGVIELAEKYDSFIGGDDFKSGQTKIKSVLAQFLVDAGIKPLSIASYNHLGNNDGYNLSSPKQFRSKEISKQSVVDDIIESNELLYNKESGDKVDHCIVIKYLPAVGDSKVAMDEYYSELMLGGHNKISIHNVCEDSLLATPLIIDLVVATEFATRVQVKGPGKSDYDELYPVASLLSYWLKAPLARPGFKPINGLNKQRQQLVNLLSVLVGLPIDNELRFERILK

SEQ ID NO: 7716 - protein, 409 aa, Candida albicans
MTYKDVTEEQLQTNPYVKLVPGQTIVEIPEYTLECGETLHNFPVAYKTWGKLNETADNALVICHALSGSSDVDDWWGELLGTDRAFDPSRYLIICINFLGSPYGSCSPVTIDKSTGKPYGPSFPLVTFKDDVGIQRLILDSLNVKRLAAVVGGSMGGMLALEYSAIYNNTGYVQKVVALATAARTSAWCISWNETQRQCIFSDPFYDDGYYYETGNKPDSGLSAARMAALLTYRSRNSFESRFGRKLGPRSPNDGGASPRTKHEEHSLLHNDGSKLINGAPVNEKYPPTYFSAQSYMRYNGSKFINRFDANCYIAISRKLDTNDLSRGRVNAPNDANGDPLVHVLKDLSTPTLVIGIESDHLFTITEQKLLADNIPNAIFETLDSEEGHDAFLLEFEKINSFITSFLNN

SEQ ID NO: 7717 - protein, 509 aa, Candida albicans
MITPFFTISQDDEFIYIDVKISHIRFSAPNIEMTVENELFVFSLPPYYLRLRFPYPCIEDDRSHAEYDSKTECVKIKIPKETKGQFFPDLDLTAKLLARTNEPKVGDIGQANSSKPLIEELDVDNTNPGAQAERDLAEREQFNWEVKQDVPTNPDLTSTATDNSDVNLKPIKYGFNNQYDNIVGVSVANGNDINELADPENTPENARIIERLIKENIKFDPEMYAADYIMKVHPEQDDENKNFKELIDWKNPLIQKFLKWYKADKQLPEAERTSIMPVEFSKEEQEKMMNLPRKSYLIDDSYKPEILLTTICLLFAYHFDLRENEGDHNIESAWTIGKIVPQFSFLDSKIVIENNYNVLRAAIITCIRRALTYPYHRNFDMITKVWDDVYYNLRGGKRLVLKALLDLKELFRFHDIYYVYDKIWLEDLCAYLISDNVSEATIRNLAHDIQKEVSSIKKADITFEKANLESAETVDDNEGNGEDSELIALSLPEIEVMAEEMFQQVQSQQ

SEQ ID NO: 7718 - protein, 508 aa, Candida albicans
MNFLIRNTIIGQTCNSKQIFYKHARTLAIKSSLTSSIRYPLQPSLHNNLNANTINFPLVKSFIRHNSSKPQKSLSSPEQIKEKALETLEKSPATELVHKTAEEPKKSIWEKVKHEAKHYWDGTKLLGYEVKVSTKLLLKLMAGYELSRRESNQLQRTIVDVVRLVPFAMFVIIPFAELLLPIALKIFPNLLPSTYESTVDRQKKLAKLKKTRKAASEFIKNTMAESGGLKLSKKITDQERENFVQFFHCISMGKNPDRQQLIQVARLFKNDQVLDNLSRPQLVAMCNYMNLRPFGTDSILRYQIRHRLLNIIKDDKVIDYEGVDSLSILELQLACSQRGIKTSDKSPARLRDDLETWLDLRLRQKIPSTLLILSSAYTYGDKGNSIESYYDALLAVLSSIPDEVYNVAKLELSDDSKLKLNILKEQEEMIEEENEREKDTVTKVKDKIKLDDYEETASEGIKIEADDPVEGKNGNETQKKEESSSAKESKQDKVSASKEPTKKEEVKV

SEQ ID NO: 7719 - protein, 491 aa, Candida albicans
MQEGVQFAAATNLKSRNKQGNGTAAESPSLSPQISDHSNDAGNKSNNHYKERLSPFRYKLRSLILPLIRQETIYLAKMQSFLRCSVFDFYFAWTANLASHTFYVLMLPPPIWFGGSYLTRDLVYVLGLGIYLTGFLKDFFCLPRPRSPPLHRITMSSYTTQEYGFPSSHSANATGVSLLLLIKILSLENVSNTTYYSLIVGLSLYYISLIFGRLYCGMHGFLDIIIGGLVGSFVFLFRHYFGLQWDKLLFDNGLGLVASTVIIIAVFVSLIHFHSEPVDDCPCFDDSVAFVGVLIGLDLAHLVAYQTKYFAKMNLTGNPYLIPFDVNRGVLNSVSRFLLGVALVVTWKTLAKPIVFTILPPIYKAVGVYLPRRSYISTAHTQTSTRKIRSTSMSNDSNMGIGDINNFIKGVTDHNKKDEVGPETEIDYYEMLSYSQNQNSDNTTIQTPPKYNSGVFKYRYDVEIVGRLIIYAGISITAVWTFAFASDYLNL

SEQ ID NO: 7720 - protein, 567 aa, Candida albicans
MSEENPPQQDQQAPNVSDKPQGDSLITPRETHFHNVFVKYLIMLISALGSVIYTTVLCTGSILNHWFDIVSGREKTVLADIEQRSHGYVPREPYDELSKMKPTSDLQYYLQQLNLDLQEYRVTTCDGYILTLHRIIDPRESEEQRQQRKPVLLQHGLLSCSGTWIVSGKNSLGYYFHEQGYDVWMGNNRSWFIPQHKTLSGSLYNNEQYWDWGVQELAYHDLPALISTVLANKKYFQKLVLLGHSQGGLQSFLMLKNPRLGEIHEKVELFCPLAPAVYPGKLFYTRQFIKFINNRSEFMWLILFGCCAFLRNLCLVRHYIASSWLFGKLSYYMFKYLFGWTGRNWGPYKKVWHFCFIFNMSYASVELMKYYLSKHSDCGFTTLLQPKAAYSSDAHFTENVTDDKKSYFQFDTTWFSGIKVPMIVFIGDEDFLVDGEKVVAHMRKYEPGYREGSNFEAVSIPTYNHLDIVWAEDVIGTIGYTICNKLKQMKARDVQEGLTSESKEQAVTIPEGSSGHHQQQEEVGLNEKIVSVSEDIHDTELTTKVKHNLSADIPLTETRKLTTTEVF

SEQ ID NO: 7721 - protein, 274 aa, Candida albicans
MFNKDPFKVYHDNVNKNIERMKKEKKLLVSSQHIPGDRQHHAHHHKRQPLSNITSARINKPTSTSKTNLLSTRKLLSKFEKPKREIFSNKSYEFEVLNNRGSNNKYTKIENEFDSKNIISKDLTINSFLKKFKEMVNWYKLNKFQFEITNTTSKEGVNNNGYFEQVNKNVITGQIMQNIVKRNYIRPEYSKAKITATHKVNQIGKLSEFMYAVKVSGETSNDDNQTQTEKTVLLMNVGNCEIKVNDRLNLNDLCYLMDYQGGKLGVYLRWHVVK

SEQ ID NO: 7722 - protein, 184 aa, Candida albicans
MDIIKKKYPFWKRLLHKWQSRRDIPFRKKFFIGYDLYGNTYWEFTIDGNMSRLRRKLEPFRKELFEVDYFKTIPPQWLQWLRRTREHSPSLNELIEDQIRQQRIKILAQQADENWKLEKLRLEREQQLKLSNELNKVKLENEKFIEKQKRKEKEALLRVEDPWKQAEESKNENPIESTTIKPRS

SEQ ID NO: 7723 - protein, 119 aa, Candida albicans
MRFKGSRNGLHLMLIGEHFARSINISYVEIYRTQGYLRLSFPLSWGNQLFLHRTFKYIFHYITYIRAKSSIQTSISDTLRSIMETNKNVGNSLCLLLQPKAEESKTKIPPKKTTEKKMN

SEQ ID NO: 7724 - protein, 120 aa, Candida albicans
MVVVVVVVSGLWSIWFVALIVHLFFCSLARFHTQNFIKRPRNVQTKRRYLSLLSKTSKFQVSVIHAEEQCLIRYSRFVFLESIAGFAYRFHLIMNVTTCARVCVVRFQTYLRTIHYITNN

SEQ ID NO: 7725 - protein, 355 aa, Candida albicans
MESTYTESTISKLEDKEETIKFDESELEEQSHRGRDKKRRLSFHSRHSSASRHKIFPIRESVDPGSVLPTVFRTISHNIDIEKNHQPIDSSDDNDDKVDKADAAAKTKFSNYSFNSDDIGDIVEKFKTDLTNGLSASQYQENLKTYGINKQSKPPSGLLKRIFMYFFGGFGLLLLVGGVLCIICWKPLGSPPAVANLVLGVILLVVFLIQAGFNFIQDYSSSKVMESIHSLVASEIMCIRDGQKIKISSQDLVPGDIIIFAPGVKIPADARVISNSPDLSFDRAILTGESKPIMATSFSEEPGTNYLESSCIAMQGTFCVNGTGRGIVVSTGDNTIFGSIAQLSSKPKTGLSPLQ

SEQ ID NO: 7726 - protein, 156 aa, Candida albicans
MLSRVSIRSLPLCTRAFATTSILKQSELTAATDSSGKEIVSGAPRELVTERVVRIYQEAKPATQSGHHNGSHWKLDWDVLGKGNRWENDLMGYQGSADYMQGTIMKFDTKESAIKFAENQGWDHYVQEPKKRHFRKKDYSANFYHSAGPLKHIRTK

SEQ ID NO: 7727 - protein, 552 aa, Candida albicans
MTEPKRRKYNKSRRAISTNSFLVKHPLNVKPGGNSFIASTPILQQQRKDSLGDFCILPDEIIMNIISYITDIPSLLHLSHTSRILYAFLYDEEIWKRVYLQNNEHYDTKPWLGSWRSTVLNIMENKELLQLPDNLLCSDLLYRPIQCSQIDYTKLFHEIIREEEVYHRDAMLGQLDDLPRGRIQRIQESSLSLDEFNANYHSSPFILVNSDSNRWPNWNFDLLFHRFPNVKFRQEAVSWDLQKYSQYLHNNKDENPLYLFDCKSDAMKVLKQEYKVPEIFQDDLFTVFNSKQFNCRPDHAWIIMGSARSGSTFHKDPNSTSAWNAAIQGRKLWVMLPPHMTPPGVGTDEEESEVTSPVSVAEWVISGFFNDSTKIDECLIGITFPGECMYVPSGWWHTVINIDDSIAITQNFVPKSKLAEVLNFLKNKPKQISGFRLKEIKQCLDFIAKDSSDEVLTRYLEAFNSLTIDLEEDCGELQDLPDMPIFEIFKQLLNNNGKGEILNDALEKLQKIELKNYERETGKSKAWEKLTEPTNSGTATFSFNFDEESDSE

SEQ ID NO: 7728 - protein, 588 aa, Candida albicans
MTVTSSSSKQPNFLIIVADDLGFTDLSPFGGEINTPNLNKLATGANGVRLTDFHTASACSPTRSMLLSGTDNHIAGLGQMAEFAQRHPEKFNNQPGYEGYLNDKVVALPEILQDNGYHTFISGKWHLGLKKPYWPNKRGFNKSFTLLPGAGNHYKYITRDSQGNQIPFLPAIYVEDDKELLQPEIELPDDFYSTNYFTDKAIEFIKETPQGKPFFGMITYTAPHWPYQAPQDKIAKYNGVYDNGPEELRQKRLQSAKNLGLIDTNIIPHPIKTIRKSWDELTSLEKLKEIKIMQTYAAMVEILDENIGRLIDHLNSIDELNNTFILFMSDNGAEGMLMEALPLTNQRINKFIDEYYDNSLSNIGNKNSFTYYGDQWAQAATAPHAMYKMWSTEGAIVCPLIIHYPNLFSSSAVSGGGSGDGDGDGDGGKILKEFTTVMDILPTILELANVSHPGETYKGRQVVKPRGKSWVNYLINKTDQVHDENTVTGWELFGQQAIRKGSFKAIYIPKPFGPEKWQLFNIIEDPGEINDLSESSSEYQTILNELLDHWAVYAAETGLIELGSDLFEKEKIEGESNEVVYRTILDNN

SEQ ID NO: 7729 - protein, 721 aa, Candida albicans
MSYKRKSYNPSPLSSPKSNTSLRHDITVTSSEYNNSDEYEVEDNVPTIFLNQLATFPLFKNAPTSFHKQVAANLRLIHYRPQEFIIKKGDLSRSMYWILKGTVSVTSTDGEEVYAELNQGEFFGEIGILYNRPRTATVIAKTRILLGVLTAESLNRVLKNFPLIERRIRDEAQERLAMQDKKNKEPLSIQSFITNLPLFQFLPPDIIHKLALSVEPLVFSPFEYILRKGDTCGDIYFIIEGEVEVLNQEGVIEIPLARLSSGSYFGEMSFLNYLQNKPRIRTATIRSVTYCELMVIKSEYLEKLCDDYPTIIEDMKITAEERKVVKPAQGIFRPNWSINPTRTIPPQKRQRENENENVDYVPFTKRMRMASMKRRRSSALAIVEPLPETILMKIFGYLSLPDLMKLRRVSKRWRKMVTTTAPLEVLDLSQYSTTIDNKALIAITDFAGSRPRVIDISGCFHITDEGFSHMVNEIGIGGRLEVLRMASVWEVTGMAIMDLCFPGEKLEEIDLTNCRKVDDNVVQRLLQKCHLKVLNLSYCKGISDSVVPYFNNLESLDLTRCSGITDAGFAQLPFSPSLRKLSLKQCSYLTDNAIYSIANAARNLEILNLNFCCGLTDGSLSAIAMGFPYLREIDLSFCGSAVSDSSVASLSVLYYLERVLVRGCVRLTRAGLDTLFGGPCPLNFIDISQCRNAHVYPGNFPAPPFQSNLVRVSNKIIYIVV

SEQ ID NO: 7730 - protein, 468 aa, Candida albicans
MRGIAVFLALISLIFASPLTVKSPLVDDFYTAPDGYESAKLGEILKLRKTPSKLSSMFFEIDIKNSWQLLVRSEDSFGNATAIVTTVIEPYNADPSKVLSYQTFEDSANIECSPSYGMQYGAPWSTVATQIDMALMVPMLKQGYYVVSPDYEGPKSTFTVGRQSGKATLDSIRAILKSNKFTGIKSDAKVAMWGYSGGSLASGWAAALQPKYAPELKKNLIGAALGGFVTNITATAEATDGTLFAGLVPNALSGLANEYPEFKEILYQKVSKAATDNLRQGTEHCIGGAILYFAEDQYFTGDDRAFPGGYGLLKEEVVNKTISENNLMQMDKDYLPDIPIFVYHGALDSIVPISNVHVTYKNWCDWGINSFEFSEDLLNGHITETIVGAPAAITWLEARFDGEPVVKGCKKTSRITNFSYPNISDSTSSIFEGILNSVTGSELGPGVTSDNITLDGLTGFLGNFIDLK

SEQ ID NO: 7731 - protein, 396 aa, Candida albicans
MSVALATPIKDFIELKWSDTAISKYHNIWLRDNCHCEKCHYSLTKQRLLNSATINPDIKPKSIDLKQDGLNIIWDQEDHESKYDFNWLRLHSYQPRLIPIDEKLKDGKKLLKREFWQVKEIEKNLPTVDYNKIMESTDNNNENAIKDWVLKIWKHGFCLIDNVPVTPEDTEKLCEKLNYIRPTHYGGFWDFTSDLAKADTAYTNFDISSHTDGTYWSDTPGLQLFHLLYHDGTGGTTSLVDAFKCAEILKQKYPESYEIFCRIPVPAHSAGEEKVCIQPDEYNPIFKLDDQGQLLQVRWNQSDRSTMDNWENPETDIPRFYQAIRNWVEIITSPENEMWYQMKPGQCLIFDNWRVFHSRSEFTGKRRLCGAYFERDDFVSRLKLLVLGRQAVLDAI

SEQ ID NO: 7732 - protein, 489 aa, Candida albicans
MSKSTFIVNGCQKLLTFQSVPLTTTSETGFADPGFEAYSTENIDIDEKIRNNPYSQIDCICLLTPIWNHDQLKKLQLYYDVHGSTTLSHAYKYFSLAISKLMYTRRSSNVASCVVKSHVQTRYKILDINGYKEMSLADLIKSISSLPSDDKRLKNLLLRNYLQFNLIYLTVQSGIEIVDDLVGCVLRQERFVEKMNTTLNWLRSPFIYQTLSESANRYVNFFHMLTSSDLKRMLVPTLDIDLMWHTHQLWNYGYFKDCLESPCHTGIDHDDTVDENKLDDGYEYTCKMYRKLFKQEYSVCYCHPCVVRRMAAASKFSILLKSGNKQSQPEEPAIINNPLFSKDEGFSHISTHNSIKLPTSRAESKRKKSITASMLEKDRNNSHYYYYHNSSMFVMAPGAPVDSANSELYSNTLCCSIANSTSSCGKCGGKCIGGSGCGNGCGSTGGCVSCGGSSSGGGGGGCGSSSGGGGGGCGGGGGGCGGGGGGGGI

SEQ ID NO: 7733 - protein, 363 aa, Candida albicans
MTRETDPLLKNRQQPQPQPLVKPLFKKLLTIIIPLSLIIISSYYIMTHHHHHHHQNDPNNTDGPILTLRLYTNNIRFDNKNYPDKYEQPWEIRKFQSINSMQFNTFQGNGNIICLQEVLHNQLIDILQGLNDIQEWNYYGVGRTDGEKSGEFAPILYKDQDFKIIENSTFWLSPTPHVPSKGWDAALERIVTMVTFQSRLNPEIKFNIFNTHYDHRGVEARRKSSQLIVDKMKNYNDYPSFLCGDFNTEPNDEPYHILTKAGFKDGKILIDKKSAYGFETTFTGFDINNEPISRIDYIWSPSFTRTLSNSENDTNQDSDDDNDNDKSYEVTLKQFGILSNWFNGHHFSDHRPVVSTYELRKKK

SEQ ID NO: 7734 - protein, 163 aa, Candida albicans
MSIAQEFEKANTHYSSNFTKRDLPLPPARKVAVVICMDARIDPAASLGLTEGDAHVIRNAGGRASDALRSVIISQRLLGTREIVVVHHTDCGMLTFSDNDLRGIVAKETGHNVDHFAFLPFGDLEKSVKDDVEFFKRNPLVLDVPVTGYIYDVKSGAINKVDS

SEQ ID NO: 7735 - protein, 816 aa, Candida albicans
MAVELINWQFRQISNHAESPLIPNQWYDTKNFTSHQIHTDLLEANIIPDPFIDDNEIHVQWISELNWQYRCIFDAPGNSNSNASLILEGIDTFANIKLNNKTILTTDNYFHKHVIPIIMNDNNELVITFNSSLRIGQELEQEHGKLPVWNGDSSRVYVRKPQFQYGWDWGPNLNTCGFESIKLITDEDYVKDFFIGYNLNQELDIAELSIEIEYLFDKSPENIEIEIKDDTGIVVDRIVPTIPVTNYNITNVKLWYPINQGKQSLYQFSLIINGICKTTQKVGFRKIELVQVNDKYGKSFYFKINNIPIQIWGTNWIPAHSFQSRLTKLDYQQWINLIIHGGYNLIRIWGGGQYEKDILYSLCDEAGILIWQDFMFACGIYPETIIESVTQEVEDQLIRLRQHCSIIIYAGNNEDYQIAESINLDTNNSTQFPAKNIYEYIIPDKINKLCNFTPYHYGSPYSDTSHKSSDPTIGDLHQWNVWHGTHEPYQNWPELSGRFVSEFGMLSIPSLQTLTKYINESQLSINSTLLNFHTKAAGGIENLDNYLWDNFLKPESLDISHYIYLTQLLQSEAMSLAYRYWRRNWENYKTGGIIMWQLNDCWPSISWSAIDFLKIPKLVYYGVKREIQQVGIACRRYQIKQQTYKQQNVFEVKNCLDIWGFGEFLDIGVKIEFYTEYGDLYFSKSIKNLVFLNNQVNMVAEKLCFDNINDNTIIYLKLIENDKIIARSSDWPQPLKKLPWNKLSTNLTIEYLGQGDFQISTTKPVKRLELYFDYTHNYLFDDNGIDLFPDDPQIIHINNFDELDVEKIRYRHLGSI

SEQ ID NO: 7736 - protein, 572 aa, Candida albicans
MNFYVFEESTRQCSIPSSTHNICSFIQKQCDTNYFKISELYYCYLTSSLPSLLLSSLLILVLLVVILISLSILVSNYLFQNLHNLTNVLGLNNQILSFILIPLTNSLPDILNYYIALDSGSTDLVIGQLMGSLLIMFTVIIGSISILNRGYIIDHPKILMLDLVIVLIVLILFSEILSDGKITNLECWTMITGYFLYILFLIFFDKDKLKESADEEQIWIEYSNNGSFTHPYNIEDAISILSSNDDEIASYGPVFSRSPSPLPDNTNSPNGSLSLSISSSSPRSSSPLCGPTESVTEESPLLLSVPGKFSTSESSPSISVNEDSEDEIIIQIPSRSKSFVQRAFDLVDCLFLTFVPYYRKIESNYSKTIICWYIMETTAIINYQFFQIPYKYVIPLSYIVAAILVHVQVSNNVQIVSISVAGLTVSLIIVSNLAIITLQLLKNLGVIWQISDYLLGLIVFAISNSLNDGITNVTISTKINPILGINSCIGTPLLIILLGIGGSGLIVTSRSHKDILFNLTDNVVISAAGLIFSICCLIIYLPWNNYRVDAKIGNFLLLLYIVMTGVEICLEY

SEQ ID NO: 7737 - protein, 303 aa, Candida albicans
MQSELYSSTYGKGNVKFLKVKKDPSNPTVQDVLEANVQVLLRGKFDESYTKADNSSIVPTDTVKNTILVEAKTTDVWPIERFAAHLAKHFTTKYGHVDGIEVTIIQAKWSKIKLEGKEHAHSFKHEGPETRRTYLNYDKHTKKLQLSSSIKDLTVLKSTGSMFYGYNVCDYTTLQPTKDRILSTDVDASWTFDPTQIATLDDILSQPKLFDTTYNTARDVTLELFCKENSPSVQSTMYNMSHKILETVKQVGTVSYVLPNKHYILFNLEWKGIKDNKDLFYPAPDPNGLIKSTVGRKGDKAKF

SEQ ID NO: 7738 - protein, 297 aa, Candida albicans
MTPAPTSTLATTENPNTKTSSKGYQIDENSFHKLAIGGSLPNQYPKFTDKLQERKFILEHTAATFRIFARNGFNEGVAGHCSVRDPLEPNTFWINPLGLHFALIRAEDLVHVDEDGNILPDGNQDPINAAGFAIHSSLHKARPDVNAACHTHSLYGRAYSAFGKPLEMINQDSCTFFNNQAVYNSFGGVAIEKDEGKAIAEAAGDARAVILQNHGLLTMGKTIDEAAYLFMLMEKTCHAQLLADAAESKDKPKQYIADSEAEYTARITSNPAILYTVFQSDYKLEERLSNGDFKFAG

SEQ ID NO: 7739 - protein, 328 aa, Candida albicans
MSARSIAKIVTARQQAEGVGARVRRSIGVINQKSFNPFLMFDHFSSSGTNGFPEHPHRGQETITLVLHGAMAHEDFTGSKGILYAGDLQFMTAGKGIVHSEMPVANEDGSPTVGLQLWVDLPDALKDTEPRYRDLREWEIPQVVTDDGKVTIKVISGRSHGIESIKELAYTPINYYYYKVKAGGKFKQELQPEFNYFLYVLNGNDLYLNGEKKIDQYQNVFFEEEGDYITGENKATEDNKDTEVEFILVGGKKLDQKVVHYGPFVADCEENIEHAIIDYQYAQNGFENRKTWKTLISDGVTKDMIEGPLDGNLDKREATKKSYLESKQ

SEQ ID NO: 7740 - protein, 505 aa, Candida albicans
MTASTNSTNDKQNRAPLIWNSFCMGCSGLQCPGLWSHPDDKSRDFNTIEYWVNLAQLLEKGKFNALFIADVLGPYDVYDGPGNFRSVAKSGAQFPTTEPSAVVSAMAAVTKNIGFGITFSTISENPYHFARRLATLDHLTKGRVGWNVVSSYLDSAAKNLLNGESLPPHAERYERAQEYIDVVYKLFLSSWSDDAVELKNRVFTNPDKVREINHKGKFFTVPGPSITEPTPQRLPVIIQAGTSKAGKEFAARNAEVVFITTFSPEELGKQIKAIKTLAKEKYGRPEGSIKFLQLITPVVADTHELAEEKFKELQSYGDLDGAQALFSGWTGIDIGKYDYEDNITDKGTNAVKSFLELWNKTSPGEPANVKKTRRDIARQITVGGLGPVFYGTPEEVTDEIQRWVDISGVDGFNVTYAISPGTFEDFVEKVVPLLQERGLTQKDYPQDLDHSLTFREQLFGSDRKEPYYLLESHPAYDLRWRAGESKDEFERRLNKKRKSETQEIA

SEQ ID NO: 7741 - protein, 371 aa, Candida albicans
MPIPASMKAIVFYAPYDVRTEERPTPKIKDPKDVIVKVRYSGLCGTDLHSYRGHIKGPVGTIIGHEFVGTVVATGDNITKFSIGDDVISNFSIECGECWYCKHGYSGQCNVTNTFGKVGLDGGQAEYVRVPYAETTLTKKPSTTNSNDDVDDSVYVLMADIFTTGYYGVKKIKDFLSISAAEGIKPQSFEETTILQLGAGPVGLCALRILKYFGFGKVVVVDNVPSRLEEAKRLGATEVINFETEPDGIKKYITEETDGVGFDAVLEVVGSAAAHKTSFDAVRRNGFISSIGMGHEPFPFNGLDVYLKNINMSFGRCHSWSLFPESLAIFEEMKGDLASFIDYKAKLEDSKEAFDMFDKHKVKKIVFDLTS

SEQ ID NO: 7742 - protein, 466 aa, Candida albicans
MKGLVFLLGLLPTIYASLVHITPASEDDFYNPPAGFESAKNGDILKLRNSPNRLASFYFPIDVKNAWQLLVKSEDSFGNPNAFVTTLIEPYNADPSKVVSYQTWEDASNINCSPSYGAQFGSPLSTITTQIDMTLIVPPLRSGYYVVTPDYEGPKATFAVGRQSGQATLDSVRAILKSGSFSGINEDAKVALWGYSGGSLATGWAAALQPVYAPELQKNIVGAAVGGFAANITAIAESVDGTIFAGLITLALNGLANEYPDLKTAFYEELSDFAVPEFKAGAENCLAENIFHYPLHQYFTGPKRAFEKGWGLLKEDIFNKSIQDNLLIGLNKTYLPQVPVLIYHGTVDEIIPIKDPHAQYQLWCDWGIESLEFAEDLSTGHLAETFTGAPAALAWIDARFDGKTPIQGCSHTTRLTNLLYPNTSDSTHSYFLGIYQAVFGTPLGPGINGDNITINSGLLGLVSSII

SEQ ID NO: 7743 - protein, 197 aa, Candida albicans
MSTFFDEMSKSFADVKVSDGKIDTADFLQASESLVKLFDLLGSSAFTVVKSDMTGNITKIRNKLLEDPANSATLQDLVLTEAKTKTKTATQGLLWLSRGLQFTAQAMRETVDAPGKELTVTFTDAYTKTLSKFHGMLVKPVFKLAMKACPYRKDFFEKLGADQTKVAEQLQKWLEALEGIVKIIMDFFASGNYGKGL

SEQ ID NO: 7744 - protein, 258 aa, Candida albicans
MSSYTELPQSAPPYSEGESGSPPRQFGDNIPDDFKYSVSVASCELPLRQLFIRKVYSLLTIQLMGSVIMGFIIRSSDSFKIWAMTNTWLLILSFIGSIGFMIGAFFKARSYPINLILLGGFTICESYTLGVACAFIESSILIEAILLTLIIFIGLTIFAFQTKYDFISWQGTVGMMLWGLIGWGFVMMFIPHQQNSMMENVYSFLGALIFSIYIIIDTQQIMKTLHLDDEIIGCISLYLDIINLFLFILRILNNNRDD

SEQ ID NO: 7745 - protein, 866 aa, Candida albicans
MTDSFDIDNILSQLTLEEKIGLVGGIDFWHTYPISRLNIPKVRFTDGPNGIRGTRFFNGVPSACFPCGTGLAATFDHELLLTTGKLMNIEAKFKNAHVILGPTMNIQRGPLGGRGFESFSEDPYLTGQIASAIIKGIQYDNEIGATVKHYVCNDLEDERSASDSLVTPRALREIYLEPFRIAIKESNPICLMTGYNKVNGEHVSQSKFFLQNILRDEWNWQGTIISDWYGTYTSKKAIENGLDLEMPGSPIFRNKQLLTSMIKSKELHIKHLDDRVKNVLKLIKFAKQSSVVVTEDGKESSENNTQETRDILRKLAQDSIVLLKNDNNLLPLKRDDVDFSSKSIAIIGPNAKIAAYSGGGSATLPAYYTTTPYNAIVEKLSSISKFDITSQLKYTIGAKAYKYLPELGPQVINPKTGKPGFSMKFYKKPKSVPNENRELFDELDTEISDILLGDYYHKDIPSNGLYYIDFECEFTPSKTQHYEFGLTVHGTAQLFIDDKLVVDNKTKQIKGVSFLNSGTIEERGSIELHQGKTYKIIVEYGSAPTFTLKDQVGEYFGGGIRLGMNEIINDDEQEIINAVNLAKSVDLVILIIGLNKDWESESYDRPDMKLPGLQDKLIESVLDVNPNTIIVNQSGTPVEFSEWLDKSKALLHCWYGGNESGNAIADILFGNVNPNGKLSLTFPLKNNDNPTFLNFKTERGRVLYGEDIFVGYRYYEKLNRQVAFPFGFGLSYTKFEFFDLKLEKKTKDKEEEEEEEESLVVSLSVKNIGKMTGSEVIQVYVSKVESDVIRPIKELKGFTKVNLQPNETKSVNLKLIIKDSVSFFDEYANQWSVQSGQYKVHVGNSSDNIPLTESFTIEKSYFWSGL

SEQ ID NO: 7746 - protein, 282 aa, Candida albicans
MTFTSFIKPESDPNIIVPTKPFNLSPNIVERFSLKDKVTVITGGAGAIGSAIAEGYAQAGGHVIILDHASSDNGLTKRLSSAYGVKSKFFQIDVTNSQQVQQVISEIDEEFGTIDVFVANAGIAWYTGSILNEDSTPENWRRVFDVNVNGVFYCAKYAGEIFKRNGSGSFIITASMSAHINNVPNYQTCYNSAKAAVMHMAKGLAVEFAGFARVNSVSPGYTNTLLSEPIPKPQRAKWWGLTPMGREAETDELVGAYLYLASDASSFTNGSDIRVDGGYCCV

SEQ ID NO: 7747 - protein, 444 aa, Candida albicans
MFRPSIKFKQSTLSIIARRLKSSAQHQPLRSSFVPSPIVFVAGLAVAAVGGYYCLDSRSAIHEYVLCPLIRTFTDAESGHKLGIFFMKYGLSPRLLDDGKNDQSDVLGVQVFGHKLKNPIGLAAGLDKDGEAIESLFNCGFSYVEIGSITPEPQPGNPQPRFFRLPKDDAVINRYGFNSSGHFNVLATLKLRFNKLLNKFGTSHSSEQHPFSNAFQQGKLLGINLGKNKFGDEVNDYVKGVERLGPYADVLVINVSSPNTPGLRDLQSEAKLTNLLTTVVKERNVLGKNLLGNKPPVLVKVAPDLTEPEIESIANSAKEAKVDGIIISNTTIQRPVDRLLTTDKQLINQAGGLSGKPLKPLSLKALRTLRKYTKDSDLVLIGCGGISNGKDALEFGKAGATFIELYTAFAYKGPGLVGKIRDELAEELRKEGKTWEQIIGSDDK

SEQ ID NO: 7748 - protein, 478 aa, Candida albicans
MLRSASRISRHRLYQSLSSQINKQSARCYAAAASSGPENRPLVTPLGRHPQKYSTPAPGFGPTTFTEVLDDVNITWDKNDDPDRLEKQNTKIRHFTINFGPQHPAAHGVLRLILELHGEEIVRSDPHVGLLHRGTEKLIESKTYMQALPYFDRLDYVSMMTNELVFALAVEKLLNVEVPLRAKYIRTLFGEITRILNHCMSVLTHIMDVGGLTPFLWGFEEREKLMEFYERVSGARLHTAYFRPGGVSQDLPAGLLDDIYMWATQFGDRIDEVEELCTDNRIWKDRTIGVGVVSAEDALNYSLSGVMLRGSGIPFDIRKSQPYDAYDLVDFDIAVGINGDCYDRYLIRMAEFRQSLRIIFQCINDIPEGPVKVEDYKISPPSRSLMKEDMEALIHHFLLFTKGYAVPQGETYTAIEAPKGEMAVYVVSDGSERPYRCKIRAPGFAHLGAFDHIARGNLLADAVAIIGTMDLVFGEVDR

SEQ ID NO: 7749 - protein, 323 aa, Candida albicans
MTISVGSNFRKFLNINAKKIIAFGGWDFSTSSSTYNLFRTAISSGREQFATNLVEFMDDYDLDGFHFDWEYPGQIDIPGIPVGSNDDGENYNELFKLLAKKAPKKLKSIALPASYWYLKGYPLSDLEKNMDYFVLMNYDYVGQWDYGKPNMGLGCHNDRSITEESIKMIQKSGIDTTKVYGGLANYGRSFKLKDKKCKSYNCPFDGPSSPVPGGSITTTPGFLSIAELNDIKFSETHFNSTSKCSHGVFGDNNEYWVAWMDELVIKDTEDWFKNEMNLGGSALWLENYKTENEEKYGNLECDMDIEDLTITCKYIPISNRRWF

SEQ ID NO: 7750 - protein, 608 aa, Candida albicans
MVSPSTDKAPSIVELTPETYQQDVSSDSIDLESGTKKLQNESALQSHEYTTNIDETSSSNTASKLTYIQKLKIRFPYYRLAIDIFIGCFFTAWWLSIVIQPKHRHQWLIPTVIWGMIMVRLITWHIKILPWLLNKVKIVWDFFTGYVYKVLSKKYQRLITGAVITVGVILLGTFVPSETEYSKRKDRAISFFGCIVAIFLLFVTSKAPSKINWNAVIGGMLMQFIIALFVLRTKCGYDVFNFISTLARELLGFAKDGVAFLTNKDVSQLGMFFFTVLPSVAFFVAFIHIWYYFGVIQWAIRKFAYFFFWTLRVSGAEAITAAASPFISIGESAILIKDLMPYLTKAELHQIMTSGFSTISGAVLVGYIGLGLNPQALVSSCVMSIPASLAVSKLRYPELENPISSGTVMIPKVEDSEAAREKSKDEPQNVLQAFSNGATLGLRIAGTMMIQCMCIIGLVALCNGILTWFGNYWNIDHLTLELILSYIFYPIGFLLGTPRNEILLVNKLIAYKFIQNEYVAYNLLTNEAPYNEMSKRGTLIATYACCGFANLGSLGITLGVLNTLTNNSRAKDISSSIISALFCGAIATMLSAAIAGMVMHDLNTFHIN

SEQ ID NO: 7751 - protein, 511 aa, Candida albicans
MGTAWELTQALKDQIFKYASFNQTPVSLRQMVQFGPVPSPGSIFLASRFIVEELPIRLAKKVKDLENAPLGLNEMPSTIQVKNWYAQSFQELTELHKPKISDELAKLLSKGASKHSLPEDSINEKPHTKQEIHRIPDSLEDNPAINNIFSDDGIVVRHHHHHHSISRARPRLNDNTQTRVESPTYGMSYFNPCPGNIVWPKEVYDYNKLVRETLEIIKKRHDATVATMAQGVQEWKNKNQTVMVNSQIQTFLDRFYMSRIGIRMLIGQHIALNMAQNSPTKQRLSSLINGSQGTTKKPRSNYVGVICTDCNVGEIAEDAIETAKYICEEYYGLFEAPEIQLIAPQQDINFMYVPGHLIHMLFETLKNSLRATIEFHTPKLKQKLIDEDPNLKFDEIDINDLKFPPIKVIISEGTEDIAIKISDEGGGIPRSSLPLIWTYLYTTVNETPKLEPEYDQTSFKAPMAGFGYGLPISRLYAQYFGGDLKLISMEGYGTDVYLHLNRLSSSNEPLP

SEQ ID NO: 7752 - protein, 350 aa, Candida albicans
MQAQSNHSTDSFDPDTYKKSQAAITDQPTHKPEMVLNNFARSYEQPPMTGYQSFIAGLGSMFGTCGLFCCLCRNPYQEVEQGEVGLIQTFGALTRTVEPGLSYVNTWSEKLTRVSIKINIREIPAQKCFTKDNVSITITSVVYYNIIDPMKAIFDIDNIHQAIIERTQTTLRDVIGGRILQDVVEKREEVAESIELIISKTAADWGVNVESILIKDLTLPDKVQASLSMATEAKRIGEAKIISAKAELESSKIIRKASDILASKAAMQIRYLDTMQAVSKNAGTKVIFMPSADQVERIAMSNMQDQPPSGKGKPLDLEEDKDWVGTPQSIGINNNRHISETVALQEAMRV

SEQ ID NO: 7753 - protein, 265 aa, Candida albicans
MLLNQYTFSAERCTTPTSISHPPLACPTSPPPTNSLNRYQHKPVTLAPTVDHGCEINGTTIDCIPKDSKFYQLIMDLKQLLAGKGLSNEDIDVEKVKQLMADYDSNEIDWQHLALHDPSRNYSRNGIINLNGNANLLILVWSPGKSSAIHDHADAHCCVKMLAGELIEHLYDFPDHEGEELQCRQETSMKRNDVGYINDSIGLHKMSNPLQNRVSVSLHLYTPPYASMYGCSMYEASSGRKHHVDMSKYYSWQGQLVNEKESSTC

SEQ ID NO: 7754 - protein, 514 aa, Candida albicans
MSDIEKKQTKISPASSVAHDEDTLANDELFQLTDSVLNKKLKLINDAIDEIGFTPYHLKLFFLNGMGYWTDTQLTYLESSVRTFVNYQFGYKYPVSNEMLAAGLLVGALFWGFSADLIGRRLAFNLTLLLSALFTILTGVMNNMASYCIFVFLSCFAAGGNLVLDTCIFLEFLPHKDQWLLTFFAFFWGIGQTIAVALAYAFLPNNSCESADNCPSHINRGWRYVYYTNGSIVLAMAILRLTLIRLQETPKFLVSNNRDQEAVEILQRIAQKHNRTCSLTIEDLESLGKVEINDDYRKHIDIKGTFRLVTHHVQILFSNRTMARSSVLVFVSWLLLGISYPLYSSFLPVYLATRGANISAPDVHGVYRDNLISNCVSMGGPLIAGALLFCFPWLGRRGVLFIGGVASMAFLFGYTQIKTRAQNVALSSISFASMYIYYSALYAYTPEVFPSVARATGNAIAIACTRVMTCIVPVIAYYSNTSSSVPIWVCGAFVGVIGFLALLFPYEPSKQRVV

SEQ ID NO: 7755 - protein, 223 aa, Candida albicans
MYSLSKRTLFQQLNKRISSTTTSSTIIPLSSLSSSSHISTRRYVSTKELTPQTLPTDFPLMSEKKATNAADYVLTSLDMIANWARKSSFWPVTFGLACCAVEMMHVSAPRYDQDRLGIIFRASPRQSDIMIVAGTLTNKMAPALRQVYDQMPDPKWVISMGSCANGGGYYHYSYSVVRGCDRVIPVDIYVPGCPPTAEALMYGVFQLQKKMMKTRITRLWYRS

SEQ ID NO: 7756 - protein, 386 aa, Candida albicans
MLKLSARPISRSIGVFSRRSVYTSVLESDINITKNGKVNVAVGAGGRSSRTGYTATVFGASGFLGRYVTSKLARHGTTTIVPFRDDMKKRFLKVTGDLGVVNFVEIDARNLQSIEDSVAHSDIVINCIGVDYDTKNFKMADVNIALAERIAEATKKANVPRYIHVSSYNADPNSESVFYATKGIAEQVVRDIIPDTTIVRPAPMYGREDSLLNYLGPKVKMWTPNKNAKEVWPVYVLDVARALERIAYDDSTAGQTFELYGPEKVTFQEIRNMIHGITENYAQVGPWSYQFADYAIPLPLAKTIAKVQQLVWWKLTNPDQVQRLVINQKIDPNAKTFHDLGIDDLTRLPDVLFSYVKQWRHPLIAQKGAPGKKELERLRDVQHFTP

SEQ ID NO: 7757 - protein, 227 aa, Candida albicans
MNSIKSHILRSSKRYISASSKRLAEVEVTVDGRKVSIEAGSSIIQAAELAGVTIPRYCYHDKLAIAGNCRMCLVDVERMPKLIASCAMPVQNGMVVHTDSERIKKAREGVTEMLLENHPLDCPVCDQGGECDLQEQSQRYGSDRGRFHDVVGKRAVENKAIGPLVKTSMNRCIHCTRCVRFMNDVAGAPEFGISRVEVMICKLVLILKEISIQKCQVILLIYVSLVP

SEQ ID NO: 7758 - protein, 1130 aa, Candida albicans
MFISHMSAPPSIPTITTPGTSSTNTRRVARRACLSCREKKIKCNGEPMTTITAADGTNRIIPEKTRTCSNCRFLGIPCVFVQSNRGGKRKKRSTEHQLSDSEATTAPATHPNQLGQHQQLPPIKKTKSTPSIHNLDSGVVIPSINQQQERHQDGYRNEELASTERVSSYILDGNNSTKLPSPVLTHTTFDSRRDEGQRFNNQLRRSSTTTAGFSLPPPQELLGRRSVSYSPGPSSIKSQLPHLTSSSTTTSSVQSPPPPPPPPQPPRGMGIQFHEASHQPGIFPPPPPPPPPPPPHPDHLHHQYYGYPPPPPPPPPPPLHHHHHYPPSHHPGFGFPPPPPGPPGPPGPPPVPPPPHYHQSAPPESPPKEFKHRHPKYFHKQNNKGHRHRHHPHLHHHHPPPPHHHHHHPRDFQQHNGQDDIKSKHTDENSQNSKPSSPRWLDNMSVSSSDSSRSVSSPQSQHNDKSQYSNHKSSTQMSSCTNSVTQTLDRLPKIVSTQQNNLTPTSKILSNSPFTESELAKYDLPKWEVLNKIFNYYYIYNQPSHQIFPGKAILLENLALNTDSSIIHAIIATTCLIISKYDSSINIVADELYWINKMHKFWDNLNDLGILCCYKLLVKCTSIRFNIKKMNDINIKLWEMINNNQYVDIFKQKKFDFQESRIIPTFGTKRQNYERELTLKIIWSFYINNIILLRFNQGRPYYKLSSIMNGFKFDYDRDQYSNNILLPMSDIDYLSLKSAGNRANWNQLYEKSHIPTDATSLILSSKSFENSLSKLSNKDITFSNLISKDEFHVDLRNKLKTKYYEIIHDEKLVVINTNYWFSNIILRLSELIQYNYILCDIMVFKMCKYDWKTDLGCNSDDRGDSKDTNTTQGEKCRDADGNSIQHKEDYKDSVSNPGLLQHPLISDEIQSVEGLTTKLKSLNNNDWKILIEMIKSTNEYVDLIKLIPSSEYTDYSIVVGPTTFDDNYNNENETTKRFRNLINNSSEWWNKQELKSSVQQSWAKLPIYILSFTSRVLSIIYSLAVLTKYIKFKKSFKSGDLIVEFLETNEVRTIEGCNISVLQQKQMSDVYEIFTEIHILSQLFVLCEYVKFKLSYSNEDLAALSIQRLNNLNQHLDEVLQQNFTKIKPE

SEQ ID NO: 7759 - protein, 684 aa, Candida albicans
MMLRFRSFSTTTHLLRGQNLTEKIVQKYAVGLQPSSKKVYSGDYVTIKPAHCMSHDNSWPVATKFMNLGASKVKDNRQIVCTLDHDVQNKSEQNLTKYTNIEKFAKSQGIDFYPAGRGIGHQIMIEEGYAFPLNLTVASDSHSNTYGGIGALGTPIVRTDAASIWATGQTWWQIPPVAKVELIGQLPKGVTGKDIIVALCGIFNNDEVLNHAIEFVGDDAISKLPIDYRLTIANMTTEWGALSGLFPVDETLVEFYQNRLKKLNKPDHPRINNQTIDQLINNKLTSDNDAVYAKHLQIDLSSLSPYISGPNSVKISNSLYDLSQQNIAINKAYLVSCTNSRLSDIQAAADIIKGHKVNPNVEFYVAAASSLVQKDAEQSGAWQTILDAGAKPLPAGCGPCIGLGTGLLKDGEVGISATNRNFKGRMGSKDALAYLASPEVVAASAVLGKIGGPEELNGEPVKQAPRIIKSIETESNSANEAESTSEEASGSIDILPGFPQSIEGELILCNADNINTDGIYPGKYTYQDDITKEQMAKVCMENYDSQFYSKTKPGDIIISGYNFGTGSSREQAATCILARGMKLIVAGSFGNIFSRNSINNALLTLEIPDLINKLRQQYEGNDELTIRTGWFLKWDVTKAQVTVVDGDDNLILTQKVGELGTNLQDIIVKGGLEGWVKSELKTNQ

SEQ ID NO: 7760 - protein, 702 aa, Candida albicans
MSALLKETFARCKKEGRNALVNFITAGFPTIDDTIPILQNMQNAGVDIIELGVPFSDPIADGPTIQQANNIALDNGITVPKCLEIISQARDQGVTGPIILMGYYNPILKYGEQKFLKDAAEAGANGFIVVDLPPEEAIKFRTECTKYGLSYVPLVAPATSNDRLKIVGEIADSFIYVVSKMGTTGASTKVSTGIQELCDRVRKYAGPDTPLAVGFGVSTREHFLTVGEVADGVVIGSKIITLIGDSKPGERGKVAYDYVQSILGNDFKPNYPKTFERNNNNQAKETKPVLEENHKYNPRFGDFGGQYVPEALHTCLAELEKGFEDAVADPEFWKEFRDLYSYIGRPSSLHKAERLSEHAGGAQIWLKREDLNHTGSHKINNALAQVLIAKRLGKKKIIAETGAGQHGVATATACAKFGLECTVFMGAEDTRRQALNVFRMKILGANVVPVKNGTQTLRDATSEAFRFWVSNLETTHYVVGSAIGPHPYPTLVRTFQSVIGQETKEQFKALNNGKLPNAVVACVGGGSNSTGMFSPFENDKEVKLLGVEAGGDGLDTERHSATLTAGIPGVFHGVKTYVLQDNDGQVHDTHSVSAGLDYPGVGPELAYWKSIGRAEFVAATDAQALEGFRLLSQLEGIIPALESSHAIYGAVELAKTMSKDQHIVINVSGRGDKDVQSVAEVLPKLGEQIGWDLRFEEDPSKV

SEQ ID NO: 7761 - protein, 423 aa, Candida albicans
MTKQFTIVIKLGTSSLVDEVTREPRIANMSLIVETMVRLRRQGHKIVIVSSGAIACGMKQVGLEEKPANLSAVQALASIGQVRLIRTFDDLFRQLEQPIAQILLTRNDIMDFTQYKNAQNTLNELMDMGIIPIVNENDTLSVSEIKFGDNDSLSAITAGIIHADYLFLMTDVECLYTDNPRTNPDAQPILVVDKIDDLHVKTDTESGAGSKVGTGGMTTKLIAADLATNAGVTTIITLSSQPYYIIDIVAHIQAHADTLSVENQRLALQKDIQQGKIPLHTRFLSKPQDTLIKSDRRFWLLHGLKTKGALVIDQGCFQALTRRNRAGLLPVGILHVVGNFHQSECVSIKVVPDKNGAIDDAVEVGHCRVNYSAPEITLIKGHKSSEIEAILGYADSEYVAHRDNLAFPPVMPPSTDSLISDSL

SEQ ID NO: 7762 - protein, 545 aa, Candida albicans
MVEDKDIDLNINNLKIHDAPTRTPPVSSPPALPTPPTPSGISLNTTMQAKLMAFQQQRSKAAAAAAAAASVSSSSSGTQASSSSISASTSESSVSTIPANINRTVSGKKKPKPNLKLSDLPLSRNNSLHRSNTSASDSSVTTPEADTPTGKISNEPQPQGLFANYSDYVDIKSGQLNFAGKASLHSKGIDFSSGSSFRVSLDEFEYLEELGRGNYGSVSKVLHKPTGVLMAMKEVRLELDENKFTQILMELDILHKCDSPYIVDFYGAFFVEGAVYMCIEYMDGGSLDRIFGNDVGVKDEYELAYITESVILGLKELKDKHNIIHRDVKPTNILVNTQGKVKLCDFGVSGNLVASLAKTNIGCQSYMAPERINTMRPDDATYSVQSDVWSLGLTILELAVGHYPYPAETYDNIFSQLSAIVDGEPPKLYPKVYSKEAQIFVKSCLAKNPDLRPSYAALLNNPWLIKNRGKETNLAQTVKDRVEEIAKLEKNKSVSRSNSMNKSAAAVPPPRNVESVQSLLRNKVKAPALHRGGLQKVNRSFLNNH

SEQ ID NO: 7763 - protein, 245 aa, Candida albicans
MSSVQTTVASEYSSEIQTVPIEHRFNPYSDNGGTVLGIAGEDFAVLAGDTRQVEGYSIQSRYESKIHDVGDDILMTANGFAADGVALIDRFKQSLIWYKFDNNGKKLAIKSAARYIQQLLYGKRFFPYYVSTLIAGLDEEGKGAVYSYDPVGSYEREQCRAGGAAASLIMPFLDNQVNFKNQFVPGTDGKEKKPLKFLTLEEVIQLVRDAFTSAGERHIYVGDGLEIKIVTKDGIRTEYYPLKRD

SEQ ID NO: 7764 - protein, 631 aa, Candida albicans
MAKKEQVEKKKRTHQVQVQVQLSNKNQPLYYPQMSSIILRFRSKDGMFRITTDSSSNFTLVLEQLIEKLSQSGNNGNGNGNNNKIDLQSLTIANKPQDKGKSSYEFQNQTVNELGLKNGDMLYVNYESVTNDSGPTTTATNTTTNTASGNTIPITGPVPSIPINSVVTSHGPLKVEELPIDQELDKEDGLITRPLSSMCRHGPKGMCEYCSPLPPWDENYRKDHAIKHISFHAYLKQQLEKLKSSGGSYFPPLDPVDYSIDLTCNQGHKPYPNGICSKCQPSPITLQLQKFRMVDHLEFADSFILNDFINVWRVSGVQRFGYLYGRYAKSEKTPLGIKAIVETIIEPPQHDELDGITLLDWDQQEEKMVDQVANKFGLYKVGIIFTDLTDAGTKNGKVLCKRHKDSYFLTNLEIIMAAKFQLKYPNISKYSTAKNNGQFSSKFVTCVISGGLNGEIEPRSYQVSTSAEALVKADIITGCTQPSQIYVNESNNHRYVPDIQYSKINKYGLEVKSNAKPTFPGEFLLVSLTDSFPLQPTPIFTNSYVIENREFLGDENHDIQSLKTLHNYLKSNNDQIFNFHFILHLIKTHILNDQEIDLLIEYIKSKNLEDYLKLVESNGWMTLMTILEQSV

SEQ ID NO: 7765 - protein, 559 aa, Candida albicans
MSSSIQLLNPKAESIRRAQALQVNINAAQGLQQVLASNLGPKGTLKLLVDGSGGLKLTKDGKVLLTEMQIQHPTAVMIARAATAQDEITGDGTTTVILLVGELLKQAERFISEGVHPQVIVDGFEIARETSLEFLDQFKQKVETFDREFLLQIARSSLATKVTNELADVLTPIVTDAVLTVKEESQRNLDLHMIEIMTMQHGHSKETELIQGLVLDHGARHPDMPRRVKNAYILILNVSLEYEKTEVNSGFFYSSAEQREKLVASERKFVDDKLRKIIELKNEVCDLNSDKGFVIINQKGIDPMSLDVLAKNGILALRRAKRRNMERLQLICGGEAQNSVDDLSPEILGYAGLVYENAIGEDKFTYVTECKDPRAATILIKGSNSHVLQQTKDAIRDGLRAVSNVIKDASILPGAGAFWLSCNNYLLQSDASKKILKGKNKPGIKSFAEALLVIPKTLSANAGLDQLETISNCQDEIIDGHIVGVDLKSGEPMDPTVEGIWDSFRVVRNAISSATGIASNLLLCDELLKAGRSSLKEGAGGPPGAGGPPGGMMPPAGMM

SEQ ID NO: 7766 - protein, 1598 aa, Candida albicans
MDNSLDQKLLAFISSQSSSKPLSPSKSNNLPKADIKSLESLCVTSLDTLLNNIGGSTTNNSILPLDSLDAIEVRLRGLYLIYADDPRKSFDILRKHQLYIVKLFNIKQIDYVYQNLNVLLAQINKVFKIEFTSKSTIFTGIEFTDFNNWNDDTSFFNVNRKDITQLIIAFHFLVLQWIAQYVSKNLKSILMQKNQFISLDEFCNIPQMFLNSSNFRKWQLLPSNENIGKYNTNNVKLISGFIKVFQSIKVSSSLSKYVGLTNCLKLKLYELTKDESLLESIGFSSNLIPFINDANININEFIRKHVPIESEGSNELQTRLLKSPQLVTDSDFLRNLQNDSQLSVDKCQIIISSFNGFKDNLKTLSNQQLSILDLITIHLKDSLDESVVPILSQSFQIYSHFKLMKRMRNISNLLFNLGNKVHNEIYRNLAVDYECAIFGISPNNDNFKQLYNKLTRTQVTGSVLGNVLQCFETYISLTDNKDDHINGTIIQFICKTLSQTSNFASLNNIKNENLKYDIVNDIFQFMEKSNNTAEKTKICNSIIESTSWCNQLIECKIYYQYYNVNGLEKYLDLEEKSCDNQLVTSGIQFQRLVTFGWNETLLVECLNNLKYGLNYNSSEFDLFELNIIKQVLLYIKYNGMIDELVDIIEISLAKSIKDEQFEKFLKFEYCRALLSQTNNNPTNDVKFSQIFLDLKKRSQNWKSFDDIIQLSLLQLQYCIYAKNSIKAKDRFNGILQTLLKKPQFNISKSKNLPIVSKLQNFLILGKFQLLACHVNNHIIHNKIEAFNNIKTGIQLLYSIVKKLPTNINKTLWQELNWEITRLLFDSYKLAIDLSIDIGISRDIPLFLNEWVKLNNSIDNDVPIVNCINEFEIGRYGLLSNNEFQKYIRIAQGRLGYSLVKNNSAVQQYINRDRDDEICGHASSSRRLKSLVRTIFNSDNSLSELSKSVQLLPCIIGDSSTMCSKGLLDKLVQLKNEILTEVTNYEKSSSLSLNQQQQLINNLNQVVCLLSSLTLFKGDGLLSEIYYLQDYVRNLPFANERKLMDSSKQDESNNLLPHALDFNQVVEDPSNNTINNSMIDFNVDLQLYLPHNWILVTLDICQNTGDLLISKLTKGSPNPIFMRLPLSRFPSSLGFQQLMQNFEKIIDDSNLSTKRKTTSKILTVEDRKQWWRSRFTLDFQLQDILHHVESKWFGGFISGIFTNDNDVENESKNVFHKFKQDLMKILKDCLTVSDDKSNIERFLQFNEFIYYCFYSMEEYNYELVDDLIKFITINMNSHGRIVNFGTNVKINKLHELIKKFDDKVIKTNQNVTSNNNNNNNNNNTNNNNNNNNSNSNNSQHIVLIPNANCSNFPWESMEFLRSKSISRMPSIHMLLDLVKSNTNNKNKLMFVDKSNLYYLINPSGDLIRSENRFKKLFESNHLWRGEIGKLSSNEHEDYQDSILCEILKSHLFVYIGHGGCDQYIKVSKLFKKCGNNQDLSNKLPPSLLLGCSSVKLDNCNYNYNSSMLQPSGNIYNWLNCKSSMILGNLWDVTDKDIDIFTLSLLQKWGLIDDYNGSGHDYGMKKLDLTNCVVQSRSKCTLKYLNGSAPVVYGLPMYLK

SEQ ID NO: 7767 - protein, 276 aa, Candida albicans
MSNPSHNPKHHLREEDSNGTQDGPKSTVPIKRSKLVGSSNLVSPNFLPRDLIETPLQTRAASPLTLNPPIDSDGLSWPSQGARLRIEQTSEEAKAREERIASAVKVILEELGEDTSREGLLETPERYARAMLYFTKGYEDNIRDVIKRAVFEEDHDEMVIVRDIEIYSLCEHHLVPFFGKAHIAYIPNKRVLGLSKLARLAEMYSRRFQVQERLTKQIAMALSEILKPRGVAVVIEATHMCMVSRGVQKTGSSTTTSCMLGCFRDQQKTREEVLTY

SEQ ID NO: 7768 - protein, 598 aa, Candida albicans
MIMPEVTHKSNNIEEDEDKAYNQYVNSTDIPDDQIIESIFSERKTAHAEDAIDYEDIDELAEEEDVMEDLPRDEAINGLNSNNNNNHDKDDDDDDEFNRLLQEGQPELTNDEEMAAQAAAESQFDALFGNSNDFDSNISHHDHMGGDSNGIIDDNHHSSVNDHDGLFNNLGNGNHLLDDDNDGLNDLGELFDDQQEDSNVINTKKHKLDDDSNNDGKTAQEDQKEKENKRQLKRQKLQKIVKHLEKEQIKRNIKYYFPTYSRHRPFNFHKFFSPSPQYYRYQRPAIALSKNIKPLIPTKVNLEIEVDQKKIFKLRSADTASLSHEDKNVTNITQDDLDFIKNLESKRSSIDSFIKEIDYVKRDWTNCDKFDHYSKDLVLSTTDWDDDAIINAGDNEYSIVKPINELLLNNPLDNSKQNSQKIENDNTTNNYNQNNSNVQDEEEDDDIFNGQINLDKLKLDMNDPNLLFVPSKKVDATKSVVPSTDKLLELKFNISNDQEYELLRKNYNTKQRSQLSNLNIEHSVPALRLQTPYYKVKLSTDETRSFHRPVFNVRPGTLVSFSKLKLRKRKKDKGKSLQQISSNTSDLTDADTGNIIAL

SEQ ID NO: 7769 - protein, 470 aa, Candida albicans
MWKFFITLGVIFSICSAQLLDTVSFDSNWENLHYIRNVDLNKGFVKETDLIEIKNINSKPQDEYYFTINDGFDSVNELSVFSAFLNDNLLEVKVDEIVANKVFKLKLPVPIAPNSNVELKINYVYIDTLVPIPTKISMDAVQQLLFKTNKFPYSPYLTKEYTLSLTGMSKGQEMQLHIDVNATEGTPDLKPRVDNQTLKYGPIAEDIQAFTLSPMGLLYDHNRPVTKAVNLNRSIWLPASDVNKVSIEEYYELTHVGAALDSGFSRIDWMKGRYEGTRNHWALSHLELPLLDRDLDGYYYTDKVGVVSSHKVVKNHLLLSPRYPLFGGWNYNFTFGWSEDLSRFLHKLHDTSDEYIIKFPILNSLRDVTYGDVYLEFYLPENAEFQNVSSPIPFESITIDNELSYLDVSKGHTKVTVHYKNLFDDLHKLDVFVKYKYTKINFVYKIVRISGFVFIGLISYYLLGLLDLSI

SEQ ID NO: 7770 - protein, 556 aa, Candida albicans
MSVLTRKRVISPSDSPNKKQNTMSDDQFSEKMYTTYVKSALLSLETDALPINTITDKINLPIGHPESITLPQFQIVLNGLVSNTSRLDNTACSNLIFAILRYNWLDIADTDGYHRFAESYSQFLVALVSTLPKYLHEVTNKLIQEFDSPNTTHHHEILTKIIKYVPTSINSIPQLLQKNFPHHISSSTKELTNYVQNLVRVLDYTPELQFSIWQLIIESSIKLDVELQNELDDLDDEEIEDLISGEEDSDSEDEWEVTTTSIKSLSSKLDSIISTLLTTTANSFTIEELNNGNGVNLFNTINSLFKSHILPTHFTKSIQFILFHITQFQPELADSYLVLLIDVAFNPSEILEKRLKAMQYLSSYIARAKNLSRHQVIFIVSYLVGWLNKFIIEREQEVESSGDKQVGGMERFKLFYAAFQALLYIFCFRHELLSTTENDWECDLDKFFQRAILTKFNPLKFCDETVVYIFAKLATKLNVCYCYSIIEHNKRERMLHTNALPSAVGNFKQKQEFLDLEAYFPFDPLVLPISKSIVAPNYIEWSEDTHAEETDSEDDI

SEQ ID NO: 7771 - protein, 686 aa, Candida albicans
MSAFAALKNNPFGESIFNNTSNGDNHSRDDVEEDEVVQYIANSSDEDDDDDDDDNDNDQGNEDNNLFPLEISAPEDTSISSTPAPILNSRITQSNYTPNESNLKFSDNHVTITLNPSEYIIISGQCNLKIIKGSIKINQCHCLTSEDNKSYNIIALQSQSLPIISHYTTPEMEEDGVPSVSIIKLENSFSGIENISQIEPAFKNLISGQPNVEEPSLFKNYSFDIILTETNGGYGLDINSYWINELNLLKSNKDDPTPKIIMIIGNKNTGKSTFCKSLINELLLTNPNRPVSYLEIDPGQSEYSTPYALSLSEIVQAQFGLVALPHKNNNIVKSRVEHYFGFTSAVNAPTRYVEIIEELFNHHQTKFSQRNHLIINTPGWVKGYGKELLNQITKIINPDKLILLSNNLNQEYPDNANILQDLTYQSLSIIPGVYQLSKYSALQIRTINKLLYFHQTTTTGTFNFNDHLLDSSPLKISYACGNSPNNPGIYSTTIINHNIDNEFSHRDLCSLVEVSIYGIYSIKSNGNTKFDEMSCFRRDDGNSPFYLNPDDFDNLLSNETITSKFIGLIMVHSINPNDHYMNIYAPDIIINRLRKVLSTNSNQTNDYKLIMIRGEGDIPNCEMLYPEFINKKIDYLKSIKKRKAATTSRKLVDLKLPYISFETKSKVGGIWKVRKNIKRRGHHQKG

SEQ ID NO: 7772 - protein, 987 aa, Candida albicans
MSDWLNENAFADSNSNDDFLNSIFDQSQGEQQAPQVAQVSTSMSNPPLQSQSASSTSRISQAHTPMYQQSPVTAHTIPQNSPQSMPNQVAQPQQQIPPPPSQHLQQTTAQMLPQQQQQQQQQQQQQQKQEQLYRMKQQIYQQQMLKKQQENMSRQPSPMNSAGHNTQQNTPITQNAKTPQNNSKLQSMQMELFFSVLYDFLQRSGISIPQSLAINGKRVNLFILYILSQRLGGYRVMKAFLLMSPEQQRMQQQNPWALMADKMGFHDKGEDPMAKERIARELCNCYSNFILPYEEYYATPEGNKDIEASKHRFQQQIVQKYSSNVPTPAPNQQSPMISSAPTPHQQRKLSRTSNSVNNSPNVSSPFHNTPRQVPAPAPAPVQTAASMPPPTPVTAKSQTTKADAHILKNYTPFKKIVETHGPFNIKELSQLSTEIEVTKPVYLFAPELGIINLQALTMSVKSNSGIQSSEVVNALNTLLVATSDVNYAFQIKDIMELLDALSSLGKDVLNKIVGVNTEEDCVNADVTKLSANGRIDDIFNRYVKGQGEDISYVVNSLTGEVVSDDEDIEELFSVCDDGNSESPIDKSTDSLDVLEFHLDDYLTALKNFKSENKHHFSKLQTRSATDDQILLVDELITITMILRNISFAEYNKEPMAGNRLFKDLLFSTVKSVALNNDKFVFSRKRLCLLKDCLLMLDNISLFTHLHTLEEAFLSFVLVASFGPKIEDQYKIPRCNIETHSYFAFGLDAFTKLMVREPYNRSLIQAVLNGTLNSSMTGYSVSLQDQEYTRKLIKAYNKDYKSASLLSQAFQMYMSILPFDANTFELSKFIFMRSPTISQMLFGAKLLIDMVPVDDLNTHHNKLSLYWLLENRELLLGNFARIVVALSTETGKFPRESPEHKVLSSVLRKALVVINSLVDNAVLAKEIGDSRHTDLMESLTDCLAFPRIIPDAILTLDTFLAPTIDTNLGKEVVRLLRYLKDLKACEGI

SEQ ID NO: 7773 - protein, 190 aa, Candida albicans
MWIFDWFQDILSSLGLWNKHAKLLFLGLDNAGKTTLLHMLKNDRLATLQPTLHPTSEELAIGSVRFTTFDLGGHQQARRLWKDYFPEVNGIVFLVDAADTERFAESKAELESLFRIEELSQVPFVILGNKIDVPTAVGEMELKNALGLYNTTGKDTGKLPEGTRPIEVFMVSVVMRSGYGEAFKWLSQYI

SEQ ID NO: 7774 - protein, 176 aa, Candida albicans
MISRIGLLKRPTVSTLNNYVKLQSTLALKRYTSTVPATSNQEQEILVAQRKNRPTSPHLQIYEPQLTWIMSSFHRITGVAMAGAFYALTCGFAATSILNIPFDTTTLVSAFTTLPTFAQYGIKAICAYPFVYHIGNGIRHLVWDFGKELTIPGVYRTGYAVLAATAVIGSYLAFLW

SEQ ID NO: 7775 - protein, 440 aa, Candida albicans [sequence omitted]

SEQ ID NO: 7776 - protein, 1038 aa, Candida albicans
MVLGFGSLLGSPQGRSQAEAPRPEFTPIGKRSGSTSSFQVYHSYPQEQKTQTSPPRRKLFRPLADSNLAAHYSHDSGLFDDTVEDFEKLSPIRPQRSPIAQRNRRSPDRHDFITDDSGGIAARQSEETIKELRSENYGWKIKYKELIRSLENMPAHEREVRKENIELKEKLATLHQHIQQLESQIAELQNNKENITTNNNDSREKDNIIQQLNNKIYELQKQLSSENKLKESQLENEEIIQALKSERNELTAKVSELEDYMKHSEVEFDVVMKQNDEFQERIHELEAAIDTLHQTEATIQQQSQSRENTELQLQKLSTELDKQQEMNRLLASKNENLEMDLSEKTDNLKELNNKVLSQAQEINLLETKLDTLNSQFENNTDGNEKLMKNLESLQNKVQTQEAFIDELHHEQKTIDNEYKAKIKDLEYENAQLSEEISRIRAKNSQYDPEAQHYEIDQLKQENAQLKDNVKKYLNNFKELKDKEVEHAHQIAFYELEFEKAEKENEKLRKEIKSLKAHESEFAESEVNNRETHRKLKEVERANKELIRKLENLQSEHAADKEQHYKELAELERVSLSKEKDLARFKAELENLQNSVSEKTELRADNVHLSNQLEASWKEIADLENQLSELRITQNQLKSEKRTEVDYEIESLIRKLKNDLTDLERENARLKTLEIENIKLKQQADKFLDDRELYSDNIELSERLKKAESARAAAEKKVSKMELDIADLQEIVEELYTRNKFSLHDNESTELKKEVQDLKNKIKASDDYIDELERNLRHSQADNNISEKLQKELTDAYDLVQTYESKMKQLEKEVEKIKQSPESSTIEQYVEFQLKLTRDELEKANAQLKSTEEKYKKEITELQTEKQNMDIELLKAKSNNKDLNRQLEASNQELSTMTRNCKRLAIKATEYRRLGKKLDNTDWIEYIQNENYYFKERYRDTNIKARDFKFLYNFTINSIRNSTEVLTNKEDNSNLAKLGIYPEYVNQSRGKRPKLTFAVLAKFVLAAVRIRQRTRDQAERYRELTRVRGEVDVARLKYN

SEQ ID NO: 7777 - protein, 459 aa, Candida albicans
MATETEIEKFDDIQREISDPIDDESLKSTQKPESLETEKVEADASHKGLADEAEQLSDEEINVDDISSDDNSESSSSEESSGDSSSDESSDENETSNIDYNDVEDEDEDSNEGPVKSVHEIIDEKAPSLPDNYEISPNTPIEEIGEITGLVENTMIIKARTSGEFRILQEKSIFCFEDRTVIGPLFEIFGRVQQPVYSVKFNSEEQFSKFKESKGKTVYYVVPDSQFLYTDSIKHIKGTDASNCHDEELPEEEQEYSDDEKESAAKSAKKKKKNKKTKDKQTHTSGPSLPNKRQKVSAYSPITTYSQNAVHNRGRQISPQHNTIYSNYGQQQPPQQQQQQSPPVAQYGQPYYPQTDSYNSLMGQTPQYPQPTFGQSQHFYQNAYNQPVQPQYEPAYQPPQQYNQYQQQPQEQQQQQQFNPNMPNAQTQQQVDPAQLEHLQRLLLQHLQNNQNQYQHPPQ

SEQ ID NO: 7778 - protein, 320 aa, Candida albicans
MKVTKRAISDTSGSSKRIKLEHIEVEIESETTELAPNVFTKVDPEDMAKCNGPPKWSEIYNQLVWMRSKFFAPVDTQGCERMPNTINRNIKTRNPKIYRFQLLISLMLSSQTKDEVNYEAMKNLHNGLLKVHPDGLCIESVLKLSESEIDAYIKKVGFHNRKAQYIRKTCSILMENHDGDIPKTIEEIVALPGVGPKMGFLLLQSGWGINAGIGVDVHLHRLALMWGWVSPKANTPEKARIELQEWLPKDYWTDINPLVVGFGQVICVPRAANCDICTLARDGLCKGVNKKLLKTPLSEERINKLSKQRADLSQLLKEFM

SEQ ID NO: 7779 - protein, 907 aa, Candida albicans
MFTKNHRRMSSTSSDDDPFDVAEKYYGEERKKKLNRVRTFSAFESTKYGAGPISPLRPTYEPPPVIKETSEPLSSSSSTSSPPTLTPQTSQVQFNLGVGKTKNGSAIHSDSEEEEEDEDPVSNTKKGEADEKDPFDTTDSKLENENSTPSSITGKEIIPHPTGFRGSSEESAIRRKPSIIPIYHDNISQESVIRNANTPTTYNREKFHLRRGSLDESTFIRPKKYYINDVQGTLRELLANEDTDNNCQITIEDTGPKVLRLGTANSLGINQSSIRGTYRLSNLLQELTIASRFGRHQIVLDEARLSENPVDRMKRLISTSFWNNLTRIITKENIVDMAKDTKIKESWIDDQGKLHENQESHRIYVPYNRKDQYEFFQLIKKQRSDIQLDVQYLPQKIDADYIKSINKKPGLLSIATRPDPQAPDSGSLISWPYVVPGGRFNELYGWDSYMETLGLLTDVKIDPSGNPRNLRHLELARGMAENFIYEIHHYGKILNANRSYYLGRSQPPFLTDMALRIFNKTIEVTPELMDEAIDFLKRATLAAIKEYETIWCAHPRLDDKTGLSCYHPEGKGIPPETEPTHFNALLKPYLAKYNDIDQLDFIEKYNSGEIKEPELDEYFLHDRAVRESGHDTSYRLEGKCAYLATVDLNSLLYKYENDIAFILQSFFNDNLQDPYDDNNSYKIHSSKIWLERSHQRKLNVDKYLWNEQDGIYYDYNVKLQQQTNYESATTFWPLYAKLASSNQAAKLIDQSLHKFEEHGGLVAGTLKSRGEVGLTRPSRQWDYPFGWAPQQILAWIGLVNYGYDGIARRLAYRWLFMMTKSFVDYNGVIVEKYNVTKGAVPHRVDAEYGNQGLDFKGVATEGFGWVNASYVFGLTFLNLYAQRALGSLTPPEIFLRNMHPEQRKQYK

SEQ ID NO: 7780 - protein, 119 aa, Candida albicans
MFRTLLTKRLFNTSTMVSSQVKNKVEQLIKTKPVFIASKSYCPYCKATKSTIEAITKDAYILELDEVDDGAEIQEALLEITGQRTVPNVFIGGQHIGGNSDVQALKSSDKLDDKIKAAL

SEQ ID NO: 7781 - protein, 609 aa, Candida albicans
MGRTNTSDQLNAISDKNTKRKSLALDNEYHNNSSSEDDSSKIELSYTIPDNNNIISQETTTSVEDVLSVSSAPQNELRLRKQKSNNQDSPVDLNGVIVDVSKREKIFLKRKRQIDNKHGSDKSKYLSRFNDITFKAKSSTIFESDEFYKTDFFGMYVLFWLATAFAMVNNLIHTYFENSTPILQWTVVKVFKRDLFKVGLVDLAMYLSTYFAFFVQYACKNGYLSWKKVGWWLQAAFDGLFLFFWLWIASEYCLDFPWIAKVFLVLHSLVFIMKMHSYAFYNGYLWSIYKEGLYSEKYLDKLTNGKVTLPKGHTKNETEKVLQESIAFTKYELEYQSHATTENPDDHHVFDIDQTDKSIAKLQQEGLIKFPQNITLFNYFEYSMFPTLVYTLNFPRTKRIRWSYVFGKTFGIFGLIFLMILIAENNLYPIVLRCEIARKLPVSERIPQYFFLLMDMIPPFLMVYLFTFFLIWDAILNAIAELSKFADRDFYGPWWSCTDFSEFANQWNRCVHKFLLRHVYHSSISAFDVNKQSAAIITFLLSSLVHELVMYVIFGTLRGYLLLFQMSQIPLIIMSRSKFMKDKKVLGNIICWFGFISGPSIICTLYLVF

SEQ ID NO: 7782 - protein, 1176 aa, Candida albicans
MPELVPPTNNRPHIHETPELSSQPSLDSNRQPRELCKKCNQLIVEGHAYELGDDRWHIHCFNCSKCNTSLGCNSNFLVLGNGNLICSNCSYNCKQCGRKIDDLAILTGDQAYCSNCFKCRSCKNKIEDLRYARTSKGLFCMDCHQKLMAKKKKYDAKKKHLALLQEKRVQLEREKDQRELQILEDHKRSVNSSRNSLIQSYMNNQNNQSGESLLYQQNNRSVTSVTSSKNKSLPLPPTSTSPARPTPYSANSYQSKESISGKNKTDTSLGSLSTSQTFSEHTNKGGSTMHSSTGLHNPPIFQSDNDFSIEEVQNSSDSDSNGDEKKSNSTSLRNKSSNRNSRVSPFVNQYSTPPLSSDHLNTDEISADTGERTVYLDVIDTPPESQADPLAGNQLKPALDVSPGRNTEQKSKSFLILSPNQFHDNEFHNTRSPMIDSPGTIISSNSNQNTKAVNLSVEDRPRSACPSPFAKVNRQARVVETNDEISTDGVDEDLAIGTPRQEHSRAGTLKSVSSPPPKVPLPSTPSRGEDISKKFSFVETPKGLGLEGVDYDNHEDQRSYIKSQQDQRQHDISEKTSPSSIMSTPKRVVGNFSPAVTNLEPKNSDLSNDQQHKHSQKNQNVSRTASLIKNLKHKRSTSGNQNKLAALFTTGSKEDHRNGHTRQTSDGSLFSSIANAYISPPITNGALGGRNHIRSTSDSTVLLSDEDHHYSNVAVKNDIEQLNSSKVLLEEDVKKLRDERHKLNEQLKMIQSKISSESIRYDNLVAEISELQIQKTKITNENKDLIEQQKNRQASGATGKLSTSSSNDSDPDASTLGKSVNTHLSPYKSSSDSTSVVSRENFEYSDHLSPDRHQGQFQQHQQYQQQYQQQQPQQQLIEDEQAHKATRLKFWRRPKVGTTQVISSNEYNNNGNGHNNGARIPNSFSTQALRIPAHNSGSSFNNNGANNNNQQNKFSKSKSSNVLDSLLSGDSSQVPLFNSTLQQRAEYEKSQVPIIITRCLAEVEKRGLDFEGIYRISGGNSAIVSIENAFSSLSNDPDEKQLNRVDETLDVDIHAVTSALKRYLRKLPDPVIPFDLYDDFIKVSTKASHSKEVRIAELQKIVNKLPPANRETLRLIVNHLHLVNSLKDINKMGYKNLSVVFAPTLAKDESGVKEMTDMGFRNDTTELLLTESHRIF

SEQ ID NO: 7783 - protein, 335 aa, Candida albicans
MTYSEFLHNLSVKDSQDESAAYEEHLNIVEYPVNDLIVMLSCLLTKIIEANDKLHPNHFENTIAIRQRLKEEKRLKKLQRQNKLQSENDDAYDEDDIDVDRTDRSFHGNNDGMDQDDDSNANVQNNDNIDNDDEEEDDDEDDEMKNKYLANVLAFHGTNIPGISLQSYLGRVLKYCPVTNEVFLSLLVYFDRIAKKANNLNQKKKNSNSNGNSTGGTGSDNQSSEAEQLFVMDSYNIHRLIISGITVSSKFFSDIFYKNLRYAKVGGLPLEELNYLELQFLLLLDFKLMISVEDLQNYGDLLLRFWKREQIANELVPNNNDNETKEHQTQTQTQS

SEQ ID NO: 7784 - protein, 1381 aa, Candida albicans
MSSNSSWSNNDSYQSRNNPNNGNNHNPHLMSQQHSQSVNIPSHLLPQAFIEQQQQPPQPQPQQYPQDGQAHNKNPPINNRFHQSQPPQSRHQYIPSKQEQMQQPYPTAEQNNQHFPPPQERSYSFSSTMDPGSPSKMTPPNFSQRNQSFSGYQQPPPQQQQYPQSPHKAYNQQTHTHQGGLQQPYIAQRQNMPPGYINQNPYSQQNRSVSSLTQDRTGAPVQHLPYPVNNDDPGYQLQPSAIQSHHPPQQQQQQQPPLQTRRQLRKAPSSNLPPIQTDQVYYSPDARRIVSTPTHQQNFPTPIPPEARTKSLTSASLKHQKQPSQPSQPYFQQISESPGKDSNARNSSSSSLHHTFSLTSKSRSFTSISKLSSLSTKKFGSSSSVNTNKLDRYQSSGTIRNNHNHNHTNQTSHNIHYAKPSVYPAILSEVAKLFKEAIILTINTKDGLEYHDTFTGKMAVDILCRIIRTNDRNLALLLGRSLDAQKFFHDVTYNHRLRDSVHEIYAFNNVYNDVDFFNEENGGAGSVSNGENSALNSKHGSFLDSSTQLQNALNDHISDYHTSQSSGSLTKIASSATGNGSVGVAGKELSASQQTGVNGVFTILTECYSPTCSRNSLCYSIACPRRLEQQARLNLKPQGGLQRAVSKLSLHDQEETETLWHKTVPQSVLDKLDKHEKTRQELIYEFVYTERDYVKDLEFMTDFYIMPLRNPANNIIPDYQRETFIQTVFGGVPDLLRLAKRLSEALTRRQQQQKPVIETIGDVFLDYVGDFEPFVTYSGNKVFATFEHERQQQVNMKYARFLDAIEKKPESRRQDLSSFLIKGVQRPARYQLLLSGILKHTKPESPDYKYLTKAKEEIEKLLVKINIQTGECTDRHKVMVLHRLLGKQTLENRFNFKLSYNNRIIYQVTLNRKRDNEKIDLYLFEHALLLVKHKIQNKREQHKVFEKPMYLPLLFVNSGMEIPTNRTIMPHRYHGSLVSDTSIRPQRAESNYIGNTLNSSSTPKFQLNFFGLGSNQVHASLFADDLTIQNQVLSQISAQQKKLIDANDIFSLCKFETRRFTGNNKINCAVPCYGGKKLLYGTDSGVWVSTVRSISATSNEKICSDPTMVISKTYVTQIEVIVEYSKLLVLSDKSLYEFDLSCTDSLDHVKNTKSGKLLLSHVSFFKVGVCDGKLLVIGARTGSSHSICIFEPVNPFDKSNKNKNKRLEIQEINFSSDPISISFLKTKLCIGCAKGFEILSSQTGTKESILDEADPSLDFATQRESVTPLAIHRLGRDFLLCYSEFVFLINRNGWRTNHDWGIFWEGNPQNVAIFFPYLLSFEPGFVEIRDLHTTNLLRALTGENIRFLHSNEHEAMFACEENGYDIIISIDFLNLKPKSPT

SEQ ID NO: 7785 - protein, 103 aa, Candida albicans
MVHVVTEVNEFQTLLKENNLVIVDFFATWCGPCKMIAPLLEKFQNEYSNIKFLKIDVDQLGSLAQEYNVSSMPTLILFKNGEEVNRVIGANPAAIKQALASLA

SEQ ID NO: 7786 - protein, 283 aa, Candida albicans
MFSLPSLTQKLAISKASFLTPIRQLGALGYLKPHEGSTFNYKKLGRGQSSGKGKTAGRGQKGQKARSKVPWWFEGGQTPYYKRFPITGFRKPYQTVLEEVNLSKIQDFWDNGRIPLQKGETLNIKVMKDCGLVTGSLKDGIKILGKGVENYNVPLNIEASRASDIAIQAIEKAGNSFTARYFTRLGLRAHVNPEQFLLKRGYVPLQARPTHKRDIEFYSNPDKRGYLQKDRSILLDPLEKAREELANKKPTKKLSKFKSLEEQLEEASTISYKPSKTISVSDV

SEQ ID NO: 7787 - protein, 350 aa, Candida albicans
MKVISDQAVTEFLNKTLSKESILDAFQPTLLKSLTTYSQDSDHIVPPRTVQPSNNPNSDTTHIYMPCISPDEVGLKVISGGPGNNSKGLGFQGCVLIMDEITGQLKAVLNANNLTAFRTALASSLGLTKLIAPSNANILPELSAFGVGLQAYWHIKLALLLYEGKIKEVNILNRTLKNAETLADRLSKEFKNVKFNSFSYQDELSGFIPHVQNSSIIFGCTPATSPIIKKEYLNTNPEVPKFISLIGSYKPHMIELDLNLCKELKQKAISIIVDSKEHTLHEAGELIQAEFDETQLIEIHELCADFDATVTDEITGITVQKIVGLSIMDLSIGKMISNEIGNNAVVVDDF

SEQ ID NO: 7788 - protein, 511 aa, Candida albicans
MIKFEDYFSIQIFFIILRETLETAIIISVLLSFINQRSHKQEEESPLSTNNNNNNDNNDNNENENENENAVHPISISQGRKADMNRKLKFQVWIGAILGLIICFIIGIIFVLIFYFVGQDYWSYTERVWEGLFSILSSIIITIMGIGLLRINKVMKLKWWIKLGDAYNYNGQQDEREDDEEISALTDNDILFDGNNNGEEEDIMNYGGTRSSSESNEIITHNNNNDSNFSFSSSSSSNSNSNFNSNSNPGILNNDNEENIPLTASSNFFTPFKNKHQSTAKNSKQLHRQSFSKKYFLAILPLVTTLREGLEAVVFIGGSAMSSSPHSIPLSVICGISMGSIIGYFLYQGGNKLSLQYFLIFSTCFLYIVSAGLMSRGIWFLELEQYVRQCNGLDVSETGSGPGSYDIVKSVWHVNCCNGLTDGWWMVFNAIFGWTNSATYGSVFSYMIYWTMVIIWLKIKLYEERHGILPLVPLKWQLKRIQKRIRLYELRKNHEQEHQGQQQEEGQQEAS

SEQ ID NO: 7789 - protein, 1143 aa, Candida albicans
MNSDIDIHNNNSTNFFNLNIKKIIGTSAKNPHQFFIQDDLIAYTASGGVVVCTIDIETNEVIAQRFFCANISYTNHSTHNSNNNNNNNGLKKRRSIIGSGTSSANAYLNMIKSYDYSEKELKRDLYGYPINSEPMEIFGTSIENFDDNYTSNNNDVNGSTNNGTSGNISPSKLKDKVRSINCITISSDKKLLAIGEIGYQPRILIFSLAANSSDNPIWSIYEHSFGINSLIFSPNSKILCSLGLVNDGFINLWKIGGSNNTNTNNNSVNLIASNRCSNIVHKIVWHENLIITLGLRFIKLWKFDENDSNCTGGISKKPLVLKGKNAILGSLLNGNFIDASILNEDELLVITDTNQLLALKLNVENPKLVILKPPEYEFNSIVVDFHYEQVWLSTGNNYTIKSISFNELVPYNSTGGSSNNVIIPLSSKKSITAFTAKDNNNTISRPIIQIYDFSKTHLAFLTDQEEIKFMKKDNSDRDGINEKVLATSLLKNFAGIKYTHSKEFLAFSHQGIIKKFIDSSELQDIIKFNVIDMDIVPVSNSVTAIEKNDHNTLFIGDKYGTLTILELLDNNNNNNNNNDYKILYQVKAHSSTINEIIYFTFSNHQICCSISRDRMIQIFICPINETNWDLLQTIPIHNGNLLQIIHLQDKIYVCSSDRTISIHKLVFEEKEKEQEEQEHSVRLYQEKIITLKSTPLCMKIFDNDLVVSTNDKSILVFDIVNNFELKRTLRLINDKINESLLVESFIKYRNLIIVWSNDKSLRAFHYQNGKEVGVAWGHSESVLELYLFNDHEIISIGNDACLFYWEVIENLKSSSSSSSSSSSSGSSAGSVISQDNNGKEIPEKQISAPLYTKVTRKILPTAPIKPIEKEGQITPTKINPTTTTTNSPIPKLTAATLKRLEAKQNGAGHTISPSRSISPIRSNSFPNSNSNSNSNSYSASTYSAPVKLSVRTSNFSKLQSPSKTPVINTTFPKRSTSPTRADTNKAKPSHPPHQPPPTITPYVSNSSPTPTSRPIVKKIERNKNLLDNTLGKLDDVANVITKCNDNEKQVIKQKLQSILSLVDKSKSKPKPTITSSSSIIEEEKQDQELLEKYSDKLMKMIEKKLSMTSLNQNNASTSSLSSSSSSSSCSSPSSPTPEALTKE

SEQ ID NO: 7790 - protein, 374 aa, Candida albicans
MLSRASIRAYSSIPNSVKIAAKESATDLTKLSVIINNAGSKTGKSGVSHLLSKFTFLNNGAKSALRFTRESELLGGTFESKVTRDALILNTTFLKQDLPYYVEALGNVVSNTQFAPHEFNEIVLPTANAETKLANANPAFKGVEKLHEITFRRGLGNPLFYNESTPIKLEEVAQFSKEQFSGENISIVAEGANEEDLTKFVSESAFCYLPSSSSNGAKALPTNTFTGQEARVPSSGASSALIGIPVKPADFGKYEVLSAAIGTSTLPSTSTPLAQIPGATSHLYKYQDAGLFVISVSGEASQVAQGIKQAKSVAESVSSSALSEAVKAAELSVALQSTVDSPLNVKVVAEEAPISKFNYVAVGDLDVLPYADEL

SEQ ID NO: 7791 - protein, 368 aa, Candida albicans
MTFVPRKTFPNYNIPLNNFKGHHQKALSKFGHLAPQLDMILEVRDSRAPISTTNVLFDKVLPSKKKLILYSKKDLSILKPRLLEKWHKSKNEQYMFVDCRSKRDGKKIINEIKKLYDSMETPPPLGLRTMIIGMPNVGKSSLVNTLRYVGLSDGENAVSTKIRKVARTGGQPGVTRSTSEIIRLSRDPEIMVYDTPGVFLPTTKNAETMLSLALVGCINESFIDPVILADYLLYVLNLQDPTGKLYTDYIDHPTNNVYELLESIDQKRNVLQIDKRFDECGLANHWISKWKQGKSSKYRGLFDVAAIHEINAKDFGNLTNAERERIGLSNVQQRLQERFGDDGTSTSKHRKRTAKDREFDMKNRLFKL

SEQ ID NO: 7792 - protein, 296 aa, Candida albicans
MTDHLIAKVQEHVPNIPLKIISQGAEALVFETSVHPYYNYNSSEKHHESPSLHNHTTFIIKYRPTKPYRHPKIDLQINKSRTIGEVKFMYKLSKLNIACPNIISTDFNNGIIWMECLGSKLPNGTISSFKNWLWYLESQEKEDPSINLHDDDQVELVCQKVGQLIGRLHLNDMIHGDLTSSNIILTEVDTKKNEDTDANNSSVYFEPALIDFGLSSFSGLAEDKAVDLYVLERAILSTHSNYADKLNGWLLEGYQQIHDSIEFNKTKQQLGKSKLKDTIKRLEDVRLRGRKRSMLG

SEQ ID NO: 7793 - protein, 578 aa, Candida albicans
MKLDYILASLVIASITEAAPIKRGLLDDLFGTSSSNTAAAAPAAAPAPAAAPAVAPAAQQAANVNTAPAVSPAATTTAAAASSKGFWAGLFDGGSTNTASTAAAPAAPAQAPVSVASAAAAPAVAVAVAPAASTPKSTSSSSSFGGFFSNLYNDFFGSSSSSSSANANSQPQAPAQAQAPVQVTKPTAAAPVVVTSEQVYTSVVTSATAAPAAAATASSDSDDYSAEGLFGFLFGGGSDGGKASAAASASGSVSLNPIDGSGLGSGSGSGNSAGNSGSSSGTTLGIGYQGGSPGKNTASINTATATAVNGGSAAGATAAAGSLGITYSPYTKSDGCKSASQIAQDIAKLSNYEVIRLYSTDCSGIENVLSAMGSNQKLFLGVWNIDSPQGELQDIVSAIKQSSSGWNVVHTIAIGNERVNAGAASVAQVQQAVDISKKYLKSQGYNGPIVTVDTLVAYVGNPQLCEMSDYLAVNSHPYWDGGVQPENSGQWLLQQIAHLQSVCGSSKDVLITETGWPTQGDSYGQCVPSVQNQVAAVKSIVKSLSDKVIMFTMFNDYWKDPGAYNVEQHWGLYGDPSS

SEQ ID NO: 7794 - protein, 494 aa, Candida albicans
MPIIKTITRSIRAILATLYLVLIILTIPLAFDVGGVNCGLAYSLTTLVTYFILTTIRILVRKTKYFQWISIIYYCQHFFIPSLLTYFLSYYSHENIKKLDLISSSGSGSSTSTSTSSKFNPVMIWRLVLINSTPIFTVLEGFCSLLLIQAMGQTMSWLTIYKSDSWLIISLIGSGSVITASFYFLYRIYVLPFTIDMFSASLLGSILTTTMGLGLFGIISGKGSMIESSLLFAYIVKCIYETFPILSEAATKALANLFTLTTQNLKKEIPKIPPSILNPISEVIPFITSTLPSSFKGVWKFLIMAIKTLTLPLLLNLAYRIGVFYAATKIIPSLYQSASYPLITPPKTPQPGSRQVSTTSLSTFTSSTTSTVLDQHSKLRTKNSFRLKPPHHQPPSVIIRLIYAYSPCLIIAVYTHLMLSYNGELGTELKLWPLWNSSNGGGGGDDDIQLIVHPWQFWNWINMGTTLILYAAELSSNDNSSGGGNSLTSHWKVE

SEQ ID NO: 7795 - protein, 653 aa, Candida albicans
MSEVDTDDTQELLATNAASGSSTTTGAPRFEALSSLSQSHQEKSSTKYKKISEFVKINVLGHPNNFEEYVLRNEASDCSLIAKYCKTTTIDLSTQPTLSIDSISLNTIHIPHPLINFMKNEANQQLSPDDQVDVSNELQESPIVVFLHGLGGQMSQFEPLMGLLSQCSEILSLDLPGFGNSKLQFEEGFKFISEISDSDKSKISSSIQKMNWDDFSTDNIVRIVYEFISQNVPSSKKIVLIGHSMGTHISIKLAKKLPQSKVEGLILLSPPALTDDINTNEQNTKNTHNSLSLFTVFTYFPWVFNSFRTWNRLEGLDSASVVRQLSKTNNSIYNKLRQFRWNLDVNSDIVLKYASGFQRATNSDLISAISRFNDNPEDKQVYEKTVFICGNNDQMTPVSTIYKCDEFLTSNFGRKVSAAIEVKGVGHSLLLSKPEFISGIILNHIESKFPERLHLSPAWVLKIKAKVSGDKWGLKNEQKWSNIQSVSYNITRNRGKDIAPLLGMKTLRESDPIHSPSILEKQFYGDNSSNQIKGNLIAIIDISADIPPYSPKSFEKIKYYKCATVSKVVPDQSAIRRFIQLVNDILHENTVANPLIAVHCHYGFNRTGFLICCYLIEVLGWSVEEAVEGFKIAKQPGIKHPHFIDALYVRYEK

SEQ ID NO: 7796 - protein, 569 aa, Candida albicans
MDTSTIVAIGVDIGTGSVRVYHNETLTSLPITTENDIYITQSSFEIYSKLIQLLSRPQLDWNFDSICITATCSMVVLSKIIIDEETYLTPVSLNKSHPNSDVLLWMDNSATLQCNQLNEYLKVAYQNILNLVGGQFVPELGLPKLKMINDNFAEGDNNDNFSKSDLVCFELYDWISYLLKVGGFQNINASANGNGDDKLIVPYIPSKPFDFGDAIDGSIKGWPHQFLQDLGITVEIGRSESNIGNRLLPIGTPIGKVNDTDIIIGHGCIDCYSGFMNMYRSSPSEKSSTLSTMLMIAGTSTCFIYSTMTPTRTTDENSAPPNYIPTVWGPVEIGKSGLYLYEFGQPASGKLFEDFLTIGFDQLEQETQNLELKHNKSIHELIKGYFYYGDVYGNRNPYGDPKMSQMIIDNNNDILPSVISPNNQNKKSGNVLSQVIKYILILEFLVFQTKQLLEPLSNVSQIIINGSQSKNTRFLKLLSTVTGLPIIIANHDVARGAQLMALIGKLCSFGWHYDDAFDQAIQNNNNDYLGNENSINIREDYYQLLMTKYEIFKDMASAQQRYRKLMGDV

SEQ ID NO: 7797 - protein, 624 aa, Candida albicans
MLKTSIRTLKRMTNSKLIELPKSSSFTQRIKPDKRVPSVEVALENEGNITNTPRNITHGGFSWVLPTPRDDYEFMIANPLTMKDLGLSLDEIEDPVFQSIVSGEFYQDKVTFVKENFPMPYAQAYAGWQFGQFAGQLGDGRVVNLFEVPKAVPDGENRDKYEIQLKGAGKTPFSRFADGKAVLRSSIREYIISEHLHAIGVPTTRALALTYLPSTLAQRHGAERCAIVARFAESWVRMGTFDLYRWRGDREGIRDLSDYVINELFTINGVKFQNFERIVKTGPNFFKLNDKLLGELTDYDKMYYETVVRNAETTAICQCYGFLNGVLNTDNTSILGLTIDFGPFSIMDKYNPNYTPNSEDHEGRYGYRNVPTAIWWNLTRLGEDLAELVGAGNELLNDPSFQQGIKEEWEDSIIKRATKIIEIGGEIYQHAFTKKYVETFFNRLGLSHELIDAQNPEIQRTDVIVPMLDVLYKIQTDFNLFFLKLQDLDLDSGDYALIAEKEFLPNYDFNTHRQHKDDLIKQISEWLILYHELRNKTKKYKSTPDPAKYNPKFLPRNWILDQVIQQAESSRGAETTYLEKLQKMSSNPYDETKWGDELKDLEQSWLLQGNKGDEFAMLQCGCSS

SEQ ID NO: 7798 - protein, 527 aa, Candida albicans
MQRRLVQTASYLIRRNNVACRFSRYNGLPVASYSTKTVPFTADTYSQKVQRDAKFKQLESQDIEYFKSVLPENSIITDEDDLLFFNEDWMRKYRGQSQLVLKPKTTEQVASILKYCNDNKLAVVPQGGNTGLVGGSNPIFDEIIISLSAMNKIRSFDPVSGILKVDAGVILETADQYLAEQGYIFPLDLGAKGSCHVGGNVACNAGGLRLLRYGSLHGSVLGLEAVLPDGTVYNSMHSLRKDNTGYDLKQLFIGSEGTLGIITGVSILCPSRPQAQNVAFLAVSSYEAVQKVFVQARKELQEILSAFEFMDNTSQKLTAKHLGLEHPIESGDFPFYVLIETSGSNKEHDDEKLETFLGNAMEEGLVDDGIIAQDEAQIQSLWSWRESIPEATTIGGGVYKYDVSIPLADLYGLVEDINTRLNDAGIASLDDESKLVLAALGYGHIGDGNLHLNVSVRKYSPEIETILEPFVYEWIAKKNGSISAEHGLGFQKKNYIGYSKNEIEVKLIKEIKQHYDPNGIMNPYKYV

SEQ ID NO: 7799 - protein, 269 aa, Candida albicans
MMIATRRQSLQLTKRYISNHATKNKRFIQTIPISTNTGSNSFLSKLHQSESNDAPTSKWARHTLSFPKTETSNTTPQPPVRKSRTSRFANKSQLANETKPFNSSITPTPQSNIIEITSDPEIQKASNKITTSTASVPTDSNKSQSTAAPSVTPKKKRVLRPRKALITLTSSAVQHLQGLLDQPDPKLIRIGVRNRGCSGLTYNLEYVDKPGKFDELVEQDGVKVLIDSKALFSIVGSEMDWLDDKLSSRFIFKNPNSKGTCGCGESFMV

SEQ ID NO: 7800 - protein, 1363 aa, Candida albicans
MSSEEKIEETQQQQQESVPVKELLLKVQLPSFFNVGDDYLTIPSSYEENIADLKQALNIIVLCRNLTNYSILIKGIDIIENFGELITFEQIISHFELDKQEEQEEQGQEREISELKIVIKEKSYNLASIYEQISRFREVIGLHYIDRLSNDIGSCGGVSKFNGIQLDDIKPKEAKKEESTEKEQQEKEELSISKEEVSKISDFAKQFISDSFDGNDFTKLTKFDDINGKVKIPIKSLTISQWSPVPPFQQAKGDLLYLSLQTLEHETFNITCHFSGFFVNKSSTINFNPTIKINEKGKFNKSYLLYDLVCQLSPLFSKTIAENEINLSDSTKYPETYLLPGNSFPAYPWLVNEKDLQNVPDLSRSQLSSLINGVDGADYIKDWNNDIQSIKELPTTTVQERIIREKLIQKSLFEFNKTATETAINIIKGNIPPLNPDESSDKFIYLRNGIFYSSGTSTVDGFENTGGEEASRYVASKDLTGIKLINRHDIRGISSLVTCIVDYMGKRVVCQAPVPGILDTPVITSPTTDAEGKNEAEEPESEPVEKVVYGLSSDGSRILEDKSFEEPLKQIGDFFHLKPHKVQLSSSSSGDDVKTESNLVVSKDTKGLKGTDGRKYVIDLYRTTPRDIEFIEQHFKLDDDHQETSYPHGEALIRHEAVNEWWRRKVAVLFKKETEQLEKEGKLLDKNQDQDQENKPQIAIPTDQVVFNPDAFSSDNENEIEQDREEVREISKFIKEKLIEEFLDEIKDQVIPFDGQQLTDVLHRSGINMRYLGYVAERLVVKKEKHLVDLEELIKENEAKAEKKREEEKEKEEKEATESEDKKEKKEDKEDAEKEEAEAEEEVPTKATYQLTLANYSTLHRIIIQEMISRSVKHILRNLTKSLPSYLISTAIAHFHNCLFGGAINPTPKVDFIDEIYKNFCSKSDLESFIKLTHDDVIKLVSKEVFSRFRYKLSSNWINTIQLPQLFREIAFKYGIQWKSQNYPFTKEEFELQNNQNKETPTQIQIIETKSSKKSKKKTQTQVITEKSIQRSSIFIADDIIGFIPIIKDSSYKSTIVEEIYSNARSHLVQGNKEMGMALFNELLAINESIYGKVNPETAKFYNLVAQVYQELGYDIEAALIGRKAVILCERSCGFDSYDTITAYMNSAYYESSNEQYLNSLKLYKEAMNTWSLVYGKDHPTLINTLTNLSESLLKIKAYDSALELLQEALEITKKLNGEISEITGFIYYRIANIVVTLNKFKESKELFDKAYDIFMKLLGPDDSMTKQVAKYVSSVGLYVEYLKRQQQQQQQETQKKSKTKTKAAPVNNIATTSTSTTKNGKKSKKNNTPPQSNPEIANQSIDEILRFIEGKPSGSKKSNKKK

SEQ ID NO: 7801 - protein, 806 aa, Candida albicans
MIVHYIILSLWSLLVLASTNNDEHYTQAVIGLEQLARNFTRPNVYNIDNIEGNLYIPQFDQLTNDYKSKQEKPQPPLELTRRIIPLLKKSASESRNVNALVTLGDLYLFGNYSLTPDYYMAKEYYQEAVSLAPNGHAYFMLGYIYSTGLFGTFPVDQERGVLYYQFAVENGDRNAQMVMAYKNFKGLGVPKNCELALEYYTDLVEQGKDWMSRNDADGQVDYNIRISDFNGGLYGEKMSETTSTIEIRSKYFKDLRNSFEEYKLTANEHEYATLFYNALESYKGDYFVPKNLTKAFLTFQECVDLGEEIYGASDYKNIDGIDKMFLSSCQSKLGRMYLKGMGVSNNTKKAKQILDRSLKVQGTPEALNLLGFIEDQGLLGEPNVTKAVDYYVAAIKKKSSEANRNLAKLLMRMNGGDPHTSEHHKEIYTYMKDAVYHRDTEALYYMGSFLQSGLSKIADSKNDISCPNIVMYYRVFLERLSSFYAPHLKFAFEELIAGNYQNALIGYSIAAEHGFEEAQISAAYLLYQLQPLYSKQPPKTFVPERVEMAVDYLERASKQSNVDATILLGDLYSGQAGASHITPDFDRAFNYYRTAAERESSHGAYKLAEMYEYGIGPANNSVDYFMAKRYYDFSLKYNEMLNHAKSESPSQFVSGKTHIDWALLRLRLKYLFNRSASKQSGNSDGGWLSAFKKVGNRVPNEVPQDSNSISRANAHHEGGTYNDDLIEEYDIGDYLVIAMTFIFFFVFFVQNILRQFRRMRNGQRRDEANNNNNNGDDNDDNQGQNGWNGNQFHFRRGNFEFHFFAI

SEQ ID NO: 7802 - protein, 222 aa, Candida albicans
MTQKSIKVCVFCGSSFGNKPVYAEEASKFGKALADKKWGLVYGGGSTGLMGAVASGCATNGGYVHGIIPEALISRERTVDEEAFNAKLKSSIDNHDGSTPIPDSKQYGKTTLVKDMHTRKRLMAQEADAFVALPGGIGSIDELAEITTWCQLNIHGKPIVVYNVDGYYDNFFKMIQGFVDCGFLSEKNGQIIKVANSVEEVLEIIENYEIPEGRFNLKWETT

SEQ ID NO: 7803 - protein, 751 aa, Candida albicans
MKVLLATFSNLSGYTTLRRSWSLQYTFLRLFSISPASRSAKETTTSQTVKHKVRWFYASDVPISKPEWYKYEKVKEPESFIPFSEYDSKQLEREFSKTERNLVEVNEDKLFQVDLKNFELSPIYWDGPIYEVRRGLWFNSDGMPLKAELTKEIEEGFQRLKPYTYESTNEEQIKTTKSNKEKISTFNKLKQDTQTEIKIDLDKQKDVIRLSNGELVLYFNKDQAVMFPGDYDSEFQIDVIRYFGPKPVSLLGVNHIQRGYSEELKESFFDKLSKNPLPGISDAFKEDFGSIIGGKKDSNKTNEDEMSDVNELDDINMQKYLESDYDLETSKSKSNREIDHLVFCIHGIGQVLGTKYESVNFTHSINVLRNTMKGVFEQNEEYQKLANSNSEEHDNTNNRIQVLPISWRHRIGFNPQQEFNAQSPSRLPTLSQINVEGISALRDVVGDVVLDVLLFYQPRYLKEIMSTVTSELNRVYKLYLEKNPDFKGKVHILGHSLGSAIAFDILSKQSSSLDGPLKIDKDLAFDVNSLFLVGSPVGMFKLLEEKNIVGRDSKSFVPSQDDTFASPKCVNLYNIFHPCDPVAYRIEPLASPSFGNYKPVDIQFAVKGLNTQFKELSNFGDEISEKISFATKWLTSSKSDETEKTIEERTNKENALGDIIKGVVMSDETDQDQKGLKKKVISGGALSKMTSLNMTGRMDYSLPLGVFDVSLVSAISAHISYFEDENTAGFILKELLANRSTPVEETTVTSK

SEQ ID NO: 7804 - protein, 254 aa, Candida albicans
MNPATIITNFNNSQLQTPPTSPVSFDKYYTYYNIQLEQSTLMPQPSKIKNGDPFTWSDIQFIIKSNQLEIFARSRQQTIKYHKFKQWLKDNKLSINDYLLDYELHWKESELREQQHELVSDKEYSIDYPEDLIFHNPNDISILYNKFPYYFEPNVKHICIWSKLKIPVDKNSEVGDISVMTKKLINRYLEKTFVAKGISWDQIVWFKNWLSLQSVRSISHIHVILKDVDDKFVDELISGGSGEVLTLDDYRNLE

SEQ ID NO: 7805 - protein, 411 aa, Candida albicans
MNVTIEESGILRSLGVNNLILLSIPIAAILVYLSYLQKPKPKVNSNKNTNTNTNTSKDHKIADRPLGYWKPDYSFKTPTPPPFPNWDFEKTRPIPYRAFRHKYNVTMGIRSMNWDSWIELDNEWKFYHDLKLKRLQEKESELSGMSDLAQDASWELLQELCQYLPARYPTMFKFENGIMNIIPTGEKYDLKDKSNLNPIVTAAKLVQDDLAIMIEKEDGSYYLESGCICLAGFWRLKDKFGMKLDDIHKSGDVPQYDKQLKSGMNKFFRRLTVNSPVVRNNYFIQTDNNLDWSVSIGSENEEKIGWYTADESDDVNKLYFRSERQSLRRLPISGAIVFTIRTYFLPVTQLCEEPYIPRRLLNGIQSWSEDVGEYKGFHIFKDALLPYLEKKALEQEANGLDPTKEPQVYPF

SEQ ID NO: 7806 - protein, 1278 aa, Candida albicans
MKSRNSPSVDSPRSRRVVSMASTSTIQISHLGPEPASKEELYKYVLKVILLEYSNEARFRTPILESIKQTTRPSSNRSSMVFDQKIPQYALKNLKTQLQLIMTNKKQVDEKFRRSLLRIYGELLDPNSENEVRKIDFLIPKFAAFANQELKKVSQMNDDEITDTVFEQTRQFVDFLIEIVTAKKDYDPALISQLKARKDSFQTSNAKLQPESNQNVKYPTKSYRISDMNKSFVDLLKKIFDVDDTKLQQDVFKYKDIALAKPLHHDVQELAKIQVNLDNFSSDTALQQWKERQEHIKSQVINRYKIPSDLTLLPIPPIPSDEDYYVLPKNGESRIYFQTLVKCIMNSRNQMEFSDPNEPFFEKNELDLINICARAWHIDYPTRAVALYSAAQSADALVDFPLDTASKKSTPVNIIASEKLFHLCKQMVEDGNLDWDEKTIWSIEDQNEWVNDLSESYSQVFNALKENLQLIFNETVKPKFGPYLQFLGDYIESDALFPLMEETNLPKKWEKRLTKSLMKVAGGRYGEYLASLPRNGSVNVIHIINVCDSLIADIKKLQKRYKNPLLGFLNVARTVASITTGMFASDAEATLNYIKTILQNNDERIPYADALEVYQLLNEIRDIHNQVTPAGSVFKFDLEKFFYPYLEAWVNESDEKVHGIVNEALKKDNYEPIDLDEDDKRSSHTILDIFAIIKQYVMTIKKQNWNDENQINNVYTVLLKSISNGALFYSDQVSKKIIQELQPPAPEPTEEEIPESKKNWLHEVKNVVSNIQNFKRPEPEVVYNFEATTCVALNNLSAMMNQLTKLEDWIDVETLSATSSSPKQYLSHVFSIRIVRGENLRASKDAMWGKINPYVAAVDLNGKRLLTRTRTIDHNPDPEWDEEFEITIPPEQSSLDISVVVWDDRFGQHQLCGKAFLELNPRRFSTSGIPEEITLDLDFQGKVVLEVAVESEILDAKFVMGRAFRALMRAQERSIKLIVEKFSGFIQSCFSRANLKSVCAKGQPSREEFEQSIQNLCDYLNMNLSILKGFLMNEIFMKTMVATWKNVVSAADELMLPKLSKAKINTESGGTSWQSVSSKLATVSLSSIGILGIDGPLSINEIETVLGWLNFLCTFFHHEGNGPPMEDLKTDQYQSLLLVPALYDQTDEYLIEEVERLSTAYVQMLNNRNNADLAFHTENNGNSIKNGKSMNRTGSLLRNNTINANATAKARKQAAKEIKEAKSDPIASKTSKEDIILRILIARGKRNYVCQRLNQRAKLAYSMATERMARAAAERRFN

SEQ ID NO: 7807 - protein, 287 aa, Candida albicans
MKILTRQYHTIRPNYRKLQHIHFPGISSFQHGLNIQQLLVDANLDYKSLEFKYRRIQRQRQQISTNTNDSSLLALKNKIENLQPLPTILTFEFDNVYAGGLRSKSEVSPNDLEGFKRIGGQYFQLERGGQVTWHGKGQLVAYLILDLKSFVKLSTKCYINNVLLKSIQNLLKKTYHLDSVVGVENPGVWIKDNKSKSSSESLKISSVGVRIRHGITEYGIALNINPDLKYLNTFEMCGLKNKRATSIHKQLSHLPVPSVEHVGKLFVDEVALALEMNSVEHINANSL

SEQ ID NO: 7808 - protein, 696 aa, Candida albicans
  MISC_FEATURE (403)..(403): X=any amino acid
MSTGSSPFVDHKSNNSTISINNNSSILNESSISKAYVSKLEFQLDTIKTENRILQQEKDQITSDYRKIIDEKNQELENLKLNFKYVYDEKNQLESKLTNQEQVSTNNINQLSDEIQTYKRENLKLTKDYNSLLDKFNKLNRKNQQIMHDLNKEIEVNDKLHQELKIKEKTNQELQKASDTAINELEQYSKILDKKNGSDNLLYKNLTTKSNNLQNINHQLQNKIDQLLQNKTSNELLKQQNQSLLHKLQNLENIESKYLQLEIEKLQLETKYNDLFKALDTAIASSNEYKDNENTDDTIHTSKVKSFIEYCNNLQAKNLTLQEKYDSKIIQVKELTKELEDHAREIETDFLPTITDLESKLKVYADQNTKLERQKSLRDKEITFLRNSLKQMEQIHANQQHKXQEQEKEENTENKSISQYMTNLEKLVDEYKTKIDELEKKNLEYNKSSIIPNEKTPSNKRQRLESNYTFKTQAIELEKENIEISSKLKQAESTIEQLKFKISELDKVETRKEQYRILQLKNNLISQDQFIKQTTLIALRKENEELINKYIKNLPIEEQIPKGVFQRQEDDKQRLQAQIDHLTKRSTRLREVFTKKSKDIITVIAKYFGFIIEFLPNPINPTDLFSRIKLRSRYIPSEEDCYLIIDVENRGLKAHGNFQFKQICEELAQYWVNENNQFPCLLSAVNLKLYEIYASK

SEQ ID NO: 7809 - protein, 323 aa, Candida albicans
MTEQTSEATVVNNSPAPTIPKIKREKPTPEEIEERRKLKQLEVVPEGFSRKQWKRELKKQRWQDTKQEYLEVQREKKRLARQRKRERLKDLDENDELRKAQPIPSRQISTNNVSVIIDCDFDELMHEKEIVSLSNQIKACYSAMRHCTYKLPIQITSFNKRLKQRFEAQLHDYHLWQGNISFTDRSLTEYVTGAPNSESKDNDGNSNSNTTNSTDTINTENLVYLTADTDEEITKLEPNHTYIIGGIVDKNRHKQLCYNKAKELGIKVARLPIGKYIEMNGRHVLVTSHVYELLCKWFENDGDWETAFNKVLPPRKIKSKSPS

SEQ ID NO: 7810 - protein, 395 aa, Candida albicans
MTPPIKSPSSSSVDYGKLSEQLMIAYTKDVLQRNLQKFHGEQHRQQFKQLLNQPVIKSIHSLSGIIVRYRHNNSELDKALDTIDLPKIFERLEIREKTNKDKNLDYDDLLVLELLNYFKNDFFKWVNSPDCPSCGSNEDVQGLGAINPSSSKTISQSQAIIDQVSVIEVHECKKCKQKIEFPRINNPVTLLTTRRGRCGEWVNCFMLILQALIGGGDDDSDRIRYVWNQEDHVWCEYYSLSSKRWIHLDPCEGVYDEPLLYCNNWGKRMSYVIGFNYNYMIDLSDKYIVPEKQIPKNSIVNVQNVNFVISYSNGINQLKHFKRIEQQQQQQEVDVNEQRNLAFLKLYHNFLVPYNKEINQLKPELTKTTPSTDLPSGRQSGSTEWTKSRGENGES

SEQ ID NO: 7811 - protein, 465 aa, Candida albicans
MTSTSVNTEFEPCSITINGIAMETLSTPQESISIDSDPQSDNDNDVQEVKYPEGGLRAYSVVFGSFIGLMATFGTLNSVGAIQAYIATHQLSDVKTSTISWIFSIYTAISFANCMVVGPLFDVKGAMLPMVVGTVMISGGFMAVANCDTVPQFILALAICVGLGNSLNITPLIGVLSHWFNLKRGRAIGMATIGGSVGGIIVPLMLRSLYTNVGFVWAIRILGFFCLACNGIAILLCRSRICQESDTVTPKNSLWTNLVQIKDQFEFSALLDPKYSFCIVGTFFTEISLLSMLTYLATYAIAQGMSESQSYVLLTVFNTTGVLGRLVPGILSDKFGHFNIMIAMLIGFTLSMLILWLPFGSNIGALYAFAAISGFFSSSILSLTPVCLGSITPVQKFGQRYGLLYFFVSLGNLFGIPVSAAIIGNGSKHSYDMFAVYCCVFGVVGTCCWFISRFYIVGLKLNVRV

SEQ ID NO: 7812 - protein, 455 aa, Candida albicans
MIEAGFVLLFLGVSFLLLSYKQLNAIFYRVFRASTKKEPVIDVEKKVASSASASGSVYGSNEPLPDPTPLMITPEEVSNYDDRPWRPFRWPYHQTMAIFKLDINHWLDMDKYYMHYIKEKERIRHKYGKQNFDMLPEGYDGCFELMETVTNHLIARYPLLFTVLKDGNYEKGKTGDGKIIRNEITKEILDMTLPLKESPLVYVSKLAKEDFYVVKKNPTDRLHYLVGAAVPFPGGSFGIDQKIGHHIDTIHADVPYYKEKLKKSMERWFDRMKPNDPVERASWYITWDVKLKVNNIYQRPEFKPNLEAEMKSTDPKEFNVRVERQTLRRLPKSNVIIFTNHPVFYSIEEMKDEPMIPSLLKKILYEGPEDILKYKNFPLIRDHLAEYLDKLVARQYELGIINDETPLKTQPTYPFAYWSKTNFDYVNGWSNPSPSYDKKNMKTDTLKNVKLADNE

SEQ ID NO: 7813 - protein, 710 aa, Candida albicans
MTGRGNSGNSSRGRGGSRGRGASKGGSRGGRGGAKNGSSSGGRPNGDTSNGNGKGKGKGKGKVSKGKKSKEKGPNANLIPLGTPRTRKPNDDEGQNGPNQNQLNDLEGRIYDANEEAYVPPRLRQNPPNTAYSSANNFGTLPMTNNNNLNQDTVGNNQNNTVNNNSESTNNFQAGMAPAAAAAAAASPSAMGAPVTAAPVAEPGPTQVDAPIIMNPDPNWPAPLTKFYIDSMARIGNLKKAKQLTGKQQLANIIDMAVRRNVVDSNDWANQRVPICSGGGKLELEIFRIKKKPKKSNSTEDDTNKKSKEKPSNTNNNSFYIDVNGDAPYDPTKKPTTSKILNNSSSSSNNNNNNKKTKGDNKKFKETGNNFQKNENKKRQLQEEYDSEARKRARSERFAQISEFKPISTYYEDQRRKDSGAVVGTSEQLEKSYFRLTSAPNPAQVRSLKVLHDSLKYVVRKYEESHNYSYIIDQLKSIRQDLTVQHIKDEFTVHVYEKNARISIENNDLGEFNQCQAQLKSLYHRLRINKEKYKHRFILYEVEMMTYSFIYMIVTKNQSEINKFRLQYLKYKHFKKHEFEKPYFKLMSALFKSYLCTLQGDFEVFFKELEQFAHIKETKIAFKFINDHLLGKVRLESLYQIAYSYRRFLVVTASEKLRFPDPQSCLIYLGELGLEKCLMKGNHELDIPKTQVALKELIAKNHRVDIKGQI

SEQ ID NO: 7814 - protein, 741 aa, Candida albicans
MGFHAPLNGSSKNSKSSAFASFDSASVMQIVNKAKDKIVPDAQFHQTITDQGIRHYQEKLSPLLQNSYHGANVNTNKQDSSPMKSPVTLQHALNVRLESILSLNVRPGEPFFVLWFLISSYFPLIAACLGPLANMISIVALVEHWKVDIITRKNVPDIPKVVVMNAVSLALGLIGNISLLMNFSRSVKYLVSQSVSIIAWLCASALLAAALFVTNREFGGENPKYVPSEGFYFAAFTSGNYFVCMLILVINFMGYSLKKYPPTFNLDQRQRTLMLFTILFSTWTVIGAFTMGSLIDDISYGSALYYCIVSFLTIGLGDILPETSGAKVAVLVFSLGGVLIMGLIVATLRSVILSSAAPAIFWNDVEKTRIALLAQLDKENRHLTSEESFHEMRVLRRKVKSRHKKVSLALTIAVFMIFWLIGALIFQKIEKWSYFNAMYFCFLCLITIVYGDYAPKTSLGRVFFVSWAVGAVPLMTILVSNVGDTLYEISNDISAWFSTWMFSTKEEYRDLKWKKKKLQEDQEDQLTVNSEAVRSSELDEDLDLAKMEQEASLEARDNSSNGEIGAASIDNPNEDVKVKDNDTCITNSSNSNMRKDQENNSYSERSVCKSEKQNFDIERIRQKIASKKQVHEMLIDYLEKMKPLIGDSIESPNRKYSYKQWKGAYDGFWLSESSPLRLPLKEPNYLILKIYFEIEMMLRGLVDMEIEDLKTLTIQDVSNELSSSSSTDIKFARTIKFDDDK

SEQ ID NO: 7815 - protein, 301 aa, Candida albicans
MTYVLTAISHNDSKFETETLDSIKEFISNNFTLVSSKELSPRAIDYVISINDFESSKENVKEFSISKSFDLVIQLESSRKTKKLFIFDMDSTLIYQEVIELIASYADIEDKVAEITTRAMNGELDFNQSLAERVLLLKGIDASSIWDELKLKIQVTNGVPELCKALKKLNIIMGVCSGGFIPLAEFLKEKLGLDYAFANTLGIDDSNRLNGTTVGPIVNGEKKAELLLDIAKKHKIDPSDAVAVGDGANDLKMMFVAGFGIAWNAKPKVQKQAPACLNTKSLSDILYIMGYNDKEIKELID

SEQ ID NO: 7816 - protein, 454 aa, Candida albicans
MVVKKNRFCPAPAPRPHFYFFLLTSSIQGKNLFHNISITTYQICPRPRPRPRPLTYLMSCDSPIIVSLNDLKTDEGYPGLKDEILEKAFGPNSLGIIIIKDLPIQFVELRKKVLISASKLANLPTDQLKSLECEKNYWLTGWSCGKEKLRQTNNNNNNNNYSIPDDKKGSFYINCSFYKDDKLESPPQELVDKFPNHLTYTMKNIWPPEDENSGLIGFKQNLKNLCNLIISISESVAINCDKYIKSHYPNDYPSNDYLTKIVQNSTCTKARLLHYFPNYNYNYNYNNKEEEKEEEEDNNNLTDLEAEALSDDNWCGEHLDHSCLTGLTSALYIDESKGLNPHHAAAAAAVVLDNSSPDLDPDSGLYIKNRQNDKIIKINIPHDCLAFQSGSTLQQVSKNKFKAVPHFVKSGNNNKGKSIARNTLAVFIQPNLDEMVNEMENFAQYSDRILKSNH

SEQ ID NO: 7817 - protein, 213 aa, Candida albicans
MVLKTFKVDGISPIKAETLTPESFSKYGGVISADHQLEKVQSSEANYGTAIKIHKVAPIVNNYSNCPSGKEATANWNIFRCKAPKHLINHGSLNSVYTSKVLERHPFSTQTFLPLGQDLHKVSYLVIVAKTDESTEEKLPDPTSIRAFVCKGNQSVTYGIGTWHAPMVVIDEKVPHIDFAVFIHENGVADEDVQECYFEPGYSIVYNQIEAKL

SEQ ID NO: 7818 - protein, 548 aa, Candida albicans
MIPRLYRSFSISTTLRNELLDTAKMLQSSSSNTLNQPKNFKIHTTKPTSPESYERTVYPTNYNKPQDETLENSDIPMIKITELSRDLTTGLTTATTSIADYFFGNTHHSHHVFYSNLTVLKAKRAAKVENKKFIDLKLIKLTSGNGGNGCVSFFKDNFKPMGPPDGGDGGNGGSIYLNVVDKNITSLHGLQKRYVAKGGQPGKGSQLDGKSGDDIIIDIPLGTIVRWIPDPQDFKKFVSQREGDALNDVFMEFDIDDRDFIQLNRGGYRPGEGWIFKEHDEEYFRDKDFFQDLNEKVTGYDEELLFEESYNDRFPIVGLDCNQVTQKPLLLLRGGKGGLGNMHFLTKEIKGPRFCKMGRPGITANFLLELKLIADLGLVGLPNAGKSSLLRAISKARPRVGHWEFTTLQPTVGTIFTRIDKDPFTVADIPGIIKGASQNKGMGLDFLRHIERSGGLVFVVSLESANPVDDLKILLEEVGPRRMKDKNVLVVATKADLSSEGANFKVLRDYIEHNHSEWKIVPVCAPKGENVERCIKLMSEIAQTKKKP

SEQ ID NO: 7819 - protein, 623 aa, Candida albicans
MFRNYLNLPEILTQVYLNKYAILLILILIKLILLETSILDNLNSVLLDNSICDNGEIQPVLNTVHYMIVDSLQTLEAAGIVSIILTLKVIKQLALFFIELFFGTYICLLNAALKGSTEVALDASEGVIRAVNATVVSATNDIESALKGLSSIINDLVTGFNAIKNMFTGSKSDPTQYQNKINITLGDLKSKIMIPSEVLTKLDNFKNSSLYGLSQLGNGTQTIVSTPFELAIKKLNTMKSSYNFTTGAPSPINFREECLKDMSKLKDVQTDLAKLVEKISKWLFIGLVLAMVGSILYVSYIQWRHWRRMDKFINETGIDKEVQFRNQYNIYNNFLIYTIVKRMGIDLNERAIWMLSFMFSKISRNVFFFGIMGVVSVVAQYILLNSVQSSMNNHIKSFDITSNSTSMSASTIYLRDMNTYIDDTQDKLNQELFSGIKEISVSLNSTIVEFLDKLNETLSDIFGSTPLAGPINTVVYCTIGRKLEKVEKGLTWMNDNLNINIPSISRDIEDGLSHMTFLQPQSVLARANKIIDLYRKSILLELYISLGLLGVWLFQIFVGSATLTIRYWNSTRQGNNSYAISSPHELSEQEKQVYGYPLSHPLIDGKDLTTSSSFYPTTEEKSK

SEQ ID NO: 7820 - protein, 275 aa, Candida albicans
MFNLIRLGFPRTSIIRYYSSTAVNQAKVYSRTYKRAGPVTKSSTSTSRSTSTDASPASSSPPKESFSDIEPSSEVPVKSTTSYILHDAPLEASNKNNGETINWSDSFHGLGAQPFSKEIAEILLAPVAEEDIEIKPDGLLYLPEIKYRRVLNRAFGPGGWGLAPRTESLVTSGQISREYGLICHGRLVSIARGEQDYFGGEEKLTTALEGCKSNALMRCCKDLGIASELWDPSFIRRWKKKYCEEIFVEHVNTKKKKKIWKLKSIKTIDYPYKMT

SEQ ID NO: 7821 - protein, 479 aa, Candida albicans
MMLFLIHLMALCCMFVAEVACEQFNSTSNSSSAQSSLIDFQYKGVSIGGWLVLEPYITPSLFNATLSSGETWTDLPVDEYHFCEKLGAKEAEKRLTDHWESMYNETDFKQIKEAGLNMVRIPIGYWSFEKLEGDPYVSGAQDYLDKAIEWSHANDLKVMIDLHGAPNTQNGFDNSGLRNLGYPGWQNKTEYVNHTYKVLQQMFQKYGTGKYASDYKNTIIGIEVLNEPLNPNMDKLKEFYIESYNDGREIQVINNTIFFQEAFQPIGYWDSFLEKGEIKVTETSNGTNHTTTKKADFKNIIIDHHHYEVFTESQVASNVSTHLENIKNYASAIGKEKAKAIVGEWSAALTDCAPWLNGIGLGSRYEGTAPYTNDRVGSCAEFNKSPDKWSKKQKKDYRRFVEMQLYEYSTNSQGWIFWCWKTEGATEWDFRALVKNGIMPQPLDNYKYVKNGTDTSSASAIASNKMTLLLAFLLVILVI

SEQ ID NO: 7822 - protein, 503 aa, Candida albicans
MSYQITEKKDLTYVITENSIPQAQLEKNFSLLSTCAFQFTLICSALAIGTFLSTVIGVGGSPVLIFGFIVAITFDLIICYSLAELASAYPHSSAQIHWTYCLASEKYKRSLSFLTGILSCAGWIFACFSSTYVASMFILALAQIYHQDYVPKSFHYYLVYLAVFLSGYLVNVFLVKLLPLITNISVAVINFGTFFIIITLLVKSPKQSAEFVFKNIINETGWSSNGVVFFLGMLPSLACVTLFDGAVHLTDEIAQPERNIPLVMVISNTLSGVMAFFAAIVYMFCVVNVNNLSNPVGGEPIVQLMYDSFQSEALTTIGVVCLILTFVGSSYMYYTSTSRLIWSFANSNGLPFSKYIGEVSSNLKSPVYALSFLTVLCIIIGTLIMGSDGALNAVLGTSMVCINLSYLIPIACLLVKSKFSTTHRFNERPYFCLGKFGLPMNIASVLWVCFIMVWLNFPLSYPVTSDNMNYACVVLGITCIIGIILWFVHGRSRYDHNIDLKHF

SEQ ID NO: 7823 - protein, 454 aa, Candida albicans
MSSFANLFGKSTKVDENIEQLFKNTRDGPVSKDELVKKQRTVIKIPKVTAPKQQTNENESTSNQSADESDEEEEYNDESNEGDDSDDAEQTESTSKNDDENENLEAQYFDKLLSEQNEEQDESKESSDAKSSKAAEERTKTKVATTVDLKEKELEKADRTVFVGNVPADVITSKIIAKNFKNLFKHYGKIDSIRYRSISFDEHLPRKVAFAKKNLHKSRDSVNAYIVYKEKPASIAAKELNATVFEDHHLRVDHVSHPAPKDNKRTIFVGNLDFEEKEETLWKYFNSKLDQDVESVRIIRDSKTNLGKGFALVQFKDTLSVNKALLLNDKPLETGTQKKGRKLRISRAKSNAKPSLMSPNHFDNQKKKFAAGKSQQKLNDNQKTKIGRAQSTLGKADRSTVGKAKRIILEGQRATKGEAIKGIKGSKKGKKVKKPRIRERSTKFKEERKTMNKV

SEQ ID NO: 7824 - protein, 468 aa, Candida albicans
MKFTHLFFIGLLTKVYTETVTVLSTRSYRLATTESTPTDGTVYLTLTRQQSSSTSLNASTITTPPSNSSASVQTTAVTDCHFHNSVQYCVDGYGNEGSILPVPTNTNNLPTSYDGCHSHDGDTFCMDGDKEVQFVKLEDEDDEESSSSSGKKCHFHAGVEHCVDDNNHDAVTCERVKRDYDIPLRIGLLFVILVTSGIGSFGPIVLKQFVNLSQENYIIVIIKQFGTGIIISTAFVHLMTHAQLMWSNSCLKIKYEGTGASITMAGIFIAFIIEYIALRIVNARDTEKVDKKEIEETSSNEQSLHGISVNDKISVMILEAGIIFHSILIGITLVVTDDVYFITLFIVIVFHQFFEGLALSSRIISITNASLSTKLVMALMFALITPIGMAIGIGVLNKFNGNDPSTLIALGTLDSFSAGVLLWTGLIEMWSHDWLHGHLRNSSFVKTTVALVSLILGMLLMSLLGNWA

SEQ ID NO: 7825 - protein, 252 aa, Candida albicans
MGNIVQLTPEHISFLNEHLKTLSAYNIIKWAYFTFPNLYQTTAFGLTGLVTVDIISKLSQELEKDHLIDLIFLDTLYHFPQTHELVQKVEQKYRPKLHVYKPKDVSTEQEFAAKYGDQLWESNDAYYDFLVKVEPSQRAYKELGVSAVLTGRRKSQGGARSELTVLEYEETSGIIKINPLWNWDFKQVKAYIDDNKVPYNELLDLGYKSIGDWHSTVPVADGEDERSGRWKGKAKTECGIHVTTKYTEYMKE

SEQ ID NO: 7826 - protein, 640 aa, Candida albicans
MRPIDSIVSKFRVQKHTSNLADNPAVLKHPEDMPKLTSCLRCRKLKKKCDKSTPHCLNCENANEECTYVKRKPRQSKNGKTTTSESSLDPPSPMVNETFTGFSYLNQSQPNDLFRHIPSATTNTSTTTSTVAAAVPPTTNTSESVSSSRSHTPPILNSIDARAPNFHSYPKQISKVLISAVGIKTNSNVSIIPPIVDKDLLTSIIGSFMQHNYRICPVIHKKEFLENFQKLFKEDGIVDLDSHHDPYELYMVLAVGSTGLERTGIISRDKKLSEYFVSMALSHVHNNLSTNSLTNVRNLTLLALYSFFNPAEYTSWEIMGKLTRLAIHLGMNHKISDQDARNLSSKEIEMRSRLFWSVYNIDRLSSVSLGRPVALQDDDINVPFPQVLEEDETEDIAVNRLVINLRRLEGKILRRVHSVNIYKNFINKDKSQEEVCQEILSDLRKEIEDWYYQVKSVDNANTSVRQSVSFHLSVPWYTARYNHLLILLYRPSYLNPRPSQDLLDILGKSCLETLSYTYKLFKAKLLPLNWTTLYRFLMVCTTILYCLCKWAIDLMESKTEICYCIEIFQAFGSDWIVAKKCAEVFRKIENKLLEITLSDGHVSDMDNLSKELLGASSSYHEILNVHSVDLCIDTDFMYNF

SEQ ID NO: 7827 - protein, 327 aa, Candida albicans
MSIKFVKSSKDFEGYLKNNTHLVLNFTASWCGPCQAIKPVIDQAYGQFQNVEIVRIDLDSQRELASKYNITSVPTFVFLETGKEVDRIQGANPQALITKLQEFNTKANGQKRRGNGTASEDLITQNSSLKDIKPLIPKNFEILNATIDYSGYEVLNCLPLYKDSKTKHVVSLDNTDKSAVISDSDSQLLFYIPFLNISKIYSILVKVKSTKTYKEVDESALDVDSDDLDEIQPPNLIKVWCNTQSILSFDEASADTSAPHIEKVSTNDEEQWLDIKFKFVRFQNVQNLTIFVDGEDEDYHTVIEKIVIVGVNGESKEQGKINQIDDE

SEQ ID NO: 7828 - protein, 450 aa, Candida albicans
MSFMPSGSNPETASFTCNTCGVKFINAELQRQHMKTEWHRYNLKRRVAGLPSITAGVFAEKILTSKHLAKNENEDEYGFYVATRKKKTNGERQLTKKFLKSQKNRGRTEEVKLTIDGGREASPAASLTSDFSEFSLGDSDFHEVESIVTGSEINYTEESDFTDLEGELLSEEEEDDEEDAEEEANDSDGSSEAVESIPITHCFYCGLNNREIENNIKHMFNKHGLYIPERSYLVDPSGLLEYLSEVISLDYECLVCGFEGKNLESVRQHIASKGHCRIPYETKEEKLAISQFYDFSVEDEPKTQAKESTKKHVEFSDEAPSTIVVEYENQPGDNERGTGDNGINDNYELVYIDQSGVELTTPAGYRIGHRSMQRYYRQNLRSPREPTVAQTTQALVDTRLAPGLSPYYATKQEKETRRIENKTRNNVERKRNKTRRANYQKHYRDEILGT

SEQ ID NO: 7829 - protein, 225 aa, Candida albicans
MADKFPEIDTPAAGGDDDYEGDFLSREKELVGDEFTTDQDKQVFQDDEDEEINEFKEQFPEVDTKAQPSGISVTKGADKYDDDDDEFEGFESSNGAAKELNLSESQAIKEWKQRRDLEIEEREKLNSKKKEEIIEKAKSTIDDFYENYNSKRDNHQKEILSEQEKFISKRDDFLKRGTLWDRVNELVTEVGELPGDESRDKTRFKELLTKLKGKENVPGAGGYQE

SEQ ID NO: 7830 - protein, 853 aa, Candida albicans
MIQSEDHNQQPMPSSTEFSMKDSCLFTQPETNMETGGNAFNMSESLLFKDVIHDYETNEFSKANQTNLHDLIAPQEDLEPNQESLKQDSQELVVVDFDDMDQDFSPASKPSKTVKLFSGKQIKLAPRSTERVNIDEKQLSGIFLDMDSLTNKANLRNSFKENRKKLSDPPSLSSIKHDSTSSQIWTEKYKPNSFIQLCSAGNDRQYRLILQWLKKWSPVVFGDDILNTENSDLLGRPYKKILLIHGPTGIGKTTISHILAKHMGYTVQELNAANSMDTLPQASGGGSTAYTNAASALKLKIVNALTSNSIHSQGKPSCLIIDEIDSLANINDVVKVLNDLVQADHRALNKKLKRSSTEEIEAKKKSKKKDIFLNRPIICIANDIYSQQSNRFGPNPMEKLRPISEIIQFRKPTTSKTSSGAKTGGNAIKSVKDYLMQINKQENMGLDHQEIGDIVEICEGDIRACINHMQFNSRIVDTIERRISKDTHLIDRQLSWFAMTDQLFKRDPQLSKEENLARLFDGFMNGEGRALASNSGTFDRVLKGIFDKYLDTVHIQDDSLIKPCELSDWISYQSRFTRINETNEYSPLVLLKASSLFSDIRVQPGNQTLIPNAKNLDFEHSQLLKSNKNIIRSIENRLSVQMRVALGMNAENAASLVLPCLAKILSPHMSAKVKSDLNVTEKKCLERIAGLVKELDLSLEYSKDLETGLSSLKLNPDLDSLTIYDNYLTTIPAASVVKQTQLRRQSLFPLITAELDRIDVSKKSVKRSLEENTKESNNGDKAAKRSKTLATTSLNFFKGRYEEVNSKTHTANTDEGSSDGDKEFKTSRIWVKYNEGFSNAVRKNIGWNDLWIV

SEQ ID NO: 7831 - protein, 266 aa, Candida albicans
MVKSIAVFGGNGFLGRKICEVGVRRGYDVTSFSRHGEPPEAVVHQPWVAKVNWEQADIFQPLTYQDKLKNYSTIVHSIGILFENQSYKKAMNSNFNFLSDIQNLANNIMGSNPMQKDNVKSTYAAIQRDSAVVLADNYIKSKAEPPRNFVYVSADKVPPLVPEEYITTKREAEFELSCKKGLRSIFLRPGAMYDETHEGGLTTRDVLLRGLRFGVGLKECIVGKHIAGDLVRPVVSTEQVAESLYDALDDKEFEGVVTVEQIQSKK

SEQ ID NO: 7832 - protein, 541 aa, Candida albicans
MEEKARADHISITNSNELNYDDYSNSYKNQPELDDELFNEKPDLSLSSISRYFATRLTTLLDLPLYHTHKKWYEVINPIPGLKSMSKSDWNFYCLGFFAWALDAMDFFCVSVAAPEIANTLNISVTDVTWGVTLVLMLRSVGAVIFGIASDYFGRKWTYISIVTLFVVVEVGTGFVQTYQQFLGVRAIFGILMGAMYPIAMVTALEGQPIAARSVLSGLFLPGYCFGYIMAMVWYRAFAGTYKEGEGWRSLIWFSGGLSLILIVWRLFTPESPDYIKMKIKKEKFNQQQRLKEQEQNGGVAVKEKKFWQKIDKSILVTFKTEWLIFSYLVLLYAGWNFTTHGSQDLYVTMITKQYHVGLDKKTVIIVVSNIGGIIGGIIMGQASELLGRRLTVVISIVCAGAFLYPSFFNPDRNWPAYIFLNAFVFGSFSVGPAYLLELVNSTHRTLLSGVAYQLGNLVSSASATIEAKIGERFPLKDQPGMFDYGKVMCIFCGAIFAYMIFIIFLGPERFHRDLQIHDTDEIEELQQDSSSNNESVKERV

SEQ ID NO: 7833 - protein, 477 aa, Candida albicans
MAISPKIKALVDLATVIAILLNFFVYFYPDIVNPTEKCNWYNAPEQKSKYTFLNNNLPTDWVNKLVLNFPSLKEQEEVVSNDIHMLLFGDPQINGNWPSTKYIKRLDNYGNDYYLGHIYNTMKRRLNPSHVTVMGDLFSSQWILDSEFYNRTYRYVERLFPQPLEYKQNALEVHARHENYNWQQWLEDEKAMDPIHRFQSRVYNDVYDWVYRNRSTPNYDQPLFINLTGNHDIGYSGDATWQHMARFHLLFGQNNYVINYKKGSPDEWRIVVLDSLTLEGPALQEEFVNYTWSFLENLRDRENPNFKGSTILLTHVPMYKKAGLCRDGPEHKYYINNEKEPYKNGKLRSHNHLAYETTQKVMDIVFPNKGKSGIILTGHDHEGCDDWYNYINGEWIASKEKQSAERESVREVVVRAMMGEFDGQTGILTGHFDDARDTWDFHFSYCSFVIQHWWWASKVALLVVIFLQSFVKLFGGI

SEQ ID NO: 7834 - protein, 379 aa, Candida albicans
MVKLLLSIWISIYFMAGSSFASSSYLVSLHSQETIDTFMAYDATYPQDLQVGELINSKFKIGNFSGFSGSFSKDIIKRLERCPLVDEIVPDITVKAYDAVFQDSAPRHLARISRRKRMKPIKKYSYIYESDFIGKKVSAYVIDSGIAIGHPEFQGRARTGKDFTDEGPGDNNGHGTHVAGLIGSHTYGVAKGVQIIDVKALNSKGTGSLSTILVAIEFAVNHRLRSGRMGVANLSLGAYKNKLLNKAIDQATQTGLVFVVAAGNNNINACLTSPSSSPYAITVGAIDDYNDSIASFSNWGECVDLFASGAYVKSVNIRSDFRPSVLSGTSMAAPIVTGLVANLLNEGVDPELIKGQLIEMSTKHRISKSSLFLKKRTPN

SEQ ID NO: 7835 - protein, 560 aa, Candida albicans
MVSNTLPEHESNTSLHDMEKKQLADQLGDIHYKILPIKKLLICLFSLSLALFLSFVDQTSVTIALATIGKDLNAETTINWAPTASLLANCICQVLFGRLSDIFGRKVMLITCLICLSLGELICSFAKSGVEFFVFRALTGLSCGGIQSLCMVILSDVVTLKQRGKYQGILGASVGLGNSIGPFMMAAFIEHNTWRNFYRMMCPINILAFVIIAIFIDTKQQTKQLNQLLSKSEQFKKLDYLGMLIGCSGLTLLLVSISSGGSTYNWNSAPVISMFVIGGILLITFLFVEWKVPELPMIPLNLFSRFSLGLILGSNFFFGMAYYGFTFYIAYYYQIVLGLDSIHSAILMLPLVIPQSVVSAIAGQIISYTGHYIYVIIFGYSLWTLSCGLTLLFDSNTNYGVITVVLLLMGTGVACTFQPTMVAAQSQAKKSERAVVISCRNVIRSLGGAVGLAVASLIITNSLLKEITKQENRQDISSTSSVPTGYLMYLKTHVYSKVDTTQLTADQVLIVRQMYMQAIRNFFYLTIPLLALCLISSLFVKDKGLQCIDEEPEKEEKELQ

SEQ ID NO: 7836 - protein, 492 aa, Candida albicans
MSSFELEELCLAMLDELPELSYDYLGNTIVQKLFTLVESSLVKLMMVKEVAPYLTQLGIHKNGTWAIQKIINLCHSDYQQMYLIGASLKPYAVKLFNDQFGNYVIQGCIKFGSPFNDFVFEAMLDNFLEISVGRFGARCIRTILESCHDSSSTSPVTNEQVLLVAGLIIEFANELAVNSNGSLLITWYLDTFKDCDSKIELLMSKFLPNIRALCVHKLANLTVLKILNNRIDDKSRVATMDAIFNNKETLEYILQESDNSNTTAGPLFIYKILSNPTLADLVNQHIPTIRKILMELNIVNFQNYKKLMDEVGISSTRIGRNGSTKRNGATNGSSRRGGNMRGNKQDGYVTQVPPPPPQQQQQQQQQQYFVQGISNPPASLQQGQHSPIKPQLQQQQQQQQRSGSPPFQNRYIPMPQAPSQYNNVTPQMYMKQMYAQQQAQIQQQFYLQQQQQQQQQQQQQMSPQEFAVMQQLEQLSLSSAALGYNSNPGTPT

SEQ ID NO: 7837 - protein, 465 aa, Candida albicans
MKVTNVISFATVASTAVSLVIPDITSFFSSFNQILIPHHQQALLINQDAHLPSDDNQPDTKTGILSNPLNKIIPNHYIVVLKDDLSQAQFLQHQNWVQNEHVSISSCKSNVNKKPLEFFQIDNFVRGYTGFFTDDLINKILELPEVAFVERDSIFHTVEFDIQKDATWGISRVSHRENIDDGKYLFDNDGGKGVTAYVIDTGIKVGHPDFEDRAQWGASIAFPNIKQDYNGHGTHCAGTIGSKTYGIAKNVNLVAVGVMNMLGAGSTSDIIKGLEFVVKSHQDDVRAKKKGFKGSTVNMSIGGGISDALDLAVNAGTKAGLHISVAAGNDNADACQYSPARATGPITIGASNIRDEKASFSNWGSCVDLFAPGEDIESTFIWSDTTVMSGTSMASPHIAGLLSYYLSLQPDVTSEFYTQAIEPADLKNKLIKYGTKGVLTGLDSVSPNILAFNGAGGNLTDFWSL

SEQ ID NO: 7838 - protein, 445 aa, Candida albicans
MLVDNYIKASSIKFNISIAPCVEIARYLKSNQQQQVRLQPHEDPKQLLSHQQQQQPDTQYHYQNHHHNKQYRQRQRRQTQEHKQQQGTPRIRRPSSSLSPLYSPKTKKSTPNKTTKTLLHKSSTSPTSPPPPKKKKSKNRIIVPNEFINCDLDIIITLINRMLISLIKLNDNNINNNNNTTNINNPTPPTRFHSKTPPAISIFSYINRLTKFNNLKSSGLITMIYYIDILSYMYPHFQLNSWTIHRFLLVATMISQKAMEDYFYTNDHYAKVGGVSLEELNCLELDFLKRIDWRTIPINNPNVQQLYYNKLVEMTGKISNMVDNNNSGDSDNTDTRYKHTKFIMENEDPTDDEEEEEGDSEDSEEDLEDDDDEDDDDEDDEFYDSDEDINSEDNGDIEIDDYEMEEENNSNVPDLPNIPMYKYDNNGFSMDGSSSPHLKRRYSKD

SEQ ID NO: 7839 - protein, 376 aa, Candida albicans
MIRTLITTTIIPIIAYIINNTPSYIWAIIDFIMDICFFWVKQLYQIYNRKDPLKEYVKQLKIAPNYNDWKEVAYEVDKLTNMDLWRQNFISKHYDYVLIDERLKLLREARLNQNSQVMMSLLRSGLIRNFAGVAQKRLYLKSYMGTKFKIEEYINEVLNCLDYLNEALNNDNNDEYIMNSKQLKLDFFHDARQSFGCSALLLQGGSLFGLCHLGVVKALYFKGLMPRIIGGSAVGAAVASLVCTLTDEELIPILVNIGDLMKNIDLLNHEIDERYGNVIENVVKKGYSQEILLFLKFVRDTIGDLTFEEAYMKTEKILNIVVHPTNQCVPSLLNYITAPNVIIWTAIYASIGTGVLSDDVALYVKDFNNEICFTNS

SEQ ID NO: 7840 - protein, 1404 aa, Candida albicans
MTDFWLNYLDNPTLSVLPHDFLKPANNKSVEGTYTFKIDNGSTDFKFGLAVFAALVYRLTGDEDIVIATDESANTPEFIVRLNLTPELTFQELVSKITKEYENNISQINYKALSEVSHRIKEAKGLDENPGLFRLSYQHAHSNQQLNTTVEGSIRDLAIYTDGTKFTIYYNALLYSHERIVIFGEQFAQYLTTVSNDTNTVITKVNLITDSQKKNLPDPTIDLDWSGYRGAIQDIFMDNANKHPDRTCVVETESFLDSNSKTRSFTYQQINQASNVVGNYLKETGIKKGDIVMIYAYRGVDLMIAVMGVLKAGATFSVIDPAYPPARQNIYLSVAKPKGLIGLEKAGTLDQLVVDYIGSELDVISTIPQLKVQDDGTLVGGKLEGADNDCLNDYQKFKDQPTGVIVGPDSNPTLSFTSGSEGIPKGVLGRHYSLAYYFPWMAKRFGLSEKDKFTMLSGIAHDPIQRDMFTPLFLGAQLLVPTADDIGTPGKLADWMAKYGATVTHLTPAMGQLLSAQATTAIPSLHHAFFVGDILTKRDCLRLQSLAENVFIVNMYGTTETQRSVSYFEIKSRKADPTYLKNLKDVMPAGTGMHNVQLLVVNRNDRSQTCGVGEVGEIYVRAAGLAEGYRGLPDLNAAKFITNWYVNPDKWIEQDEANKNSSETWREHGWLKPRDRMYRSGDLGRYLPDGNVECCGRADDQVKIRGFRIELGEIDTHLSQHPLVRENVTLVRRDKNEEPTLISYIVPKDSPELKTFKADVDDSIEEANDPIVKGLVAYRELIKDIKGYLKKKLASYAIPTIIVPLVKLPLNPNGKVDKPKLPFPDTAQLAAVAKLSVSSHDAQAAEEENLTKLEEQIRDLWLDVLPNRPATISKDDSFFDLGGHSILGTRMIFELRKKLNVEIPLGVIFKNPTVEQFAKEVEKVIKGGQDFQLADEGKTIQEENKDVADSQSENLNYAEDAKELSKSALLESYSSLKQLPSGSINVFVTGATGFLGSFIVRDLLTARNKNLDIKVYAHVRASSKEAGLQRLRQTGITYGIWDENWAEKIEIVLGDLSKEKFGLDNSQWLDLTNNIDVIIHNGAFVHWVYPYSQLRDANVIGTINVLNMAGEGKAKFFSFVSSTSALDTDYFVNLSDELLAQGKNGISEADDLQGSAKGLGNGYGQSKWAAEYIIRRAGERGLKGCITRPGYVTGFSKTGASNTDDFLLRMLKGSAELGLYPDITNNVNMVPVDHVARVVTATALNPPSSEELTVAHVTGHPRIQFNDFLGCLKAYGYEINPVDYPVWTSALEKFVTEESKESALFPLLHFVLDNLPQDTKAPELDDSNAAKSLKQDSKYTGEDFSAGKGVDLDQTGVYISYLIKIGFLPKPTGTGEKKLPEVEISDESLKLISGGAGARGSAAK

SEQ ID NO: 7841 - protein, 962 aa, Candida albicans
MRSSGYLNSNNGSSSSLESTNVNKSTDKNQLYLKVVCNCATDLVPQDTTGTGSESKKAYSSSKSINPVLVVQLNNTIKSTSKKLNTNQPSWNDELYMPLKNQDDSSLLIFSVWDKHTRYKNYLGELRLNVKDIFVDNGNFVDKTELKWYHLNSNTKYHSFVTGSILAGFELVIKNKKKRFHSSYNDKFQQLSIDSDVESAFKKWLSSLTKPTIYSVNNKINPNDQGFYDDELVNEFELESVLTERSKKSHLNVPGGNGLLSVPGDDCHDAGSFSDASFLSDGGYASDASANLFDQKETSSDSKKSRIKSKMRLRRSKQEYENFELASRQVLGVVFIEIVSCEDLPPYKNFTRTSFDMDPFVVVSFGKKTFRTGWKRHTLNPVFNERLAFELLPHESNFSIQFLVLDKDHFSFHDNVAHISLPLRTLTEYATAKPTEGDSSDVNTSDSTSFSQTGNGFTTEDTEFPENDSVQIIENETPSNKQSRKRYLSRKKVVGTQLDLKKFKAMSLSLQLHDQKYIGKYAPKLKIRVRFETYTELRKKFWRVLLEESNSTPENRDSCDYIELISLLDTLGCVNSDELVELFYSNLGKSSWGGDLLTFDEIIDQMETYVNQNVESGKVKIFEFEKCPICNEKRVSKKQDLDIITHFAICASKDWSVVGKLLSSSYVTPTQATKKWFTKALIKLTYGKYKLGGNSANILVQDRMTGIIVEEKMSVYVRLGIRLLYKGLDKARSKRVRILLKNMSIKQGKKFDAPQSKSDIASFIKFHKLDLDECEIDDPSQFATFNDFFYRKLKPGAREIEDEKNSKIVTSPADCRSVVFESIDKATQLWIKGAGFTIPKLIHNDHSMRVSSYTLGIFRLAPQDYHRFHSPVDGVIESIKHIDGEYYTVNPMAIRSELDVFGENVRTIVTIKTKDFGNIYFIAVGAMMVGSIVLTQRYRIRDFERRRIGLLQIWRVYCFIIN

SEQ ID NO: 7842 - protein, 521 aa, Candida albicans
MQSQLVQPTIETLKKTIDANSSLKESPNVYPVYKYVPYNDITIHQAYLKLANLNDSNRTESFLFESSVKGDTVDRYSFIGIQPTKIIKTGDNPKQFADEFCNVDPITVLEKELSKYKQAPLPGLPKFNGGATGYISYDCIKYFEPKTKRPMKDSGLPEAVLMFCDLVVAFDHVYQRFQIIYNIKIDDNRDKINEDIESLYKQATENIEKVEKVLLRNTSSEEIAPKQGPIKLGQNFTSNIGQEGYEKHVTTLKEHILKGDIIQAVPSQRIARPTSLHPFNIYRHLRTVNPSPYLFYIDLLDFQIIGASPELLVQSDTKGRIVTHPIAGTMPRGKTNEEDEENAEILRASLKDRAEHIMLVDLARNDVNRVCQPTTNKVDKLLTIQRFSHVMHLVSEVSGTLREDQTRFDAFRSIFPAGTVSGAPKVKAMELIAELEKEKRGVYAGAVGHWGYDGKTMDTCIALRTMVYKDGVAYLQAGGGIVFDSDEYDEYIETMNKMKANNNTIVEAEKIWANKVGQLEG

SEQ ID NO: 7843 - protein, 577 aa, Candida albicans
MRFKIRGPLIQLRYKSTKPFYITTPICYVNAAPHIGHLYSMLIADTRNKWEKLNPSKESFMLTGTDEHGLKIQSTAEKLGLEPKVLVDKVSQNFSKLAEQFDVNYDRFIRTTDNDHIELVRYFWNLMMEKGFIYTDTHSGWYSISDETFFPETQIEEVVKNGKAVKISSETKNEVVYQKETNYFFKLSMFQEQLIQFLKQNPEFIKPKHRYQFILKELEDTKLPDLSISRPSSRLKWSIEVPNDSTQKIYVWFDALLNYLTATKFPHGFEVQDSKFVTPENSIWPATHVIGKDIIRFHCIYWPIFLMAAGIELPKQVIVHSHWLCDGFKMSKSLGNVVDPMEISEYYGVDPVRFFLVENSNIDDDCKFSEELLQRSRDAVLGKYCNLISRIGGKNFSIEEAVKSSASGEFNNIREIIETYTINKDSVEGLLSSSSKLTTDLNDLYNQMDHYFTNFDYIRAIQCWWSVINQANQIFQSAEPWTYVKLINSPETPAELKEKYRILNNYFVYLCAETTRISSILIQPVMPQLSKKILDRLNVSGRTSEFTTFGADLQYGSGANSKSHKVPLEKIAPRDIK

SEQ ID NO: 7844 - protein, 469 aa, Candida albicans
MYESNDEESDQIKQDRLRNRQIEYELFRTILPSDIYIYPPSQDYENELNNNDHVNKEYLITGRLIDVKLDDGNFIHEFYLENNNESTFGNQQQQQHIVIIHGYMAAMGYFIKNVEDVIKIPGVRLHLIDLPGFGNSSRPKFPKEFILEPNSLSAKINQILQIENWFIDKIENWRIKSNINQFKLIGHSMGAYLSCCYLMKYNLSTSGNENEKLVSDVILVSPMGTESNEFSLINDKRFQFNLHNKIDPFQELHFENENENENENENENQLVPNDDDDDDDIIINEEITKIWSKLGKPKFPKNWLLKKLWSSNKSPFEFLQNFGPFYSKILSYWSFQRFKNFENNQNTIDLILKLHNYSYSIFNQFQGSGEIAISQLITPEILAKLPLADRGLIDFLVENNINNMWIYGDNDWMNKNGGEYIYQQIKTKNEKITQFKVVEKAGHHIYLDNPQTFNQIVIDFLKLNQLDFL

SEQ ID NO: 7845 - protein, 341 aa, Candida albicans
MSKGDLEELDIQKLIVEKRLEQSNGSGFATMKRNKRALGTCLFVSLGGILYGYNQGMFGQVSSMHSFGETVGIGKIQDNPTLQGLLTSILELGAWVGVLMNGYVADALGRRASVVIGCILFNIGVIIQAVARDADYGYILGGRFVIGLGVGVLSMVVPLYNSEISRAEIRGANTAIYQLSITFGIMISYWITYGTNFIGGTGDNQSQASWLVPMCIQAAPAIILAVFIYSFPESPRWLINVGQEDKALEVLAWLRETEQENVGLQIEFLEMKAQKIFEQTLETEAYPHLQDGTKMSKFKINLNQYKSMVTHLPTFKRVSVACLTMVFQQWTGAYVSNTFFF

SEQ ID NO: 7846 - protein, 357 aa, Candida albicans
MSVTSFKIKVPASSANIGPGFDVLGIGLQLYLTITVTIDPSIDTSSDPHHALLSYEGDGKVPFESNENLITQTALYVMRCNGIKDFPRGTHIHVNNPIPLGRGLGSSASAIVAGVYLGNEIGNLKLDKYRLLDYCLMIERHPDNIAAAMLGGFIGSYLNELSSEDSQLITVPLDYILPKVKNGELITPQNKIVSQQPPNNIGQYVEYKWNKKIKCLTIIPNFELSTDLSRSVLPKNYQLPDIVYNLQRIAILTTALTQDPPNHKVIYQSMKDKLHQPYRFGLIPGLNTVLQKITPESYPGLCGICLSGAGPTILCLATDGFEKIANDVIEIFKQEGIECDSKLLDLAYDGATVEYGS

SEQ ID NO: 7847 - protein, 474 aa, Candida albicans
MPLFLQLIPSAPSFSYTISLPSSFSFYFFNYYNLMSFKGFKKGVLRAPQTMRQKFNMGEITQDAVYLDAERRFKEIEMETKKLSEESKKYFNAVNGMLDEQIDFAKAVAEIYKPISGRLSDPSATVPEDNPQGIEASESYQAVVKDLKDTLKPDLELIEKRIVEPAQELLKIIQAIRKMSVKRDHKQLDLDRHKRNFSKYESKKERTVKDEEKMFSAQAEVEIAQQEYDYYNDLLKNELPVLFQMQSDFIKPLFVSFYYMQLNIFYTLYTRMEELKIPYFDLSTDIVEAYTAKKGNIEEQTDSIGITHFKVGHAKSKLEATKRRHAAMNSPPPTGASSIASTGTGGELPAYSPGGYNQPYGDSKYQPPSSPATYQSPVVAATAQSPATYQSPVATGQPPSYLPQTPASAPPPQVGSGLPTCTALYDYTAQAQGDLTFPAGAVIEIIQRTEDANGWWTGKYNGQTGVFPGNYVQL

SEQ ID NO: 7848 - protein, 570 aa, Candida albicans
MSMSTPMPTPTPLDTKKMPPKEKKNKDDRPYKCTFCDKAFHRLEHQTRHIRTHTGEKPHACTFPGCVKRFSRSDELTRHLRIHTNPSSRKRKNKNQNMMINPNATTATTTGPAGMAIPTSNLPPGSYAIPNTAIPFSIDRNGNHVYHQPYPVYFVPHANGYMQPMVQTQGVTVVPNTDQQQQQYYQQQQQQYQFQERPQHQQQQQTNIGTNNHLQQNGSAVFSLPSSPTMASAQTPNSGTSSSSESIKLAPLSIPNNISRSQQQQQQQQQQQIPKSESSTSLYSDGNKLFSRPNSTLHSLGSSPENNNASGPLSGVPTPSFSNLNDYFQQKSNSNNSRLFNASSSSLSSLSGKIRSSSSTNLAGLQRLTPLTSTTNNTNNTTTSNTNNNNMTRPSIIPKQPSSTSLNLEFYNGNNQQQQNYHTHKKSRPNSPSQTPIHLSSSRKSANNSFIISPNETPLQTPLQSPQLKPYQDQPPTNVNINVSAPSDTFIGTAVTEKLNNISSIAGNGTQLPPIRSVLSFTSLVDYPDPKQKNVAPPVVDTTNVARGETNGSNGNNSNAKPMSLTNLLS

SEQ ID NO: 7849 - protein, 544 aa, Candida albicans
MRKELKCIIWAHVGLIVYLLYLSFDLLSLLNDDIFSDALLDVEINPNPSTSLNKPAIIPKIIHQTYKTTDIPEIWKPGQQACINLHQDDYQYFLWTDESAREFINKEFNWFIDTWDNYKYPIQRADAIRYFALYYYGGIYIDLDDGCKRKLDPLLTVPAFVRKTAPTGISNDVMGSVPNHPFFLKVIQDLEKYQRNWLVPYITIMMSTGPLFLSIMWKQYKRWGVPEAGKVRILLPQNYKGTTSSYFAIVRGSSWHMGDANFIKSLGDHLVLAVIGGFLLGLLILFVEYLFYSWVISSQCKRLTSKLLSFTWAILMGVLRFFHLDKLLSKCDFWSRSTKYEEMLLPKDSNDLKNINNNNTSNNNTNGGDSNNNDKSDYNNNDNNNNNINNHTGKTRLSSIFNILGGKTKVKRRNRKDSNLPIEIDVLSKLLDDTVIIDASTTETPTNPVSPTPSPISPTINSRTSNNELLIPTNNNNNNNNNTNDNTNNVNNINNRTTCDDQSTLLPYSTRLSSSSSSSSSSPSSSTSSLPSHETIMKLNNDIV

(The sequence listing continues in the following parts.)

What is claimed is:

1. A method for constructing a strain of diploid fungal cells in which both alleles of a gene are modified, the method comprising the steps of:
(a) modifying a first allele of a gene in diploid fungal cells by recombination using a gene disruption cassette comprising a first nucleotide sequence encoding an expressible selectable marker, thereby providing heterozygous diploid fungal cells in which the first allele of the gene is inactivated; and
(b) modifying the second allele of the gene in the heterozygous diploid fungal cells by recombination using a promoter replacement fragment comprising a second nucleotide sequence encoding a heterologous promoter, such that expression of the second allele of the gene is regulated by the heterologous promoter; and
wherein the gene encodes a polypeptide consisting essentially of an amino acid sequence selected from the group consisting of SEQ ID NOs: 7001 to 7932.

2. A method of assembling a collection of diploid fungal cells each of which comprises modified alleles of a different gene, the method comprising the steps of:
(a) modifying a first allele of a first gene in diploid fungal cells by recombination using a gene disruption cassette comprising a first nucleotide sequence encoding an expressible selectable marker, thereby providing heterozygous diploid fungal cells in which the first allele of the gene is inactivated;
(b) modifying a second allele of the first gene in the heterozygous diploid fungal cells by recombination using a promoter replacement fragment comprising a second nucleotide sequence encoding a heterologous promoter, such that expression of the second allele of the gene is regulated by the heterologous promoter, thereby providing a first strain of diploid fungal cells comprising a modified allelic pair of the first gene; and
(c) repeating steps (a) and (b) a plurality of times, wherein a different gene is modified with each repetition, thereby providing the collection of diploid fungal cells each comprising the modified alleles of a different gene, and
wherein each different gene encodes a different polypeptide consisting essentially of an amino acid sequence selected from the group consisting of SEQ ID NOs: 7001 to 7932.

3. The method of claim 1 or 2, wherein the selectable marker in the gene disruption cassette is disposed between a first region and a second region, wherein the first region and the second region hybridize separately to non-contiguous regions of the first allele of the gene in the diploid fungal cells.

4. The method of claim 3, wherein the selectable marker is selected from the group consisting of CaSAT1, CaBSR1, CaURA3, CaHIS3, CaLEU2, CaTRP1, and combinations thereof.

5. The method of claim 1, wherein the diploid fungal cells are cells of fungal species selected from the group consisting of Aspergillus fumigatus, Aspergillus niger, Aspergillus flavis, Candida albicans, Candida tropicalis, Candida parapsilopsis, Candida krusei, Cryptococcus neoformans, Coccidioides immitis, Exophalia dermatiditis, Fusarium oxysporum, Histoplasma capsulatum, Pneumocystis carinii, Trichosporon beigelii, Rhizopus arrhizus, Mucor rouxii, Rhizomucorpusillus, Absidia corymbigera, Botrytis cinerea, Erysiphe graminis, Magnaporthe grisea, Puccinia recodita, Septoria triticii, Tilletia controversa, and Ustilago maydis.

6. The method of claim 1 or 2, wherein the gene corresponds to an open reading frame selected from the group consisting of SEQ ID NOs: 6001-6932.

7. The method of claim 1 or 2, wherein the method further comprises
(c) introducing a nucleotide sequence encoding a transactivation fusion protein that is expressible in the diploid fungal cell, said transactivation fusion protein comprising a DNA binding domain and a transcription activation domain; and wherein the heterologous promoter in the promoter replacement fragment comprises at least one copy of a nucleotide sequence which is bound by the DNA binding domain of the transactivation fusion protein, such that binding of the transactivation fusion protein increases transcription from the heterologous promoter.

8. The method of claim 7, wherein the promoter replacement fragment further comprises a selectable marker.

9. The method of claim 8, wherein the selectable marker is selected from the group consisting of CaHIS3, CaSAT1, CaBSR1, CaURA3, CaLEU2, CaTRP1, and combinations thereof.

10. A strain of diploid fungal cells comprising modified alleles of a gene, wherein the first allele of the gene is inactivated by a gene disruption cassette comprising a nucleotide sequence encoding an expressible selectable marker; and the expression of the second allele of the gene is regulated by a heterologous promoter that is operably linked to the coding region of the second allele of the gene, and wherein the gene encodes a polypeptide consisting essentially of an amino acid sequence selected from the group consisting of SEQ ID NOs: 7001 to 7932.

11. The diploid fungal cells of claim 10 further comprising a nucleotide sequence encoding a transactivation fusion protein that is expressible in the diploid fungal cell, said transactivation fusion protein comprising a DNA binding domain and a transcription activation domain; and wherein the heterologous promoter in the promoter replacement fragment comprises at least one copy of a nucleotide sequence which is bound by the DNA binding domain of the transactivation fusion protein, such that binding of the transactivation fusion protein modulates transcription from the heterologous promoter.

12. The strain of diploid fungal cells of claim 10 or 11, wherein the gene is a gene essential for the growth and/or survival of the cells; or contributes to the virulence and/or pathogenicity of the fungal cells against a host organism.

13. The strain of diploid fungal cells of claim 10 or 11, wherein the gene corresponds to an open reading frame selected from the group consisting of SEQ ID NOs: 6001-6932.

14. A collection of diploid fungal strains comprising diploid strains of claim 10, wherein substantially all the different genes that encode the amino acid sequences of SEQ ID NOs: 7001 to 7932 are modified and are present in different diploid strains in the collection.

15. A collection of diploid fungal strains of claim 10 each comprising the modified alleles of a different gene, wherein each gene is essential for the growth and/or survival of the cells, and wherein each gene encodes a polypeptide consisting essentially of an amino acid sequence selected from the group consisting of SEQ ID NOs: 7001 to 7932.

16. The collection of diploid fungal strains of claim 15, wherein each of the genes corresponds to an open reading frame selected from the group consisting of SEQ ID NO: 6001-6932.

17. A collection of diploid fungal strains of claim 10 each strain comprising the modified alleles of a different gene, wherein each gene contributes to the virulence and/or pathogenicity of the cells to a host organism.

18. The collection of diploid fungal strains of claim 17, wherein substantially all of the genes in the genome of the diploid fungus that contribute to the virulence and/or pathogenicity of the fungal cells against a host organism are modified and present in the collection.

19. The collection of diploid fungal strains of claim 14, wherein the essential genes present in the collection all share a characteristic selected from the group consisting of: similar biological activity, similar intracellular localization, structural homology, sequence homology, cidal terminal phenotype, static terminal phenotype, sequence homology to human genes, and exclusivity with respect to the organism.

20. The collection of diploid fungal strains of claim 14, 15, 17, or 19 wherein the cells of each strain further comprise at least one molecular tag of about 20 nucleotides, the sequence of which is unique to each strain.

21. The collection of claim 20, wherein the molecular tag is disposed within the gene disruption cassette.

22. A nucleic acid molecule microarray comprising a plurality of nucleic acid molecules, wherein each nucleic acid molecule comprises a nucleotide sequence that is hybridizable to a target nucleotide sequence selected from the group consisting of SEQ ID NO: 6001 through to SEQ ID NO: 6932.

23. A nucleic acid molecule microarray comprising a plurality of nucleic acid molecules, wherein each nucleic acid molecule comprises a nucleotide sequence that is hybridizable to the nucleotide sequence of a gene that is either essential to the growth of a diploid fungal cell or contributes to the virulence and/or pathogenicity of the diploid fungal cells against a host organism, and wherein each of the gene encodes a polypeptide consisting essentially of an amino acid sequence selected from the group consisting of SEQ ID NOs: 7001 to 7932.

24. A method for identifying a gene that is essential to the survival of a fungus comprising the steps of:
(a) culturing the diploid fungal cells of claim 10 under conditions wherein the second allele of the gene is substantially underexpressed or not expressed; and
(b) determining viability of the cells; whereby a loss or reduction of viability as compared to a control indicates that the modified gene is essential to the survival of the fungus.

25. A method for identifying a gene that is essential to the growth of a fungus comprising the steps of:
(a) culturing the diploid fungal cells of claim 10 under conditions wherein the second allele of the gene is substantially underexpressed or not expressed; and
(b) determining growth of the cells; whereby a loss or reduction of growth of the cells as compared to a control indicates that the modified gene is essential to the growth of the fungus.

26. A method for identifying a gene that contributes to the virulence and/or pathogenicity of a fungus comprising the steps of:
(a) culturing diploid fungal cells of claim 10 or 11 under conditions wherein the second allele of the gene is substantially underexpressed or not expressed; and
(b) determining the virulence and/or pathogenicity of the cells toward a host cell or organism; whereby a reduction of virulence and/or pathogenicity as compared to a control indicates that the modified gene contributes to the virulence and/or pathogenicity of the fungus.

27. A method for identifying a gene that contributes to the resistance of a diploid fungus to an antifungal agent comprising the steps of:
(a) culturing the diploid fungal cells of claim 10 under conditions wherein the second allele is substantially overexpressed and in the presence of the antifungal agent; and
(b) determining the viability of the cells; whereby an increase in viability as compared to a control indicates that the modified gene contributes to the resistance of the diploid fungus to the antifungal agent.

28. A method for identifying an antifungal agent that inhibits the growth of a diploid fungus comprising the steps of:
(a) providing diploid fungal cells of claim 12; and
(b) culturing the diploid fungal cells under conditions wherein the second allele of the gene is underexpressed and in the presence of a test compound;
whereby a loss or reduction of growth of the diploid fungal cells as compared to a control indicates that the test compound is an antifungal agent.

29. A method for identifying a therapeutic agent for treatment of a mammalian disease, the method comprising the steps of:
(a) providing diploid cells of claim 10, wherein the modified gene in the diploid cells is an essential gene and displays sequence homology to a mammalian gene associated with the disease;
(b) culturing diploid fungal cells under conditions wherein the second allele of the gene is overexpressed or underexpressed and in the presence of a test compound;
whereby a difference in growth of the diploid fungal cells as compared to a control indicates that the test compound is a therapeutic agent.

30. A method for correlating changes in the levels of proteins with the inhibition of growth or proliferation of a diploid fungal cell, the method comprising the steps of:
(a) generating a first protein expression profile for a control diploid fungal cell which comprises two wild type alleles of the gene;
(b) culturing diploid fungal cells of claim 12 under conditions wherein the second allele of the gene is substantially underexpressed, not expressed or overexpressed, and generating a second protein expression profile for the cultured cells; and
(c) comparing the first protein expression profile with the second protein expression profile to identify changes in the levels of proteins.

31. A method for correlating changes in the levels of gene transcripts with the inhibition of growth or proliferation of a diploid fungal cell, the method comprising the steps of:
(a) generating a transcription profile for a control diploid fungal cell which comprises two wild type alleles of the gene;
(b) culturing diploid fungal cells of claim 12 under conditions wherein the second allele of the gene is substantially underexpressed, not expressed or overexpressed and generating a second transcription profile for the cultured cells; and
(c) comparing the first transcription profile with the second transcription profile to identify changes in the levels of gene transcripts.

32. A purified or isolated nucleic acid molecule comprises a nucleotide sequence encoding a gene product required for proliferation of Candida albicans, wherein said gene product consisting essentially of an amino acid sequence of one of SEQ ID NOs: 7001 to 7932.

33. The nucleic acid molecule of claim 32, wherein said nucleotide sequence is one of SEQ ID NOs: 6001 to 6932.

34. A nucleic acid molecule comprising a fragment of one of SEQ ID NOs: 6001 to 6932, said fragment selected from the group consisting of fragments comprising at least 10, at least 20, at least 25, at least 30, at least 50 and at least 100 consecutive nucleotides of one of SEQ ID NOs: 6001 to 6932.

35. A nucleic acid molecule comprising a nucleotide sequence that hybridizes under stringent condition to a second nucleic acid molecule consisting of (a) a nucleotide sequence selected from the group consisting of one of SEQ ID NOs: 6001 to 6932, or (b) a nucleotide sequence that encodes a polypeptide consisting of an amino acid sequence selected from the group consisting of one of SEQ ID NOs: 7001 to 7932; wherein said stringent condition comprises hybridization to filter-bound DNA in 6× sodium chloride/sodium citrate (SSC) at about 45° C. followed by one or more washes in 0.2×SSC/0.1% SDS at about 50-65° C.

36. The nucleic acid molecule of claim 34 or 35, which consists of the nucleotide sequence selected from the group consisting of one of SEQ ID NOs: 4001 to 4932, and 5001 to 5932.

37. A purified or isolated nucleic acid molecule obtained from an organism other than Candida albicans or Saccharomyces cerevisiae comprising a nucleotide sequence having at least 30% identity to a sequence selected from the group consisting of SEQ ID NOs: 6001-6932, fragments comprising at least 25 consecutive nucleotides of SEQ ID NOs: 6001-6932, the sequences complementary to SEQ ID NOs: 6001-6932 and the sequences complementary to fragments comprising at least 25 consecutive nucleotides of SEQ ID NOs: 6001-6932, as determined using BLASTN version 2.0 with the default parameters.

38. The purified or isolated nucleic acid molecule of claim 37, wherein said organism is selected from the group consisting of Absidia corymbigera, Aspergillus flavis, Aspergillus fumigatus, Aspergillus niger, Botrytis cinerea, Candida albicans, Candida dublinensis, Candida glabrata, Candida krusei, Candida parapsilopsis, Candida tropicalis, Coccidioides immitis, Cryptococcus neoformans, Erysiphe graminis, Exophalia dermatiditis, Fusarium oxysporum, Histoplasma capsulatum, Magnaporthe grisea, Mucor rouxii, Pneumocystis carinii, Puccinia graminis, Puccinia recodita, Puccinia striiformis, Rhizomucor pusillus, Rhizopus arrhizus, Septoria avenae, Septoria nodorum, Septoria triticii, Tilletia controversa, Tilletia triticii, Trichosporon beigelii, and Ustilago maydis.

39. A vector comprising a promoter operably linked to the nucleic acid molecule of claim 32, 33, 34, 35, or 37.

40. The vector of claim 39, wherein said promoter is regulatable.

41. The vector of claim 39, wherein said promoter is active in an organism selected from the group consisting of Absidia corymbigera, Aspergillus flavis, Aspergillus fumigatus, Aspergillus niger, Botrytis cinerea, Candida albicans, Candida dublinensis, Candida glabrata, Candida krusei, Candida parapsilopsis, Candida tropicalis, Coccidioides immitis, Cryptococcus neoformans, Erysiphe graminis, Exophalia dermatiditis, Fusarium oxysporum, Histoplasma capsulatum, Magnaporthe grisea, Mucor rouxii, Pneumocystis carinii, Puccinia graminis, Puccinia recodita, Puccinia striiformis, Rhizomucor pusillus, Rhizopus arrhizus, Septoria avenae, Septoria nodorum, Septoria triticii, Tilletia controversa, Tilletia triticii, Trichosporon beigelii, and Ustilago maydis.

42. A host cell containing the vector of claim 39.

43. A purified or isolated polypeptide comprising an amino acid sequence selected from the group consisting of one of SEQ ID NOs: 63 to 123.

44. A purified or isolated polypeptide obtained from an organism other than Candida albicans or Saccharomyces cerevisiae comprising an amino acid sequence having at least 30% similarity to an amino acid sequence selected from the group consisting of one of SEQ ID NOs: 7001 to 7932 as determined using FASTA version 3.0t78 with the default parameters.

45. The polypeptide of claim 44, wherein said organism is selected from the group consisting of Absidia corymbigera, Aspergillus flavis, Aspergillus fumigatus, Aspergillus niger, Botrytis cinerea, Candida albicans, Candida dublinensis, Candida glabrata, Candida krusei, Candida parapsilopsis, Candida tropicalis, Coccidioides immitis, Cryptococcus neoformans, Erysiphe graminis, Exophalia dermatiditis, Fusarium oxysporum, Histoplasma capsulatum, Magnaporthe grisea, Mucor rouxii, Pneumocystis carinii, Puccinia graminis, Puccinia recodita, Puccinia striiformis, Rhizomucor pusillus, Rhizopus arrhizus, Septoria avenae, Septoria nodorum, Septoria triticii, Tilletia controversa, Tilletia triticii, Trichosporon beigelii, and Ustilago maydis.

46. A fusion protein comprising a fragment of a first polypeptide fused to a second polypeptide, said fragment consisting of at least 6 consecutive residues of an amino acid sequence selected from one of SEQ ID NOs: 7001 to 7932.

47. A method of producing a polypeptide, said method comprises introducing into a cell, a vector comprising a promoter operably linked to a nucleotide sequence encoding a polypeptide consisting of an amino acid sequence selected from the group consisting of one of SEQ ID NOs: 7001 to 7932; and culturing the cell such that the nucleotide sequence is expressed.

48. A method of producing a polypeptide, said method comprising providing a cell which comprises a heterologous promoter operably linked to a nucleotide sequence encoding a polypeptide consisting of an amino acid sequence selected from the group consisting of one of SEQ ID NOs: 7001 to 7932; and culturing the cell such that the nucleotide sequence is expressed.

49. A method for identifying a compound which modulates the activity of a gene product encoded by a nucleic acid comprising a nucleotide sequence selected from the group consisting of one of SEQ ID NOs: 6001 to 6932, said method comprising:
(a) contacting said gene product with a compound; and
(b) determining whether said compound modulates the activity of said gene product.

50. The method of claim 49, wherein the activity of the gene product is inhibited.

51. The method of claim 49, wherein said gene product is a polypeptide and said activity is selected from the group consisting of an enzymatic activity, carbon compound catabolism activity, a biosynthetic activity, a transporter activity, a transcriptional activity, a translational activity, a signal transduction activity, a DNA replication activity, and a cell division activity.

52. A method of eliciting an immune response in an animal, comprising introducing into the animal a composition comprising an isolated polypeptide, the amino acid sequence of which comprises at least 6 consecutive residues of one of SEQ ID NOs: 7001 to 7932.

53. A strain of Candida albicans wherein a first allele of a gene comprising a nucleotide sequence selected from the group consisting of one of SEQ ID NOs: 6001 to 6932 is inactive and a second allele of the gene is under the control of a heterologous promoter.

54. A strain of Candida albicans comprising a nucleic acid molecule comprising a nucleotide sequence selected from one of SEQ ID NOs: 6001 to 6932 under the control of a heterologous promoter.

55. The strain of claim 53 or 54, wherein said heterologous promoter is regulatable.

56. A method of identifying a compound or binding partner that binds to a polypeptide comprising an amino acid sequence selected from the group consisting of one of SEQ ID NOs: 7001 to 7932 or a fragment thereof said method comprising:
(a) contacting the polypeptide or fragment thereof with a plurality of compounds or a preparation comprising one or more binding partners; and
(b) identifying a compound or binding partner that binds to the polypeptide or fragment thereof.

57. A method for identifying a compound having the ability to inhibit growth or proliferation of Candida albicans, said method comprising the steps of:
(a) reducing the level or activity of a gene product encoded by a nucleic acid selected from the group consisting of SEQ ID NOs: 6001 to 6932 in a Candida albicans cell relative to a wild type cell, wherein said reduced level is not lethal to said cell;
(b) contacting said cell with a compound; and
(c) determining whether said compound inhibits the growth or proliferation of said cell.

58. The method of claim 57, wherein said step of reducing the level or activity of said gene product comprises transcribing a nucleotide sequence encoding said gene product from a regulatable promoter under conditions in which said gene product is expressed at said reduced level.

59. The method of claim 58, wherein said gene product is a polypeptide comprising a sequence selected from the group consisting of polypeptides encoded by SEQ ID NOs: 7001 to 7932.

60. A method for inhibiting growth or proliferation of Candida albicans cells comprising contacting the cells with a compound that (i) reduce the level of or inhibit the activity of a nucleotide sequence selected from the group consisting of SEQ ID NOs: 6001 to 6932, or (ii) reduce the level of or inhibit the activity of a gene product encoded by a nucleotide sequence selected from the group consisting of SEQ ID NOs: 6001 to 6932.

61. The method of claim 60, wherein said gene product is a polypeptide comprising an amino acid sequence selected from the group consisting of polypeptides encoded by SEQ ID NOs: 7001 to 7932.

62. The method of claim 60, wherein the compound is an antibody, a fragment of an antibody, an antisense nucleic acid molecule, or a ribozyme.

63. A method for manufacturing an antimycotic compound comprising the steps of:
(a) screening a pluralities of candidate compounds to identify a compound that reduces the activity or level of a gene product encoded by a nucleotide sequence selected from the group consisting of SEQ ID NOs: 6001 to 6932; and
(b) manufacturing the compound so identified.

64. The method of claim 63, wherein said gene product is a polypeptide comprising an amino acid sequence selected from the group consisting of polypeptides encoded by SEQ ID NOs: 6001 to 6932.

65. A method for treating an infection of a subject by Candida albicans comprising administering a pharmaceutical composition comprising a therapeutically effective amount of a compound that reduces the activity or level of a gene product encoded by a nucleic acid comprising a sequence selected from the group consisting of SEQ ID NOs: 6001 to 6932 and a pharmaceutically acceptable carrier, to said subject.

66. The method of claim 65, wherein the compound is an antibody, a fragment of an antibody, an antisense nucleic acid molecule, or a ribozyme.

67. A method for preventing or containing contamination of an object by Candida albicans comprising contacting the object with a composition comprising an effective amount of a compound that reduces the activity or level of a gene product encoded by a nucleic acid comprising a sequence selected from the group consisting of SEQ ID NOs: 6001 to 6932.

68. A method for preventing or inhibiting formation on a surface of a biofilm comprising Candida albicans, said method comprising contacting the surface with a composition comprising an effective amount of a compound that reduces the activity or level of a gene product encoded by a nucleic acid comprising a sequence selected from the group consisting of SEQ ID NOs: 6001 to 6932.

69. A pharmaceutical composition comprising a therapeutically effective amount of an agent which reduces the activity or level of a gene product encoded by a nucleic acid selected from the group consisting of SEQ ID NOs: 6001 to 6932 in a pharmaceutically acceptable carrier.

70. The method of claim 65, wherein said subject is selected from the group consisting of a plant, a vertebrate, a mammal, an avian, and a human.

71. An antibody preparation which binds the polypeptide of claim 43 or 44.

72. The antibody preparation of claim 71 which comprises a monoclonal antibody.

73. A method for evaluating a compound against a target gene product encoded by a nucleotide sequence comprising one of SEQ ID NOs: 6001 to 6932, said method comprising the steps of:
(a) contacting wild type diploid fungal cells with the compound and generating a first protein expression profile;
(b) determining the protein expression profile of diploid fungal cells of claim 12 which have been cultured under conditions wherein the second allele of the target gene is substantially underexpressed, not expressed or overexpressed and generating a second protein expression profile for the cultured cells; and
(c) comparing the first protein expression profile with the second protein expression profile to identify similarities in the profiles.

74. A method for evaluating a compound against a target gene product encoded by a nucleotide sequence comprising one of SEQ ID NOs: 6001 to 6932, said method comprising the steps of:
(a) contacting wild type diploid fungal cells with the compound and generating a first transcription profile;
(b) determining the transcription profile of diploid fungal cells of claim 12 which have been cultured under conditions wherein the second allele of the target gene is substantially underexpressed, not expressed or overexpressed and generating a second transcription profile for the cultured cells; and
(c) comparing the first transcription profile with the second transcription profile to identify similarities in the profiles.

75. A method for identifying an antimycotic compound comprising screening a plurality of compounds to identify a compound that reduces the activity or level of a gene product, said gene product being encoded by a nucleotide sequence that is naturally occurring in Saccharomyces cerevisiae and that is the ortholog of a gene having a nucleotide sequence selected from the group consisting of SEQ ID NOs: 6001 to 6932.

76. A computer or a computer readable medium that comprises at least one nucleotide sequence selected from the group consisting of SEQ ID NOs: 1-932, 1001-1932, 2001-2932, 3001-3932, 4001-4932, 5001-5932, and 6001-6932, or at least one amino acid sequence selected from the group consisting of SEQ ID NOs: 7001-7932.

77. A method assisted by a computer for identifying a putatively essential gene of a fungus, comprising detecting sequence homology between a fungal nucleotide sequence or fungal amino acid sequence with at least one nucleotide sequence selected from the group consisting of SEQ ID NOs: 6001-6932, or at least one amino acid sequence selected from the group consisting of SEQ ID NOs: 7001-7932.
